United States Patent Application Publication US 2007/0192889 A1 - sequence listing, part 8

SEQ ID NO: 15420 - DNA, 2082 bp, Oryza sativa
  Clone ID: TFbOSC7439j.C1.o3.fg
atgtctgcgcctggagccggagctgccgccgccgccgctgctgctggagctggagatggcgtgcctggagctggagccggagccgttgcgaacgtcaacaccaacagaggcaattctgcctcacaatccagcggagggccattctcggggtatatccttctcctgctgttaactcattcgtttatagcgctgttagtcctgttagtcgcaagtcaattgcagcttttggggagtgcttcccgtacgattgctcgtccaccatgtatgcgcctggagccggagctgccgccggtgccactgctgctggagctagagatggcgcgcctggagctggagccggagctgttgcgaacgtcaacaccaacggaggcaattctgcctcacaatccaacggagggccattctcgggttggctttgctgctgcactgaaaccacatgcttttgatggttctaactataagagatggaaagcacgtgcactattgtggttgacagcgatgcaatgcttctatgtttcacggggcaaacaaagtgaaccacctctttctcctgaggaagaggctaagttcgaggcttcggattgcctgttccgtggagcattgatcagtgtactcgctgacaacatagtggacgtgtacatgcacatgccttctgggaaggacatgtgggatgcacttgaggccaaattcggagtttccgacgccggcagtgagctgtatgtcatggagcagttctatgactacaagattgtcgatgaccgttctgtagtagaacaagctcatgagattcagatgctggctaaggaacttgagaacaacaactgtgagttgccagacaagtttgtggcgggtggcattattgccaaattgccaccttcttggtcggacttggccacttctctaaagcacaagagacaagagttcagtgtttctgatctcattggctctttgggtgttgaggagaaggcgaggacaaaggacgtccggggcaaaaaggttgagggaggttctagtgccaatatggtacagaagaagaaccctcatgcatcccacaacaacaagaaagtcaagcctgatgtcaaacccaaggctgcaaccaactttaagaacaaaggcaagggaaaggcaaagggagactgctttgtgtgtggcaagtctgggcattgggccaaggactgtcctgagcgcaaagacaggaagtctgccaacatggtcattagcgagggcggaggaacatcggggtacggtcgggagaggttcctccttgttgatgggaaacgggtcgcttgcggctgttcatggtgttggttttgctatgtgtatctattgaaaacaaaggatgaagcattgcatttctttaagacctataaagctgaggtagaaaaccaacttgaaaggaaaatcaaacggttgaggtctgatagaggtggggagtatttttccaatgaatttgcatccttttgcgaagagtttggaattattcatgagaggacgcctccctattcaccccaatcaaatggggtggccgaaagaaagaaccgtactctaactgagatggtgaatgccatgttagacactgcagggctttctaaggaatggtggggtgaggcagttttgactgcgtgtcatgtcctgaataaaattccaatgaagcataaggaagtaacaccattcgaggaatgggaaaggaagaaattaaatctctcatacctacgaacatggggctgtttggccaaggtaaatgtacctatagccaaaaagcggaaacttggaccaaatactgttgattgtgtgttccttggttatgctattcacagtgtgggttataaattcttaatagtaaactctagagtacccgacatgcatgttggtacaattattgagtccagagatgctacattctttgagaatgaatttcccatgaaacatacacctagcacctctagtcaagaaactatcatgccccatgagcactttgcaccgatagaacacaatgatcaaacgcctgaggaaaatcctgaggaggacaacattgtagatactcgtaagagtaagagacaaagggttgcaaaatggagatga

SEQ ID NO: 15421 - DNA, 3381 bp, Oryza sativa
  Clone ID: TFbOSC900014j.C1.o10.fg
atgcagtgcttctatgtttcacggggcaaacgaagtgaaccacctctttctcctgaggaagaggctaagttcgaggcttcggattgcctgttccatggagcattgatcagtgtactcgctgacaacatagtggacgtgtacatgcacatgccttctgggaaggacatgtgggatgcacttgaggccaagttcggagtttctgacgccggcagtgagctgtatgtcatggagcagttctatgactacaagatggtcgatgaccgttctgtagtagaacaagctcatgagattcagatgctggctaaggaacttgaaaacaacaactgtgagttgccggacaagtttgtggcgggtggcattattgccaaactaccaccttcttggtcggactttgccacttctctaaagcacaagagacaagagttcagtgttcctgatctcattggctctttgggtgttgaggagaaggcgagggcaaaggacgtccggggcaaaaaggttgagggaggttctagtgccaatatggtacagaagaagaaccctcatgcatcccacaacaacaagaaagtcaagcctgatgtcaaacccaaagctgcaaccaattttaagaagaaaggcaagggaaagacaaagggagactgctttgtgtgtggcaagtctgggcattgggccaaggactgtcctgagtgcaaagacaggaagtctgccaacatgatcattagcgagggcggaggaacatcggggtatggtaaaatattacctacagttctctctgtttttcattcacctgattggtgggtggatactggtgctaatattcatgtcgggagaggttcctccttgttgatgggaaacgggtcacttgcggctgttcatggtgttggtacggtcgatctgaagtttacttcgggaaagaccgtgcagctgaagaacgtgcagcatgtcccttcaataaagaagaatctagttagcggctctctattgtgtagagaaggttttagacttgtgtttgagtccaataaatgtgtcgtatctaaatatgggacttttgttggaaaaggttatgacagtggaggcttgttccgcttttctttgaatgacatgtgtaataatcataatgctgtgaaccatattagcgagaatgatgagtctaatgtgtggcattcgcgactctgtcatgtgaatttcggttgtatgacgcgcttagctaacatgagtttaattccaaaattcactttggtcaaaggttccaagtgccatacttgtgttcaatcgaaacaacctcgcaagcctcacaaggcatctgaggcgaggaatttggcacctctagaacttgttcattccgatttgtgcgaaatgaacggcgtgttgactaaagggggaaagaaatatttcatgacactgatagatgattgcactagattttgctatgtgtatctattgaaaacaaaggatgaggcattgcattactttaaaatctataaagctgaggtagaaaaccaacttgaaaggaaaatcaaacggttgaggtctgatagaggtggggagtatttttccaatgagtttgcatccttttgcgaagagtttggaattattcatgagatgacgcctccctattcaccccaatcaaatggggtggccgaaagaaagaaccgtactctaactgagatggtgaatgccatgttagatactgcggggctttccaaggaatgcacttctagtaaagaaactgtcatgccccatgagcactttgcaccgatagaacacgatgatcaaacgcctgaggaaaatcctgaggaggacaacattgtagatactcgcaagagtaagagacaaagggttgcaaaatcctttggagatgactacattgtataccttgtggatgacaccccaagaaccatagaagagacatattcatctcctgacgctgactactggaaggaagcagtacgtagtgaaatggactcgattatgtctaatggtacttgggaagtcgttgagcgtccatatgggtgcaagcccgtaggatgcaaatgggttttcaagaaaaagcttaggcctgatggtacaatcgaaaagtacaaggcaaggcttgtagccaagggttatacccaaaaggaaggcgaggacttcttcgacacatactcaccagttgctcgcttgaccacgattcgagtactacttgctctggcagcctctcatggtcttctcgtccatcagatggacgttaagacagctttcctaaacggagagctggaggaggagatctatatggatcaaccagacgggtatgtactagaaggtcagaagggaatggtgtgtaaactattgaaatccttgtatggcctcaagcaagcacctaagcaatggcatgagaagtttgacaccacgcttacatttgcaggctttgttgtgaacgaagctgacaaatgtgtatactatcgctatggtgggggagaaggggtgatcttgtgcttatatgtcgatgacatactgatctttgggaccagccttaatgtgattgaggaggtcaaagactatctgtccaagagttttgaaatgaaggatttgggagaggctgatgttattcttaacatcaaactacaaagaggagatgagggtgggattacacttgtgcaatcccactatgtggacaaggttttgagtcgctttggatatagtgactgcaagccagctcctactccttatgatcccagcgtgctattaaggaaaaaccgaagaatagcaagggatcaactgagatactctcaaatcattggttcattgatgtacttggctagcgcaacgaggcctgacatctcatttgctgctctggaaagagtaatgcgctatctaaagggcactatgagctatggaattcactataccgggtatccaaaagtactagaagggtatagtgactcaaactggatatctgatgctgatgagataaaagccacaagtggatatgcgttcacacttggaggtggcgctgtttcctggaagtcttgcaagcagaccatcttaacgaggtcaacaatggaagcagaacttacagcactagatactgcgacagttgaggccgagtggcttcgtgaactcctgatggatttgccggtggttgaaaaaccagtgccagctatcctaatgaactgcgataatcaaacagtgattattaaagtgaacagttcaaaggacaacatgaagtcatctagacacatcaagagaagactgaaatctttcagaaagcagaaaaactccggagtgatagcattggactatgtccaaacggctagaaatctggcagatcagtttaccaaggggctaccacgtaatgtgatagacagtgcatcgagggaaatgggcttgatacccacctaa

SEQ ID NO: 15422 - DNA, 3723 bp, Oryza sativa
  Clone ID: TFbOSC900017j.C1.o7.fg
atgcagtgcttctatgtttcacggggtaaacgaagtgaaccacctctttctcctgaggaagaggctaagttcgacgcttcggattgcgtgttccgtggagcattgatcagtgtactcgctgacaacatagtggacgtgtacatgcacatgccttctgggaaggacatgtgggatgcacttgaggccaagttcggagtttctgacgccggcagtgagctgtatgtcatggagcagttctatgactacaagatggtcgatgaccgttctgtagtagaacaagcttatgagattcagatgctggctaaggaacttgagaacaacaactgtgagttgccggacaagtttgtggcgggtggcattattgccaaactaccaccttcttggtcggactttgccacttctctaaagcacaagagacaagagttcagtgttcctgatctcattggctctttgggtgttgaggagaaggcgagggcaaaggacgtccggggcaaaaaggttgagggaggttctagtgccaatatggtacagaagaagaaccctcatgcatcccacaacaacaagaaagtcaagcctgatgtcaaacccaaggctgcaaccaattttaagaagaaaggcaagggaaaggcaaagggagactgctttgtgtgtggcaagtctgggcattgggccaaggactgtcctgagcgcaaagacaggaagtctgccaacatgatcattagcgagggcggaggaacatcggggtacggtaaaatattacctacagttctctctgtttttcattcacctgattggtgggtggatactggtgctaatattcatgtatgtgctgacatttctcagttttcttcttatcaggtcgggagaggttcctccttgttgatgggaaacgggtcgcttgcggctgttcatggtgttggtacggtcgatctgaagtttacttcgggaaagaccgtgcagctgaagaacgtgcagcatgtcccttcaataaagaagaatctagttagcggctctctattgtgtagagaaggttttagacttgtgtttgagtccaataaatgtgtcgtatctaaatatgggacttttgttggaaaaggttatgacagcggaggcttgttccgcttttctttgaatgacatgtgtaataatcataacgctgtgaaccatattagcgagaatgatgagtctaatgtgtggcattcgcgactctgtcatgtgaatttcggttgtatgatgcgcttagctaacatgagtttaattccaaaattcactttggtcaaaggttccaagtgccatacttgtgttcaatcgaaacaacctcgcaagcctcacaaggcatctgaggcgaggaatttggcacctctagaacttgttcattccgatttgtgcgaaatgaacggcgtgttgactaaagggggaaagaaatatttcatgacactgatagatgattgcactagattttgctatgtgtatctattgaaaacaaaggatgaggcattgcattactttaaaatctataaagctgaggtagaaaaccaacttgaaaggaaaatcaaacggttgaggtctgatagaggtggggagtatttttccaatgagtttgcatccttttgcgaagagtttggaattattcatgagatgacacctccctattcaccccaatcaaatggggtggccgaaagaaagaaccgtactctaactgagatggtgaatgccatgttagacactgcggggctttccaaggaatggtggggtgaggcagttttgactgcgtgtcatgtcctgaataaaattccaatgaagcacaaggaagtaacaccattcgaggaatgggaaaggaagaaattaaatctctcatacctacgaacatggggctgtttggccaaggtaaatgtacctatagtcaaaaagcggaaacttggaccaaaaactgttgattgtgtgtttcttggttatgctatccacagtgtggtttatagattcttaatagtaaactctggagtacccgacatgcatgctggtacaatttttgagtccagagatgctactttctttgagaatgaatttcctatgaaatatacatctagcacttctagtaaagaaactgtcatgccccatgagcactttgcaccgatagaacacaatgatcaaacgcctgaggaaaatcctgaggaggacaacattgtagatactcgcaagagtaagagacaaagggttgcaaaatcctttggagatgactacattgtatacctcgtggatgacaccccaagaaccatagaagaggcatattcatctcctgacgctgactactggaaggaagcagtacgcagtgaaatggactcgattatgtctaatggtacttgggaagtcgttgagcgtccatatggatgtaagcccgtaggatgcaaatgggttttcaagaaaaagcttaggcctgatggtacaatcgaaaagtataaggcaaggcttgtggccaagggttatacccaaaaggaaggcgaggatttcttcgacacatattcaccagttgctcgcttgactacgattcgagtactacttgctctggcagcctctcatggtcttcttgtccatcagatggacgttaagacagctttcctaaacggagagctggaggaggagatctatatggatcaaccagacgggtatgtactagaaggtcaggagggaatggtgtgtaaactattgaaatccttgtatggcctcaagcaagcacctaagcaatggcatgagaagtttgacaccacgcttacatctgcaggctttgttgtgaacgaagctgacaaatgtgtatactatcgctatggtgggggaaaaggggtgatcttatgcttgtatgtcgatgacatactgatctttgggaccagccttaatgtgattgaggaggtcaaagactatctgtccaagagttttgaaatgaaggatttgggagaggctgatgttattcttaacatcaaactacaaagaggagatgagggtgggatcacacttgtgcaatcccactatgtggacaaggttttgagtcgctttggatatagtgactgtaagccagctcctactccttatgatcccagcgtgctattaaggaaaaaccgaagaatagcaagggatcaactgagatactctcaaatcattggttcattgatgtacttggctagcgcaacgaggcctgacatctcatttgctgtaagcaagctgagccggtttgtctcaaatctgggagatgatcattggcaggctctggaaagagtaatgcgctatctaaagggcactatgagctatggaattcactataccgggtatccaaaagtactagaaggatatagtgactcaaactggatatctgatgctgatgagataaaagccacaagtggatatgcgttcacacttggaggtggcgctgtttcctggaagtcttgcaagcagaccatcttaacgaggtcaacaatggaagcagaacttacagcactagatactgcgacagttgaggctgagtggcttcgtgaactcctgatggatttgccggtggttgaaaaaccagtgccagctatcctaatgaactgcgataatcaaacagtgattattaaagtgaacagttcaaaggacaacatgaagtcatctagacacatcaagagaagactgaaatctgtcagaaagcagaaaaaactccggagtgatagcattggactatgtccaaacggctag

SEQ ID NO: 15423 - DNA, 2490 bp, Oryza sativa
  Clone ID: TFbOSC900088j.C1.o24.fg
atgtctgcgcctggagccggagccgccggcgtggctgttggaggagatggcgtgcctggagctggagccggaggtggtgcgctaggagctagagccggtgccacgaacaacaacatcaacggaggcaattttgcctcacaatccagtggagggccattctcggggtatatccttctcctgttcctattgttagcgctttaccgctatgttcctgttcctgatattcatgatgcctttagcatgctagcgctttactgctatgttcctgttcctgatattcatgatgcctttagcgtgctactgcgttactgctatgttattcatgatgcctttagtatgctactggttatgttgtcactagattaccctacactgagatggaaagcacatgcactattgtggttgacagcgatgcaatgcttctttgtttcacggggcaaacgaagtgaaccacctctctctcctgaggaagaggctaagttcgaggcttcggattgcctgttccgtggagcattgatcagtgtactcgctgacaacatagtggacgtgtacatgcacatgccttccgggaaggacatgtgggatgcacttgaggccaagttcggagtttccgacgccggtagtgagctgtatgtcatggagcagttctatgactacaagatggtcgatgaccgttctgtagtagaacaagctcacgagattcagatgctggctaaggaacttgagaacaacaactgtgagttgccagacaagtttgtgcacaagagacaagagttcagtgtttctgatctcattggctctttgggtgttgaggagaaggcgagggcaaaggacaaccggggcaaaaagaagaagaaccctcatgcatcccacaacaacaagaaaatcaagcttgatgtcaaatccaaggctgcaaccaaatttaagaagaaatgcaagggaaaggcaaagggagactgctttgtgtgtggcaagtctgggcattgggccaaggactgtcctgagtgcaaagacaggaagtctgccaacatggtcattagcgagggcggaggaacatcggggtacggtaaaatattacctacagttctctctgtctttcactcacctgattggtgggtggatactggtgctaatattcatgcatgtgctgacatttctctgttttcttcttatcaggtcgggagaggttcctccttgttgatgggaaacaggtcgcttgcggctattcatggtgttggtacggtcgatctgaagtttacttcgggaaagaccatgcagctgaagaacgtgcagcatgtcccttcaataaagaagaatcttgttagcggctctctattgtgtagagaaggttttagacttgtgtttgaatccaataaatgtgtcatatctaaatatggaacttttgttggaaaaggttatgacagtggaggcttgttccgcttttctttgaatgacatgtgtaataatcataatgttgtgaaccatattagcgagaatgatgagtctaatgtgtggcattcgcgactctgtcatgtgaatttcggttgtatgacgctcttagctaacatgagtttaattccaaaattcactttggtcaaaggttctaagtgccatacttgtgttcaatcgaaacaaccttgcaagcctcacaagacatctgaggcgaggaatttggcacctctagaactcgttcattccgatttgtgcgaaatgaacggcgtgttgactaaagggggaaagaaatatttcatgacactgatagatgattgcactagattttgttatgtgtatctattgaaaacaaaggatgaagcattgcatttctttaagacctataaagctgaggtagaaaaccaacttgaaaggaaaatcaaactgttgaggtctgatagaggtggggagtattttttcaatgagtttgcatccttttgcgaagaatttggaattattcatgagaggacgcctccctattcaccccaatcaaatggggtggccgaaagaaagaaccgtactctaactgagatggtgaatgccatgttagacactgcggggctttccaaggaatggtggggtgaggcagttttgactgcgtgtcatgtcctgaataaaattctaatgaagcataaggaagtaataccattcgaggaatgggaaaggaagaaattaaatctctcatacctacgaacatggggctgtttggccaaggtaaatgtacctatagccaaaaagcggaaacttggaccaaatactgttgattgtatgttccttggttatgctattcacagtgtgggctatagattcttaatagtaaattctggagtacctgacatgtatgttggtacaattattgagtccagagatgctacattctttgagaatgaatttcccatgaaacatacacctagcacttctagtcaagaaactgtcatgccccatgagcactttgctatgttcctgttcctaatattcataatgcctttagcatgctag

SEQ ID NO: 15424 - DNA, 3933 bp, Oryza sativa
  Clone ID: TFbOSC900094j.C1.o6.fg
atgtcgaacactggagacaaggagaaggagactcccgtcaacaccaacggaggcaatactgcctcaaactccagcggaggaccattcttggggtataaccttattacattatttcaattagaagttttactgttaatgttcatcgcaatgtcaacattgtgtcattatgtgattgttgatgcttattcaacgttaagcatgctcatgttgattacattcaccactatcactggatcaaatcctattgtaaatatcatgtttattatcttgttattttggattaaaatatgccgaattatgaccaaatttccaacaatccaaaaacctgaaaggtcattttcggtagttggctttgctgctacactgaaaccacatgcctttgatggttcaaactataagagatggaaagcacgtgcactattgtggttgacagcgatgcagtgcttctatgtttcacggggcaaacgaagtgaaccacctctttctcctgaggaagaggctaagttcgaggcttcggattgcctgttccgtggagcattgatcagtgtactcgctgacaacatagtggacgtgtacatgcacatgccttctgggaaggacatgtgggatgcacttgaggccaagttcggagtttctgacgccggcagtgagctgtatgttatggagcagttctatgactacaagatggtcgatgaccgttctgtagttgaacaagctcatgagattcagatgctggctaaggaacttgagaacaacaactgtgagttgccggacaagtttgtggcaagtggcattattgccaaactaccaccttcttggtcggactttgccacttctctaaagcacaagagacaagagttcagtgttcctgatctcattggctctttgggtgttgaggagaaggcgagggcaaaggacgtccggggcaaaaaggttgagggaggttctagtgccaatatggtacagaagaagaaccctcatgcatcccacaacaacaagaaagtcaagcctgatgtcaaacccaaggctgcaaccaattttaagaagaaaagcaagggaaaggcaaagggagactgctttgtgtgtggcaagtctgggcattgggccaaggactgtcctgagcgcaaagacaggaagtctgccaacatgatcattagcgagggcggaggaacatcggggtacggtaaaatattacctacagttctctctgtttttcattcacctgattggtgggtggacactggtgctaatattcatgtcgggagaggttcctccttgttgatgggaaacgggtcgcttgcggctgttcatggtgttggtacggtcgatctgaagtttacttcgggaaagaccgtgcagctgaagaacgtgcagcatgtcccttcaataaagaagaatctagttagcggctctctattgtgtagagaaggttttagacttgtgtttgagtccaataaatgtgtcgtatctaaatatgggacttttgttggaaaaggttatgacagcggaggcttgttccgcttttctttgaatgacatgtgtaataatcataatgctgtgaaccatattagcgagaatgatgagtctaatgtgtggcattcgcgactctgtcatgtgaatttcggttgtatgacgcgcttagctaacatgagtttaattccaaaattcactttggtaaaaggttccaagtgccatacttgtgttcaatcgaaacaacctcgcaagcctcacaaggcatctgaggcgaggaatttggcacctctagaacttgttcattccgatttgtgcgaaatgaacggcgtgttgactaaagggggaaagaaatatttcatgacactgatagatgattgcactagattttgctatgtgtatctattgaaaacaaaggatgaggcattgcatttctttaaaatctataaagctgaggtagaaaaccaacttgaaaggaaaatcaaacggttgaggtctgatagaggtggggagtatttttccaatgagtttgcatccttttgcgaagagtttggaattattcatgagatgacgcctccctattcaccccaatcaaatggggtggccgaaagaaagaaccgtagtctaactgagatggtgaatgccatgttagacactgcggggctttccaaggaatggtggggtgaggcagttttgactgcgtgtcatatcctgaataaaattccaatgaagcataaggaagtaacatcattcgaggaatgggaaaggaagaaattaaatctctcatacctacgaacatggggctgtttggccaaggaaaatcctgaggaggacaacattgtagatactcgcaagagtaagagacaaagggttgcaaaatcctttggagatgactacattgtatacctcgtggatgacaccccaagaaccatagaagaggcatattcatctcctgacgctgactactggaaggaagcagtacgcagtgaaatggactcgattatgtctaatggtacttgggaagtcgttgagcgtccatatgggtgcaagcccgtaggatgcaaatgggttttcaaggaaaagcttaggcctgatggtacaatcgaaaagtacaaggcaaggcttgtggccaagggttatacccaaaaggaaggcgaggacttcttcgacacatactcaccagttgctcgcttgaccacgattcgagtactacttgctctggcagcctctcatggtcttctcgtccatcagatggacgttaagacagctttcctaaacggagagctggaggaggagatctatatggatcaaccagacgggtatgtactagaaggtcaggagggaatagtgtgtaaactattgaaatccttgtatggcctcaagcaagcacctaagcaatggcatgagaagtttgacaccacgcttacatctgcaggctttgttgtgaacgaagctgacaaatgtgtatactatcgctatggtgggggagaaggggtgatcttgtgcttatatgtcgatgacatactgatctttgggaccagccttaatgtgattgaggaggtcaaagactatctgtccaagagttttgaaatgaaagatttgggagaggctgatgttattcttaacatcaaactacaaagaggagatgagggtgggattacacttgtgcaatcccactatgtggacaaggttttgagtcgctttggatatagtgactgcaagccagctcctactccttatgatcccagcgtgctattaaggaaaaaccgaagaatagcaagggatcagctgagatactctcaaatcattggttcattgatgtacttggctagcgcaacgaggcctgacatctcatttgctgtaagcaagctgagccggtttgtctcaaatccgggagatgatcattggcaggctctggaaagagtaatgcgctatctaaagggtactatgagctatggaattcactataccgggtatccaaaagtactagaagggtatagtgactcaaactggatatctgatgctgatgagataaaagccacaagtggatatgtgttcacacttggaggtggcgctgtttcctggaagtcttgcaagcagaccatcttaacgaggtcaacaatggaagcagaacttacagcactagatactgcgacagttgaggccgagtggcttcgtgaactcctgatggatttgccggtggttgaaaaaccagtgccagctatcctaatgaactgcgataatcaaacagtgattattaaagtgaacagttcaaaggacaacatgaagtcatctagacacatcaagagaagactgaaatctgtcagaaagcagaaaaactccggagtgatagcattggactatgtccaaacggctagaaatctggcagatcagtttaccaaggggctaccacgtaatgtgatagacagtgcatcgagggaaatgggcttgatacccacctaa

SEQ ID NO: 15425 - DNA, 4515 bp, Oryza sativa
  Clone ID: TFbOSC900136j.C1.o6.fg
atggcgcgccgggaaccggagccgttgcgaacgtcaacaccaacggaagcaattctacctcacaatccagcggagggccattctcgggtcgtgctagtcgcaagtcaattgcgtccttggtatgtgcatgatgcttatgataccttaagcatattactggttatgctacatgttatcactagatcaccccacattgttcatgccatggttattgtcttaatattttggattaaaatatgccgatatatgaccatatttccaacaatccaaaaacctgataggtcattttcggtagttggctttgctgctgcactgaaaccacatgcatttgatggttctaactataagaggtggaaagcacgtgcactattgtggttgacagcgatgcaatgcttctgtgtttcacagggcaaacgaagtgaaccatctctctctcatgaggaagaggctaagttcgaggcttcggattgcctgttccatggagcactgatcagtgtactcgctcacaacatagtggacgtgtacatgcacatgccttccgggaaggacatgtgggatgcacttgaggccacgttcggagtttccgacgccggcagtgagctgtatgtcatggagcaattctatgactacaagatggtcgatgaccgttctgtagtagaacaagctcatgagattcagatgctggctaaggaacttgaggacaacaactgtgagttgccggacaagtttgtggcaggtggcattattgccaaattgccaccttcttggtcggactttgccacttctctaaagcacaagagacaagagttcagtgtttctgatctcattggctctttgggtgttgaggagaaggcgagggcaaaggacaaccggggcaaaaaggttgagggaggttctagtgccaatatgaacaacaagaaagtcaagcctgatgtcaaacccaaggctgcaaccaactttaagaagaaaggcaagggaaaggcaaagggagactgctttgtgtgtggcaagtccgggcattgggccaaggactgtcctgagcgcaaagacaggaagtctgccaacatggtcattagcgagggcggaggaaaatcggggtacggtaaaatattacctacagttctctctgtttttcactcacctgattggtgggtggatactggtgctaatattcatgtcgggagaggttcctccttgttgatgggaaacgggtcgcttgcagctgttcatggtgttggtacggtcgatctgaagtttacttcgggaaagaccgttcagctgaagaacgtgcagcatgtcccttcaataaagaagaatcttgttagcggctctctattgtgtagagaaggttttagacttgtgtttgaatccaataaatgtgtcgtatctaaatatggaacttttgttggaaaaggttatgacagcggaggcttgttccgcttttctctgaatgacatgtgtaataatcataatgttgtgaaccatattagcgagaatgatgagtctaatgatgaagcattgcatttctttaagacctataaagctgaggtagaaaaccaacttgaaaggaaaatcaaacggttgaggtctgatagaggtggggagtatttttcgaatgagtttgcatccttttgcgaagagtttggaattattcatgagaggacgcctccctattcaccccaatcaaatggggtggccgaaagaaagaaccgtactctaactgagatggtgaatgccatgttagacactatggggctttccatggaatggtggggtgaggcagttttgactgcgtgtcatgtcctgaataaaattccaatgaagcataaggaagtaacaccattcgaggaatgggaaaggaagaaattaaatctctcatacctacgaacatggggctgtttggccaaggtaaatgtacctatagccaaaaagcggaaacttggaccaaatactgttgattgtgtgttccttggttatgctattcacagtgtgggttatagattcttaatagtaaactctggagtacccgacatgcatgttggtacaattattgagtctagagatgctacattctttgagaatgaatttcccatgaaacatacacctagcacttctagtcaagaaactgtcatgccccataagcactttgcaccgatagaacacaatgatcaaacgcctgaggaaaatcctgaggaggacaacgttgtagatactcgtaagagtaagagacaaagggttgcaaaatcctttggagatgactacattgtatacctcgtggatgacaccccaagaaccatagaagaggcatattcatctcctgacgctaactactggaaggaagcagaagtcgttgagcgtccatatgggtgcaagcctgtaggatgcaaatgggttttcaagaaaaagcttaggcctgatggtacaattgaaaagttcaaggcaaggcttgtggccaagggttatacccaaaaggaaggcgaggattttttcgacacatactcaccagttgctcgcttgaccacgattcgacaagcacctaagcaatggcatgagaagtttgacacaacgcttacatctgtaggctttgttgtgaacgaagctgataaatgtgtgtactatcgctatggtgggggagaaggagtgatcttgtgcttatatgtcgatgacatattgatctttgggaccagcttcaatgtgattgaggaggtcaaggactatctatccaagagttttgaaatgaaggatttgggagaggctgatgttattcttaacattaagctacaaagaggagatgagggtgggattacacttgtgcaatcccactatgtggacaaggttttgagtcactttggatatagtgactgcaagccagctcctactccttatgatcccagcgtgctattaagaaaaaaccgaagaatagcaagggatcaactgagatactctcaaatcattggttcattgatgtacttggttagtgcaacgaggcctgacatctcatttgctataagcaagctgagccggtttgtctcaaatccgggagatgatcattggcaggctctggaaagagtaatgcgctatctaaagggcactatgagctatggaattcactatactgggtatccaaaattactagaagggtgtagtgactcaaactggatatctgatgctgatgagataaaagccacaagtggatatgtgtttacacttggaggtggcactgtttcctggaagtcgttcaagcagaccatcttaacgaggtcaacaatggaagcagaacttacaacactatatactgcgacagttgaggccaagtggcttcgtgaactcctgatggatttgtcggtggttgaaaaaccagtgccagctatcctaatgaactgtgataatcaaatagtgattattaaagtgaacagttcaaaggacaacatgaagtcatctaggcatatcaagagaagactgaaatctgtcagaaagcagaaaaactccggagtgatagcattggactatgtccaaacggctagaaatttggatggctcataccttaatgtgatccgagtggctttttcaagcagagatgttgacctgcagaacatctcagaaggaacacacctatatgagttcgactgctactcatatcctaggtggaagttcaacttaacagtctccaccaaaacacagaaggagcagggcctccggaactacaccttcgccagagatctgcaccagaaatgtacatcgtactactgctgcttccatgttttttttacttcaattttggcacagcaacagtcatccgtggtggaaattgttgcagccgtcatgcacggggaggaagtcaccaggcagcgatgcagacgtccagccgtcctgcgcggggagcggatcacccggcggcagcgtagccggctggctcgaaggtgcaaacctccggtcggcaacgcagtagccatcctacgcggggagcggatcacccagaggcggcgtatgcggtcggcacgaaggtgcaaggctccggtcggcaacgcagtagccgtcctgcgcggggagcgtatcacccggtggtggcgtatgcggtcggctcggaggtgcaagccttcggtcggcaacgcagtagccatcctgcgcggggagcggatcacccggcggcggtgtatgcggtcggctcggtgcaagcgttcggtcggcgatgaagtagccatcctgcgcggggagcggatcacttggtggtggcgagtagtacccaggcagcgaggggtgtcaagcccccgagcccgtggcaaggtcggtgaagagcacccggacgacgcgggaggcgaagcccccgagtccgtggcgaggtcgacgaataatgcccaggcaacgagggaggtgaagcctccgagtccgtggcgagtcggtgtagagcacccggacgacgcgggaggtgaagcccccgagtccatggtgaggtcggcgaaaaatgcccagacaacgaggaagcgaagcccccgagtccgtggtaagtcggtgtag

SEQ ID NO: 15426 - DNA, 2994 bp, Oryza sativa
  Clone ID: TFbOSC900169j.C1.o29.gm
atggcgcgccgggagccggagccgttcgagccggagctgccgctggcgccgttgctgcctctggagatggcacgccgggagccggaggcgttgcgaacgtcaactccaacggaggcaattctgcctcacaatccagcggagggccattctcgggcgatgcaatgcttctatgtttcacggggcaaacgaagtgaaccacctctttctcctgaggaagaggctaaattcaaggcttcggattgcctgttccgtggagcattgatcagtgtactcgctgacaatatagtggacgtgtacatgcacatgcctttcgggaaggacatgtgggatgcacttgaggccaagttcggagtttccgacgccggcagtgagctgtatgtcatggagcagttttatgactacaagatggtcgatgaccgttctgtagtagaacaagctcatgagattcagatgctgactaaggaacttgagaacaacaactgtgagttgccggacaagtttgtggcgggtggcattattgccaaattgccaccttcttggtcggactttgccacttctctaaagcacaagaggcaagagttcagtgtttctgatctcattggctctttgggtgttgaggagaaggcgagggcaaaggacaactggggcaaaaaggttgagggaggttctagtgccaatatggtacagaagaagaaccgtcatgcatcccacaacaacaacaagaaagtcaagcctgatgtcaaacccaaggttgcaaccaactttaagaagaaaggcaagggaaaggcaaagggcgactgctttgtgtgtggcaagtctgggcattgggccaaggactgtcctgagcgcaaagacaggaagtgtgccaacatggtcattagcgagggcggaggaacatcgggagatgctacattctttgagaatgaattttccatgaaacatacacctagcacttctagtcaagaaactgtcatgccccataagcactttgcaccgatagaacacaatgatcaaacgcctgaggaaaatcctgaggaggacaacattgtagatactcgtaagagtaagagacaaagggttgcaaaatcctttggagatgactacattgtatacctcgtggatgacaccccaagaaccatagaagaggcatattcatctcctgacgctgactactggaaggaagcagtacgcagtgagatggactcgattatgtctaatgatacttgggaagtcgttgagcgtccatatgggtgcaagcctataggatgcaaatgggttttcaagaaaaagcttagccctgatggtacaatcgaaaagtacaaggcaagacttgtggccaagggttatacccaaaaggaaggcaaggattttttcgacacatactcaccagttgctcacttgacaatgattcgagtactacttgctctggcagcctctcatggtgttctcgtccatcagatgaacgttaagacagctttcctaaacggagagctggaggaggagatctatatggatcaaccagacgggtatgtactagaaggctttgttgtgaacggagctgacaaatgtgtgtactatcgctatggtgggggagaaggagtgatcttgtgcttatatgtcgatgacatattgatctttgggaccaacctcaatgtgattgagggggtcaaggactatctgtccaagagttttgaaatgaaggatttgggagaggctgatgttattcttaacattaaactacaaagaggagatgagggtgagattacacttgtgcaatcccactatgtggacaagattttgagtcactttggatatagtggctgcaagccagcttctactccttatgatcccagcgtgctattaaggaaaaaccgaagaatagcaagggatcaactgagatactcccaaataattggttcattgatgtacttggctagtgcaacgaggcctgacatctcatttgctgtaagcaagctgagccggtttgtcttaaatccgggagatgatcattggcaggctctggaaagagtaatgcgctatctaaagggcattatgagttatggaattcactataccaggtatccaaaagtactagaagggtatagtgactcaaactggatatctgatgctgataagataaaagccacaagtggatatgtgttcgcacttggaggtggcactgtttcctggaagccttgcaagcagaccatcttaacgaggtcaacaatggaagtagaacttacagcactagatactgcgacagttgaggccgagtggcttcgtgaactcctgatggatttgccggcgggtgatcaggtttttggggagtgcttcccgcacgactgctcagttcatccaccatgtctgcgcctggagccggagctgccgccggcgccgctgctgcctctggagatgacgcgccaggagccggagccgttgcgaacgtcaacaccaacagaggcaattctgcctcacaattcagcggagggccattctcggggctctgtgaggagcctaagataccttaacctctctggaataccgttttcggacaaggtgcctcctcagcttggctctatcactggactaagagatcttcgccatttgaatcttgcggaaaatcggttatctggcgggcaacttgaaacactgtacacgtataacccattgatgtatagtggtaacaatggtctttgtgggtttcctcttcaaaggagttgccccggcaatagcacatcaaaggatggtgatctttctaatgaaaagcatggggatcagcagatacctgaactacattctgatgaccaaatgttcttcctctttggctgtggcgttggtttcgtggttggttcctgggttgtgttcttttctctgctgttcgtgaaaacttggaggattgcttattttcgcctcttcgacagtgtttatgacaaagtatatgtgtttgtggttgttaattggggtagcctaactggaatgaaagttgcaagttaa

SEQ ID NO: 15427 - DNA, 3945 bp, Oryza sativa
  Clone ID: TFbOSC900172j.C1.o12.fg
atgtctggagttgccgccgccactgctggcggaggtggtacgccgccgacaggagctggatccggagctggtgcgccaggaggtgccgtgaacgacaacaacaacggaggcaattctgcctcaccatccagcggagggccattctcagggtataatcttctcctcctgctactgttgttagcgctatcgctatactatgtgcgctatgttcttgttcctgttctacatggtgcctctagcatgttatcgcgttactgttatgttcctgttcctgacattcaggatgcgcatagtatgctactggttatgttaagatcaccctacactgcttatgccatgatcattgctttaaccttttggattaaaatatgccgattaatgactatatttccaacaatccaaaaacctgataggtcattttcggtagttggctttgctgctgcactgaaaccacatgcttttgatggttcaaactataagagatggaaagcacgtgcactattgtggttgacagcgatgcagtgcttctatgtttcacggggcaaacgaagtgaaccacctctttctcctgaggaagaggctaagttcgaggcttcggattgcctgttccgtggagcattgatcagtgtactcgctgacaacatagtggacgtgtacatgcacatgccttctgggaaggacatgtgggatgcacttgaggccaagttcggagtttctgacgccggcagtgagctgtatgttatggagcagttctatgactacaagatggtcgatgaccgttctgtagtagaacaagctcatgagattcagatgctggctaaggaacttgagaacaacaactgtgagttgccggacaagtttgtggcaggtggcattattgccaaactaccaccttcttggtcggactttgccacttctctaaagcacaagagacaagagttcagtgttcctgatctcattggctctttgggtgttgagaagaaggcgagggcaaaggacgtccagggcaaaaaggttgagggaggttctagtgccaatatggtacagaagaagaaccctcatgcatcccacaacaacaagaaagtcaagcctgatgtcaaacccaagactgcaaccaattttaagaagaaaggcaagggaaaggcaaagggagactgctttgtgtgtggcaagtctgggcattgggccaaggactgtcctgagcgcaaagacaggaagtctgccaacatgatcattagcgagggaggaggaacatcggggtacggtaaaatattacctacagttctctctgtttttcattcacctgattggtgggtagacactggtgctaatattcatgtatgtgctgacatttctctgttttcttcttatcaggtcgggagaggttcctccttgttgataggaaacgggtcgcttgcggctgttcatggtgttggtacggtcgatctgaagtttacttcgggaaagaccgtgcagctgaagaacgtgcagcatgtcccttcaataaagaagaatctagttagcggctctctattgtgtagagaaggttttagacttgtgtttgagtccaataaatgtgtcgtatctaaatatgggacttttgttggaaaaggttatgacagcggaggcttgttccgcttttctttgaatgacatgtgtaataatcataatgctgtgaaccatattagcgagaatgatgagtctaatgtgtggcattcgcgactctgtcatgtgaatttcggttgtatgacgcgcttagctaacatgagtttaatttcaaaattcactttggtaaaaggttccaagtaccatacttgtgttcaatcgaaacaacctcgcaagccacacaaggcatctgaggcgaggaatttggcacctctagaacatgttcattccgatttgtgcgaaatgaacggcgtgttgactaaagggggaaagaaatatttcatgacactgatagatgattgcactagattttgctatgtgtatctattgaaaacaaaggatgagacattgcattactttaaaatctataaagctgaggtagaaaaccaacttgaaaggaaaatcaaacggttgaggtctgatagaggtggggagtatttttccaatgagtttgcatccttttgcgaagagtttggaattattcatgagatgacgcctccctattcaccccaatcaaatggggtggccgaaagaaagaaccgtactctaactgagatggtgaataccatgttagacactgcggggctttccaaggaatggtggggtgaggcagttttgactgcgtgtcatgtcctgaataaaattccaatgaagcataaggaagtaacaccattcgaggaatgggaaaggaagaaattaaatctctcatacctacgaacatggggctgtttggccaaagtaaatgtacctatagccaaaaagcggaaacttggaccaaaaactgttgattgtgtgtttcttggttatgctatccacagtgtggattatagattcttaatagtaaactctggagtacccgacatgcatgttggtacaattcttgagtccagagatgctacattctttgagaatgaatttcctatgaaatatacacctagcacttctagtaaagaaactgtcatgccccatgagcactttgcaccgatagaacacaatgatcaaacgcctaaggaaaatcctgaggaggacaacattgtagatactcgcaagagtaagagacaaagggttgcaaaatcctttggagatgactacattgtatacctcgtggatgacaccccaagaaccatagaagaggcatattcatctcctgacgctgactactggaaggaagcagtacgcagtgaaatggactcgattatgtctaatggtacttgggaagtcgttgagcgtccatatgggtgcaagcccgtaggatgcaaatgggttttcaagaaaaagcttaggcctgatggtacaatcgaaaagtacaaggcaaggcttgtggccaagggttatacccaaaaggaaggcgaggacttcttcgacacatactcaccagttgctcgcttgaccacgattcgagtactacttgctctggcagcctctcatggtcttctcgtccatcagatggacgttaagacagctttcctaaacggagagctggaggaggagatctatatggatcaaccagacggatatgtactagaaggtcaggagggaatggtgtgtaaactattgaaatccttgtatggcctcaagcaagcgcctaagcaatggcatgagaagtttgacaccacgcttacatctgcaggctttgttgtgaacgaagctgacaaatgtgtatactatcgctatggtgggggagaaggggtgatcttgtgcttatatgtcgatgacatactgatctttgggaccagccttaatgtgattgaggaggtcaaagactatctgtccaagagttttgaaatgaaggatttgggagaggctgatgttattcttaacatcaaactacaaagaggagatgagggtgggattacacttatgcaatcccactatgtggacaaggttttgaatcactttggatatagtgactgcaagccagctcctactccttatgatcccagcgtgctattaaggaaaaaccaaagaatagtaagggatcagctgagatactctcaaatcattggttcattgatgtacttggctagtgcaacgaggcctgacatctcatttgctgtaagcaagctgagccggtttgtctcaaatccgggagatgatcattggcaggctctggaaagagtaatgcgctatctaaagggcactatgagctatggaattcactataccgggtatccaaaagtactagaagggtatagtgactcaaactggatatctgatgctgatgagataaaagccacaagtagatatgtggtcatacttggaggtggcgctgtttcctag

SEQ ID NO: 15428 - DNA, 3906 bp, Oryza sativa
  Clone ID: TFbOSC900209j.C1.o26.gm
atgcagtgcttctatgtttcacggggcaaacgaagtgaaccacctctttctcctgaggaagaggctaagttcgaggcttcggattgcctgttccgtggagcattgatcagtgtactcgctgacaacatagtggacgtgtacatgcacatgccttctgggaaggacatgtgggatgcacttgaggccaagttcggagtttctgacgccggcagtgagctgtatgtcatggagcagttctatgactacaagatggtcgatgaccgttctgtagtagaacaagctcatgagattcagatgctggctaaggaacttgagaacaacaactgtgagttgccggacaagtttgtggcgggtggcattattgccaaactaccaccttcttggtcggactttgccacttctctaaagcacaagagacaagagttcagtgttcctgatctcattggctctttgggtgttgaggagaaggcgagggcaaaggacgtccggggcaaaagggttgagggaggttctagtgccaatatggtacagaagaagaaccctcatgcatcccacaacaataagaaagtcaagcctgatgtcaaacccaaggctgcaaccaattttaagaagaaaggcaagggaaaggcaaagggagactgctttgtgtgtggcaagtctgggcattgggccaaggactgtcctgagcgcaaagacaggaagtctgccaacatgatcattagcgagggcggaggaacatcggggacggtcgggagaggttccttcttgttgatgggaaacgggtcgcttgcggctgttcatggtattgccaaaaagcggaaacttggaccaaaaactgttgattgtgtgttccttggttatgctatccacagtgtgggttatagattcttaatagtaaactctggtgtacccgacatgcatgctggtacaattcttgagtccagagatgctacattctttgagaatgagtttcctatgaaatatacacctagcacttctagtaaagaaactgtcatgccccatgagcactttgcaccgatagaacacgatgatcaaacgcctgaggaaaatcctgaggaggacaacattgtagatactcgcaagagtaagagacaaagggttgcaaaatcctttggagatgactacattgtatacctcgtggatgacaccccaagaaccatagaagaggcatattcatctcctgacgctgactactggaaggaagcagtacgcagtgaaatggactcgattatgtctaatggtacttgggaagtcgttgagcgtccatatgggtgcaagcccgtaggatgcaaatgggttttcaagaaaaagcttaggcctgatggtacaatcgaaaagtacaaggcaaggcttgtggccaagggttatacccaaaaggaaggcgaggacttcttcaacacatactcaccagttgctcgcttgaccacgattcgagtactacttgctctggcagcctctcatggtcttctcgtccatcagatggacgttaagacagctttcctaaacggagagctggaggaggagatctatatggatcaaccagacgggtatgtactagaaggtcaggagggaatggtgtgtaaactattgaaatccttgtatggcctcaagcaagcacctaagcaatggcatgagaagtttgacaccacgcttacatctgcaggctttgttgtgaacgaagctgacaaatgtgtatactatcgctatggtgggggagaaggggtgatcttgtgcttgtatgtcgatgacatactgatctttgggaccagccttaatgtgattgaggaggtcaaagactatctgtccaagagttttgaaatgaaggatttgggagaggctgatgttattcttaacatcaaacttcaaagaggagatgagggtgggattacacttgtgcaatcccactatgtggacaaggttttgagtcgctttggatatagtgactgcaagccagctcctactccttatgatcccagcgtgctattaaggaaaaaccgaagaatagcaagggatcaactaagatactctcaaatcattggttcattgatgtacttggctagcgcaacgaggcctgacatctcatttgctgtaagcaagctgagccggtttgtctcaaatccgggagatgatcattggcaggctctggaaagagtaatgcgctatctaaagggcactatgagctatggaattcactataccgggtatccaaaagtactagaagggtatggtgactcaaactggatatctgatgctgatgagataaaagccacaagtggatatgtgttcacacttggaggtggcgctgtttcctggaagtcttgcaagcagaccatcttaacaaggtcaacaatggaagcagaacttacagcactagatactgcgacagttgaggccgagtggcttcgtgaactcctgatggatttgccggtggttgaaaaaccagtgccagctatcctaatgaactgcgataatcaaacagtgattattaaagtgaacagttcaaaggacaacatgaagtcatctagacacatcaagagaagactgaaatctgtcagaaagcagaaaaactccggagtgatagcattggactatgtccaaacggctagaaatctggcagatcagtttaccaaggggctaccacgtttttggggagtgcctcctgcacgactgctcatcgccatgtctggagttgctgccgccgctactggcccgccgacaggagctggtggtacgccgccgccgacaggagctggatccggagctggtgcgccaggaggaggtgccgtgaacgactacaacaacggaggcaattctgcctcaccatccagcggagggccattctcgggggacggctatgcatttgcatccacagagaacagcatggttatctacaacattaatgtggctcctctgataaaaagtaacaaatacacgcttttggctgagcggacgaggaagtgggaggaggagaagaggcaggagcgccgtgagggcaaggccccggcggctcccgccggcaaccggcgaggtgaggccaagcagaaggccaccgccgaggacatcgacgatggcgacgaggacttggggttccaggagcctgaggccaccgtcgccaccgtcgatgggggagcgtgcgctcacgcttctcgctggagcctcaaggccatgaagcgcgagcttctggccgcggcccctacccatgaggcgacgcggcgggcgcggtggtcggaggttgccctcaccttcgaccagaccgaccacccgccgtgcgttgcccggggaggacagatcgcgatggtggtttcccccaccgtttgcaatgtgaagttggggcgtgtcctcatagacgggggtgcagccctcaacatcctttcccccgtagcctttgacgccatcaaggccctggggatggtgctccggccgtcccagccgatcatcggtgtgacgctggggcacacctggccgctgggtcatatcgacctcccggtcaccttcggtggttccgccaacttccgcacggagcgggtggacttcgatgtggcggacctcagtctgccctacaacgcggtcctggggaggcccgcgttggtgaagttcatggcggcggtccactacgcctatctccagatgaagatgccgggccccggtggccccatcaccgtccatggcgacctcaaagttgcgcttgcttgtatggagcagcacgcggaccacctcgccgcggcgtccaagcccgcgggtggcgacgagaggctcagcgcctccgtcccggccgccccgaggcagcggatggtcacgtgcgacgaggtcccggtcaaggaggttgccctgggcgacggcccgtccaagaccacacgaatcggtggtcttctggacgacaaatag

SEQ ID NO: 15429 - DNA, 4515 bp, Oryza sativa
  Clone ID: TFbOSC900299j.C1.o21.fg
atggcgcgccgggaaccggagccgttgcgaacgtcaacaccaacggaagcaattctacctcacaatccagcggagggccattctcgggtcgtgctagtcgcaagtcaattgcgtccttggtatgtgcatgatgcttatgataccttaagcatattactggttatgctacatgttatcactagatcaccccacattgttcatgccatggttattgtcttaatattttggattaaaatatgccgatatatgaccatatttccaacaatccaaaaacctgataggtcattttcggtagttggctttgctgctgcactgaaaccacatgcatttgatggttctaactataagaggtggaaagcacgtgcactattgtggttgacagcgatgcaatgcttctgtgtttcacagggcaaacgaagtgaaccatctctctctcatgaggaagaggctaagttcgaggcttcggattgcctgttccatggagcactgatcagtgtactcgctcacaacatagtggacgtgtacatgcacatgccttccgggaaggacatgtgggatgcacttgaggccacgttcggagtttccgacgccggcagtgagctgtatgtcatggagcaattctatgactacaagatggtcgatgaccgttctgtagtagaacaagctcatgagattcagatgctggctaaggaacttgaggacaacaactgtgagttgccggacaagtttgtggcaggtggcattattgccaaattgccaccttcttggtcggactttgccacttctctaaagcacaagagacaagagttcagtgtttctgatctcattggctctttgggtgttgaggagaaggcgagggcaaaggacaaccggggcaaaaaggttgagggaggttctagtgccaatatgaacaacaagaaagtcaagcctgatgtcaaacccaaggctgcaaccaactttaagaagaaaggcaagggaaaggcaaagggagactgctttgtgtgtggcaagtccgggcattgggccaaggactgtcctgagcgcaaagacaggaagtctgccaacatggtcattagcgagggcggaggaaaatcggggtacggtaaaatattacctacagttctctctgtttttcactcacctgattggtgggtggatactggtgctaatattcatgtcgggagaggttcctccttgttgatgggaaacgggtcgcttgcagctgttcatggtgttggtacggtcgatctgaagtttacttcgggaaagaccgttcagctgaagaacgtgcagcatgtcccttcaataaagaagaatcttgttagcggctctctattgtgtagagaaggttttagacttgtgtttgaatccaataaatgtgtcgtatctaaatatggaacttttgttggaaaaggttatgacagcggaggcttgttccgcttttctctgaatgacatgtgtaataatcataatgttgtgaaccatattagcgagaatgatgagtctaatgatgaagcattgcatttctttaagacctataaagctgaggtagaaaaccaacttgaaaggaaaatcaaacggttgaggtctgatagaggtggggagtatttttcgaatgagtttgcatccttttgcgaagagtttggaattattcatgagaggacgcctccctattcaccccaatcaaatggggtggccgaaagaaagaaccgtactctaactgagatggtgaatgccatgttagacactatggggctttccatggaatggtggggtgaggcagttttgactgcgtgtcatgtcctgaataaaattccaatgaagcataaggaagtaacaccattcgaggaatgggaaaggaagaaattaaatctctcatacctacgaacatggggctgtttggccaaggtaaatgtacctatagccaaaaagcggaaacttggaccaaatactgttgattgtgtgttccttggttatgctattcacagtgtgggttatagattcttaatagtaaactctggagtacccgacatgcatgttggtacaattattgagtctagagatgctacattctttgagaatgaatttcccatgaaacatacacctagcacttctagtcaagaaactgtcatgccccataagcactttgcaccgatagaacacaatgatcaaacgcctgaggaaaatcctgaggaggacaacgttgtagatactcgtaagagtaagagacaaagggttgcaaaatcctttggagatgactacattgtatacctcgtggatgacaccccaagaaccatagaagaggcatattcatctcctgacgctaactactggaaggaagcagaagtcgttgagcgtccatatgggtgcaagcctgtaggatgcaaatgggttttcaagaaaaagcttaggcctgatggtacaattgaaaagttcaaggcaaggcttgtggccaagggttatacccaaaaggaaggcgaggattttttcgacacatactcaccagttgctcgcttgaccacgattcgacaagcacctaagcaatggcatgagaagtttgacacaacgcttacatctgtaggctttgttgtgaacgaagctgataaatgtgtgtactatcgctatggtgggggagaaggagtgatcttgtgcttatatgtcgatgacatattgatctttgggaccagcttcaatgtgattgaggaggtcaaggactatctatccaagagttttgaaatgaaggatttgggagaggctgatgttattcttaacattaagctacaaagaggagatgagggtgggattacacttgtgcaatcccactatgtggacaaggttttgagtcactttggatatagtgactgcaagccagctcctactccttatgatcccagcgtgctattaagaaaaaaccgaagaatagcaagggatcaactgagatactctcaaatcattggttcattgatgtacttggttagtgcaacgaggcctgacatctcatttgctataagcaagctgagccggtttgtctcaaatccgggagatgatcattggcaggctctggaaagagtaatgcgctatctaaagggcactatgagctatggaattcactatactgggtatccaaaattactagaagggtgtagtgactcaaactggatatctgatgctgatgagataaaagccacaagtggatatgtgtttacacttggaggtggcactgtttcctggaagtcgttcaagcagaccatcttaacgaggtcaacaatggaagcagaacttacaacactatatactgcgacagttgaggccaagtggcttcgtgaactcctgatggatttgtcggtggttgaaaaaccagtgccagctatcctaatgaactgtgataatcaaatagtgattattaaagtgaacagttcaaaggacaacatgaagtcatctaggcatatcaagagaagactgaaatctgtcagaaagcagaaaaactccggagtgatagcattggactatgtccaaacggctagaaatttggatggctcataccttaatgtgatccgagtggctttttcaagcagagatgttgacctgcagaacatctcagaaggaacacacctatatgagttcgactgctactcatatcctaggtggaagttcaacttaacagtctccaccaaaacacagaaggagcagggcctccggaactacaccttcgccagagatctgcaccagaaatgtacatcgtactactgctgcttccatgttttttttacttcaattttggcacagcaacagtcatccgtggtggaaattgttgcagccgtcatgcacggggaggaagtcaccaggcagcgatgcagacgtccagccgtcctgcgcggggagcggatcacccggcggcagcgtagccggctggctcgaaggtgcaaacctccggtcggcaacgcagtagccatcctacgcggggagcggatcacccagaggcggcgtatgcggtcggcacgaaggtgcaaggctccggtcggcaacgcagtagccgtcctgcgcggggagcgtatcacccggtggtggcgtatgcggtcggctcggaggtgcaagccttcggtcggcaacgcagtagccatcctgcgcggggagcggatcacccggcggcggtgtatgcggtcggctcggtgcaagcgttcggtcggcgatgaagtagccatcctgcgcggggagcggatcacttggtggtggcgagtagtacccaggcagcgaggggtgtcaagcccccgagcccgtggcaaggtcggtgaagagcacccggacgacgcgggaggcgaagcccccgagtccgtggcgaggtcgacgaagaatgcccaggcaacgagggaggtgaagcctccgagtccgtggcgagtcggtgtagagcacccggacgacgcgggaggtgaagcccccgagtccatggtgaggtcggcgaaaaatgcccagacaacgaggaagcgaagcccccgagtccgtggtaagtcggtgtag

SEQ ID NO: 15430 - DNA, 2382 bp, Oryza sativa
  Clone ID: TFbOSC900307j.C1.o13.gm
atgcagtgcttctatgtttcacggggcaaacgaagtgaaccacctctttctcctgaggaagaggctaagttcgaggcttcggattgcctgttccgtggagcattgatcagtgtactcgctgacaacatagtggacgtgtacatgcacatgccttctgggaaggacatgtgggatgcacttgaggccaagttcggagtttctgacgccggcagtgagctgtatgttatggagcagttctatgactacaagatggtcgatgaccgttctgtagttgaacaagctcatgagattcagatgctggctaaggaacttgagaacaacaactgtgagttgccggacaagtttgtggcaggtggcattattgccaaactaccaccttcttggtcggactttgccacttctctaaagcacaagagacaagagttcagtgttcctgatctcattggctctttgggtgttgaggagaaggcgagggcaaaggacgtccggggcaaaaaggttgagggaggttctagtgccaatatggtacagaagaagaaccctcatgcatcccacaacaacaagaaagtcaagcctgatgtcaaacccaaggctgcaaccaattttaagaagaaaagcaagggaaaggcaaagggagactgctttgtgtgtggcaagtctgggcattgggccaaggactgtcctgagcgcaaagacaggaagtctgccaacatgatcattagcgagggcggaggaacatcgaggtacggtcgggagaggttcctccttgttgatgggaaacgggtcgcttgcggctgttcatgtgtgggttatagattcttaatagtaaactctggagtacccgacatgcatgttggtacaattcttgagtccagagatgctacattctttgagaatgaatttcctatgaaatatacacctagcacttctagtaaagaaactgtcatgccccatgagcactttgcaccgatagaacacaatgatcaaacgcctgaggaaaatcctgaggaggacaacattgtagatactcgcaagagtaagagacaaagggttgcaaaatcctttggagatgactacattgtatacctcgtggatgacaccccaagaaccatagaagaggcatattcatctcctgacgctgactactggaaggaagcagtacgcagtgaaatggactcgattatgtctaatggtacttgggaagtcgttgagcgtccatatgggtgcaagcccgtaggatgcaaatgggttttcaagaaaaagcttaggcctgatggtacaatcgaaaagtacaaggcaaggcttgtggccaagggttatacccaaaaggaaggcgaggacttcttcgacacatactcaccagttgctcgcttgaccacgattcgagtactacttgctctggcagcctctcatagtcttctcgtccatcagatggacgttaagacagctttcctaaacggagagctggaggaggagatctatatggatcaaccagacgggtatgtactagaaggtcaggagggaatggtgtgtaaactattgaaatccttgtatggcctcaagcaagcacctaagcaatggcatgagaagtttgacaccacgcttacatctgtaggctttgttgtgaacgaagctgacaaatgtgtatactatcgctatggtgggggagaaggggtgatcttgtgcttatatgtcgatgacatactgatctttgggaccagccttaatatgattgaggaggtcaaagactatctgtccaagagttttgaaatgaaagatttgggagaggctgatgttattcttaacatcaaactacaaagaggagatgagggtgggattacacttgtgcaatcccactatgtggacaaggttttgagtcgttttggatatagtgactgcaagccagctcctactccttatgatcccagcgtgctattaaggaaaaaccgaagaatagcaagggatcagctgagatactctcaaatcattggttcattgatgtacttggctagcgcaacgaggcctgacatctcatttgctgtaagcaagctgagccggtttgtctcaaatccgggagatgatcattggcaggctctggaaagagtaatgcgctatctaaaggacgggcgggcgatcaggtttttggggagcgcaaggcgcgactactcactgttcgtcaacatctacttcatcttcaccaacatgtcgaacactggagacaaggagaaggagactcccgtcaacaccaacggaggcaatactgcctcaaactccagcggaggaccattcttggggccagacgccgccatcgtcttcctcgctgacctcggcctctccgccgccgacatcgccaccaccgtcgcctacgaccactgctactga

SEQ ID NO: 15431 - DNA, 3255 bp, Oryza sativa
  Clone ID: TFbOSC900361j.C1.o9.fg
atgatgtaccgggagaccttcgccgacgaggtcggacacatcaggaagtcgttcgagatgctcgagggagctaatgtccagcaagttattcctgaagctgctggaggctatgctcaagaccgggaacaggatgaacgttgggacctcctgcggcggcgccatggcgttcaagctcgaagcgctgctcaaattcacctatgtcgagggcaccgacgggaagccacgctgctccacttcgtagtgcaggagatgaccctgtcgagcgccgccgaggcggcggacattgccgcggggctcgccgccgagctcaccaatgtcaggaagacggcgaccgtggacctggacgtgcttaccacctcggtgtccggcccgtcgcacggcctgtcccaaatcaaggagctgattgggagtgacctgtccggctatgagaggaaccagtgcttcgcgcgtggccttcatgtgactacactgttcacattatttgcctttccgctgttgaagttagactttggatctgaatctatacggaagagtggtagatccagtgaaccacctctttctcctgaggaagaggctaagttcgaggcatcggattgtctgttccgtggagcattgatcagtgtactcgctgacaatatagtggacgtgtacatgcacatgccttctgggaaggacatgtgggatgcacttgaggccaagttcggagtttctaacgccggcagtgagctgtatgtcatggagcagttctatgactacaagatgttgccggacaagtttgtggcgggtggcattattgccaaattgccaccttcttggtcggactttgccacttctctaaagcacaagagacaagagttcagtgtttctgatctcattggctctttgggtgttgaggagaaggcgagggcaacggacatccgggaaaaaaaggttgagggaggttctagtgccaatatggtacagaaaaagaaccctcatgcatcctacaacaacaagaaagtcaagcctgatgtcaaacccaaggctgcaaccaactttaagaagaaaggcaagggaaaagcaaagggagactgctttgtgtgtggcaagtctgggcattgggccaaggactgtcctgagcgcaaagacaggaagtctgccaacatggtcattggcgagggcggaggaacatcggggtacggtaaaatattacctacagttctctctgtttttcactcacctgattggtgggtggacactggtgctaatattcatgtcgggagaggttcctccatgttgatgggaaacgggtcgcttgcggctgttcatggtattggtacggtcgatcagaagtttacttcgggaaagaccgtgcagctgaagaacgtgcagcatgtcccttcaataaagaagaatcttgttagcggctctctactttgtagagaaggttttagacttgtgtttgagtccaataaatgtgtcgtatctaaatatgggacttttgttagaaaaggttatgacagcggaggcttgttccgcttttctttgaatgacatgtgtaataatcataatgttgtgaaccatattagcgagaatgatgagtctaatgtgtggcattcgcgactctgtcatgtgaatttcagttgtatgacgcgcttagctaacatgagtttaattccaaaattcactttgatcaaaggttccaagtgccatacttgtgttcaatcgaaacaacctcgcaagcctcacaaggcatctgaggcgaggaatttggcacctctagaacttgttcattccgatttgtgcgaaatgaacggcgtgttgactaaagggggaaagaaatatttcatgacactgatagatgattacactagattttgttatgtgtatatattgaaaagaaaggatgaagcattgcattactttaaaatctataaagctgaggtagaaaaccaacttgaaaggaaaatcaaacggttgaggtctgatagaggtgaggagtatttttctaatgagtttgcatccttttgcgaagagtttggaattatttatgagaggatgcctccctattcaccccaatcaaatggggtggccgaaagaaagaaccgtactctaactgagatggtgaatgccatgttagagactgcggggctttccaaggaatggtggggtgaggcagttttgactgcgtgtcatgtcctgaataaaatttcaatgaagcataaggaagtaacaccattcgaggaatgggaaaggaagaaattaaatctctcatacctacgaacatggggctgtttggccaagcactttgcaccgatagaacacaatgatcaaacgcctgagaaaaatcctgaggaggacaacattgtagacactcacaagagtaagagacaaagggttgcaaaatcctttggagatgactacattgtataccttgtggatgacaccccaagaaccatagaagagacatattcatctcctgacgctgactactggaaggaaataatggatgttaagacagctttcttaaacggagagctggaggaggagatctatatggatcaaccagacggccttaatgtgattgaggaggtcaaggactatctgtacaagagttttgaaatgaaggatttgggagaggctaatgttattcttaacatcaaactacaaagaggagatgagggtgggattacacttgtgcaatctcactatgtggacaaggttttgagtcgctttggatatagtgactgtaagccagctcctactccttgtgatcctagcgtgctattaaggaaaaaccgaagaatagtaagggatcaactgagatactctcaaatcattggttcattgatgtacttggctagtgcaacgaggcctgacatctcatttgctgtaagcaagctgagccggtttgtctcaaatccgggagatgatcattggcaggctctggaaagagtaatgcgctatctaaagggcactatgagctatggaattcactataccgggtattcaaaagtactagaagggtatattgactcaaactggatatctgatgctgatgagataaaagtcacaagtggatatgtgttcacacttggaggtggtgttgtttcctggaagtcttgcaagcagaccatcttaacaaggtcaacaatggaagcagaacttacagcactagatactgcgacagttgaggccgagtggcttcgtgaactcctgatggatttgccggtggttgaaaaaccagtgcgcgccagctatcctaatgaactatga

SEQ ID NO: 15432 - DNA, 4260 bp, Oryza sativa
  Clone ID: TFbOSC900380j.C1.o15.fg
atgtctggagttgctaccgccgctattggcggaggtggtgcgccgccaccgacaggagctgcgccgccgccgacgccgacaggagctggatccggagctggtgcgccaggaggaggtgctgtgaacgactacaacaacggaggcaattctgcctcaccatccagcggagggccattctcggggtataatcttctccttctactgctgttagcgctactcctgttcccattgttagcgctatactgtgtgcgctatgttcttgttcctgttctacatgatgcctctagcatgttatcgcattactggtatgttcctgtttctgacattcatgatgtgcatagtatgctactggttatgttaagatcaccctacactgcttatgccatgatcatagtttcaatttcttggattaaaatatgccgaataatgactatattttcaacaatccaaaaacctgataggtcattttcggtagttggctttgctgctgcactgaaaccacatgcttttgatggttcaaactataagaaatggaaagcacgtgcactattgtggttgacagcgatgcagtgcttctatgtttcacggggtaaacgaagtgaaccacctctttctcctgaggaagaggctaagttcgaggcttcggattgcctgttccgtggagcattgatcagtgtactcgctgacaacatagtggacgtgtacatgcacatgccttctgggaaggacatgtgggatgcacttgaggccaagttcggagtttctgacgccggcagtgagctgtatgtcatggagcagttctatgactacaagatggtcgatgaccgttctgtagtagaacaagctcatgagattcagatgctggctaaggaacttgagaacaacaactgtgagttgccggacaagtttgtggcgggtggcattattgccaaactaccaccttcttggtcggactttgccacttctctaaagcacaagagacaagagttcagtgttcctgatctcattggctctttgggtgttgaggagaaggcgagggcaaaggacgtccggggcaaaaaggttgagggaggttctagtgccaatatggtacagaagaagaaccctcatgcatcccacaacaacaagaaagtcaagcctgatgtcaaacccaaggctgcaaccaattttaagaagaaaggcaagggaaaggcaaagggagactgctttgtgtgtggcaagtctgggcattgggccaaggactgtcctgagcgcaaagacaggaagtctgccaacatgatcattagcgagggcggaggaacatcggggtacggtaaaatattacctacagttctctctgtttttcattcacctgattggtgggtggatactggtgctaatattcatgtcgggagaggttcctccttgttgatgggaaacgggtcgcttgcggctgttcatggtgttggtacggtcgatctgaagtttacttcgggaaagaccgtgcagctgaagaacgtgcagcatgtcccttcaataaagaagaatctagttagcggctctctattgtgtagagaaggttttagacttgtgtttgagtccaataaatgtgtcatatctaaatatgggacttttgttggaaaaggttatgacagcggaggcttgttccgcttttctttgaatgacatgtgtaataatcataacgctgtgaaccatattagcgagaatgatgagtctaatgtgtggcattcgcgactctgtcatgtgaatttcggttgtatgatgcgcttagctaacatgagtttaattccaaaattcactttggtcaaaggttccaagtgccatacttgtgttcaatcgaaacaacctcgcaagcctcacaaggcatctgaggcgaggaatttggcacctctagaacttgttcattccgatttgtgcgaaatgaacggcgtgttgactaaagggggaaagaaatatttcatgacactgatagatgattgcactagattttgctatgtgtatctattgaaaacaaaggatgaggcattgcattactttaaaatctataaagctgaggtagaaaaccaacttgaaaggaaaatcaaacggttgaggtctgatagaggtggggagtatttttccaatgagtttgcatccttttgcaaagagtttggaattattcatgagatgacgcctccctattcaccccaatcaaatggggtggccgaaagaaagaaccgtactctaactgagatggtgaatgccatgttagacactgcgaggctttccaaggaatggtggggtgaggcagttttgactgcgtgtcatgtcctgaataaaattccaatgaagcacaaggaagtaaatgtacctatagtcaaaaagcggaaacttggaccaaaaactgttgattgtgtgtttcttggttatgctatccacagtgtgggttatagattcttaatagtaaactctggagtacccgacatgcatgctggtacaatttttgagtccagagatgctactttctttgagaatgaatttcctatgaaatatacatctagcacttctagtaaagaaactgtcatgccccatgagcactttgcaccgatagaacacaatgatcaaacgcctgaggaaaatcctgaggaggacaacattgtagatactcgcaagagtaagagacaaagggttgcaaaatcctttggagatgactacattgtatacctcgtggatgacaccccaagaaccatagaagaggcatattcatctcctgacgctgactactggaaggaagcagtacgcagtgaaatggactcgattatgtctaatggtacttgggaagtcgttgagcgtccatatggatgtaagcccgtaggatgcaaatgggttttcaagaaaaagcttaggcctgatggtacaatcgaaaagtataaggcaaggcttgtggccaagggttatacccaaaaggaaggcgaggatttcttcgacacatattcaccagttgctcgcttgactacgattcgagtactacttgctctggcagcctctcatggtcttcttgtccatcagatggacgttaagacagctttcctaaacggagagctggaggaggagatctatatggatcaaccagacgggtatgtactagaaggtcaggagggaatggtgtgtaaactattgaaatccttgtatggcctcaagcaagcacctaagcaatggcatgagaagtttgacaccacgcttacatctgcaggctttgttgtgaacgaagctgacaaatgtgtatactatcgctatggtgggggagaaggggtgatcttatgcttgtatgtcgatgacatactgatctttgggaccagccttaatgtgattgaggaggtcaaagactatctgtccaagagttttgaaatgaaggatttgggagaggctgatgttattcttaacatcaaactacaaagaggagatgagggtgggatcacacttgtgcaatcccactatgtggacaaggttttgagtcgctttggatatagtgactgtaagccagctcctactccttatgatcccagcgtgctattaaggaaaaaccgaagaatagcaagggatcaactgagatactctcaaatcattggttcattgatgtacttggctagcgcaacgaggcctgacatctcatttgctgtaagcaagctgagccggtttgtctcaaatccgggagatgatcattggcaggctctggaaagagtaatgcgctatctaaagggcactatgagctatggaattcactataccgggtatccaaaagtactagaaggatatagtgactcaaactggatatctgatgctgatgagataaaagccacaagtggatatgcgttcacacttggaggtggcgctgtttcctggaagtcttgcaagcagaccatcttaacgaggtcaacaatggaagcagaacttacagcactagatactgcgacagttgaggctgagtggcttcgtgaactcctgatggatttgccggtggttgaaaaaccagtgccagctatcctaatgaactgcgataatcaaacagtgattattaaagtgaacagttcaaaggacaacatgaagtcatctagacacatcaagagaagactgaaatctgtcagaaagcagaaaaactccggagtgatagcattgtactatgtccaaacggctagaaatctggcagatcagtttaccaaggggctaccacgtaatgtgatagacagtgcatcgagggaaatgggcttgatacccacctaa

SEQ ID NO: 15433 - DNA, 3807 bp, Oryza sativa
  Clone ID: TFbOSC900383j.C1.o22.fg
atgcagtgcttctatgtttcacggggcaaacgaagtgaaccacctctttctcctgaggaagaggctaagttcgaggcttcggattgcctgttccgtggagcattgatcagtgtactcgctgacaacatagtggacgtgtacatgcacatgccttctgggaaggacatgtgggatgcacttgaggccaagttcggagtttctgacgccggcagtgagctgtatgtcatggagcagttctatgactacaagatggtcgataaccgttctgtagtagaacaagctcatgagattcagatgctggctaaagaacttgagaacaacaactgtgagttgccggacaagtttgtggcgggtggcattattgccaaactaccaccttcttggtcggactttgccacttctctaaagcacaagagacaagagttcagtgtttctgatctcattggctctttgggtgttgaggagaaggcgagggcaaaggacgtgcggggcaaaaaggttgagggatgttctagtgccaatatggtacagaagaagaaccctcatgcatcccacaacaacaagaaagtcaagcctgatgtcaaacccaaggctgcaaccaattttaagaaaaaaggcaagggaaaggcaaagggagactgctttgtgtgtggcaagtctgggcattgggccaaggactgtcctgagcgcaaagacaggaagtctgccaacatggtcattagcgagggcggaggaacatcggggtacggtaaaatattacctacagttctctctgtttttcattcacctgattggtgggtggatactggtgctaatattcatgtatgtgctgacatttctctgttttcttcttatcaggttgggagaggttcctccttgttgatgggaaacgggtcgcttgcggctgttcatggtgttggtacggtcgatctgaagtttacttcgggaaagaccgtgcagctgaagaacgtgcagcatgtcccttcaataaagaagaatctagttagcggctctctattgtgtagagaaggttttagacttgtgtttgagtccaataaatgtgtcgtttctaaatatgggacttttgttggaaaaggttatgacagcggaggcttgttccgcttttctttgaatgacatgtgtaataatcataatgctgtgaaccatattagcgagaatgatgagtcaaatgtgtggcattcgcgactctgtcatgtgaatttcggttgtatgacgcgcttagctaacatgagtttaattccaaaattcactttggtcaaaggttccaagtgccatacttgtgttcaatcgaaacaacctcgcaagcctcacaaggcgtctgaggcgaggaatttggcacctctagaacttgttcattccgatttgtgcgaaatgaacggcgtgttgactaaagggggaaagaaatatttcatgacactgatagatgattgtactagattttgctatgtgtatctattgaaaacaaaggatgaggcattgcattactttaaaatctataaagctgaggtagaaaaccaacttgaaaggaaaatcaaacggttgaggtctgatagaggtggggagtatttttccaatgagtttgcatccttttgcgaagagtttggaattattcatgagatgacgcctccctattcaccccaatcaaatggggtggccgaaagaaagaaccgtactctaactgagatggtgaatgccatgttagacactgcggggctttccaaggaatggtggggtgaggcagttttgactgcgtgtcatgtcctgaataaaattccaatgaagcataaggaagtaacaccattcgaggaatgggaaaggaagaagttaaatctctcatacctacgaacatggggctgtttggccaaggtaaatgtacctatagccaaaaagtggaaacttggaccaaaaactgttgattgtgtgtttcttggttatgctatccacagtgtgggttatagattcttaatagtaaactctggagtacccgacatgcatgctggtacaattcttgagtccagagatgctacattctttgagaatgaatttcctatgaaatatacacctagcacttctagtaaagaaactgtcatgccccatgagcactttgcaccgatagaacacaatgatcaaacgcctgaggaaaatcctgaggaggacaacattgtagatactcgcaagagtaagagacaaagggttgcaaaatcctttggagatgactacattgtatacctcgtggatgacaccccaagaaccatagaagaggcatattcatctcttgacgctgactactggaaggaagcagtacgcagtgaaatggactcgattatgtctaatggtacttgggaagtcgttgagcgtccatatgggtgcaagcccgtaggatgcaaatgggttttcaagaaaaagcttaggcctgatggtacaatcgaaaagtacaaggcaaggcttgtggccaagggttatacccaaaaggaaggcgaggacttcttcgacacatactcaccagttgctcgcttgaccacgattcgagtactacttgctctggcagcctctcatggtcttctcgtccatcagatggacgttaagacagctttcctaaacggagagctggaggaggagatctatatggatcaaccagacgggtatgtactagaaggtcaggagggaatggtgtgtaaactattgaaatccttgtatggcctcaagcaagcacctaagcaatggcatgagaagtttgacaccacgcttacatctgcaggctttgttgtgaacgaagctgacaaatgtgtatactatcgctatggtgggggagaaggggtgatcttgtgcttatatgtcaatgacatactgatctttgggaccagccttaatgtgattgaggaggtcaaagactatctgtccaagagttttgaaatgaaggatttgggagaggctgatgttattcttaacatcaaactacaaagagaagatgaggatgggattacacttgtgcaatcccactatgtggacaaggttttaagtcgctttggatatagtgactgcaagccagctcctactccttatgatcccagcgtgctattaaggaaaaaccaaagaatagcaagggatcaactgagatactctcaaatcattggttcattgatgtacttggctagcgcaacgaggcctgacatctcatttgctgtaagcaagctgagccggtttgtctcaaatccgggagatgatcattggcaggctctggaaagagtaatgcgctatctaaagggcactatgagctatggaattcactataccgggtatccaaaagtactagaagggtatagtgactcaaactggatatctgatgctgatgagataaaagccacaagtggatatgtgttcacacttggaggtggcgctgtttcctggaagtcttgcaagcagaccatcttaacgaggtcaacaatggaagcagaacttacagcactagatactgcgacagttgaggccgagtggcttcgtgaactcctgatggatttgccggtggttgaaaaaccagtgccagctatcctaatgaactgcgataatcaaacaatgattattaaagtgaacagttcaaaggacaacatgaagtcatctagacaaatcaagagaagactgaaatctgtcagaaagcagaaaaactccggagtgatagcattggactatgtccaaaaggctagaaatctggcagatcagtttaccaaggggctaccacgtaatgtgattgacagtgcatcgagggaaatgggcttgatacccacctaa

SEQ ID NO: 15434 - DNA, 943 bp, Oryza sativa
  Clone ID: TFbOSC9356j.C1.o1.fg
atgtcgaacactggagacaaggagaaggagactcccgtcaacaccaacggaggcaatactgcctcaaactccagcggaggaccattcttggggtcattttcggtagttggctttgctgctacactgaaaccacatgcctttgatggttcaaactataagagatggaaagcacgtgcactattgtggttgacagcgatgcagtgcttctatgtttcacggggcaaacgaagtgaaccacctctttctcctgaggaagaggctaagttcgaggcttcggattgcctgttccgtggagcattgatcagtgtactcgctgacaacatagtggacgtgtacatgtacatgccttctgggaaggaaatgtgggatgcacttgaggccaagttcggagtttctgacgccggcagtgagctgtatgttatggagcagttctatgactacaagatggtcgatgaccgttctatagttgaacaagctcatgagattcagatgctggctaaggaacttgagaacaacaactgtgagttgccggacaagtttgtggcaggtggcattattgccaaactaccaccttcttggtcggactttgccacttctctaaagcacaagagacaagagttcagtgttcctgatctcattggctctttgggtgttgaggagaaggcgagggcaaaggacgtccggggcaaaaaggttgagggaggttctagtgccaatatggtacagaagaagaaccctcatgcatcccacaacaacaagaaagtcaagcctgatgtcaaacccaaggctgcaaccaattttaagaagaaaagcaagggaaaggcaaagggagactgctttgtgtgtggcaagtctgggcattgggccaaggactgtcctgagcgcaaagacaggaagtctgccaacatgatcattagcgagggcggaggaacatcggggtacg

SEQ ID NO: 15435 - DNA, 2415 bp, Oryza sativa
  Clone ID: TFbOSC400690j.C1.o14.fg
atggctgacaatgagaaaggcaataaggtcagaagtcaggacattggtacctcgagctcccgagtgaatgaagcaccagacaccagttgtgtgacactggtccaacacctgattaaccagaaccgattgcttatagagatactacagcagcatcagacaccaattctgaacctgagtcagatacaacctcaagtgcagttggaggcagtccaagcactcacaccacgagtcagcatgccgccagcatcccgaaggacccatggtgacgtgccacatgttgactcaaaagaagcaagtatcatttgttttatgtgtgatgagcaagggcactatgcaagggagtgtcctcagcagaaaaaaaaaacaccaatgcgaaccgaagatgaagtccgtaagatgagcattaccagcacagaatggcctccaccaggaatgacaaaacgtcagagaagaaataccttccgaggtgcgccacagttgacagagcatcttttagctaatggaggtagagtgtctgataatgaagattcagatcaagtctcctcagatgatgaagatgagaagtctccccaaggtttcaaccagaataaaatggaacgtaaggcatgctctcgttgtggagaaatcggtcatgttgccagctcgtgtgccactacatgcgttcattgtgaggaagaccatccacccgacaggtgtccaacgagcaggatcacttgtttcttttgtgaaggaactgatcatgtaccaaaagattgtcaattcagttttttgctgacgaagaaaatggccaaccaacccgccagttccaacggagagaagcatcaaggcaacacaaatcctcgccaagattacagtttcagcctgactccagtgccaggacagaggaatcaaaatgagaaaagaaaatgccgagtccgggaagatatctgttgcttcaattgtcaaggaatgggtcatttcgccgacaagtgcccaaaaccgagaaacatagctgccagcacgtcagtccacgcaactccctgcaatcagaagcttgctcctcagcgaactgtcatccatgcatcccgaagcagtcctatagcccgcgttgcaacagctccaactccagcgagtgcattaccacaaggtgtcaatgcccaatttcagccccagccatcagttgacaagaccgaggccagtatcggcattgtacctttggatgttcgagcacagcagccaagaaatcaaaattggaacaacccagcagggacaaccaacgttcaagtacctacagtccagcaacagtgcaagttatcagaatttctcaaaactgagcctccaacctttgccattgccgtcgatcctatggaagccagtgattggttgcgcacaatcgagaagaagctagggttgattcagtgcaccgaccaggagcgggttggcttcgcaactcctcagctggttggaccggcttcagagtggtgggatagctacgaagcatcacagccagaaggacataccatcacctggaacgagttttcatctgtattcaggagatcacatgttcccgcaggaatgatcacattaagaaaacgagagtttcgctatctgaagcaagcagatttgaccgtcacaaagtacctgcacgagttctatcgtttggctcactatgcaccagaagatgtggaaacggatgaagacaaacaagagaagtttctccaggggttaaaagatgagcttgcagtgcaactccttctagaggattatgaagattttgagaaacttgtggacaaagccatgcaactcgaaagtgagcataatcggatgacgaactgcaagaggaggattgtcaacatcccagtatttccatgtggtaaccaaagacagcgcactgagccacttcagatcaccggatcttctgttgtgcatcaagagttcctgccccaagaagatggacgcaatgcagacaacaacactagcaatactaatgatgatgataccaccaacaaccatggttcttgcctcattagcgaccactcgaataaagcgtgcaatgtcagtagcattcaccaagatgtcaacgatagtatcaatgttggaatccagaatgacaaccttagcaattttgacactgagaaagactccaatggtgatagcaactatggtaccactgatgccaatgttagcaaggatttccaaccaccaattccaactccaagtcaaaatgatcgtccccagatggacagctcaacaaagaagacgttgatttgttacaactgcaaagaaccaggtcatttctctagagattgtccacagccgaagcgtaacctacgccatcactccggccattatgcaagaagaagacaagtcactcgccttgtggtcactggagcaaacgccatacctgtgaggcctcatgttaatcctaacctatag

SEQ ID NO: 15436 - DNA, 1992 bp, Oryza sativa
  Clone ID: TFbOSC900144j.C1.o22.np
atggacgaagtcgggggtcgatggacatctctaggacaaatgaaggctacacgagctgcggcccggtagtcgagatgtcatggcacagggctggtgtcctgctgctaggggctcaatcctgcctacctgtcccggaggttccggccgtaggtggggttgggtcggtactcttgtctatggctaggatgggttggaaactatgtcacgtcttccgtccgtataccgtggtggtattttgctcaataactaaaatgtcgaatggttagcctgggttggcttgggacgagctgggacccagggtcgggttgccagttcggtcttgatcatcgtaggccttgggttaaggcagtactagatggtcaggtcagtgaagaagaagacatcgtcagttgtttgccgaagctccggaagactgcaggatccgctagcgaagtggaggaagcagtgaagccagctgtgaagcaggacaaaagacttagatctgttaaggtcctatccttagtttctaatctgtctctcccctttgttttccctctcttcctctccaaacctttgcaacagatggctgacaatgagaaaggcaataaggtcagaagtcaggacattggtacctcgagctcccgagtgaatgaagcaccagacaccagttgtgtgacactggtccaacacctgattaaccagaaccgattgcttatagagatactacagcagcatcagacgccaattctgaacctgagtcagatacaacctcaagtgcagttggaggcagtccaagcactcacaccacaagtcagcatgccgccagcatcccgaaggacccatggtgacgtgccacatgttgactcaaaagaagcaagtatcatttgttttatgtgtgatgagcaagggcactatgcaagggagtgtcctcagcagaaaagaaaaacaccaatgcgaaccgaagatgaagtccgtaagatgatcattaccagcacagaatggcctctaccaggaatgacaaaacgttagagaagaaataccttccgaggtgcaccacagttgacagagcatcttttagctaatggaggtagagtatctgatagtgaagattcagatcaagtctcctcagatgatgaagatgagaagtctccccaaggtttcaaccagaataaaatggaacgtaaggcatgctctcgttgtggagaaatcggtcatgttgccagctcgtgtgccactacatgcgttcattgtgaggaagaccatccacccgacaggtgtccaacgagcaggatcacttgtttcttttgtgaaggaactgatcatgtaccaaaagattgtcaattcagttttctgctgacgaagaagatggccaaccaacccgccagttccaacggagagaagcatcaaggcaacacaaatcctcgccaagattacagtttcagcctaactccagtgccaggacagaggaatcaaaatgagaaaagaaaatgccgagtccgggaagatatctgttgcttcaattgtcaaggaatgggtcatttcgccgacaagtgcccaaaaccgagaaacatagctgccagcacgtcagtccacgcaactccctgcaatcagaagcttgctcctcagcgaactgtcatccatgcatcccgaagcagtcctatagcccgcgttgcaacagctccaactccagcgagtgcattaccacaaggtgtcaatgcccaatttcagccccagccatcagttgacaagaccgaggccagtatcggcattgtacctttggatgttccagcacaacagccaagaaatcaagtacaagataaagaaccctcaacaaagaagacgttgatttgttacaactgcaaagaaccaggtcatttctctagagattgtccacagccgaagcgtaacctacgccatcactccggccattatgcaagaagaagacaagtcactcgccttgtggtcactggagcaaacgccatacctgtgaggcctcatgttaatcctaaccta

SEQ ID NO: 15437 - DNA, 4715 bp, Oryza sativa
  Clone ID: TFbOSC900371j.C1.o5.np
atggctagccgcccccgccgtgcagctcgtgcaccagcccgctttggttttgaggatggtagagttgaagcagaagcaaatcacgaaccagctaatgagcattctcaccacagcaaccgttcgcaccgtactgtttcccgcaacgcagaggttgagcaacctcgccgcagcagccgctcgcatcgcacagtttcccgtgaagcagagttggagcagtctcaccgccctcaccgcactgccagtcacaattctagagaagaacgcctcccttccccacctcatgtggaaaacaacatgcaacacataatggcagttcagacacaaatcttgcaaggtctaaccacagccatagccaactttcagcataacgcgcatggaaatggccaccctcacgtgggcaacaatagatccaagctgacagacttcctgaggtcacgtccaccagagttctctcagaccgtcgagcccgtcgaggctgacgattggttgaaagatgttgatagaaaactcaacttagtgcagtgtactcctgttgagaagacgctctacgcctctcaccagctaagaggacctgccgcagattggtgggagaattactgcaatgcacaccctgaacccactaacattgcttgggatgagtttgctacggctttccgtgcagctcatgtgcctgaaagcactattgacatgaagaaagaagaattcaacagacttaagcaaggcaacagcagtgtcaatgagtacctaagtcagttcaacaagttagctcggtacgcccctgaagaagtggacacagataagaagaagatcaggaaattcttgaaagggattgcagttggaatgagactccagttgcttgctcatgacttccccacttttcaacatatgatcaacaaggctcttctacttgaggatgccagaaaagaggctaccgaagaatacaagaaacacaagtctaaccatcagggaaattcttcccgaggcgcacctcgcccacgctatggtcaacccatgcaatatcaccagtcggtaactcaggctaaccaccagccaggctacgcccctcgtcctcagatgaaccgtccggcacctcagccacagcagcgtgcccctagtggcaataccgcgccaaacagtgttacctctttcaagtcaccacagggaccgtcagcagttcagtgtttccggtgcaactagatgggacactatgccagacagtgtcctcagaatcctaccaacaccaactcagggtatgctaatggcagcactgccagaactcctgctccagcggcagctcagtctcgtcctagctctcaggcaagtggacaaggttctcgtgcgtccaaccactttggtcgaggacgtgtgaatcacattcaagctgaaaccgctcaggatgctccagacgttgtgatgggtatgttctctgtcaactccatacccgcaatagttctgtttgattcaggagcttctcattctttcatatcgcaagcttttgtgaaaagaaatggttggaaaacccaaaatttgcatgtaccgatgatagtacattcccctggaaggaatataagggcaactcaaatatgcccggaagttaaccttagaattgaggaagttgacttcctagccaaaccgatagtcctagactcgcaaagcttggacatcattctagggatggattggttggctaagcacaaaggacagatagattgtgccgaaaagtccatcaccttgcaaggacctggaggaaaacaagtccgctttacccctaacacccctaccgcaagtcggtctatcctaacctgtttacaagtcacctccttggagtcggtgcccatagtctgtgaatatcccgacgtatttccggaagaattaacaagaatgccaccagaccgagagatcgagttcgccatagaactggcaccaggcacagctccaattgcaaaaagaccctaccgaatggcagctaatgagttagcagaagttaaaagacaaatcgaagaactggaaagtaaaggttatgtgcgacctagctcatccccttggggagccccagtgcttctggttaagaaaaaggatggctctgagagaatggtaatcgactatagagccctaaatgaagtaactataaagaacaagtacccgttgccccggattgacgatttattcgatcaacttaaaggagcaagagttttctcaaaaattgacttgaggtcaggttaccaccaactgaaaatcagatctgaagatatcccgaagaccgctttctcaacgcgttatggtctatatgagttcacagttatgtccttcggactcaccaatgctccagcattcttcatgaacttaatgaataaaatcttcatggaatacctggaccagtttgtcgtggtgttcatcgatgacatcctgatatactctaagaacgaggaagaacatgctgaacacctaaggctgataatggaaaagctcagagatcatcaactattcgctaaattctcgaaatgcgaattctggttagaccgagtagcatttcttggacacgtgatctcctccaacggtgtcgaagtagatcccagcaaggttgaagctgtacttgcttggaacccgcccaagaatgtgtcagagattcgcagcttccttggcttagcgggatattatcgaagattcattgaaggattctctaagctagccagacctatgaccgagctgttaaagaaggaaaagaaatttcaatggtctgcagcctgtgaagacagcttccaagaattgaagaaaaggttgaccactgccccaattctcacttgccagatatccgaaaagatttcgagatcttctgtgacgcatcaagacaaggcttaggatgtgtcctaatgcaagaacgaaaggttgtggcctatgcatccaggcagctcaggcctcatgaagtcaattatcccacccatgatctcgagttggcagccgtgattcatgctcttaagatctggaggcactacttaatagggaacagatgtgaagtatacaccgatcacaaaagtcttaaatatatcttcacacagaccgagttaaatatgaggcagagaagatggttggaactaatcaaggattacgatcttggaatccactatcatcctggtaaagccaacgtggtcgctgatgcgctaagtcgcaaggcctattgcaatgtagctcaaatacggcctgaccaagatcatctgtgcagagaattggagaagttaaggctgaccgtggtacagacaggagtcccagccagcttgacagtacagcctaccctagagtcgcaaatccgggaggctcagaaagatgacgaagggataaaagagttaataaaaagaatacaggagaagaaagacaccaatttctccatagacgatcaaggcacagtttggtgcgattcacgcatctgtgtaccggccaagaaggagttaagagatctcatcctaaaggaagctcatgagtccgcttactccattcatccgggaagtacgaagatgtaccaggatatcaaggcatacttttggtgggctggaatgaagcgagatgtcgctgaatacgtagccttgtgtgacatttgccaaagagtcaaggcagagcatcagaggccagctggtctgctgcaacccctaccgattcccgagtggaaatgggaagagatcggaatggatttcatcaccggtttgccaagaacccccagcgggtacgactctatttgggtaatcgtggaccgactcacgaaatcagctcatttcgtgccagtgaaaaccacctatgatggaaggaaactggcagaactctacatgacccatgtcgtatgtagatttggctgccccaagaaaattgtgtcagaccgaggcactcagttcacctcaaggttctggaagcagttgcatgaagccctcgggactgatctaaactttagtacagcctaccatccgcagaccgatggtcagacgaaaagggtaaaccaaatcctagaagacatgttgcgtgcgtgtgccttggatttcgaaggcacttgggatcgttgtttgccatatgctgagttctcatacaacaacagttatcaggccagcattcagatgtcgccgaatgaggcaatgttcggaagaaagtgtcgcacccccttgtgctggaacgaggtgggcgaagccctggtattcggtcctgacatactcaagtcagcagaagaacaagttaagctaatccgagaatgattaaagacagcgcaggaccgtcagaagaattacgctgacaatcggaggcatgaccttgagttcgaaaaaggagatcatgtatacctgcgggtatcacccctccgtggtatgagaaggtttgggatgtccggcaagttagcaccccgctacatcggcccctacctcataaccgccagacgtggcgaagtggcttatcagcttgagctacctgaaggtctcgcagatgtgcacaacgtgtttcacgtatcccagttaaagaaatgtcttcgagttccagaagagcaagttcccctgggtaatatcgagctggaaaagaatctgacctacaaggaaagaccgatcaaggttcttgaagaagcagaacgtcagactcgaaggaagacaatcaagttctacaaagtccaatggagcaatcattctgaagatgaagcaacctgggaacgagaagatcttctccgcgccgagtttccggagctgctccct

SEQ ID NO: 15438 - DNA, 5295 bp, Oryza sativa
  Clone ID: TFbOSC401219j.C1.o40.fg
atggcagtgaacgccagcttcagttcccacggttttagtgagggtcaccacgtcgctcagcttcgtgacctcgcctgtttccttggcttctcgtgtcccgagtacacggggtactccgtggaccgtgttccccctcactgtgagctctccgtgtacctctaccctcgtgaaggtatacacggagctggccttcgcccccaccacttcaccgtggccaggcccactctccagatcgcgtaccaggacctttcctggactgcgcttcgtcgcctggcccacgactacagccaccgtctcggaggctccgccttccggcagcttccacgccttccttctggccactcagacgccaggtacccttgtccgtacagcgagtctcagccagtgctgactcgcatggttgagctttcggaggctcaggccactcagcacgacctactccttgaggcttaccgctccctggcccgctgctacaccgctttggaggcccgtctggccgaggagggtgtcacctcagttgacactatctcctgggactcaggccgcctctgccacgccagccacctgtcctcccacagctcccgcggctctgcctgcactcccagtggcccgcgctcccccagctcgcgtgcgccgtactcaccagtgtactccccctacccacacccagttagcccttcctacacccccggacacaccccagttgcttcctcccgccgtggtccacgctttatccgcactgcgcggaagcgtgttgttggttcttccaccgtgttccgtttccaccacccagctcccccaccgccagcggcccgcgctgctgccggccctcgacagatggctagccgcccccgccgtgcagctcgtgcgccagcccgcttcggttttgaagaaggtagagccgaaccagaagcaaatcatgaatcagctaatgagcagtctcaccgcagcaaccgttcgcaccgtactgtttcccgcaacgcagaagttgagcaaccccgccgtagcaaccgctcgcatcgcacagcttcccgtgatgcagagatggaacagtctcaccgctctcaccgcactgccagtcacaattctggagaagaacgcctcccttccccacctcatgtggaaaacaacatgcaacacttaatggcagttcagacacaaatcttgcaaggaatagccgcagccgtagccggttatcagcataatgctcatggaaatggccaccctcacatgggcaacaatagatccaagctgacggattttctgaggtcacgtccgccagagttctctcagaccgtcgagcccgtcgaggctgacgattggttgaaagatgttgatagaaaactcaacttagtgcagtgtactccagtcgagaagacgctctacgcctctcaccagctaagaggacctgctgcagattggtgggagaattactgcaatgcacaccctgaacccactagcattgcttgggatgagtttgccacggctttccgtgcagctcatgtgcctgaaagcaccattgacatgaagaaagaggaattcaatagacttaagcaaggcaacagcagtgtcaatgagtacctaagtatgttcaacaagttggctcggtacgcccctgaggaagtggactcagataagaagaagatcaggaaattcttgaaaggaatcgcagttggaatgagactccagttgctagcacatgacttccccacttttcaacatatgatcaacaaggcacttctacttgaggatgccagaaaagaggctaccgaagaatacaagaaacgcaaatctaaccaccaagggaattcctcccgaggcgcacctcgccctcgctacggtcaacccatgcaataccaccagtcggtcactcaggctaaccgccagccaggctacgcccctcgtcctcagatgaaccgcccggcaccccagccacagcagcgtgcccctagtggcaatactgcgccaaacagtgttacctctttcaagtcaccacagggaccgtcagcaattcagtgtttccggtgcaaccagatgggtcactatgctagacagtgccctcagaatcctaccaacaccaactcagggcatgctaatggcagcactgccagaactcctactccagcggcagctcagtctcgtcctagcactcaggcaagtggacaaggttcacgtgcttccaaccactttggtcgaggccgtgtgaatcacattcaagctgaaaccgctcaggatgctccagacgttgtgatggtacattcccctggaaggaatataagggcaactcaaatatgcccggaagttaaccttagaattgaggaagttgacttcctagccaaaccgatagtcctagactcgcaaagcttggacatcatcctagggatggattggttggctaagcacaaaggacagatagattgtgccgaaaagtccatcaccttgcaaggacctggggaaaagcaagtccgctttacccctaacactcctaccgcaagtcggtctatcttaacctgtttacaagtcacctccttggagtcggtgcccatagtttgtgaatatcccgacgtatttccggaagaattaacaagaatgccaccagaccgagagattgagttcgccatagaactggcgccaggcaccgcaccaattgcaaaaagaccctaccgaatggcagctaatgagttagcagaagttaaaagacaaatcgaagaattagagagtaaaggttatgtgcgacctagctcatccccttggggagccccagtgctcctggttaagaaaaaggatggctctgagagaatggtaatcgactatagagccctgaatgaagtaactataaagaacaagtacccgttgccacggattgacgatttgttcgaccaacttaaaggagcaagagttttctcaaaaattgacttgaggtcaggttaccaccaactgaaaatcagatctgaagatatcccaaagaccgctttctcaacgcgttatggtctatatgagttcacagtaatgtccttcggactcaccaatgctccagcattcttcatgaacttaatgaacaaaatcttcatggaatacctggaccagtttgtcgtggtattcatcgatgacatcctaatatactccaagaacgaggaagaacatgctgaacacctgaggttgataatggaaaagctcagggatcatcaactattcgcaaaattctcgaaatgcgaattctggttagaccgagtagcatttcttggacacgtgatttcctccaatggtgtcgaagtagatcccagcaaggttgaagctgtacttgcttggaacccgcccaagaatgtgtcagagattcgcagcttcctcggcttagctagatattatcgaagattcattgaaggattctctaagctaaccagacctatgaccgagctgttaaagaaggaaaagaaatttcaatggtctgcagcctgtgaagacagcttccaagaaatgaagaaaaggttgaccactgccccagttctcaccttgccagatatccgaaaagatttcaagatcttctgtgatgcatcaaggcaaggcttaggatgtgtcctaatgcaagaacgaaaggttgtggcctatgcatccaggcagctcaggcctcatgaagtcaattatcccacccatgatctcgagttggcagccgtggttcatgctcttaagatctggaggcactatttaatcgggaacagatgtgaagtatacaccgatcacaaaagtcttaagtatatcttcacacagaccgagttaaatatgagacagagaagatggttggaactaatcaaggattacgatcttagaatccactatcaccctggtaaagccaacgtggtcgctgatgcgctaagtcgcaaggcctattgcaatgtagctcaaatacggcctgaccaagatcacctgtgcagagaattggagaagttaaggctgaccatggtacagccaggtgtccctgccagtttgacagtacagcctaccctagagtcgcaaatccgggaggctcagaaagacgacgaagggataaaagaattaataaaaagaatacaggagaagaaagacaccaatttctccatagacaaccaaggcacagtttggtgcggtccacgcatctgtgtaccggccaagaaggagttaagagatctcatcctaaaggaagctcatgagtccgcctattccattcatccaggaagtacgaagatgtaccaagatatcaaggcatacttctggtggactggaatgaagcgagatgtcgcagaatacgtagccctgtgtgacgtttgccaaagagtcaaggcagaacatcaaaggccagctgctcatttcgtgccagtgaaaaccacctatgatggaaagaaactagcagaactctacatgacccatgtcgtatgtagatttggctgtcccaagaaaattgtgtcagaccgaggcactcagttcacctcaaggttctggaagcagttgcatgaagccctcggaaccgatctaaattttagtacagcctaccatccgcagaccgatggtcagactgaaagggtaaaccaaatcctagaagacatgctacgttcgtgtgccctggatttcgaaggcacttgggatcgttgtttgctgtatgctgagttctcatacaacaacggttatcaggccagcattcagatgttgccaaatgaggcaatgttcggaagaaagtgccgcactcccttgtgctggaatgaggtgggcaaagcactggtattcggtcctgacatactcaagtcagcagaagaacaagttaagctaacccgagaacgtttaaagacagcgcagaaccgtcagaaaaattatgctgacaatcggaggcgtgaccttgaattcgaaaaaggagatcatgtgtacctgcgggtatcacctctccgtggtatgaggaggtttgggatgtccggcaagttagcaccccgctacatcggcccctacctcataaccgccagacgtggcgaagtggcttatcagcttgagttacctgaaggtctcgcagatgtgcataacgtgtttcacgtatcccagttaaagaaatgtcttcgagttccagaagagcaagttcccctgggtaatatcgtgctggaaaagaatctgacctacaaggaaagaccgatcaaggttcttgaagaggcagaacgtcagactcgaaggaagaccatcaagttctacaaagtccaatggagcaatcattctgaagatgaggcaacctgggagcgagaagatcttctccgcgccgagtttctggagctgctcctttag

SEQ ID NO: 15439 - DNA, 413 bp, Oryza sativa
  Clone ID: TFbOSC11188j.C1.o2.np
atgaaggcaaggagtgaaatcttcaactcagtatcagatgctacacggagtgaaaactgcaagcaccggttaccaggcaatgccatgtcttgggagatgatccaatgggaaggaactcatcaaggtcaaaggtgtaaaggaatacggtgaatgctaaataatgacaacctgaagataatagttgccacatcccagtcgaagtcagctagaggtgcaaccagggaaaagtcaggtgaagagaagattccatttgcaacaggagatcgagccaagcagtccagagtggagaagttttgttaggcaagtttgttatagaagatggagcggaagaagtcagacaagaagagaagaccacccaacctatcttcatgctagcctcctcgaatctcggggacgagattcctgtaaggggg

SEQ ID NO: 15440 - DNA, 1052 bp, Oryza sativa
  Clone ID: TFbOSC11867j.C1.o3.np
ttggatttattgcgtcagccgaggggaggggcgcgcggaccgggtccacgggagtggggcccacgcggcagcctcacggtccacggtggaccgggtgctcccggctcacaccggccggcgccgtgggtcccacgcatcagccgcacccgagggcgcgggcggctgacggccgggccccacatggcagccgcggggcgcgcccgaaggcggccacgccggcacagccgacgggaggcggcgcacccgcgccccgatggggagggaagggggaaacgaatcggcggtccacagctcaccccgggtcgacggcgacgacgggaacggcgaccggagcggaggaaggcggcggcgcggctcgggtagacggggacggcggcgttccggcggtcggcgggcgaaacggaggggtggacgaggtcggcgaggttgcggcgaaaccaaaggaggcggcgccgaagcgggagaaggtccggggcgacgacggcggcaaaccggagctcggtggtgacggcggagagagagagcgacggcgcgagctcgattccggcggagagagagagcggcgagtggcggaaacggtggagggaggcacggggagtgtttatatagggttgggagtgagagagggcggccggatgagggggaaacgggcgcggaagatccggccgccattgatgcgccggcgaggtttagggggaaagattccgaacgaatccgaggaagagagggagggaaaaatggggggaaagagggagggaatcacggggaatatttcccccctcttgattgcacgcggggcggacgggagcggcgggatttgcggcggcggcggcgctagggcacgggcgagacggcgggagcggcgggaggaaggggatgacgggtgggccccacccgtcagcgagggtggcgggcgggcccgcccgtcagcggcgcgcgcgcggggaggaggccgaatgggccgcggggaggaggagagagagggaaggagatgggccgagccggcccaagagggggaggggggaaaagactttttaggatttttcttttta

SEQ ID NO: 15441 - DNA, 1368 bp, Oryza sativa
  Clone ID: TFbOSC401126j.C1.o41.fg
atggttggcctgggttggcttgggacgagctgggacccagggtcgggttgccagttcggtctgaatcatcgtaggccttgggttaaggcaggtttacccttttcttccttcttcaaatttcaactagtactagatggtcagatgtttaacagagaaaaaggaaagaatgtcagcgggtatgcctcaagtaactcaagttttcaactcaatccaccactggcctcaagagagttaaccagggcacacccttggtccattccgagcatgctgcttggttcacagctaccattggttggaagtcaagaccaaaatcagtatgtgtttgatcgagcatttgccacccaggtcgatgagcttccaatgccagaagaggatgtccccttttgtcacgattgtagagagcaaggacactatgccctgaattgtccatgggtatatgccaaagaagctccttcctttggtttagcagggcaggcatcgctaaaccagcctcctcgcaccaagtcaagcttgcagcctagtgtgccaagtagagagcccaatggagagaatccattgaatcccgagaattgctttcctcctagcctttcgtaccacgtggggtcacgtactaagcaagccaaaggcaagaagagtaagaatcagaagagaaaagcaccgatgcgaactgaagaagaagtacgtaagatgactattaccagcaccgaatggcctccagcagggataactattcctagacatcaaagaggaaataccttccgaggtgcacgacagttgacccagcacctcctaagccatggtggcagagtatctgatagtgaagggtcagatcaagtctcctcggatgatgaagatgagtctccccgacatctcggcgaggaagaaatggaatcaaaggcatgcacccgttgtggagaaattggacacgttgctagcatgtgtcttacactctgccctcattgtgaggaagaccatccaccaggtgaatgtcccacccgcaaggtgacatgttttctgtgcgaaggtacaaaccatgtgcccaaggattgccaactcagtgtgttgttgaccaagaccgcagaaatccaacgaacaaccctacggttgtctcatcagctagtcagctccaatagcaacatcgacaatatcatccacaacaccaatgctcctcctgctccacctgactctgcaataaatcatagcaataataccttcagcaccaaccattctctgcaccgacagcctcagcaaagaattgttgtcgatggaagaagttgtgtctctccccgacctactccaggccgagcaaagggcaatcaatctcaggagggcgataccaagcagaagaccgttctctgcttcaaatag

SEQ ID NO: 15442 - DNA, 1024 bp, Oryza sativa
  Clone ID: TFbOSC6416j.C1.o1.np
agatgtccccttttgtcacgattgtagagaacaaggacactatgccctgaattgtccatgggtatatgccaaagaagccccttcctttggtttaatagggcagacatcgctaaaccagcctcctcgcaccaagtcaagcttgcagcctagtgtgcaaagtagagagcccaatggagagaatccattgaatcccgggaattgctttcctcctagcccttcgtaccacgtggggtcacgtactaagcaagccaaaggcaagaagagtaagactcagaagagaaaagcaccgatgcgaactgaagaagaagtacgtaagatgactattaccagcaccgaatggcctccagcagggataactattcctagacgtcaaagaggaaataccttccgaggtgcacgacagttgacccagcacctcctaagccacggtggcagagtatctgatagtgaagggtcagatcaagtctcctcggatgatgaagatgagtctccccgacatctcggcgaggaagagatggaatcaaaggcatgcacccgttgtggagaaattggacacgttgctagcatgtgtctcacactctgcgcttattgtgaagaagaccatccaccaggggagtgtcccacctgcaaggtcacatgttttctatgcgaaggtacaaaccatgtgcccaaggattgccaactcagtgtgttgtcgaccaagaccgcagaaatccaacgaacaaccctacgattgtctcatcagctagtcagctccaacggcaatatcgacgatatcatccacagcaccaatgctcctcctgctgcacctgactctgcaataaatcatagcaataataccttcagcaccaaccattctctgcaccgacagcctcagcaaagaattgtcgttgatggaagaagttgtgtctctccccgacctactccaggccaagcaaagggcaatcaacctcaggagggcgataccaagcagaaaaccgtcatccgcttcaaacagcaatcagaaggaagcttctcctgtgaa

SEQ ID NO: 15443 - DNA, 1275 bp, Oryza sativa
  Clone ID: TFbOSC12281j.C1.o1.fg
atgaaagccagtgattggttgcgcacagtcgagaagaagctggggttgattcagtgcacagaccaggagcgggttggcttcgcaactcatcagttggttggaccgacttcagaatggtgggatagctacgaagcatcacggccagaaggacataccatcacttgggatgagttttcatctgtattcaagagatcacatgttcccgcaggaatgatcacactaagaaaacgagagtttcgctacctgaagcaagaagatttgaccgtgacagagtacctgcacgagttccatcgtttggctcactatgcaccagaagatgtggaaacggatgaagacaaacaagagaagtttctccaggggttaaaagatgaggttgcagtgcaactactcctagaggattatgaagattttgagaaacttgtggacacaagccatacaactcgaaaggaccactcggatcaagcgtgcgatgtcaatagcattcaccaagatatcgacgatagtatcaatgaaggcacccagaatgacaaccctagcaattttgactctgagaaagactccaatggtgatagcaactatggtaccactgatgccaatgttagcaaggatttccaaccaccaattccaactccaagtcagaatgatcgttcccagacgaacagctcagtaaagaagacattgatttgttacaattgcaaagaaccaggtcatttctccacagattgtccacaaccgaagcgtaacctgcgtcatcactccggccattatgcaagaagaagacaagtcactcgccttgtggtcactggagcaaacgccatacctgtttctctgaaaggcagcaggctcaagtaccacatcgtcaccagaagcatccacaactctcggagtgaagagtacttagttgacaaaggtcaaaagatgattgatagaagatatcgaaaaagatgtttattaccgggcaaagaagtaggtcgaaacgtgattgataagagaaatcgggaaagaacacatcaagttgataacttgtgtgaggttgacgccgaagatatgaatcatgagaagttctggaacggaagcatcattaaactaccgcaacctagtctaagtaacctaaaaggtgcaccctggttcgagtcaggtgaagagaagattccatccgcaataggaggtcaagccaagcagttccgagtggtgaagttttgctggaagtttgtgaagacgcaacagaagaagtcagacaagaagagaagaccgcccaacctatcttcttgctag

SEQ ID NO: 15444 - DNA, 1983 bp, Oryza sativa
  unsure (1)..(1983): unsure at all n locations
  Clone ID: TFbOSC13271j.C1.o1.np
atggctagccgtccccgccgtgcagctcgtgcaccagcccgctttggtgttgaggatggtagagttgagccagaagaaaatcatgaatcagctaatgagcagtctcaccacagcaaccgttcgcatcgtactgtttcccgcaacgcagaggttgagcaaccccgccgcagcagccgctcgcatcgcacagtttcccgtgatgcagagatggaacagtctcaccgctctcaccgcactgccagtcacaattctggagaagaacgcctcccttccccacctcatgtggaaaccaacatgcaacacttaatggcagttcagacacaaatcttgcaaggactaaccacagccatagccagttttcagcataatgcgcatggaaatggccaccctcacatgggcaacaacagatccaagctgacagactttttgaggtctcgtccgccagagttctctcagaccgtcgagcccgtcgaggctgacgattggttgaaagatgttgatagaaaactcaacttagtgcagtgtactcctgttgagaagacgctctacgcctctcaccaactaagaggacctgccgcagattggtgggagaattactgcaatgcacaccctgaacccactaacattgcttgggatgagttcgctacggctttccgtgcagctcatgtgcctgaaagcactattgacatgaagaaagaagaattcaacagacttaagcaaggcaacagcagtatcaaatgagtacctaaagtcagttcaacaagttggctcggtacgcccctgaggaagtggacacagacaagaagaagatcaggaaattcttgaaaggaatcgcagttggaatgagactccagtgcttgctcatgacttccccacttttcaacatatgatcaacaacgcacttctacttgaggatgccaggaaagaggctaccgaagaatacaagaaacgcaagtctaaccatcagggaaattcttcccgaggcgcacctctcgcctcgctacggtcaacccatgcaataccaccagtcggtcactcaggctaaccgcaagccaggctacgcccctcgtcctcagataaaccggtcgggcacctcagccacagcagcgtgcccctagtggcaatactgcgcctaacagcgttacctctttcaagtcaccgtagggaccgtcagcagttcagtgtttccggtgcaaccagatgggtcactatgctagacagtgtcctcagaatcctaccaacaccaactcagggcatgctaatggcagcactgccagaactcctactccagcggcaactcagtctcgtcctagctctcaggcaagtggacaaggttcacgtgcttccaacaactttggtcgaggccgtgtgaatcacattcaagctgaaaccgctcaggatgctccagacgttgtgatgggtatgttctctgtcaactccgtacccgcaatagttctgttcgattcgggagcttcccattctttcatatcgcaagcttttgtgaaaagaaatggttggaaaacccaaaatttgcgtgtaccaatgatagtacattcccctggaaggaatataagggcaactcaaatatgcccggaagttaaccttagaattgaggaagttgacttcctagccaaaccgatagtcctagactcgcaaagcttggacatcattctagggatggattggttggctaagcacaaaggacagatagaatgtgccgaaaagtccatcaccttgcaaggacctagaggaaagcaagtccgctttacccctaacacccctaccgcaagtcggtctatcctaacctgtttacaagtcacctccttgggagtcgggtgccccattaaagggngttttcccttttgggtttccggagaattaacagaatccaccagaccgagagatcgagttcgccatagaactggcaccaggcacagctccaattgcaaaaagaccctaccgaatggcagctaatgagttagc

SEQ ID NO: 15445 - DNA, 2138 bp, Oryza sativa
  Clone ID: TFbOSC13981j.C1.o2.hg
atggctagccgcccctgccgtgcagctcgtgcgccagcccacttcggttttgaagaaggtagagtcgaaccagaagcaaatcatgaatcagctaatgagcagtctcaccgcagcaacaattcgcaccgtactgtttcccgtaacgcagaagttgagcaaccccgccgtagcaaccgctcgcatcgcacagcttcccgtgattcagagatggaacagtctcaccgctctcaccgcactgctagtcacaattctggagaagaacgcctcccttccccacctcatgtggaaaacaacatgcaacacttaatggcagttcagacacaaatcttgcaaggaatagccgcagccgtagccggttatcagcataatgtgcatggaaatggccaccctcacatgggcaacaatagatccaagctgacagattttctaaggtcacgtccgccagagttctctcagaccgtcgagcccgtcgaggctgacgattggctgaaggatgttgaaagaaaattcaacttagtgcagtgtactcctgttgagaagacgctctacgcctctcaccaactaagaggacctgctgcagattggtgggagaattactgcaatggacaccctgaacccactaacattgcttgggatgagtttgccacggctttccgtgcagctcatgtgcctgaaagcaccattgacatgaagaaagaggaattcaacaggcttaagcaaggcaacaccagtgtcaatgagtacctaagtcagttcaacaagttggctcggtacgcccctgaggaggtggacacagacaagaagaagatcaggaagttcttgaagggaatcgcagttgggatgagactccagttgcttgctcatgacttccccacttttcaacacatgatcaacaaggcacttctacttgaggatgccagaaaagaggctaccgaagagtacaagaaacacaagtctaaccatcagggaaattcttcccgaggcgcgcctcgccctcgctacggtcaacccgtgcaataccaccagtcggtcactcaggctaaccgccagccaggctacgcccctcgtcctcagataaaccgtccggcacctcagccacagcagcgtgcccctagtggcaatactgcgccaaacagcgttacctccttcaagtcacctcaaggaccgtcagcagttcagtgtttccggtgcaaccagatgggtcactatgctagacagtgccctcagaatcctaccaacaccaactcagggcatgctaatggcagcactgccagaactcctactccagcggcagctaagtctcgtcctagcactcaggcaagtggacaaggttcacgtgcttccaaccactttggtcgaggccgtgtgaatcacattcaagctgaaaccgctcaggatgctccagacgttgtgatgggtatgttctctgtcaactccgtacccgcaatagttctgtttgattcaggagcttcccattctttcatatcacaagcttttgtgaaaagaaatggttggaaaacccaaaatttacgtgtaccaatgatagtacattcccctggaaggaatataaaggcaactcaaatatgcccggaagttaaccttagaattgaggaagttgacttcctagccaaaccgatagtcctagactcgcaaagcttggacatcatcctagggatggattggttggctaagcacaaaggacagatagattgtgccgaaaagtccatcaccttgcaaggacctggaggaaagcaagtccgctttacccctaacactcctaccgcaagtcggtctatcttaacctgtttacaagtcacctccttggagtcggtgcccatagtttgtgaatatcccgacgtatttccggaagaattaacaagaatgccactagaccgagagattgagttcgccatagaactggcaccaggcaccgcaccaattgcaaaaagaccctaccgaatggcagctaatgagttagcagaagttaaaagacaaatcgaagagctggaaagtaaaggttatgtacgacctagctcatccccttggggagccccagtgcttctggttaagaaaaaggaaggctctgagagaatggtaatcgactatagagccctgaatgaagtaactataaagaacaa

SEQ ID NO: 15446 - DNA, 852 bp, Oryza sativa
  Clone ID: TFbOSC14645j.C1.o1.fg
atggaagccagtgattggttgcgcacagtcgagaagaagctagggttgattcagtgcaccgaccaggagcgggttggcttcgcaactcatcagttggttggaccggcttcagagtggtggaatagctacgaagcatcacggccagaaggacataccatcacttgggatgagttttcatctgtattcaagagatcacatgttcccgcaggaatgatcacactaagaaaacgagagtttcgctacctgaagcaagaagatttgaccgtcacagagtacctgcacgagttctatcgtttggctcactatgcaccagaagatgtggaaacggatgaagacaaacaagagaagtttctccaggggttaaaagatgaggttgcagtgcaactactcctagaggattatgaagattttgagaaacttgtggacacaagccatacaactcgaaaggaccactcggatcaagcgtgcgatgtcaatagcattcaccaagatatcgacgatagtatcaatgaaggcacccagaatgacaaccctagcaattttgactctgagaaagactccaatggtgatagcaactatggtaccactgatgccaatgttagcaaggatttccaaccaccaattccaactccaagtcagaatgatcgttcccagacgaacagctcagtaaagaagacattgatttgttacaattgcaaagaaccaggtcatttctccacagattgtccacaaccgaagcgtaacctgcgtcatcactccggccattatgcaagaagaagacaagtcactcgccttgtggtcactggagcaaacgccatacctgtgaggcctcgtgctaatcataacccatag

SEQ ID NO: 15447 - DNA, 4149 bp, Oryza sativa
  Clone ID: TFbOSC16108j.C1.o1.fg
atggctagccgcccccgccgtgcagctcgtgcaccagcccgctttggttttgaagatggtagagttgagccagaagaaaatcatgagtcagctaatgagcagtctcaccacagcaaccgttcgcaccgtactgcttcccgcaacgcagaagttgagcaaccccgccgcagcagccgctcgcatcgcacagtttcccgtaatgcagagatggaacagtctcaccgctctcaccgcactgccagtcacaattctggagaagaacgcctccctttcccacctcatgtggaaaacaacatgcaacacttaatggcagttcagacacaaatcttgcaaggattagccgcagccgtagccggttttcagcataatgcgcatggaaatggccaccctcacatgagcaacaatagatccaagctgacagattttctgaggtcacgtccgccagagttctctcagaccatcgagcccgttgaggctgacgattggctgaaagatgttgatagaaaactcaacttagtgcagtgtactccggtcgagaagacgctctacgcctctcaccagctaagaggacctgctgcagattggtgggagaattactgcaatgcacaccctgaacccactaacattgcttgggatgagtttgctacggctttccgtgcagctcatgtgcctgaaagcactattgacatgaagaaagaagaattcaacagacttaagcaaggcaacagcagtgtcaatgagtacctaagtatgttcaacaagttggctcggtacgcccctgaggaagtggacacagacaagaagaagatcaggaaattcttgaaaggaatcgcagttggaatgagactccagttgcttgctcatgatttccccacttttcaacatatgatcaacaaggcgcttctacttgaggatgccagaaaagaggctaccgaagaatacaagaaacgcaagtctaaccatcagggaaattcttcccgaggcgtacctcgccctcgctacggtcaacccatgcaataccaccagtcggtcactcaggctaaccaccagccaggctacgcccctcgtcctcaaatgaaccgtccggcacctcagccacagcagcgtgcccctagtggcaatactgcgccaaacagtgttacctctttcaagtcaccacagggaccgtcagcagttcagtgtttccggtgcaaccagatgggtcactatgccagacagtgccctcagaatcctaccaacaccagcttagggcatgctaatggcagcactgccagaactcctactccagcggcagctcagtctcgtcctagctctcaggcaagtggacaagtacattcccctgggaggaatataagggcaactcaagtatgcccgggagttaaccttagaattgaggaagttgacttcctagccaaaccgatagtcctagactcgcaaagcttggacatcattctagggatggattggttggctaagcacaaaggacagatagattgtgctgaaaagtccatcaccttgcaaggacctggaggaaagcaagtccgctttacctctaacacccctaccgcaagtcggtctatcctaacctgtttacaagtcacctccttggagtcggtgcccatagtctgtgaatatcccgacgtattcccagaagaattaacaagtatgccaccagaccgagagattgtgttcgccatagaactggcgccaggcactgcaccaattgcaaaaagaccctaccgaatggcagctaatgagttagcagaagttaaaagacaaatcgaagaattggagggtaaaggttatgtgcgacctagctcatccccttggggagccccagtgcttctggttaagaaaaaggatggctctgagagaatgctggaccagtttgtcgtggtgttcatcgatgacatcctgatatactccaagaatgaggaagaacatgctgaacacctgaggctgataatggaaaagctcagagatcatcaactattcgctaaattctcgaaatgcgaattctggttagaccgagtagcatttcttggacacgtgatctcctccaacggtgtcgaagtagatcccagcaaggttgaagctgtacttgcttggaacccgcccaagaatgtgtcagagattcgcagcttccttggcttagctggatattatcgaagattcattgaaggattctctaagctagccagacctatgaccgagctattaaagaaggaaaggaaatttcaatggtctgcagcctgtgaagacagttttcaagaaatgaagaaaaggttgaccactgccccagttctcaccttgccagatatccaaaaagattttgagatcttctgtgatgcatcaagacaaggcttaggatgtgtcctaatgcaagaacgaaaggtggtggcctatgcgtccagacagctcaggcctcatgaagtcaattaccccacccatgatctcgagttggcagccgtgattcatgctcttaaaatctggaggcactatttaatcggaaagagatgtgaagtatacaccgatcacaaaagtcttaaatacatcttcactcagaccgagttaaacatgaggcagagaagatggttggaactaatcaaggattacgatctgggaattcattatcatcccggtaaagctaacgtggtcgctgatgcgctaagtcgcaaggcctattgcaatgtagctcaaatacggcctgaccaagatcgcctgtgcagagaattggagaagttaaggctgaccgtggtacagtcaggtgtccctgccagcttgacagtacagcctaccctagaatcgcaaatccgggaggctcagaaagatgacgaagggataaaagagttaataaaaagaatacaggaaaagaaagacaccaatttctccatagacgaccaaggcacagtttggtgcggtccacacatctgtgtaccagccaagaaggagttaagagatctcatcctaaaggaagctcatgagtccgcctactccattcatccaagaagtacgaagatgtaccaagatatcaaggcatatttctggtgggctagaatgaagcgagatgtcgcagaatacgtagccctgtgtgacatttgccaaagagtcaaggcagagcaccagaggccagctggtctgctacagcccctaccgattcccgagtggaaatgggaagagatcgggatggatttcatcaccggtttgccaagaacccctagcgggtacgactccatttgggtaatcgtggaccgactcacgaaatcagctcatttcgtgccagtgaaaaccacctttgatggaaagaaactagcagaactctacatgacccatgtcgtatgtagatttggctgtcccaagaagatcgtgtcagatcgaggcactcagttcacctcaaggttctggaagcagttgcatgaagccctcggaaccgatctaaatttaagtacgggctaccatccgcagactgatggtcagacagaaagggtaaaccaaatcctagaagacatgctacgtgcgtgtgccttggatttcgaaggcacctgggatcgttgtttgccgtatgcggagttctcatacaacaacagttatcaggctagcatacagatgtcgccgaacgaggcaatgttcggaagaaagtgccgtactcccttgtgctggaatgaggtgggcgaagcgctggtattcggtcttgacatactcaaggcagcagaagaacaagttaagctaatccgagaacgtttaaagacagcgcaaaaccgtcagaagaattacgctgacaatcggaggcgtgaccttgagttcgaaaaaggagatcatgtatacctgcgggtatcacccctccgtggtatgaggaggtttgggatgtccggcaagttagcaccccgctacatcggcccctacctcataaccgccagacgtggcgaagtggcttatcagcttgagttacctgaaggtctcgcagatgtgcacaacgtgtttcacgtgtctcagttgaagaaatgtcttcgagttccagaagagcaagtccctctgggtaatatcgagctggaaaagaatctgacttacaaggaaagaccgaccaaggttcttgaagaggcagaacgtcagactcgaaagaagaccatcaagttctacaaagtccaatag

SEQ ID NO: 15448 - DNA, 5556 bp, Oryza sativa
  Clone ID: TFbOSC17191j.C1.o1.fg
atggcagtgaacgccagtttcagttcccacggttttggtgagggtcaccacgtcgctcagcttcgtgacctcgcccgtttccttggcttctcgtgtcccgagtacacggggtactccgtggaccgtgttccccctcactgtgagctctctgtgtacctttacccccgtggaggtatacacggagctggccttcgcccacaccacttcactgtagccaggcccactctccagatcgcgtaccaggacctctcctggactgcgcttcgtcgcctggcccacgactacagccaccgtctcggaggctccgccttccggcagcttccacgccttccttctggccactcagacgccaggtacccttgtccgtacagcgagtctcagccagtgctgactcgcatggttgagctttcggaggctcaggccactcagcacgacctactccttgaggcttaccgctcccttgcccgccgctacgccgccttggaggcccgtctggccgaggagggtgtcacctcagttgacactatctcctgggactcaggccgcctctgccacgccagccacctgtcctcccacagctcccgcggctctgcccgcactcccagtggcccgcgctcccccagctcgcgtgcgccgtactcaccagtgtactcgccctacccacacccagttagcccttcctacaccccaggacacaccccagttgcttcctcctgccgtggcccacgctttatccgcactgcgcggaagcgtgttgttggttctgccaccgtgttccgtttccactacccagctcccctaccgccagcggcccgtgctgctgccggccctcgacagatggctagccgcccccgccgtgcagctcgtgcaccagcccgctttggttttgaggatggtagagttgagccagaagaaaatcatgaatcagctaatgagcagtctcaccacagcaaccgttcgcatcgtactgtttcccgcaacgcagaggttgagcaaccccgccgcagcagccgctcgcatcgcacagtttcccgtgatgcagagatgggacagtctcaccgctctcaccgcactgccagtcacaattctggagaagaacgcctccctttcccacctcatgtggaaaccaacatgcaacacttaatggcagttcagacacaaatcttgcaaggactaaccacagccatagccagttttcagcataatgcgcatggaaatggccaccctcacatgggcaacaacagatccaagctgacagactttctgaggtctcgtccgccagagttctctcagaccgtcgagcccgtcgaggctgacgattggttgaaagatgttgatagaaaactcaacttagtgcagtgtactcctgttgagaagatgctctacgcctctcaccaactaagaggacctgccgcagattggtgggagaattactgcaatgcacaccctgaacccactaacattgcttgggatgagttcgctacggctttccgtgcagctcatgtgcctgaaagcactattgacatgaagaaagaagaattcaacagacttaagcaaggcaacagcagtatcaatgagtacctaagtcagttcaacaagttggctcggtatgcccctgaggaagtggacacagacaagaagaagatcaggaaattcttgaaaggaatcgcagttggaatgagactccagttgcttgctcatgacttccccacttttcaacatatgatcaacaaggcacttctacttgaggatgccagaaaagaggctaccgaagaatacaagaaacgcaagtctaaccatcagggaaattctttccgaggcgcacctcgccctcgctacggtcaacccatgcaataccaccagtcggtcactcaggctaaccgccagccaggctacgcccctcgtcctcagataaaccgtccggcacctcagccacagcagcgtgcccctagtggcaatactgcgcctaacagtgttatctctttcaagtcaccgcagggaccgtcagcagttcagtgtttccggtgcaaccagatgggtcactatgctagacagtgtcctcagaatcctaccaacaccaactcagggcatgctaatggcagcactgccagaactcctactccagcggcagctcagtctcgtcctagctctcaggcaagtggacaaggttcacgtgcttccaacaactttggtcgaggccgtgtgaatcacattcaagctgaaaccgctcaggatgctccagacgttgtgatgggtatgttctctgttaactccgtacccgcaatagttctgttcgattcgggagcttcccattctttcatatcgcaagcttttgtgaaaagaaatggttggaaaacccaaaatttgcgtgtaccaatgatagtacattcccctggaaggaatataagggcaactcaaatatgcccggaagttaaccttagaattgaggaagttgacttcctagccaaaccgatagtcctagactcgcaaagcttggacatcattctagggatggattggttggctaagcacaaaggacagatagattgtgccgaaaagtccatcaccttgcaaggacctggaggaaagcaagtccgctttacccctaacacccctaccgcaagtcggtctatcctaacctgtttacaagtcacctccttggagtcggtgcccatagtctgtgaatatcccgacgtatttccggaagaattaaaaagaatgccaccagaccgagagatcgagttcgccatagaactggcaccaggcacagctccaattgcaaaaagaccctaccgaatggcagctaatgagttagcagaagttaaaagacaaatcgaagagttggagagtaaaggttatgtgcgacctagctcatccccttggggagccccagtgcttctggttaagaaaaaggatggctctgagagaatggtaatcgactatagagccctgaatgaagtaactataaagaacaagtacccgttgccacggattgacgatttattcgatcaacttaaaggagcaagagtcttctcaaaaattgacttgaggtcaggttaccatcaactgaaaatcagatctgaagatattccgaagaccgctttctcaacgcgttatggtctatatgagttcacagtaatgtccttcggactcaccaatgctccagcattcttcatgaacttaatgaacaaaatctttatggaatacctggaccagtttgtcgtggtattcatcgataacatcctgatatactccaagaacgaggaggaacatgctgaacacctgaggcggataatggaaaagctcagagatcatcaactattcgcaaaattctcgaagtgcgaattctggttagaccgagtagcatttcttggacacgtgatctcgtccaacggtgtcgaagtagatcccagcaaggttgaagctgtacttgcttggaacccgcccaagaatgtgtcagagattcgcagcttccttggcttagcgggatattatcgaagattcattgaaggattctctaagctagccagacctatgaccgagctgttaaagaaggaaaagaaatttcaatggtctgcagcctgtgaagacagcttccaagaattgaagaaaaggttgaccactgccccagttctcaccttgccagatatccgaaaagatttcgagatcttctgtgacgcatcaagacaaggcttaggatgtgtcctaatgcaagaacaaaaggttgtggcctatgcatccaggcagctcaggcctcatgaagccaattatcccacccatgatctcgagttggcagccgtggttcatgctcttaagatctggaggcactatttaatcgggaacagatgtgaagtatacaccgatcacaaaagtcttaagtatatcttcactcagaccgagttaaatatgagacagagaaaatggttggaactaatcaaggattacgatcttggaatccactatcatcctggtaaagccaacgtggtcgctgatgcgctaagtcacaaggcctattgcaatgtagctcaaatacggcctgaccaagatcacctgtgcagagaattggagaagttaagactgaccgtggtacagtcaggtgtccctgccagcttgacagtacagcctaccctagagtcgcaaatccgggaggctcagaaagacgacgaagggataaaagaattaataaaaagaatacaggagaagaaagacaccaatttctccatagacgataaaggcacagtttggtgcggaccacgcatctgtgtaccggccaagaaggagttaagagatctcatcctaaaggaagctcatgagtccgcctactccattcacccaggaagtacgaagatgtaccaagatatcaaggcatacttctggtgggctggaatgaagcgagacgtcgcagaatacgtagccctgtgtgacatttgccaaagagtcaaggcggaacatcagaggccagctggtctgctgcaacccctaccgattcccgagtggaaatgggaagagatcggaatggatttcatcaccggtttgccaagaacccccagcgggtacgactccatctgggtaatcgtggaccgactcacgaagtcagctcatttcgtgccagtgaaaaccacctatgatggaaagaaactagcagaactctacatgactcatgtcgtatgtagatttggctgtcccaagaaaatagtgtcggatcgaggcactcagttcacctcaaggttctggaagcagttgcatgaagccctcggaactgatctaaattttagtacggcctaccatccacagaccgatggtcagacggaaagggtaaaccaaatcctagaagacatgctacgtgcgtgtgccttggatttcgaaggcacttgggatcgttgtttgccgtatgctgagttctcatacaacaacagttatcaggccagcattcagatgtcgccgaatgaggcaatgttcggaagaaagtgccgcacccccttgtgctggaatgaggtgggcgaagccctggtattcggtcctgacatactcaagtcagcagaagaacaagttaagctgatccgagagcgtttaaagacagcgcagaaccgtcagaaaaattacgcagacaatcggagacgtgaccttgagttcgaaaagggagatcatgtgtacctgcgagtatcacccctccgtggtatgagaaggtttgggatgtccggcaagttagcaccccgctacatcggtccctacctcataaccgccagacatggcgaagtggcttatcagcttgagctacctgaaggtctcgcagatgtgcacaacgtgttccacgtatcccagttaaagaaatgtcttcgagttccagaagagcaagttcccctgggtaatatcgagctggaaaagaatctgacctacaaggaaagaccgatcaaggttcttgaagaggtagaacgtcagactcgaaggaagaccatcaagttctataaagtccaatggagcaatcattccgaagacgaggcaacctgggagcgagaagatcttctccgcgccgagttcccggacctgctcccttag

SEQ ID NO: 15449 - DNA, 4212 bp, Oryza sativa
  Clone ID: TFbOSC19655j.C1.o3.gm
atggcgcccccaatcgccgggaacggacgcgccaaccgtctctccctcctcgccggagcgtcgtccggtcgcgccgtcgcctcctccagcatcgcagctgcctccccttccccggcttgccctccgtttcccgcggagacccccggagctgcgttcccgccgtcgcccttccctttcatccgcgtcggccgcctccagccgcctctatctccctgcctgagcgccggtcgacgtcgccaccacctccctcgactccgcgacgccgccctcatccccggcatctcctcctcctcgcccgaatttcgccggaacaccgtcgcccgcgccggcttctccttcctcctcggcggcatctcctccggctgcccctttcgccatgcccatgcgtcagccggcgctgccgtcccctccctcggcacgccgcggcaccaccacctccggcatcgcagcggcaaggtcgcccttggcctcgcttcccctccatccaaacccctccgcggtccatcatcgtcgtctccgatcgttctcgtcgtcgacgtcccatcggtcacccggctcgtcgtctcgcggcgccgcctccgtcgtcggcatcgcagcggcgtggtccacgccgtcgtcggctgccctcatcgtctcctcgccggccccgcccccgtcatcgtcttcgtcctcgcctccgcgtcgtcaagcctcgtgccggccgcgtctcgccgtcgtccaaggatcgccgccgaagtcgttccctcgccgtctgtctccgccgcgcctctttcgtcgttccggaggttcccgaagcgtggttcgtggtcgtcgccgaagaccgtcgagcccgtcgaggctgacgattggttgaaagatgttgatagaaaactcaacttagtgcagtgtactcctgttgagaagacgctctacgcctctcaccagctaagaggacctgctgcagattggtgggagaattactgcaatgcacatcctgaacccactaacattgcttgggatgagtttgctacggctttccgtgcagctcatgtgcctgaaagcactattgacatgaagaaagaagaattcaacagacttaagcaaggcaacagcagtgtcaatgagtacctaagtcagttcaacaagttggctcggtacgcccctgaggaagtagacacagataagaagaagatcaggaaattcttgaaacgaatcgcagttggaatgagactccagttgcttgctcatgacttccccacttttcaacatatgatcaacaaggcacttctgcttgaggatgccagaaaagaggctaccgaagaatacaagaaacgcaagtctaaccatcagggaaattcttcccgaggcacacctcgccctcgctacggtcaacccatgcaataccaccagtcggtcactcaggctaaccgccagccaggctacgcccctcgccctcagatgaaccgtccgacacctccgccacagcagtgtgcccctagtggcaacactgcgccaaacagtgttacctctttcaactcaccacagggaccgtcagtagttcagtgtttccggtgcaaccagatgggtcactatgctagacagtgccctcagaatcctaccaacaccaacttagggcatgctaatggcagcatcgccaaaactcctactccagcggcagctcagtctcgtcctagctctcaggcaagtggacaaggttctcgtgcttccaaccactttggtcgaggacgtgtgaatcacattcaagctgaaaccgctcaggatgctccagacgttgtgatggaagaattaacgagtatgccaccagaccgagagattgagttcgccatagaactggcaccagggactgcaccaattgcaaaaaggccataccgaatggcagctaatgagttagcagaagttaaaagacaaatcgaagaactggaaagtaaaggttatgtgcgacctagctcatccccttggggagccccagtgcttctggttaagaaaaaggatggctcggagagaatggtaatcgactatagagccctgaatgaagtaactataaagaacaagtacccgttgccacggattgacgatttattcgatcaacttaaaggagcaagagttttctcaaaaattgacttgaggtcaggttaccaccaactgaaaatcagatctgaagatatcccgaagaccgctttctcaacgcgttatggtctatatgagttcacagttatgtccttcggactcaccaatgctccagcattcttcatgaacttaatgaacaaaattttcatggaatacctagaccagtttgtcgtggtgttcatcgatgacatcctgatatactccaagaacgaggaagaacatgctgaacacctgaggctgataatggaaaagctcagagatcatcaactattcgctaaattctcgaaatgggaattctggttggaccgagtagcatttcttggacacgtgatctcctctaacggtgtcgaagtagatcccagcaaggttgaagctgtacttgcttggaacccgcccaagaatgtgtcagagatccgcagcttccttggcttagcgggatattatcgaagattcattgaaggattctctaagctagccagacctatgaccgagctgttaaagaaggaaaagaaatttcactggtctacagcctgtgaagacagctttcaagaaatgaagaaaaggttgaccactgcaccagttctcaccttgccagatatccgaaaagattttgagatcttctgtgacgcatcaagacaaggcttaggatgtgtcctaatgcaagaacgaaaggttgtggcatatgcatccaggcagcttaggcctcatgaagtcaattatcccacccatgatctcgagttggcaaccgtggagaagaaagacaccaacttctccatagacgatcaaggcacagtttggtgcggtccacgcatctgtgtaccggccaagaaggagttaagagatctcatcctaaaggaagctcatgagtccgcttactccattcatccaggaagtacgaagatgtaccaagatatcaaggcatacttttggtgggttggaatgaagcgagatgtcacagaatacgtagccttgtgtgacatttgccaaagagtcaaggcagagcatcagaggccagccggggacgttgggcccgagggtgatgtgttcgccctcctcttagtccccccgagggggtcgagccgcacccgcctcggccccgagggccgaggcgccccgacccctcgtgggttttcgctccgcgtgtatgggttagacagccatgattccgcgtcgcgcctgctcccggcgaaagtggagattgggagcttggagtctcacctagggtccccggccgaaccggcaaaggggggcctgcgcggtctcccggtgaggagccccacgctccgtcacctaccgattcccgagtggaaatgggaagagatcggaatggatttcatcaccggtttgccaagaacccccaacgggttctggaagcagttgcatgaagccctcggaactgatctaaattttagtacggcctaccatccacagaccgatggtcagacggaaagggccagcattcagatgtcgccgaatgaggcaatgttcggaagaaagtgccgcacccccttgtgctggaatgaggtgggcgaagcactggtattcggtcctgacatactcaagtcagcagaagaacaagttaagctgatacgagaacgtttgaagacagcacagaaccgtcataagaattacactgacaatcggaggcgtgaccttgagttcgaaaagggagatcatgtgtacctgcgggtatcacccctccgtggtatgagaaggtttgggatgtccggcaagttagcaccccgctacatcggcccctacctcataaccgccagacgtggcgaagtggcttatcagcttgagctacctgaaggtctcgcagatgtgcacaacgtgttccacgtatcccagctaaagaaatgtcttcgagttccagaagagcaagttcccctgggtaatatcgagctggaaaagaatctgacctacaaggaaagaccgatcaaggttcttgaagaggcagaacgtcagactcgaaggaagaccatcaagttctacaaagtccaatggagcaatcattctgaagatgaggcaacctgggaacgagaagatcttctccgcgccgagttcccggacctgctcccttag

SEQ ID NO: 15450 - DNA, 1589 bp, Oryza sativa
  Clone ID: TFbOSC2188j.C1.o1.fg
atgcaatatcaccagtcagtcactcaggctaaccgccagccaagctatgcccctcgtcctcagatgaatcgtctggcacctcagccgcagcagcgtgccccaagtggcaataccgcgccaaacagtgttacctctttcaagtcaccgccaggactatcagcagttcagtgtttccggtgcaaccagatgggtcactatgccagacagtgccctcagaatcttaccaactccaactcagggcataccaatggcagcaccgccagaactcctactcctgcagcagctcagtcccgtcctagcacgcaggcaagtggacaaggttcccgtgcttccaacaactttggtcgagaccgagtgaaccacattcaagccgagaccgctcaggacgctccagacgttgttatgggtatgttctctgtcaactccgcacccgcaatagttctgtttgattcaggagcatcccattctttcatatcgcaagcttttgtgaaaagaaatggttggaaaacccaaaatttgcgagtaccaatgatagtacattcccctggaagggatataagggcaactaaaatatgctcggaagttaaccttagaattgaggaagttgacttcctagccaaaccgatagtcctagactcgcaaagcttggacatcattcttgggatggattggttggctaagcacaaaggacagatagattgtgccgaaaggtccatcaccttgcaaggacctggaggaaagcaagttcgctttacccccaacactcttactgcaagtcggtctatcctaaccagtttgcaagccacttctttggaatcggtacccatagtctgtgaatatcccgacgtatttccaaaagaattaacggaaatgccaccaaaccgagagattgagttcgccatagaactggcactaggcaccgcaccaattgcaaaaagtccctaccgaatggcagctaatgaattagcagaagtcaaaaagcagatcgaagaattggagagtaaaggttatgtgcgacctagctcatccccttggggagccccagtgcttctggttaagaaaaaggatggctctgagagaatgttgaaaatcagatatgaagatatcccgaagaccgctttctcaacgcgctatgggctgtatgagttcacagtgatgtccttcggactcaccaatgctccagcattcttcatgaacctgatgaacaaaatcttcatggagtacctggaccagtttgttgtggtattcatcgatgacatcctgatatactccaagaatgaggaagaacatgttgaacacctgaggctgataatggagaagctaagagatcatcaattgttcgctaagttctcaaaatgcgaattctggctggaccgagtagcattccttggtcacgtgatctcctctaacggtgtcgaagtagatcccagcaaggttgaagctgtccttgcttggtatcctcccaagaatgagtcagagatccgcagtttccttggcctagctggttactatcgaagattcatcgaagggttctctaagctagccagacctatgaccgagctgttaaagaaggaaaagaagtttgaatg

SEQ ID NO: 15451 - DNA, 3246 bp, Oryza sativa
  Clone ID: TFbOSC23559j.C1.o4.gm
atgcagagatggaacagtctcaccgctctcaccgcactgccagtcacaattctggagaagaacgcctcccttccccacctcataccgtcgagcccgtcgaggctgaaagatgttgatagaaaactcaacttagtacagtgtactcctgttgagaagacgctctacgcctctcaccagctaagaggacctgctacagattggtgggagaattactgcaatgcacaccctgaacccactaacattgcttgggatgagtttgcgacggctttccgtgcagctcatgtacctgaaagcaccattgatatgaagaaagaggaatttaacaggcttaagcaaggcaacaacagtgtcaatgagtacctaagtcagttcaacaaattggctcggtatgcccctgaggaagtggacacagacaagaagaagatcaagaagttcttgaagggaatcgcagttggaatgagactccagttgcttgctcatgacttccccacttttcaacatatgatcaataaggcacttctacttgaggatgccagaaaagaggctaccgaagaatacaagaaacgcaagtctaaccatcagggaaattcttcccgaggcgcacctcgccctcgctatggtcaacccatgcaatatcaccaatcggtcactcaggctaaccgccagccaggctacgcccctcgtcctcagatgaaccgtccggcaccccagccacagcagtgtgcccctagtggcaatactgcgccaaacagtgttacctctttcaagtcaccgcagggaccgtcagcagttcagtgtttccggtgcaaccagatgggtcactatgctagacagtgccctcagaatcctaccaacaccaactcagggcatgctaatggcagcactgccaggactcctactccagcggcagctcagtctcgtcctagctctcaggcaagtggacaaggttcacgtgcttccaacaactttggtcgaggccgggtgaaccacattcaagctgagaccgctcaggatgctccagacgttgtgatggaagaattaacgagtatgccaccagaccgagagattgagttcgccatagaactggcgccaagcactgcaccaattgcaaaaagaccataccgaatggcagctaatgagttagcagaagttaaaagacaaatcgaagagttggagagtaaaggttatgtgcgacctagctcatccccttggggagccccagtgcttctggttaagaaaaaggatggctctgagagaatggtaatcgactatagagccctgaatgaagtaactataaagaacaagtacccgttgccacggattgacgatttgttcgatcaacttaaaggagcaagagttttctctaaaattgacttgagatcaggttaccaccaactgaaaatcagaactgaagatatcccgaagaccgctttctcaacgcgttatggtctatacgagttcacagtgatgtccttcggactcaccaatgccccagcattcttcatgaacttaatgaacaaaatctttatggaatacctggaccagtttgtcgtggtgttcatcgatgacatcctgatatactccaagaatgaggaagaacatgttgaacacctgaggctgataatggaaaagctcagagatcatcaactattcgctaaattctcgaaatgcgaattctggttagaccgagtagcatttcttggactcgtgatctccttcaacggtgtcgaagtagatcccagcaaggttgaagctgtacttgcttggaacccgcccaagaatgtgtcagagattcgcagcttccttggcttaactggatattatcgaagattcattgaaggattctctaagctagccagacctatgaccgagctgttaaagaaggaaaagaaatttcactggtctgcagcctgtgaagacagttttcaagaaatgaagaaaaggttgaccactgccccagttctcaccttgccagatatccgaaaagatttcgagatcttctgtgatgcatcaagacaaggcttaggatgtgtcctaatgcaagaacgaaaggttgtggcctatgcatccaggcagcttaggcctcatgaagtcaattatcccacccatgatctcgagttggcagccgtggttcatgctcttaagatctggaggcactatttaatcgggaacagatgtgaagtatacaccgatcacaaaagttttaagtacatcttcactcagaccgagttaaatatgaggcagagaagatggttggaactaatcaaggattacgatcttggaattcataccaccccgtcaggtgtccctgccagcttgacagtacagcctaccctagagtcgcaaatccgagaagctcagaaagacgacgaagggataaaggagttaacaaaaagaatacaagagaagaaagacaccgatttgtccatagacgaccaaggcacagtttggtgcggtccacgcatctgtgtaccggccaaaaaggagttaagagatctcatcctaaaagaagctcatgagtccgcctactccattcatccaggaagtacgaagatgtaccaagatatcaaggcatacttctggtgggctggaatgaagcgagatgtcgcagaatacgtagccttgtgtgacatttgccaaagagttaaggcagaacatcagaggccagctggtctgctgcaacccctaccgattcccgagtggaaatgggaagagatcggaatggatttcatcaccggtttgccaagaacccctagcgggtacgactccatctggaaccgtcagaaaaattacgctgacaatcggaggcgtgaccttgagttcgaaaaaggagatcatgtatacctgcgggtatcacccctccgtggtatgaggaggtttgggatgtccggcaagttagcaccccgctacattggcccctacctcataactgccagacgtggcgaagtggcttatcagctcgagttacctgaaggtctcgcagatgtgcacaacgtgttccacgtatcccagttaaagaaatgtcttcgagttccagaagagcaagtcctcctgggtaatatcgagctggaaaagaatctgacctacaaggaaagaccgatcaaggttcttgaagaggcagaacgtcagactcgaaggaagaccaccaagttctacaaagtccaatggagcaaccattctgaagatgaggcaacctgggagcgagaagatcttctccgtgcagagttcccggagctgctcccctag

SEQ ID NO: 15452 - DNA, 4515 bp, Oryza sativa
  Clone ID: TFbOSC27040j.C1.o1.fg
atggctagccgcccccgccgtgcagctcgtgcaccagcccgctttggttttgaagatggtagagttgaagcagaagcaaatcatgaatcagctaatgagcagtctcaccgcagcaaccgttcgcaccgtactgtttcccgcaacgcagaggttgagcaaccccgccgcagcagccgctcgcatcgcacagtttcccgtgatgcagagatggagcagtctcacctctctcactgcactgtcagtcacaattctggagaagaacgcctcccttccccacctcatgtggaaaacaacatgcaacacataatggcagttcagacacaaatcttgcaaggactaaccacagccatagccagttttcagcataatgtgcatggccaccctcacgtgggcaacaatagatccaagctgacagactttctgaggtcacgtccgccagagttctctcagaccgtcgagcccgtcgaggctgacgattggttgaaagatgttgatagaaaactcaacttagtgcagtgtactcctgttgagaagacgctctacgcctctcaccagctaagaggacctgccgcagattggtgggaaaattactgcaatgcacatcctgaacccaataacattgcttgggatgagtttgctacggctttccgtgcagctcatgtgcctgaaagcactattgacatgaagaaagaagaattcaacagacttaagcaaggcaacaacagtgtcaatgagtacctaagtcagttcaacaagttggctcggtacgcccctgaggaagtagacaccgataagaagaagatcaggaaattcttgaagggaatcgcagttggaatgagactccagttgcttgctcatgacttccccacttttcaacatatgatcaacaaggcacttctgcttgaggatgccagaaaagaggctaccgaagaatacaagaaacgcaagtctaaccatcagggaaattcttcccgaggcgcacctcgccctcgctacggtcaacccatgcaataccaccagtcgatcactcaaactaaccgccagccaggctacgcccctcgtcctcagataaaccgtccggcacctccgccacagcagcgtgcccctagtggcaatactgcgccaaacagtgttacctctttcaagtcaccacagggaccgtcagcagttcagtgtttccggtgcaaccagatgggtcactatgctagacagtgtcctcagaatcctgccaacaccaactcagggcatgctaatggcagcaccgccagaactcctactccagcggcagctcagtctcgtcctagctctcaggcaagtggacaaggttctcgtgcttccaaccactttggtcgaggacgtgtgaatcacattcaagctgaaaccgctcaggatgctccagacgttgtgatgggtatgttctctgtcaactccgtacccgcaatagttctatttgattcaggagcttcccattctttcatatcacaagcttttgtgaaaagaaacggttggaaaacccaaaatttgcgtgtaccaatgatagtacattcccctgggaggaatataagggcaattcaaatatgcccggaagttaaccttagaattgaggaagttgacttcctagccaaaccgatagtcctagactcgcaaagcttggacatcatcctagggatggattggttggctaagcacaaaggacagatagattgtgccgaaaagtccatcaccttgcaaggacctggaggaaagcaagtccgctttacccctaacacccctaccgcaagtcggtctatcctaacctgtttgcaagtcacctccttggagtcggtgcccatagtcagtgaatatcctgacgtatttccagaagaattaacgactaatgagttagcagaagtcaaaagacaaatcgaagagttggagagtaaaggttatgtgcgacctagctcatccccttggggagccccagtgcttctggttaagaaaaaggatggctctgagagaatggtaatcgactatagagccctgaatgaagtaactataaagaacaagtacccgttgccacggattgacgatttattcgatcaacttaaaggagcaagagtcttctcaaaaattgacttgaggtcaggttaccaccaattgaaaatcagatctgaagatattccgaagaccgctttctcaacgcgttatggtctatacgagttcacagtaatgtccttcggactcaccaatgctccagcgttcttcatgaacttaatgaacaaaatcttcatggaatacctggaccagtttgtcgtgaaatgcgaattctggttggaccgagtagcatttcttggacacgtgatttcctccaacggtgtcgaagtagatcccagcaaggttgaagctgtacttgcttggaacccgcccaagaacgtgtcagagatccgcagcttccttggcttagcgggatattatcgaagattcattgaaggattctctaagctagccagacctatgaccgagctgttaaagaaagaaaagaaatttcaatggtctgcagcctgtgaagacagctttcaagaaatgaagaaaaggttgaccactgcaccagttctcaccttgccagatatccgaaaagatttcgagatcttctgtgacgcatcaagacaaggcttaggatgtgtcctaatgcaagaacgaaaggttgtggcctacgcatccaggcagctcaggcctcatgaagtcaattatcccacccatgatctcgagttggcagccatggttcatgctcttaagatctggaggcattatttaatcgggaacagatgtgaagtatacaccgatcacaaaagtcttaagtatatcttcacacagaccgagttaaatatgagacagagaagatggttggaactaatcaaggattacgatctgggaattcattatcatcccggtaaagctaacgtggtcgctgatgcgctaagtcgcaaggcctattgcaatgtagcccaaacacggcctaaccaagatcacctgtgcagagaattggagaagttaaggctgaccgtggtacagtcaggtgtccctgccagcttgacagtacagcctaccctagaatcacaaatccgggaggcccagaaagatgacgaagggataaaagagttaataaaaagaatacgggagaagaaagacaccaatttctccatagacgaacaaggcacagtttggtgcggtccacgcatctgtgtaccggccaagaaggagttaagagatctcatcctaaaggaagctcatgagtccgcctactccattcatccaggaagtacgaagatgtaccaagatatcaaggcatacttctggtgggctggaatgaagcgagacgtcgcagaatacgtagccttgtgtgacatttgccaaagagtcaaggcagagcaccagaggccagctggtctgctacaacccctaccaattcccgagtggaaatgggaagagatcggaatggatttcatcaccggtttgccaagaaccccctgcgggtatgactccatttgggtaatcgtggaccgactcacgaaatcagctcatttcgtgccagtgaaaaccacctatgatggaaagaaactggcagaactctacatgactcatgtcgtatgtagatttggctgtcccaagaaaattgtgtcggaccgaggcactcagttcacctcaaggttctggaagcagttgcatgaaactctcggaactgatctaaattttagtacggcctaccatccacagaccgatggtcagacagaaagggtaaaccaaatcctagaagacatgctgcgtgcgtgtgccttggatttcgaaggcacttgggatcgttgtttgccgtatgctgagttctcatacaacaacagttaccaggctagtattcagatgtcgccaaatgaggcaatgttcggaagaaagtgccgcacccccttgtgctggaatgaggtgggcgaagccctggtattcggtcctgacatactcaagtcagcagaagaacaagttaagctgatccgagaacgcttgaagacagcgcagaaccgtcagaaaaattacgctgacaatcggagacgtgaccttgagttcaaaaaaggagatcatgtgtacctgcgggtgtcacccctccgaggtatgagaaggtttgggatgtccggcaagttagcaccccgctacatcggcccctacctcatagccgccagacgtggcgaagtggcttatcagcttgagctacctgaaggtctcgcagatgtgcacaacgtgttccacgtatcccagttaaagaaatgtcttcgagttccagaagagcaagttcccctgggtagtatcgagctggaaaagaatctgacctacaaggaaagaccgatcaaggttcttgaagaggcagaacgtcagactcgaaggaagaccatcaagttctacaaagtccaatggagcaatcattctgaagatgaggcaaccagggaacgagaagatcttctccgcgccgagtttccggagctgctcccttag

SEQ ID NO: 15453 - DNA, 4974 bp, Oryza sativa
  Clone ID: TFbOSC29124j.C1.o1.fg
atggcagtgaatgccagcttcagttcccacggttttggtgagggtcaccacgtcgctcagcttcgtgacctcgcccatttccttggcttctcgtgtcccgagtacacggggtactccgtggaccgtgttccccctcactgtgagctctctgtgtacctttacccccgtggaggtatacacggagctggccttcgcccacaccacttcaccgtggccaggcccactctccagatcgcgtaccaggatctctcctggactgcgcttcgtcgcctggcccatgactacagccaccgtctcggaggctccgccttccggcagcttccacgccttccttctggccactcagacgctaggtacccttgtccgtacagcgagcctcagccagtgctgactcgcatggttgagctttcggaggctcaggccactcagcacgacctactccttgaggcttaccgctcccttgcccgccgctacgccgccttggaggcccgtctggccgaggagggtgtcacctcagttgacactatctcctgggactcaggccgcctctgccacgccagccacctgtcctcccacagctcccgcggctctacccgcactcccagtggcccgcgctcccccagctcgcgtgcgccgtactcaccagtgtactcgccctacccacacccagttagcccttcctacaccccaggacacaccccagttgcttcctcccgccgtggcccacgctttatccgcactgcgcggaagcgtgttgttggttctgccaccgtgttccgtttccactacccagctcccctaccgccagcggcccgtgctgctgccggccctcgacagatggctagccgcccccgccgtgcagctcgtgcaccagcccactttggttttgaagatggtagagttgagccagaagaaaatcatgagtcggctaatgagcagtctcaccgcagcaaccgttcgcatcgtacagcttcccgtaatgcagaaatggaacagtcccaccgctctcaccacactgtcagtcacaattctggagaagaacgcctcccttccccacctcatgtggaaaacaacatgcaacacttaatggcagttcagacacaaatcttgcaaggtttagccgcagccgtagccggttttcagcataatgcgcatggaaatggccaccctcacatgagcaacaatagatccaagctgacaaactttctgaggtctcgtccgccagagttctctcagaccgtcgagcccgtcgaggctgacgattggctgaaagatgtggatagaaaactcaacttagtgcagtgtactccggttgagaagacgctctacgcctctcaccagctaagaggacctgccgcagattggtgggagaattactgcaatgcacaccctgaacccactaacattgcttgggatgagtttgctacggccttccgtgcagctcatgtgccggaaagcactattgacatgaagaaagaagaattcaacagacttaagcaaggcaacagcagtgtcaatgagtacctaagtatgttcaacaagttggctcggtacgcccctgaggaagtggacacagacaagaagaagatcaggaagttcttgaagggaatcgcagttggaatgagactccagttgcttgctcatgacttccccacttttcaacatatgatcaacaaagcacttctacttgaggatgccagaaaagaggctaccgaagaatacaagaaacgcaagtctaaccatcagggaaattctttccgaggcgcacctcgccctcgctacggtcaacccatgcaatatcaccagtcggtaactcaggctaaccgccagccaggctacgcccctcgtcctcagatgaaccatccggcacctcagccacagcagcgtgcccctagtggcaatactgcgccaaacagtgttacctctttcaagtcaccacagggaccgtcagcagttcagtgtttccggtgcaaccagatgggacactatgccagacagtgtcctcagaatcctaccaacaacaactcagggcatgctaatggcagcactgccagaactcctactccagcggcagctcagtctcgtcctagctctcaggcaagtggacaaggttctcgtgcgtccaacaactttggtcgaggacgtgtgaatcacattcaagctgaaaccgctcaggatgctctagacgttgtaatgggacctggaggaaagcaagtccgctttacccctaacacccctaccgcaagtcggtctatcctaacctgtttacaagtcacctccttggagtcggtgcccatagtctgtgaatatcccgacgtatttccggaagaattaacgagaatgccaccagaccgagagatcgagttcgccatagaactggcaccaggcacagctccaattgcaaaaagaccctaccgaatggcagctaatgagttagcagaagttaaaagcaaattgaagaactggaaagtaaaggttatgtgcgacctagctcatccccttggggagccccagtgcttctggttaagaaaaaggatggctctgagagaatggtcaggttaccaccaactgaaaatcagatctgaagatatcccgaagaccgctttctcaacgcgttatggtctatatgagttcacagttatgtccttcggactcaccaatgctccagcattcttcatgaacttaatgaacaaaatcttcatggaatacctggaccagtttgtcgtggtgttcatcgatgacatcctgatatactccaagaacaaggaagaacatgctgaacacctgaggctgataatggaaaagctcagagatcatcaactattcgctaaattctcgaaatgcgaattctggttggaccgagtagcatttcttggacacgtgatttcctccaacggtgtcgaagtagatcccagcaaggttgaagctgtacttgcttggaacccgcccaagaacgtgtcagagatccgcagtttccttggcttagcgggatattatcgaagattcattgaaggattctctaagctagccagacctatgaccgagctgttaaagaaggagaagaaatttcaatggtctgcagcctgtgaagacagctttcaagaaatgaagaaaaggttgaccactgcaccagttctcaccttgccagatatccgaaaagatttcgagatcttctgtaacgcatcaagacaaggcttaggatgtgtcctaatgcaagaacgaaaggttgtggcctatgcatccaggcagctcaggcctcatgaagtcaattatcccacccatgatctcgagttggcagccgtggttcatgcacttaagatctggaggcactatttaatcgggaacagatgtgaagtatacaccgatcacaaaagtcttaaatatatcttcacacagaccgagttaaatatgaggcagagaagatggttggaactaatcaaggattacgatcttggaatccactatcatcctggtaaagccaacgtggtcgctgatgcgctaagtcgcaaggcctattgcaatgtagctcaaatacggcctgaccaagatcatctgtacagagaattggataagttaaggctgaccgtggtacagtcaggagtccctgccagcttgacagtacagcctaccctagaatcgcaaatccgggaggctcagaaagatgacgaagggataaaagagttaataaaaagaatacaggagaagaaagacgctaatttctccatagacgatcaaggcacagtttggtgcggtccacgcatctgtgtaccggccaagaaggagttaagagatctcatcctaaaagaagctcatgagtccgcctactccattcatccaggaagtacgaagatgtaccaagatatcaaggcatacttctggtgggctggaatgaagcgagatgtcgcagaatacatagccttgtgtgacatttgccaaagagtcaaggcagagcatcagaggccagctggtctgctgcaacccctaccgatccccgggtggaaatgggaagagatcggaatggatttcatcaccggtttgccaagaacccctagcgggtacgactccatctgggtaatcgtggatcgactcacgaaatcagctcatttcgtgccagtgaaaaccacctatgatggaaggaaactagcagagctctacataacccatgtcgtatgtaggtttggttgtcccaagaaaatagtgtcggatcgaggcactcagttcacctcaaggttctggaagcagttgcatgaagctctcggaactgatctaaattttagtacagcctaccatccgcagaccgatggtcagacagaaagggtaaaccaaatcctagaagacatgctgcgagcgtgtgccttggatttcgaaggcacttgggatcgttgtttgccgtatgctgagttctcatacaacaacagttatcaggccagcattcagatgtcgccgaatgaggcaatgtttggaagaaagtgccgcactcccttgtgctggaatgaggtgggcgaagcgctggtattcggtcctgacatactcaagcgtgaccttgagttcgaaaaaggagatcatgtatacctgcgggtatcacccctccgtggtatgaagaggtttgggatgtccggcaagttagcaccccgctacatcggcccctacctcataaccgccagacgtggcgaagtggcatatcagcttgagctacctgaaggtctcgcagacgtgcataacgtgtttcacgtatcccagttaaagaaatgtcttcgagttccagaagagcaagtccccctgggtaatatcgaactggaaaagaatctgacctacaaggaaagaccgatcaaggttctggaagaggcagaacgtcagactcgaaggaagaccatcaagttctacaaagtccagtggagcaatcattctgaagatgaggcaacctgggagcgagaagatcttctccgcgccgagttcccggagctgctcccttag

SEQ ID NO: 15454 - DNA, 4974 bp, Oryza sativa
  Clone ID: TFbOSC31735j.C1.o1.np
atgactgtactcctactctgtaataaagagacctctgttgctatgatattctgtcttcctgtgataccagcattgtttcctgggactggtatcgatgaacagatggcagtgaacgccagcttcagttcccacggttttggtgagggtcaccacgtcgctcagcttcgtgacctcgcccgcttccttggcttctcgtgtcctgagtacacggggtactctgtggaccgtgttccctctcgttatgagctttcggtgtacctttaccctcgtggaggtatacacggggctggccttcgcccacaccacttcactgtggccaggcccactctccagatcgcccaccgcctcgggggctctgcctttcggcagctcctgcgccttccttctggccgcactgacactaggtacccttgcccgtacagcgagtctcagcctgtgctgactcgcatggttgagctctctgaggctcaggccacccagcacgaccttctccttgaggcttaccgctcccttgctcgccgctacgctgctttggaggcccgcctggccgaggagggtgtcacctcagttgacactgcctcttgggacttaggtcgcctctgccacgccagccacctgtcttcccacagctcccgcggctctgttcgcactcccagtggcccgcgcacccccagttcgcgtgtgccgtactccccagtgcactctccctaccctcacccagttagcccttcctacactcctggtcacaccccagttgcttcctcctgccgtggcccacgctttatccgcactgtgcggaagcgtgttgttggttcttccactgtgttccgctttgaccacccagctcgcccaccgccagcagcccgtgctgctgccggccctcgacaagttccgccgatctcttcgcgtcagccgatcgacgtctcttcgactgaggagccgactacaggagcccatttcggttttgaggaaggtagagttgagccagaagcaaatcatgagtcagctaatgagcagtctcaccacagcaaccgttcgcaccatactgcttcccgcaatgcagaagttgagcaaccccaccgcagcaaccgctcgcaccgcacagtttcccgtaatgcagaagtggaacagtctcaccgctctccccgcgctgccattcacaattctagggaagaacgcattccttccccaccccatgttgagaacaacatgcagcacttgatggcagttcagactcaaatcttgcaaggtttagccacagccatagccggtattcagcacaacgcgcatggaaatggccatccccacacgggcaacaacagatctaagctgacagactttctaaggtctcgtccgccagagttctcccagaccgtcgagcccgttgaggctgacgattggctgaaagatgttgagagaaaactcaacttagtgcagtgtactcctgttgagaagacgctctacgcctctcaccagctaagaggacctgctgcagattggtgggagaattattgcaacgcacaccccgaacccactaacattccatgggatgaattcgctgcagctttccgtgcagctcatgtgcctgaaagcactattgacatgaagaaggaagaatttaacaggctcaagcaaggcaataccagtgtcaatgagtatatgagtcagttcaacaagttggctcgatacgctcctgaggaagtggacacagacaagaagaagatcaggaagttcttgaaaggagtcacaagacttctacttgaggatgccagaaaagaggctaccgaggagtataagaaacgcaagtctacccatcagggaaattcttcccgaggggaacctcgccctcgctttggacaacccatgcaatatcaccagtcagtcactcaggctaaccgccagccaagctatgcccctcgtcctcagatgaatcgtctggcacctcagccgcagcagcgtgccccaagtggcaataccgcgccaaacagtgttacctctttcaagtcaccgccaggactatcagcagttcagtgtttccggtgcaaccagatgggtcactatgccagacagtgccctcagaatcttaccaactccaactcagggcataccaatggcagcaccgccagaactcctactcctgcagcagctcagtcccgtcctagcacgcaggcaagtggacaaggttcccgtgcttccaacaactttggtcgagaccgagtgaaccacattcaagccgagaccgctcaggacgctccagacgttgttatgggtatgttctctgtcaactccgcacccgcaatagttctgtttgattcaggagcatcccattctttcatatcgcaagcttttgtgaaaagaaatggttggaaaacccaaaatttgcgagtaccaatgatagtacattcccctggaagggatataagggcaactaaaatatgctcggaagttaaccttagaattgaggaagttgacttcctagccaaaccgatagtcctagactcgcaaagcttggacatcattcttgggatggattggttggctaagcacaaaggacagatagattgtgccgaaaggtccatcaccttgcaaggacctggaggaaagcaagttcgctttacccccaacactcttactgcaagtcggtctatcctaaccagtttgcaagccacttctttggaatcggtacccatagtctgtgaatatcccgacgtatttccaaaagaattaacggaaatgccaccaaaccgagagattgagttcgccatagaactggcactaggcaccgcaccaattgcaaaaagtccctaccgaatggcagctaatgaattagcagaagtcaaaaagcagatcgaagaattggagagtaaaggttatgtgcgacctagctcatccccttggggagccccagtgcttctggttaagaaaaaggatggctctgagagaatgttgaaaatcagatatgaagatatcccgaagaccgctttctcaacgcgctatgggctgtatgagttcacagtgatgtccttcggactcaccaatgctccagcattcttcatgaacctgatgaacaaaatcttcatggagtacctggaccagtttgttgtggtattcatcgatgacatcctgatatactccaagaatgaggaagaacatgttgaacacctgaggctgataatggagaagctaagagatcatcaattgttcgctaagttctcaaaatgcgaattctggctggaccgagtagcattccttggtcacgtgatctcctctaacggtgtcgaagtagatcccagcaaggttgaagctgtccttgcttggtatcctcccaagaatgagtcagagatccgcagtttccttggcctagctggttactatcgaagattcatcgaagggttctctaagctagccagacctatgaccgagctgttaaagaaggaaaagaagtttgaatggtcagcagcctgtgaagacagctttcaagaaatgaagaaaagattgaccactgccccagttctcaccttgccagatatccgaaaagatttcgaaatcttctgtgatgcatcaagacaaggcttaggatgtgtcctaatgcaagagcgaaaggttgtggcctacgcatccaggcagcttaggcctcacgaagtcaactatcccacccatgatctcgagttggcagccgtggttcatgctcttaagatctggaggcactatttaatcgggaacagatgtgaagtatacaccgatcacaaaagtcttaagtacatcttcactcagaccgagttaaatatgaggcagagaagatggttggaactaatcaaggattacgatcttggaattcattaccatcccggtaaagctaatgtggtcgctgatacgctaagtcgcaagacctattgcaatgcagctcaaatatggccagaccaagatcgcctgtgcagagaattggagaagttaaggctgaccgtggtgcagtcaggtgtccctgccagcttgacagtgcagcctaccctagaatcgcaaatccgggaagctcagaaagatgatgaagggataaaagagctaataaaaagaatacagaagatgaaggacaccgatttctccatagacgatcaaggcacagtttggtgcggtccacgcatctgtgtaccggccaagaaggagttaagagacctcattttaaaagaagctcatgagtccgcctactccatctatccaggaagtacgaagatgtaccaggatatcaaggcatatttctggtgggttggaatgaagcgagatgtcgcagaatacgtagccctttgtgacatttgccagagagtcaaggcagagcatcagaggccagctggtctgctgcaacccctaccgattcccgagtggaaatgggaagagatcggaatggatttcataaccggtttgccaagaacccctagcgggtacgactccatctgggtaatcgtggatcgactcacgaaatcggcacatttcgtgccagcgaaaaccacctttgatggaaagaaactggcagaactctacatgacccatgtcgtgtgtcgatttggttgtcccaagaagattgtgtcggatcgaggcactcagttcacctcaagttatcaggccagcattcagatgtcgccgaatgaggcaatgttcggaagaaagtgccgcactcccttgtgctggaataaggttggcgaagcactggtgttcggtcctgacatactcaaggcagcagaagaacaagttaagctgatccgacaatgtttaaagacaactcagaaccgtcagaagaattacgctgacaatcggaggcgtgaccttgagtttgaaaaaggagatcttgtgtacttgcgggtatcacctctccgtggaatgaggaggtttgggatgtccggcaagttagcaccccgctacatcggcccctacctcataaccgccagacgtggtgtcacgccccgaactagccccgagcggaac

SEQ ID NO: 15455 - DNA, 4721 bp, Oryza sativa
  Clone ID: TFbOSC33740j.C1.o1.np
atggctagccgcccccgccgtgcagctcgtgcaccagcccgctttggttttgaagatggtagagttgaagcagaagcaaatcatgaatcagctaatgagcagtctcaccacagcaaccgttcgcaccgtactgtttcccgcaacgcagaggttgagcaaccccgccgcagcaaccgctcgcatcgcatagttttccgtaatgcagagatggaacagtctcaccgctctcaccacactgccagtcacaattctggagaagaacgcctcccttccccacctcatgtggaaaacaacatgcaacacataatggcagttcagacacaaatcttgcaaggaataaccacagccatagccggttttcagcataatgcgcatggaaatggccaccctcacgtgggcaacaatagatccaagctcacagactttctgaggtcacgtccgccagagttctctcagaccgtcgagcccgtcgaggctgacgattggttgaaagatgttgatagaaaactcaacttagtgcagtgtactcctgttgagaagacgctctacgcctctcaccagctaagaggacctgctgcagattggtgggagaattactgcaatgcacatcctgaacccactaacattgcttgggatgagtttgctatggctttccatgcagctcatgtgcctgaaagcactattgacatgaagaaagaagaattcaacagacttaagcaaggcaacagcagtgtcaatgagtacctaagtcagttcaacaagttggctcggtacgcccctgaggaagtagacacagataagaagaagatcaggaaattcttgaagggaatcgcagttggaatgagactccagttgcttgctcatgacttccccacttttcaacatatgatcaacaaggcacttctgcttgaggatgccagaaaagaggctaccgaagaatacaagaaacgcaagtcgcaagtctaaccatcagggaaattcttcccgaggcgcacctcgccctcgctacggtcaacccatgcaataccaccagtcggtcactcaggctaaccgacagccaggctacgcccctcgtcctcagatgaaccgtccggcacctccgccacagcagcgtgcccctagtggcaacactgcgccaaacagtgttacctccttcaagtcaccacagggaccgtcagcagttcagtgtttccggtgcaaccagatgggtcactatgctagacagtgccctcagaatcctaccaacaccaactcagggcatgctaatggcagcaccgccagaactcctactccagcggcagctcagtctcgtcctagctctcaggcaagtggataaggttctcgtgcttccaaccactttggtcgaggacgtgtgaatcacattcaagctgaaaccgctcaggatgctccagacgttgtgatgggtatgttctctgtcaactccgtacccgcaatagttctatttgattcaggagcttcccattctttcatatcacaagcttttgtgaaaagaaatggttggaaaacccaaaatttgcgtgtaccaatgatagtacattcccctgggaggaatataagggcaactcaaatatgcccggaagttaaccttagaattgaggaagttgactttctagccaaaccgataatcctagactcgcaaagcttggacatcatcctagggatggattggttggctaagcacaaaggacagatagattgtgccgaaaagtccatcactttgcaaggacctggaggaaagcaagtccgctttacccctaacacccctaccgcaagtcggtctatcctaacctgtttacaagtcacctccttggagtcggtgcccatagtctgtgaatatcccgacgtatttccagaagaattaacgagtatgccaccagaccgagagattgagttcgccatagaactggcaccaggcacagctccaattgcaaaaagaccctaccgaatggcagctaatgagttagcagaagtcaaaagacaaatcgaagagttggagagtaaaggttatgtgcgacctagctcatctccttggggagccctagtgcttctggttaagaaaaaggatggctctgagagaatggtaatcgactatagagccctgaatgaagtaactataaagaacaagtacccgttgccacggattgacgatttattcgatcaacttaaaggagcaagagttttctcaaaaattgacttgaggtcaggttaccaccaactgaaaatcagatctgaagatatcccgaagaccgctttctcaacgcgttatggtctatatgagttcacagttatgtccttcggactcaccaatgctccagcattcttcatgaacttaatgaaccaaatcttcttggaatacctggaccagtttgtcgtggtgttcatcgatgacatcctgatatactccaagaacgaggaagaacatactgaacacctgaggctgataatggaaaagctcagagatcatcaactattcgctaaattctcgaaatgcgaattctggttggaccgagtagcatttcttggacacgtgatttcctccaacggtgtcgaagtagatcccagcaaggttgaagctgtacttgcttggaacccgcccaagaacgtgtcagaaatccgcagcttccttggcttagcgggatattatcgaagattcattgaaggattctctaagctagccagacctatgaccgaactgttaaagaaggaaaagaaatttcaatggtctgcagcctgtgaagacagctttcaagaaatgaagaaaaggttgaccactgcaccagttctcaccttgccagatatccgaaaagatttcgagatcttctgtgacgcatcaagacaaggcttaggatgtgtcctaatgcaagaacgaaaggttgtggcctatgcatccaggcagctcaggcctcatgaagtcaattatcccacccatgatctcgaattggcagccgtggttcatgctcttaagatctggaggcattatttaatcgggaacagatgtgaagtatacaccgatcacaaaagtcttaaatatatcttcacacagaccgagttaaatatgaggcagagaagatggttggaactaatcaaggattacgatcttggaatccactatcatcctggtaaagccaacgtggtcgctgatgcgctaagtcgcaaggcctattgcaatgtagctcaaatacggcctgaccaagagcatttgtgcagagaattggagaagttaaggctgaccgtggtacagtcaggagtccctgccagcttgacagtacagcctaccctagaatcgcaaatccgggaggctcagaaagatgacgaagggataaaagagttaataaaaagaatacaggagaagaaagacaccaatttctccatagacgatcaaggcacagtttggtgcggtccacgcatctgtgtaccggccaagaaggagttaagagatctcatcctaaaggaagctcatgagtccgcttactccattcatccaggaagtacgaagatgtaccaagatatcaaggcatacttttggtgggctggaatgaagcgagatgtcgcagaatatgtagccttgtgtgacatttgccaaagagtcaaggcagagcatcagaggccagctggtatgctgcaacccctaccgattcccgagtggaaatgggaagagatcggaatggatttcatcaccggtttgccaagaacccccaacgggtacgactccatttgggtaatcgtggaccgactcacgaaatcagctcatttcgtgccagtgaaaaccacctatgatggaaagaaactagcagaactctacatgacccatgtcatgtagatttggctgtcccaagaaaattgtgtcagaccgaggcactcagttcacctcaaggttctggaagcagttgcatgaagccctcggaactgatctgaattttagtacagcctaccatccgtagaccgatggtcagaccgaaagggtaaaccaaatcctagaagacatgctacgtgcgtgtgccttggatttcgaaggcacttgggatcgttgtttgccgtatgccgagttctcatacaacaacagttatcaggccagcattcagatgtcgccgaatgaggcaatgttcggaagaaagtgccgcacccccttgtgctggaatgaggtgggcgaagcactggtattcggtcctgacatactcaagtcagcagaagaacaagttaagctgatacgagaacgtttgaagacagcacagaaccgttagaagaattacgctgacaatcggaggcgtgaccttgagttcgaaaaaggagatcatgtgtacctgcgggtatcacccctccgtggtatgagaaggtttgggatgtccggcaagttagcaccccgctacatcggcccctacctcataacggccagacgtggcgaagtggcttatcagcttgagctacctgaaggtctcgcagatgtgcacaacgtgttccacgtatcccagttaaagaaatgtcttcgagttccagaagagcaagttcccctgggtaatatcgagctggaaaagaatctgacctacaaggaaagaccgatcaaggttcttgaagaggcagaacatcagactcgaaggaagaccatcaagttctacaaagtccaatggagcaatcattctgaagatgaggcaacctgggaacgagaagatcttctccgcgccgagtttccggagctgttccct

SEQ ID NO: 15456 - DNA, 477 bp, Oryza sativa
  Clone ID: TFbOSC34202j.C1.o14.gm
atggggagggaaggagaaggggaggccgggggtttaaggaggcggcaatgtcggtttggggaaccgacttgcgcggtcaagagcgcgagctggcgctcggctagcggccaaattggcgacagggaggatgacgccggcggagaggcgtgcgcagaggctgacggcggcggcgaccgggcggtcggccacgcgcgcgcggctcgcaacgggaaggcgcggcggatggtgcggcgcggctcggcacgcgcgctggctgcggggccgagcggctgcaggctgcagggcggcagggcagcgggaccgggcggcatccacgcgggcgcgcgcgagcaacggcccgcggggagcggcagcgagggatggggagacggagagcgagggggggcgctcggggcggcgcgcgagcagcgaattggattcggagatgaactcgacgatagatcggggattgagatcatgagatggcacgggcactag

SEQ ID NO: 15457 - DNA, 5331 bp, Oryza sativa
  Clone ID: TFbOSC400014j.C1.o36.fg
atggcagtgaacgccagcttcagttcccacggttttggtgagggtcaccacgtcgcccagcttcgtgacctcgcccgtttccttggcttctcgtgtcccgagtacacggggtactccgtggaccgtgttccccctcactgtgagctctctgtgtacctttacccccgtggaggtatacacggagctggccttcgcccccaccacttcactgtggccaggcccaccctccagatcgcgtaccaggacctctcctggactgcgcttcgtcgcctggcccacgactacagccaccgtctcggaggctccgccttccggcagcttccacgtcttccttctggccactcagacgccaggtacccttgtccgtacagcgagtctcagccagtgctgactcgcatggtcgagctttcggaggctcaggccactcagcacgacctactccttgaggcttaccgctcccttgctcgccgctacgccgctttggaggcccgtctggccgaggagggtgtcacctcagttgacactatctcttgggactcaggccgtctctgccacgccagccacctgtcctcccacagctcccgcggctctgctcgcactcccagtggcccgcgctcccccagctcgcgtgcgccgtactcaccagtgtactccccctacccacacccagttagcccttcctacacccccggacacactccagtcgcttcctcccgccgtggcccacgctttatccgcactgcgcggaagcgtgttgttgaggttgagcaacctcgccgcagcagccgctcgcatcgcacagtttcccgtgaagcagagttggagcagtctcaccgccctcaccgcactgccagtcacaattctggagaagaacgcctcccttccccacctcatgtggaaaacaacatgcaacacataatggcagttcagacacaaatcttgcaaggtctaaccacagccatagccagctttcagcataatgcgcatggaaatggccaccctcacatgggcaacaatagatccaagctgacagactttctgaggtcacgtccaccagagttctctcagaccgtcgagcccgtcgaggctgacgattggttgaaagatgttgataggaaactcaacttagtgcagtgtactcctgttgagaagacgctctacgcctctcaccagctaagaggacctgccgcagattggtgggagaattactgcaatgcacaccctgaacccactaacattgcttgggatgagttcgctacggctttccgtgcagctcatgtgcctgaaagcactattgacatgaagaaagaagaatttaacagacttaagcaaggccacagcagtgtcaatgagtacctgagtcagttcaacaagttggctcggtacgcccctgaggaagtagacaccgataagaaaaagatcaggaaattcttgaaagaaatcgcagttggaatgagactccagttgcttgctcatgacttccccacttttcaacatatgatcaataaagcacttctacttgaggatgccagaaaagaggccaccgaagaatacaagaaacgcaagtctaaccatcagggaaattcttcccgaggcgcacctcgccctcgctacggtcaacccatgcaataccatcagtcggtcactcaggctaaccgccagccaggctacgcccctcgtcctcagataaaccgtccggcacctcagccacagaagcatgcccctagtggcaacactgcgccaaacagtgttacctccttcaagtcaccacaaggaccgtcagcagttcagtgtttccggtgcaaccagatgggtcactatgctagacagtgtcctcagaatcctaccaacaccaactcagggcatgctaatggcagcaccgcccgaactcctactccagcggcagctcagtctcgtcctagctctcaggcaagtggacaaggttctcgtgcttccaaccactttggtcgaggacgtgtgaatcacattcaagctgaaaccgctcaggatgctccggacgttgtgatgggtatgttctctgtcaactccgtacccgcaatagttctgtttgatttgggagcttcccattctttcatatcgcaagcttttgtgaaaagaaatggttggaaaacccaaaatttgcgtgtaccaatgatagtacattcccctggaaggaatataagggcaactcaaatatgcccggaagttaaccttagaattgaggaagttgacttcctagccaaaccgatagtcctagactcgcaaagcttggacatcatccttgggatggattggttggctaagcacaaaggacagatagattgtgccgaaaagtccatcaccttgcaaggacctggaggaaagcaagtccgctttacccctaacacccctaccgcaagtcggtctatcctaacctgtttgcaagtcacctccttggagtcggtgcccatagtctgtgaatatcccgacgtatttccggaagaattaacaagaatgccaccagaccgagagatcgagttcgccatagaactggcaccaggcacagctccaattgcaaaaagaccctaccgaatggccgctaatgagttagcagaagttaaaagacaaatcgaagaactggaaagtaaaggttatgtgcgacctagctcatccccttggggagccccagtgcttctggttaagaaaaaggatggctatgagagaatggtaattgactatagagccctgaatgaagtaactataaagaacaagtacccgttgcctcggattgacgacttattcgatcaacttaaaggagcaagagtcttctcaaaaattgacttgaggtcaggttaccaccaactgaaaatcagatctgaagatattccgaagaccgctttctcgacgcgatatggtctatatgagttcacagtaatgtccttcggactcaccaatgctccagcattcttcatgaacttaatgaacaaaatctttatggaatacctggaccagtttgtcgtggtattcatcgatgacatcctgatatactctaagaacgaggaagaacatgctgaacacctgaggctgataatggaaaagctcagagatcatcaactattcgctaaattctcgagatgcgaattctggttggaccgagtagcatttcttggacacgtgatctcctccaacggtgtcgaagtagatcccagcaaggttgaagctgtacttgcttggaacccgcccaagaatgtgtcagagattcgcagcttccttggcttagctggatattatcgaagattcattgaaggattctctaagctagccagacctatgaccgagctgttaaagaaggaaaagaaatttcaatggtctacagcctgtgaagacagctttcaagaaatgaagaaaagattgaccactgccccagttctcaccttgccagatatccgaaaagatttcgagatcttctgtgacgcatcaagacagggcttaggatgtgtcctaatgcaagaacgaaaggttgtggcctatgcatccaggcagctcaggcctcatgaagtcaattatcccacccatgatctcgagttggcagccgtgattcatgctcttaagatctggaggcactacttaatagggaacagatgtgaagtatacaccgatcacaaaagtcttaaatatatcttcacacagaccgagttaaatatgaggcagagaagatggttggaactaatcaaggattacgatcttggaatccactatcatcctggtaaagccaacgtggtcgctgatgcgctaagtcgcaaggcctattgcaatgtagctcaaatacggcctgaccaagatcatctgtgcagagaattggagaagttaaggctgaccgtggtacagtcaggtgtccctgccagcttgacagtacagcctaccctagagtcgcaaatccgggaggcacagaaagacgacgaaggggtaaaagaattaataaagagaatacaggagaagaaagacaccaatttctccatagacgatcaaggcacagtttggtgcggttcacgcatctgtgtaccggccaagaaggagttaagagatctcatcctaagggaagctcatgagtccgcctactccattcatccaggaagtacgaagatgtaccaagatatcaaggcatacttttggtgggctggaatgaagcgagatgtcgcagaatacgtagccttgtgtgacatttgccaaagagtcaaggcagagcatcagaggccagctggtctgttgcaacccctaccgattcccgggtggaagtgggaagagatcggaatggatttcatcaccggtttgccaagaacccccagcgggtacgactccatttgggtaatcgtggaccgactcacgaaatcagctcatttcgtgccagtgaaaaccacctatgatggaaagaaactagcagaactctacatgacccatgtcgtatgtagatttggctgccccaagaaaattgtgtcagaccgaggcactcagttcacctcaaggttctggaagcagctgcatgaagccctcggaactgatctgaattttagtacagcctaccacccgcagaccgatggtcagaccgaaagggtaaaccaaatcctagaagacatgctacgtgcgtgtgccttggatttcgaaggcacttgggatcgttgtttgccatatgccgagttctcatacaacaacagttatcaggccagcattcagatgtcaccgaatgaggcaatgttcggaagaaagtgccgcacccccttgtgctggaatgaggtgggcgaagcactggtattcggtcctgacatactcaagtcagcagaagaacaagttaagctgatccgagaacgtttgaagacagcgcagaaccgccaaaagaattacgctgacaatcggagacgtgaccttgagttcgaaaaaggagatcatgtgtacctgcgggtatcaccactccgtggtatgagaaggtttgggatgtccggcaagttagcaccccgctacatcggcccctacctcataaccgccagacgtggcgaagtggcttatcagcttgagctacctgaaggtctcgcagatgtgcacaacgtgttccacgtatcccagttaaagaaatgtcttcgagttccagaagagcaagttcccctgggtaatatcgagctggaaaagaatctgacctacaaggaaagaccgatcaaggttcttgaaaaagcagaacgtcagactcgaaggaagacaatcaagttctacaaagtccaatggagcaatcattctgaagatgaagcaacctgggaacgagaagatcttctccgcgccgagttttcggagctgctcccttag

SEQ ID NO: 15458 - DNA, 5013 bp, Oryza sativa
  Clone ID: TFbOSC400028j.C1.o11.fg
atggcagtgaactccagcttcagttcccacggttttggtgagggtcaccacgtcgctcagcttcgtgacctcgcccgtttcctcggtttctcgtgtcccgagtacacggggtactccgtggaccgtgttccccctcactgtgagctctctgtgtacctttacccccgtggaggtatacacggagccggccttcgcccacaccacttcaccgtggccaggcccactctccagatcgcgtaccaggacctctcctggactgcgcttcgtcgcctggcccacgactacagccaccgtctcggaggctccgccttccggcagcttccacgccttccttctggccactcagacgccaggtacccttgtccgtacagcgagtctcagccagtgctgactcgcatggttgagctttcggaggctcaggccactcagcacgacctactccttgaggcttaccgctcccttgcccgccgctacgccgctttggaggcccgtctggccgaggagggtgtcacctcagttgacactatctcctgggactcaggccgcctctgtcacgccagccacctgtcctcccacagctcccgtggctctgcccgcactcccagtggtccgcgctcccccagctcgcgtgcgccgtactcaccagtgtactccccctacccacacccagttagcccttcctacacccccggacacaccccagttgcttcctcccgccgtggcccacgctttatccgcaccgcgcggaagcgtgttgttggttcttccaccgtgttccgtttccactacccagctcccccaccgccagcggcccgtgctgctgccggccctcgacagacacaaatcttgcaaggattagccgcagccatagccggttttcagcataatacgcatggaaatggccaccctcacatgagcaacaatagatccaagctgacagactttctgaggtctcgtccgccagagttctctcagaccgtcgagcccgtcgaggctgacgattggctgaaagatgtggatagaaaactcaacttagtgcagtgtactcctgttgagaagacgctctacgcctctcaccagctaagaggacccgctgcagattggtgggagaattactgcaatgcacaccctgaacccactaacattgcttgggatgagtttgctacggctttccgtgcagctcatatgcctgaaagcactattgacatgaagaaagaagaattcaacagacttaagcaaggcaacagcagtgtcaatgagtacctaagtatgttcaacaagttggctcggtacgcccctgaggaagtggacacagacaagaagaagatcaggaaatttttgaaggggatcgcagttggaatgagactccagttgcttgctcatgactttcccacctttcaacatatgatcaacaaggcacttctacttgaggatgccagaaaagaggctatcgaagaatacaagaaacgcaagtctaaccatcagggaaattcttcccgaggcgcacctcgccctcgctacggtcagcccatgcaatatcaccagtcggtaactcaggctaaccgccagccaggctacgcccctcgtcctcagatgaaccatccggcacctcagccacagcagcgtgcccctagtggcaatactgcgccaaacagtgttacctcttttaagtcaccacagggaccgtcagcagttcagtgcttccggtgcaaccagatgggtcactatgccagacagtgtcctcagaatcctaccaacaccaactcagtacatgctaatggcagcactgccagaactcctactccagcgacagctcagtctcgtcccagctctcaggcaagtggacaaggttcacgtgcttccaaccactttggtcgaggacgtgtgaaccatattcaagctgaaaccgctcaggatgctccagacgttgtgatgggtatgttctctgtcaactccgtacccgcaatagttctgtttgattcaggagcttcccattctttcatatcacaagcttttgtgaaaagaaatggttggaaaacccaaaatttacgtgtaccaatgatagtacattcccctggaaggaatataagggcaactcaaatatgcccggaagttaaccttaaaattgaggaagttgacttcctagccaaaccgatagtcctagactcgcaaagcttggacatcatcctaggtatggattggttggctaagcacaaaggacagatagattgtgccgaaaagtccatcaccttgcaaggacctggaggaaagcaagtccgctttacccctaacacccctaccgcaagtcggtctatcctaacctgtttacaagtcacctccttggagtcggtgcccatagtctgtgaatatcccgacgtattcccagaagaattaacgagtatgccaccagaccgagagattgagttcgctatagaactggcaccaggcacggctccaattgcaaaaaggccctaccgaatggcagctaatgagttagcagaagttaaaagacaaatcgaagagttggagagtaaaggttatgtgcgacctagctcatccccttggggagccccagtgcttctggttaagaaaaaggatggctctgagagaatggtaattgactatagagccctgaatgaagtaactataaagaacaagtacccgttgccacggattgacgatttattcgatcaacttaaaggagcaagagttttctcaaaaattgacttgaggtcaggttaccaccaactgaaaatcagatctgaagatatcccgaagaccgctttctcaacgcgttatggtctatatgagttcacagtaatgtccttcggactcaccaatgctccagcattcttcatgaacttaatgaacaaaatctttatggaatacctggaccagtttgtcgtggtgttcatcgatgacatcctgatatactccaagaatgaggaagaacacgctgaacacctaaggctgataatggaaaagctcagagatcatcaactattcgctaaattctcgaaatgcaaattctggttagatcgagtagcatttcttggacacgtgatctcctcccacggtgtcgaagtagatcccagcaaggttgaagctgtacttgcttggaacccgcccaagaatgtgtcagagattcgcagcttcctaggcttagctggatattatcgaagattcattgaagtattctctaagctagccagacctatgaccgagctgttaaagaaggaaaataaatttcactggtctgcatcctgtgaagacagctttcaagaaatgaagaaaaggttgaccactgccccagttctcaccttgccagatatccgaaaagatttcgagatcttctgtgatgcatcaagacaaggcttaggatgtgtcctaatgcaagaacgaaaggttgtggcctatgcatccaggcagctcaggcctcatgaagtcaattatcccacccatgatctcgagttggcagccgtggtgcatgcccttaagatctggaggcactatttaatcgggaacagatgtgaagtatacaccgatcacaaaagtcttaagtatatcttcacacagaccgagttaaacatgagacagagaagatggttggaactaatcaaggattacgatcttggaatccattatcatcctggtaaagccaacgtggtcgctgatgcgctaagtcgcaaggcctattgcaatgtagctcaaatacggcctgaccatgatcacctgtgcagagaattggagaagttaaggctgaccgtggtacagtcaggtgtccctgccagcttgacagtacagcctaccctagagtcgcaaatccgggaggctcagaaagacaacgaagggataaaagaattaataaaaaggaatacaggagaagaaagacaccaatttctccatagacgatcaaggcacagtttgaaggagttaagagatctcatcctaaaggaagctcatgagtccgcctactccattcatccaggaagtacgaagatgtaccaagatatcaaggcatacttctggtgggctggaatgaagcgagatgtcgcagaatacgtagccttgtgtgacatttgccaaagagtcaaggcagagcatcagaggccagctggtctgctgcaacccctaccgattcccgagtggaaatgggaagagatcggaatggatttcatcaccggtttgccaagaacccctaacgggtacgactccatctgggtaatcgtggatcgactcacgaaatcagctcatttcgtgccagtgaaaaccacctttgatggaaagaaactagcagaactctacatgacccatgtcgtgtgtagatttggctgtcccaagaaaattgtgtcggaccgaggcactcagttcacctcaaggttctggaagcagttgcatgaagccctcggaactgatctaaaatttagtacagcctaccatccgcagaccgatggtcagaccgaaagggtaaaccaaatcctagaagacatgctacgagcgtgtgccttggatttcgaaggcacttgggatcgttgtttgccgtacgcggagttctcatacaacaacagttaccaggctagtattcagatgtcgccgaatgaggcaatgttcggaagaaagtgccgcactcccttgtgctggaatgaggtgggcgaagcactgttagcaccccgctacatcggcccctacctcataaccgccagacgtggcgaagtggcttatcagcttgagttacctgaaggtctcgcagatgtgcataacgtgttccacgtatcccagctaaagaaatgtcttcgagttccagaagagcaagtccccctgggtaatatcgaactggaaaagaatctgacctacaaggaaagaccgatcaaggttcttgaagaggcagaacgtcagactcgaaggaagaccatcaagttctacaaagtccaatggagcaatcattttgaagacgaggcaacctgggagcgagaagatcttctccgcgccgagttcccggagctgctcccttag

SEQ ID NO: 15459 - DNA, 5490 bp, Oryza sativa
  Clone ID: TFbOSC400049j.C1.o32.fg
atgcccacggtcatgggcggatgtgagatggcagtgaacgccagcttcagttcccacggttttggtgagggtcaccacgtcgctcagcttcgtgacctcgcccgtttccttggcttctcgtgtcccgagtacacggggtactccgtggaccgtgttccccctcactgtgagctctccgtgtacctctaccctcgtggaggtatacacggagctggccttcgcccccaccacttcatcgtggccaggcccactctccagatcgcgtaccaggacctttcctggactgcgcttcgtcgcctggcccacgactacagccaccgtctcggaggctccgccttccggcagcttccacgccttccttctggccactcagacgccaggtacccttgtccgtacagcgagtctcagccagtgttgactcgcatggttgagctttcggaggctcaagccactcagcacgacctactccttaaggcttaccgctccctggcccgccgctacgccgctttggaggcccgtctggccgaggagggtgtcacctcagttgacactatctcctgggactcaggccgcctctgccacgccagccacctgtcctcccacagctcccgcggctctgcccgcactcccagtggcccgcgctcccccagctcgcgtgcgccgtactcaccagtgtactccccctacccacacccagttagcccttcctacacccccggacacaccccagttgcttcctcccgccgtggtccatgctttatccgcactgcgcggaagcgtgttgttggttcttccaccgtgttccgtttccaccacctagctcccccaccgccagcgatggctagccgcccccgccgtgcagcttgtgcgccagcccgcttcggttttgaagaaggtagagtcaaaccagaagcaaatcatgaatcagctaatgagcagtctcaccgcagcaaccgttcgcaccgtactgtttcccgcaacgcaaaagttgagcaaccctgccgtagcaaccgctcacatcgcacagcttcccgtgatgtagagatggaacagtctcaccgctctcaccgcactgccagtcacaattctggagaagaatgcctcccttccccacatcatgtggaaaacaacatgcaacacttaatggcagttcagacacaaatcttgcaaggaatagccgcagccgtagccggttataagcataattcgcatggaaatggccaccctcacatgggcaacaatagatccaagctgacagattttctgaggtcacgtccgccagagttctctcagaccgtcgagcccgtcgaggctgacgattggttgaaagatgttgatagaaaactcaacttagtgcagtgtactccggtcgagaagacgctctacgcctctcaccagctaagaggacctgctgcaaattggtgggagaattactgcaatgcacaccctgaacccactaacattgcttgggatgagtttgctacggctttccgtgcagctcatgtgcctgaaagcaccattgacatgaagaaagaaaaattcaacagacttaagcaaggcaacagcagtgtcaatgagtacctaagtatgttcaacaagttggctcggtacgcccttgaggaagtggactcagataagaagaagatcaggaaattcttgaaaggaatcgcagttggaatgagactccagttgctagcgcatgacttccccacttttcaacatatgatcaacaaggcacttctacttgaggatgccagaaaagaggctaccgaagaatacaagaaacgcaaatctaaccaccaggggaattcctcccgaggcgcacctcgccctcgctacggtcaacccatgcaataccaccagtcggtcactcaggctaaccgccagccaggctacgcccctcgtcctcagatgaaccgctcggcaccccagccacagcagcatgcccctagtggcaatactgcgccaaacagtgttacctctttcaagtcaccacagggaccgtcggcagttcagtgtttccggtgcaaccagatgggtcactatgctagacagtgccctcagaatcctaccaacaccaactcagggcatgctaatggcagcactgccagaactcctactccagcggcagctcagtctcgtcttagcactcaggcaagtggacaaggttcacgtgcttccaaccactttggtcgaggctgtgtgaatcacattcgagctgaaaccgctcaggatgctccagacgttgtgatgggtatgttctctgtcaactccgtacccgcaatagttctgtttgattcgggagcttcccattctttcatatcacaagcttttgtgaaaagaaatggttggaaaacccaaaatttacgtgtaccaatgatagtacattcccctggaaggaatataagggcaactcaaatatgcccggaagttaaccttagaattgaggaagttgacttcctagccaaaccgatagtcctagactcgcaaagcttggacatcatcctagggatggattggttggctaagcacaaaggacagatagattgtgccgaaaagtccatcaccttgcaaggacctggaggaaagcaagtccgctttacccctaacactcctaccgcaagtcggtctatcttaacctgtttacaagtcacctccttggagtcggtgcccatagtttgtgaatatcccgacgtatttccggaagaattaacaagaatgccaccagatcgagagattgagttcgccatagaactggcaccaggcaccgcaccaattgcaaaaagaccctaccaaatggcagctaatgagttaacagaagttaaaagacaaatcggagagctggaaagtaaaggttatgtacgacctagctcatccccttggggagccccagtgcttctggttaagaaaaaggatggctctgagagaatggtaatcgactatagagccctgaatgaagtaactataaagaacaagtacccgttgccacggatcgacgatttattcgatcaacttaaaggagcaagagttttctcaaaaattgacttgaggtcaggttaccaccaactgaaaatcagatctgaagatatcccaaagaccgctttctcaacgcgttatggtctatatgagttcacagtaatgtcctttggactcaccaatgctccaacattcttcatgaacttaatgaacaaaatcttcatggaatacctggaccagtttgtcgtggtattcatcgatgacatcctgatatactccaagaacgaggaagaacatgctgaacacctgaggttgataatggaaaagctcagggatcatcaactattcgcaaaattctcgaaatgcgaattctggttagaccgagtagcatttcttggacacgtgatttcctccaatggtgtcgaagtagatcccagcaaggttgaagctgtacttgcttggaacccgcccaagaatgtgtcagagattcgcagcttcctcggcttagctggatattatcgaagattcattgaaggattctctaagctagccagacctatgaccgagctgttaaagaaggaaaagaaatttcgatggtctgcagcctgtgaagacagcttccaagaaatgaagaaaaggttgaccactgccccagttctcaccttgccagatatccgaaaagatttcgagatcttctgtgatgcatcaagacaaggcttaggatgtgtcctaatacaagaacgaaaggttgtggcctatgcatctaggcagctcaggcctcatgaagtcaattatcccacccatgatctcgaattggcagccgtggttcatgctcttaagatctggaggcactatttaatcgggaacagatgtgaagtatacaccgatcacaaaagtcttaagtatatcttcacacagaccgagttaaatatgagacagagaagatggttggaactaatcaaggattacgatcttggaatccactatcaccctggtaaagccaacgtggtcgctgatgcgctaagtcgcaagacctattgcaatgtagctcaaatacggcctgaccaagatcacctgtgcagagaattggagaagttaaggctgaccgtggtacagtcaggtgtccctgccagcttgacagtacagcctaccctagagtcgcaaatccgggaggctcagaaagacgacgaagggataaaagaattaataaaaagaatacaggagaagaaagacaccaatttctccatagacaaccaaggcacagtttggtgcggtccacgcatctgtgtaccggccaagaaggagttaagagatctcatcctaaaggaagctcatgagtccgcctattccattcatccaggaagtacgaagatgtaccaagatatcaaggcatacttctggtgggctggaatgaagcgagatgtcgcagaatacgtagccctgtgtgacatttgccaaagagtcaaggcggaacatcagaggccagctggtctgctgcaacccctaccgattcccgagtggaaatgggaagagatcggaatggatttcatcaccggtttgccaagaacccctaacgggtacgactccatctgggtaatcgtggaccgactcacgaaatcagctcatttcgtgccagtgaaaaccacctttgatggaaagaaactagcagaactctacatgacccatgtcgtatgtagatttggctgtcccaagaagatcgtgtcagatcgaggcactcagttcacctcaaggttctggaaacaattgcatgaagccctcggaaccgatctaaattttagtatggcctaccatccgcagaccgatggcacttgggatcgttgtttgccgtatgctgagttctcatacaacaacagttatcaggccagcattcatatgtcgccgaatgaggcaatgttcggaagaaagtgccacacccccttgtgctggaatgaggtgggtgaagcgctggtattcggtcctgacatactcaagtcagcagaagaacaagttaagctaatccgagaacgtttaaagacagcgcagaaccgtcagaaaagttacgctgacaatcgaaggcgtgaccttgagttcgaaaaaggagatcatgtgtacctgcgggtatcacccctccgtggtatgaggaggtttgggatgtccggcaagttagcaccccgctacatcggcccctacctcataaccgccagacgtggcgaagtggcttatcagcttgagctacctgaagatctcgcagatgtgcacaacgtgttccacgtatcccagctaaagaagtgtcttcgagttccggaagagcaagttcccctgggtaatatcgtgctggaaaagaatctgacctacaaggaaagaccgatcaaggttcttgaagaggcagaacgtcagactcgaaggaagaccatcaagttctacaaagtccaatggagcaaccattctgaagatgaggcaacctgggagcgagaagatcttctccgcgccgagttcccggagctgctcccttag

SEQ ID NO: 15460 - DNA, 5085 bp, Oryza sativa
  Clone ID: TFbOSC400197j.C1.o6.fg
atggcggtgaacgccagcttcagttcccacggtttcggtgagggtcaccacgtcgtccagcttcgtgacctcgcccgtttccttggcttctcgtgttccgagtacacggggtactccgtggaccgtgttccccctcactgtgagctctctgtgtacctttacccccgtggaggtatacacggagctggccttcgcccccaccacttcactgtggccaggcccactctccagatcgcgtaccaggacctctcctggactgtgcttcgtcgcctggcccacgactacagccaccgtctcggaggttccgccttccggcagcttccacgccttccttctggccactcagacgccaggtacccttgtccgtacagcgagtctcagccagtgctgactcgcatggtcgagctttcggaggctcaggccactcagcacgacctactccttgaggcttaccgctcccttgcccgccgctacgccgctttggaggcccgtctggccgaggagggtgtcacctcggttgacactatctcctgggactcaggccgcctctgccacgccagccacctgtcctcccacagctcccgcggctctgcccgcactcccagtggcccgcgctcccctagctcacgtgcgccgtactcaccagtgtactccccctacccacacccagttagcccttcctacacccccggacacaccccagttgcttcctcccgccatggcccacgctttatccgcactgcgcggaagcgtgttgttggttcttccaccgtgttccgtttccgccacccagctcccccaccgatggctagccgcccccgccgtgcagctcgtgcaccagcccgctttggttttgaagatggtagagttgaagcagaagcaaatcatgaatcagctaatgagcagtctcaccacagcaaccgttcgcaccgtactgttttccgcaacgcagaggttgagcaaccccaccgcagcaaccgctcgcatcgcacagttttccgtaatgcagagatggaacagtctcaccgctctcaccgcactgccagtcacaattctggagaagaacgcctcccttccccacctcatgtggaaaacaacatgcaacacataatggcagtacagacacaaatcttgcaaggactaaccacagccatagccagttttcagcataatgcgcatggaaatggccaccctcacgtgggcaacaatagatccaagctgacagattttctgaggtcacatccgccagagttctctcagaccgtcgagcccgtcgaggctgacgattggttgaaagatgttgatagaaaactcaacttagtgcaatgtactcctgttgagaagacgctctacgcctctcaccagctaagaggacctgctgcagattggtgggagaattactgcaatgcacaccctgaacccactaacattgcttgggatgagtttgctacggccttccgtgcagctcatgtgccggaaagcactattgacatgaagaaagaagaattcaacagacttaagcaaggcaacagcagtgtcaatgagtacctaagtatgttcaacaagttggctcggtacgcccctgaggaagtggacacagacaagaagaagatcaggaaattcttgaaggggatcgcagttggaatgagactccagttgcttgctcatgacttccccacttttcaacatatgatcaacaaggcacttctgcttgaggatgccagaaaagaggctaccgaagaatacaagaaacgcaagtctaaccatcagggaaattcttcccgaggcgcacctcgccctcgctacggtcaacccatgcaataccaccagtcggtcactcaggctaaccgccagccaggctacgcccctcgccctcagatgaaccgtccggcacctccgccacagcagcgtgcccctagtggcaacactgcgccaaacagtgttacctctttcaagtcaccacagggaccgtcagcagttcagtgtttccggtgcaaccagatgggtcactatgctagacagtgccctcagaatcctaccaacaccaactcagggcatgctaatggcagcaccgccagaactcctactccagtggcagctcagtctcgtcctagctctcaggcaagtggacaaggtcctcgtgcttccaaccactttggtcgaggacgtgtgaatcacattcaagctgaaaccgctcaggatgctccagacgttgtgatggtctgtgaatatcccgacgtattcctagaagaattaacgagaatgccaccagaccgagagattgagttcgccatagaactggcaccaggcacagctccaattgcaaaaagaccctaccgaatggcagctaatgagttagcagaagttaaaagacaaatcgaagaactggaaagtaaaggttatgtgcgacctagctcatccccttggggagccccaatgcttctggttaagaaaaaggatggctctgagagaatggtaatcgactatagagccctgaatgaagtaactataaagaacaagtacccgttgctacggattgacgatttattcgatcaacttaaaggagcaagagttttctcaaaaattgacttgaggtcaggttaccaccaactgaaaatcagatctgaagatatcccgaagaccgctttctcaacgcgttatggtctatatgagttcacagttatgtccttcggactcaccaatgctctagcattcttcatgaacttaatgaacaaaatcttcatggaatacctggaccagtttgtcgtggtgttcatcgatgacatcctgatatactccaagaacgaggaagaacatgctgaacacctgaggctgataatggaaaagctcagagatcatcaactattcgctaaattctcgaaatgcgaattctggttagatcgagtagcatttcttggacacgtgatttcctccaacggtgtcgaagtagatcccagcaaggttgaagctgtactttcttggaacccgcccaagaacgtgtcagagatccgcagcttccttggcttagcgggatattatcgaagatccattgaaggattctctaagctagccagacctatgaccgagctgttaaagaaggaaaagaaatttcaatggtctgcagcctgtgaagacagctttcaagaaatgaagaaaaggttgaccactgcaccagttctcaccttgccagatatccgaaaagatttcgagatcttctgtgatgcatcaagacaaggcttaggatgtgtcctaatgcaagaacgaaaggttgtggcctatgcatccaggcagctcaggcctcatgaagtcaattatcccacccatgatctcgagttggcagccgtggttcatactcttaagatctggaggcattatttaatcgggaacagatgtgaagtatacaccgatcacaaaagtcttaaatatatcttcacacagaccgagttaaatatgaggcagagaagatggttggaactaatcaaggattacgatcttggaatccactatcatcctggtaaagccaacgtggtcgctgatgcgctaagtcgtaaggcctattgcaatgtagctcaaatacggcctgaccaagatcatatgtgcagagaattggagaagttaaggctgaccgtggtacagtcaggagtccctgccagcttgacagtacagcctaccctagaatcgcaaatccaggaggctcagaaagatgacgaagggataaaagagttaataaaaagaatacaggagaagaaagacaccaatttctccatagacgatcaaggcacagtttggtgcggtccacacatctgtgtaccggccaagaaggagttaagagatctcatcctaaaggaagctcatgagtccgcttactccattcatccaggaagtacgaagatgtaccaagatatcaaggcatacttttggtgggctggaatgaagcgagatgtcgcagaatacgtagccttgtgtgacatttgccaaagagtcaaggcagagcatcagaggccagctggtctgctgcaacccctaccgattcccgagtggaaatgggaagagatcggaatggatttcatcaccggtttgccaagaacccccagcgggtacgactccatttgggtaatcgtggaccgactcacgaaatcagctcatttcgtgccagtgaaaaccacctatgatggaaagaaactagcagaactctacatgacccatgtcgtatgtagatttggctgtcccaagaaaattgtgtcagaccgaggcactcagttcacctcaaggttctggaagcagttgcatgaagccctcggaactgatctgaattttagtacagcctaccatccgcagaccgatggtcagaccgaaagggtaaaccaaatcctagaagacatgctacgtgcgtgtgccttggatttcgaaggcacttgggatcgttgtttgccgtatgccgagttctcatacaacaacagttatcaggccagcattcagatgtcgccgaatgaggcaatgttcggaagaaagtgccgcacccccttgtgctggaatgaggtgggcgaagcactggtattcggtcctgacatactcaagtcagaagaagaacaagttaagctgatacgagaacgtttgaagacaacacagaaccgtcagaagaattacgctgacaatcggaggcgtgaccttgagttcgaaaaaggagatcatgtgtacctgcgggtatcacccctccgtggtatgagaaggtttgggatgtccggcaagttagcaccccgcctcataactgccagacgtggcgaagtggcttatcagcttgagctacctgaaggtctcgcagatgtgcacaacgtgttccacgtatcccagttaaagaaatgtcttcgagttccagaagagcaagttcccctgggtaatatcgagctggaaaagaatctgacctacaaggaaagaccgatcaaggttcttgaagaggcagaacgtcagactcgaaggaagaccatcaagttctacaaagtccaatggagcaatcattctgatgatgaggcaacctgggaacgagaagatctgctccgcgccgagtttccggagctgctctcttag

SEQ ID NO: 15461 - DNA, 5556 bp, Oryza sativa
  Clone ID: TFbOSC400239j.C1.o3.fg
atggcagtgaacgccagtttcagttcccacggttttggtgagggtcaccacgtcgcccagcttcgtgacctcgcccgtttccttggcttctcgtgtcccgagtacacggggtactccgtggaccgtgttccccctcactgtgagctctctgtgtacctttaccctcgtggaggtatacacggagttggccttcgcccccaccacttcactgtggccaggcccactctccagatcgcgtaccaggacctctcctggactgcgcttcgccgcctggcccacgactacggccaccgtctcggaggctccgccttccggcagcttccacgtcttccttctggccacgcagacgccagatacccttgtccgtacagcgagtctcagccagtgctgactcgcatggtcgagctttcggaggctcaggccactcagcacgacctactccttgaggcttaccgctcccttgcccgccgctacgccgccttggaggcccgtctggccgaggagggtgtcacctcagttgacactatctcttgggactcaggccgtctctgccacgccagccacctgtcctcccacagctcccgcggctctgctcgcactcccagtggcccgcgctcccccagctcgcgtgcgccgtactcaccagtgtactccccctacccacacccagttagcccttcctacacccccggacacactccagtcgcttcctcccgccgtggcccacgctttatccgcactgcgcggaagcgtgttgttggttcttccaccgtgttccgtttccgccacccagctcccccaccgccagcggcccgtgctgctgccggccctcgacagatggctagccgcccccgtcgtacagctcgtgcaccagtccgctttggttttgaagatggtagagttgaagcagaagcaaatcacgaaccagctaatgagcattctcaccacagcaaccgttcgcaccgtactgtttcccgcaacgcagaggttgagcaacctcgccgcagcagccgctcgcatcgcacagtttcccgtgaagcagagttggagcagtctcaccgctctcaccgcactgccagtcacaattctggagaagaacgcctcccttccccacctcatgtggaaaacaacatgcaacacataatggcagttcagacacagatcttgcaaggtctaaccacagccatagccagctttcagcataatgcgcatggaaatggccaccctcacgtgggcaacaatagatccaagctgacagactttctgaggtcacgtccaccagagttctctcagaccatcgagcccgtcgaggctgacgattggttgaaagatgtggatagaaaactcaacttagtgcagtgtactcctgttgagaagacgctctacgcctctcaccagctaagaggacctgccgcagattggtgggagaattactgcaatgcacatcctgaacccactaacattgcttgggatgagttcgctacggctttccgtgtagctcatgtgcctgaaagcactattgacatgaagaaagaagaatttaacagactcaagcaaggccacagcagtgtcaatgagtacctaagtcagttcaacaagttggctcggtacgcccctgaggaagtagacaccgataagaaaaagatcaggaaattcttgaaaggaatcgcagttggaatgagactccagttgcttgctcatgacttccccacttttcaacatatgatcaacaaagcacttctacttgaggatgccagaaaagaggccaccgaagaatacaagaaacgcaagtctaaccatcagggaaattcttcccgaggcgcacctcgccctcgctacggtcagcccatgcaataccatcagtcggtcactcaggctaaccgccagtcaagctacgcccctcgtcctcagatgaaccgtccggcacctccgccacagcagcgtgcccctagtggcaacactgcgccaaacagtgttacctccttcaagtcaccacagggaccgtcagcagttcagtgtttccggtgcaaccagatgggtcactatgctagacagtgtcctcagaatcctaccaacaccagcccaggacatgctaatggcagcactgccagaactcctactccagcggcagctcagtctcgtcctagctctcaagcaagtggacaaggttctcgtgcttccaaccactttggtcgaggacgtgtgaatcacattcaagctgaaaccgctcaggatgctccagacgttgtgatgggtatgttctctgtcaactccgtacccgcaatagtcctgtttgattcgggagcttcccattctttcatatcgcaagcttttgtgaaaagaaatggttggaaaacccaaaatttgcgtgtaccaatgatagtacattcccctggaaggaatataagggcaactcaaatatgcccggaagttaaccttagaattgaggaagttaacttcctagccaaaccgatagtcctagactcgcaaagcttggacatcatcctagggatggattggttggctaagcacaaaggacagatagattgtgccgaaaagtccatcaccttgcaaggacctggaggaaagcaagtccgctttacccctaacacccctaccgcaagtcggtctatcctaacctgtttgcaagtcacctccttggagtcggtgcccatagtctgtgaatatcccgacgtatttccggaagaattaacaagaatgccaccagaccgagagattgagttcgccatagaactggcaccaggcacagctccaattgcaaaaagaccctaccgaatggccgctaatgagttagcagaagttaaaagacaaatcgaagaactggaaagtaaaggttatgtgcgacctagctcatccccttggggagccccagtgcttctggttaagaaaaaggatggctctgagagaatggtaattgactatagagccctgaatgaagtaactataaagaacaagtacccgttgcctcggattgacgacttattcgatcaacttaaaggagcaagagtcttctcaaaaattgacttgaggtcaggttaccaccaactgaaaatcagatctgaagatattccgaagaccgctttctcgacgcgttatggtctatatgagttcacagtaatgtccttcggactcaccaatgctccagcattcttcatgaacttaatgaacaaaatctttatggaatacctggaccagtttgtagtggtattcatcgatgacatcctgatatactctaagaatgaggaagaacatgctgaacacctgaggctgataatggaaaagctcagagatcatcaactattcgctaaattctcgaaatgcgaattctggttggaccgagtagcttttcttggtcacgtgatctcctccaacggtgtcgaagtagatcccagcaaagttgaagctgtacttgcgtggaacccgcccaagaatgtgtcggagattcgcagcttcctcggcttagctggatattatcgaagattcattgaaggattctctaagctagccagacctatgaccgagctgttaaagaaggaaaagaaatttcaatggtccacagcctgtgaagacagctttcaagaaatgaagaaaagattgaccactgccccagttctcaccttgccagatatccgaaaagacttcgagatcttctgtgatgcatcaagacagggcttaggatgtgtcctaatgcaagaacgaaaggttgtggcctatgcatccaggcagctcaggcctcatgaagtcaattaccccacccatgatctcgagttggcagccgtgattcatgctcttaagatctggaggcactacttaatagggaacagatgcgaagtatacaccgatcacaaaagtcttaagtatatcttcactcagaccgagttaaatatgagacagagaagatggttggaactaatcaaggattacgatcttggaatccactatcatcctggtaaagccaacgtggtcgctgatgcgctaagtcgcaaggcctattgcaatatagctcaaatacggcctgaccaagatcacctgtgcagagaattggagaagttaaggctgaccgtggtgcagtcaggtgtccctgccagcttgacagtacagcctaccctagagtcgcaaatccgggaggctcagaaagacgacgaagggataaaagaattaataaaaagaatacaggagaagaaagacaccaatttctccatagacgatcaaggcacaatttggtgcggtccacgcatctgtgtaccggccaagaaggagttaagaaatctcatcctaaaggaagctcatgagtccgcttactccattcatccaggaagtacgaagatgtaccaagatatcaaggcatacttttggtgggctggaatgaagcgagatgtcgcagaatacgtagccttgtgtgacatttgccaaagagtcaaggcagaacaccaaaggccagctggactgctacaacccctaccgattcccgagtggaaatgggaagagatcggaatggatttcatcaccggtttgccaagaacccccagcggatacgactccatttgggtaatcgtggaccgactcacgaagtcagcacatttcgtgccagtgaagaccacctatgatggaaagaaactagcagaactctacatgactcatgtcgtatgtagatttggctgtcccaagaaaatagtgtcggatcgaggcactcagttcacctcaaggttctggaagcaattgcatgaagcactcggaactgatctgaattttagtacggcctaccacccgcagaccgatggtcagacagaaagagtaaaccagatcctagaagacatgctgcgagcatgtgccttggatttcgaaggcacttgggatcgttgttggccgtatgccgagttctcatacaacaacagttatcaggccagcattcagatgtcgcggaatgaggcaatgttcggaagaaggtgccgcactcccttgtgctggaatgaggtgggcgaagcattggtattcggtcctaacatactcaagtcagcagaagaacaagttaagctgatacgagaacgtttgagaacagcacagaaccgtcagaagaattacgctgacaatcggaggcgtgacgttgagttcgaaaaaggagatcatgtgtacctacgggtatcaccactccgaggaatgagaaggtttgggatgtccggcaagttagcaccccgctacatcggcccctacctcataaccgccagacgtggcgaagtggcttatcagcttgagctacctgaaggtctcgcagatgtgcacaacgtgttccacgtatcccagttaaagaaatgtcttcgagttccagaagagcaagttcccctaggtaatatcgagctggaaaagaatctgacctacaaggaaagaccgatcaaggttcttgaagaagcagaacgtcagactcgaaggaagacaatcaagttctacaaagtccaatggagcaatcattctgaagatgaagcaacctgggaacgagaagatcttctccgcgccgagtttccggagctgctcccttag

SEQ ID NO: 15462 - DNA, 3600 bp, Oryza sativa
  Clone ID: TFbOSC400259j.C1.o3.fg
atgggcaacaacagatccaagctgacagactttctgaggtctcgtccgccagagttctctcagaccgtcgagcccgtcgaggctgacgattggttgaaagatgttgatagaaaactcaacttagtgcagtgtactcctgttgagaagacgctctacgcctctcaccaactaagtggacctgccgcagattggtgggagaattactgcaatgcacaccctgaacccactaacattgcttgggatgagttcgctacggctttccgtgcagctcatgtgcctgaaatcactattgacatgaagaaagaagaattcaacagacttaagcaaggcaacagcagtgtcaatgagtacctaagtcagttcaacaagttggctcggtacgcccctgaggaagtagacacagataagaagaagatcaggaaattcttgaaaggaatcgcagttggaatgagactccagttgcttgctcatgacttccccacttttcaacatatgatcaacaaggcacttctacttgaggatgccagaaaagaggctaccgaagaatacaagaaacgcaagtctaaccatcagggaaattcttcccgaggcgcacctcgccctcgctacggtcaacccatgcaataccaccagtcggtcacccaggctaaccgccagccaggctacgcccctcgtcctcagataaaccgtccggcacctcagccacagcagcgtgcccctagtagcgatactgcgcctaacagtgttacctctttcaagtcaccgcagggaccgtcagcagttcagtgtttccggtgcaaccagatgggtcactatgctagacagtgtcctcagaatcctaccaacaccaactcagggcatgctaatggtagcactgccagaactcctactccagcggcagctcagtctcgtcctagctctcaggcaagtggacaaggttcacgtgcttccaacaactttggtcgaggccgtgtgaatcacattcaagcagaaaccgctcaggatgctccagacgttgtgatgggacctggaggaaagcaagtccgctttacccctaacacccctaccgcaagtcggtctatcctaacctgtttacaagtcacctccttggagtcggtgcccatagtctgtgaatatcccgacgtatttccggaagaattaacaagaatgccaccagaccgagagatcgagttcgccatagaactggcaccaggcacagctccaattgcaaaaagaccctaccaaatggcagctaatgagttagcagaagttaaaagacaaatcgaagaactggaaagtaaaggttatgtgcgacctagctcatccccttggggagccccagtacttctggttaagaaaaaggatggctcggagagaatggtaatcgactatagagccctgaatgaagtaactataaagaacaagtacccgttgccacggattgacgatttattcgatcaacttaaaggagcaagagttttctcaaaaattgacttgaggtcaggttaccaccaactgaaaatcagatctgaagatatcccgaagaccactttctcaacgcgttatggtctatatgagttcacagttatgtccttcggactcactaatgctccagcattcttcatgaacttaatgaacaaaatcttcatggaatacctagaccagtttgtcgtggtgttcatcgatgacatcctgatatactccaagaacgaggaagaacatgctgaacacctgaggctgataatggaaaagctcagagatcatcaactattcgctaaattctcgaaatgcgaattctggttggaccgagtagcatttcttggacacgtgatttcctccaacgcctgtgaagacagcttccaagaattgaagaaaaagttgaccactgccccagttctcaccttgccagatatccgaaaatatttcgagatcttctgtgacgcatcaagacaaggcttaggatgtgtcctaatgcaagaacaaaaggttgtggcctatgcatccaggcagctcaggcctcatgaagccaattatcccacccatgatctcgagttggcagccgtggttcatgctcttaagatctggaggcactatttaatcgggaacagatgtgaagtatacaccgatcacaaaagtcttaagtatatcttcactcagaccgagttaaatatgagacagagaagatggttggaactaatcaaggattacgatcttggaatccactatcatcctggtaaagccaacgtggtcgctgatgcgctaagtcgcaaggcctattgcaatgtagctcaaatacggcctgaccaagatcacctgtgcagagaattggagaagttaagactgaccgtgatacagtcaggtgtccctgccagcttgacagtacagcctaccctagagtcgcaaatccgggaggctcagaaagacgacgaagggataaaagaattaataaaaagaatacaggaaaagaaagacacaaatttctccatagacgatcaaggcacagtttggtgcggaccacgcatctgtgtaccggccaagaaggagttaagagatctcatcctaaaggaagctcatgagtccgcctactccattcacccaggaagtacgaagatgtaccaagatatcaaggcatacttctggtgggctggaatgaagcgagacgtcgcagaatacgtagccctgtgtgacatttgccaaagagtcaaggcggaacatcagaggccagctggtctgctgcaacccctaccgattcccgagtggaaatgggaagagatcggaatggatttcatcaccggtttgccaagaacccccaacgggtacgactccatttggatttggctgtcccaagaaaattgtgtcagaccgaggcactcagttcacctcaaggttctgaattttagtacagcctaccatccgcagaccgatggtcagaccgaaagggtaaaccaaatcctagaagacatgctacgtgcgtgtgccttggatttcgaaggcacttgggatcgttgtttgccgtatgccgagttctcatacaacaacagttatcaggccagcattcagatgtcgccgaatgaggcaatgttcggaagaaagtgccgcaccccattgtgctggaatgaggtgggcaaagcattggtattcggtcctgacatactcaagtcagcagaagaacaagttaagctgatacgggaacgtttgaagacagcacagaaccgtcagaagaattacgctgacaatcggaggcgtgaccttgagttcgaaaaaggagatcatgtgtacctgcgggtatcacccctccgtggtatgagaaggtttgggatgtccggcaagttagcaccccgctacatcggcccctacctcataaccgccagacggtgcgaagtggcttatcagcttgagctacctgaaggtctcgcaaacgtgcacaacgtgttccacgtatcccagttaaagaaatgtcttcgagttccagaagagcaagttcccctgggtaatatcgagctggaaaagaatctgacctacaaggaaagaccgatcaaggttcttgaagaggcagaacgtcagactcgaaggaagaccatcaagctctacaaagtctaa

SEQ ID NO: 15463 - DNA, 4923 bp, Oryza sativa
  Clone ID: TFbOSC400530j.C1.o1.fg
atggcagtgaacgccagcttcagttcccacggttttggtgagggtcaccacgtcgcccagcttcgtgacctcgcccgtttccttggcttctcatgtcccgagtacacggggtactccgtggaccgtgttccccctcactgtgagctctcggtgtacctttacccccgtggaggtatacacggagctggcctttgcccccaccacttcactgtggccaggcccactctccagatcgcgtaccaggacctctcctggactgcgcttcgtcgcctggcccacgactacagccaccgtctcggaggttccgccttccggcagcttccacaccttccctctggccactcagacgccaggtacccttgtccgtacagcgagtctcagccagtgctgactcgcatggtcgagctttcggaggctcaggccactcagcacgacctactccttgaggcttaccgctcccttgcccgccgctacgccgctttggaggcccgtctggccgaggagggtgtcacctcagttgacactatctcttgggactcaggccgcctctgccacgccagccacctgtcctcccacagctcccgcggctctgcccgcactcccagtggcccgcgctcccccagctcgcgtgcgccgtactcaccagtgtactccccctacccacacccagttagcccttcctacacccccggacacaccccagttgcttcctcccgccgtggcccacgctttatccgcaccgcgcggaagcgtgttgttggttcttccaccgtgttccgtttccactacccagctcccccaccgccagcggcccgtgctgctgccggccctcgacagatggctagccgtccccgccgtgcagctcgtgcaccagcccgctttggttttgaggatggtagagttgagccagaagaaaatcatgaatcagctaatgagcagtctcaccacagcaaccgttcgcatcgtactgtttcccgcaacacagaggttgagcaaccccgccgcagcagccgctcgcatcgcacagtttcccgtgatgcagagatggaacagtctcaccgctctcaccgcactgccagtcacaattctggagaagaacgcctcccttccccacctcatgtggaaaccaacatgcaacacttaatggcagttcagacacaaatcttgcaaggactaaccacagccatagccagttttcagcataatgcgcatggaaatggccaccctcacatgggcaacaacagatccaagctgacagactttttgaggtctcgtccgctagagttctctcagaccgtcgagcccgtcgaggctgacgattggttgaaagatgttgatagaaaactcaacttagtgcagtgtactcctgttgagaagacgctctacgcctctcaccaactaagaggacctaccgcagattggtgggagaattactgcaatgcacaccctgaacccactaacattgcttgggatgagttcgctacggctttccgtgcagctcatgtgcctgaaagcactattgacatgaagaaagaagaattcaacagacttaagcaaggcaacagcagtgtcaatgagtacctaagtcagttcaacaagttggctcggtacgcccctgaggaagtagacacagataagaagaagatcaggaaattcttgaaagaaatcgcagttggaatgagactccagttgcttgctcatgacttccccacttttcaacatatgatcaacaaggcacttctacttgaggatgccagaaaagaggctaccgaagaatacaagaaacgcaagtctaaccatcagggaaattcttcccgaggcgcacctcgccctcgctacggtcaacccatgcaataccaccagtcggtcacccaggctaaccgccagccaggctacgcccctcgtcctcagataaaccgtccggcacctcagccacagcagcgtgcccctagtagcgatactgcgcctaacagtgttacctctttcaagtcaccgcagggaccgtcagcagttcagtgtttccggtgcaaccagatgggtcactatgctagacagtgtcctcagaatcctaccaacaccaactcagggcatgctaatggcagcactgccagaactcctactccagcggcagctcagtctcgtcctagctctcaggcaagtagacaaggttctcgtgcttccaaccactttggtcgaggccgtgtgaatcacattcaagctgaaaccgctcaggatgctccagacgctgtgatgggtatgttctctgtcgactccgtacccgcaatagttctgttcgattcgggagcttcccattctttcatatcgcaagcttttgtgaaaagaaatggttggaaaacccaaaaattgcgtgtaccaatgatagtacattcccctgggaggaatataagggcaactcaaatatgcccggaagttaaccttagaattgaggaagttgacttcctagccaaaccgatagtcctagactcgcaaagcttggacatcattctagggatggattggttggctaagcacaaaggacagatagattgtgccgaaaagtccatcaccttgcaaggacctgcaggaaagcaagtccgctttacccctaacacccctaccgcaagtcggtctatcctaacctgtttacaagtcacctccttggagtcggtgcccatagtctatgaatatcccgacgtatttctggaagaattaacaagaatgccaccagaccgagagatcgagttcgccatagaactggcaccaggcacagctccaattgcaaaaagaccctaccgaatggcagctaatgagttagcagaagttaaaagacaaatcgaagagttggagagtaaaggttatgtgcgacctagctcatccccttggggagccccagtacttctggttaagaaaaaggatggctctgagagaatggtaatcgactatagagccctgaatgaagtaactataaagaacaagtacccgttgccacggattgacgatttattcgatcaacttaaaggagcaagagtcttctcaaaaattgacttgaggtcaggttaccatcaactgaaaatcagatctgaagatattccgaagaccgctttctcaacgcgttatggtctatatgagttcacagttatgtccttcggactcaccaatgctccagcattcttcatgaacttaatgagcaaaatcttcatggaatacctggaccagtttgtcgtggtattcatcgatgacattctgatatactctaagaacgaggaagaacatgctgaacacctgaggttgataatggaaaagctcagggaccatcaactattcgcaaaattctcgaaatgcgaattctggttagaccgagtagcatttcttggacacgtgatctcccccaacggtgttgaagtagatcccagcaaggttgaagctgtacttgcttggaacccgcccaagaatgtgtcagagattcgcagtttccttggcttagctggatattatcgaagattcattgaaggattctctaagctagccagacctatgaccgagctgttaaagaaggaaaagaaatttcaatggtctgcagcctgtgaagacagctttcaagaaatgaagaaaaggttgaccactgccccagttctcaccttgccagatatccgaaaagatttcgagatcttctgtgatgcatcaagacaaggcttaggatgtgtcgtaatgcaggaacgaaaggttgtggcctatgcatccaggcagctcaggcctcatgaagtcaattatcccacccatgatcttgagttggcagccgtggttcatgctcttaagatctggaggcattatttaatcgggaacagatgtgaagtatacaccgatcacaaaagtcttaagtatattttcacacagaccgagttaaatatgagacagagaagatggttggaactaattaaggattacgatcttggaatccactatcatcctggtaaagccaacgtggtcgctgatgcgctaagtcgcaaggcctattgcaatgtagctcaaatacggcctgaccaagatcacttgtgcagagaattagagaagttaaggctgaccgtggtacagtcaggtgtccctgccagcttgacagtacagcctaccctagagtcgcaaatccgggaagctcagaaagacgacgaagggataaaagagttgataaaaagaatacaggagaagaaagacaccaatttctccatagacgatcaaggcacagtttggtgcggtccacgcatctgtgtaccggccaagaaggagttaagagatctcatcctaaaggaagctcatgagtccacctactccattcacccaggaagtacgaagatgtaccaagatatcaaggcatacttctggtgggccggaatgaagcgagatgtcgcggaatacgtagccttgtgtgacatttgccaaagagtcaaggcagagcatcagaggccagctggtctgctgcaacccctaccgattcccgagtggaaatgggaagagatcggaatggatttcatcaccggtttgccaagaacccccaacgggtacgactccatttgggtaatcgtggaccgactcacgaaatcagctcatttcgtgccagtgaaaaccacctatgatggaaagaaactagcagaactctacatgacccatgtcgtatgtagatttggctgtcccaagaaaattgtgtcagatcgaggcactcagttcacctcaaggttctggaagcagttgcatgaagctctcggaactgatctaaattttagtacggcctaccatccgcagaccgatggtcagacagaaagggtaaaccaaatcctagaagacatgctacgtgcgtgtgccctggatttcgaaggcacttgggatcgttgtttgccgtatgctgagttctcatacaacaacagctattag

SEQ ID NO: 15464 - DNA, 5199 bp, Oryza sativa
  Clone ID: TFbOSC400630j.C1.o10.fg
atggctagccgcccccgccgtgcagctcgtgcaccagcccgctttggttttgaagatggtagagttgaagcagaagcaaatcatgaatcagctaatgagcagtctcaccacagcaaccgttcacaccatactgtttcccgcaacgcagaggttgagcaaccccgccgcagcaaccgctcgcatcgcacagttttccgtaatgcagagatggaacaatctcaccgctctcaccgcactgccagtcacaattctggagaagaacgccttccttccccacctcatgtggaaaacaacatgcagcacttaatggcagttcagacacaaatcttgcagggattaaccacagccatagccagttttcagcataatgcgcatggaaatggccaccctcacgtgggcaacaatagatccaagctgacagactttctgaggtctcgtccgccagagttctctcataccgtcgagcccgtcgaggctgacgattggctaaaagatgttgatagaaaactcaacttagtgcagtgtactccggttgagaagacgctctacgcctctcaccagctaagaggacctgctgcagattggtgggagaattactgcaatgcacaccctgaacccactaacattgcttgggatgagtttgctatggctttccgtacagctcatgtgcctgaaagcgctattgatatgaagaaagaagaattcaacagacttaagcaaggcaacagcagtgtcaatgagtacctaagtatgttcaacaagttggctcggtacgcccctgaggaagtggacaccgacgagaagaagatcaggaaattcttgaaaggaatcgcagttggaatgagactccagttgattgctcatgatttccccacttttcaacatatgatcaacaaggcacttctactcgaggatgctagaaaagaggctaccgaagaatacaagaaacgcaagtctaaccatcagggaaattcttcccgaggcgcacctcgccctcgctacggacaacccatgcaataccaccagtcggtcactcaggctaaccgccagccaggttacgcccctcgtcctcagatgaaccgtccggcacctcagccacagcagcgtgcccctagtggcaatactgcgccaaacagtgttacctcgttcaagtcaccacagggaccgacagtagttcagtgtttccggtgcaaccagatgggtcactatgctagacagtgccctcagaaccctaccaacaccagctcagggcatgcgaatggcagcactgccagaactcctacccagcggcagctcagtctcgtcctagctctcaggcaagtggacaaggatgcttcagacattgtgatgggtatgttctctgtcaactccatacccgcaatagttctggttgattcgggagcttcccattctttcatatcacaagcttttgtgaaaagaaatggttggaaaacccaaaatttgcgtgtaccaatgatagtacattcccctggaaggaatataagggcaactcaaatatgcccggaagttaaccttagaattgaggaagttgacttcctagccaaaccgatagtcctagactcgcaaagcttggacatcatcctagggatggattggttggctaagtacaaaggacagatagattgtgccgaaaagtccatcaccttgcaaggacctggaggaaagcaagtccgctttacccctaacactcctaccgcaagtcggtctatcttaacctgtttacaagtcacctcattggagtcggtgcccatagtttgtgaatatcccgacgtatttccggaagaattaacaagaatgccaccagaccgagagattgagttcgccatagaactggcaccaggcaccgcaccaattgcaaaaagaccctaccgaatggcagctaatgagttagcagaagttaaaagacaaatcgaagagctggaaagtaaaggttttgtgcgacctagctcatccccttggggagccccagtgcttctggttaagaaaaaggatggctctgagagaatggtaatcgactatagagccctgaatgaagtaactataaagaacaagtacccgttgccacggatcgacgatttattcgatcaacttaaaggagcaagagttttctcaaaaattgacttgaggtcaggttaccaccaactgaaaatcagatctgaagatatcccaaagaccgctttctcaacgcgttatggtctatatgagttcacagtaatgtccttcggactcaccaatgctccagcattcttcatgaacttaatgaacaaaatcttcatggaatacctggaccagtttgttgtggtattcatcgatgacatcctgatatactccaagaacgaggaagaacatgctgaacacctgaggttgataatggaaaagctcagggatcgtcaactattcgcaaaattctcgaaatgcgaattctggttagaccgagtagcatttcttggacacgtgatttcctccaatggtgtcgaagtagatcccagcaaggttgaagctgtacttgcttggaacccgcccaagaatgtgttagagattcgcagcctcctcggcttagctggatattatcgaagattcattaaaggattctctaagctagccagacctatgaccgagctgttaaagaaggaaaagaaatttcaatggtctgcagcctgtgaagacagcttccaagaaatgaagaaaaggttgaccactgccccagttctcaccttgccagatatccgaaaagatttcgagatcttctgtgatgcatcaagacaaggcttaggatgtgtcctaatgcaagaacgaaaggttgtggcctatgcctccaggcagctcaggcctcatgaagtcaattatcccacccatgatctcgagttggcagccgtggttcatgctcttaagatctggaggcactatttaatcgggaacagatgtgaagtatacaccgatcacaaaagtcttaagtatatcttcacacagaccgagttaaatatgagacagagaagatggttggaactaatcaaggattacgatcttggaatccactatcaccctggtaaagccaacgtggtcgctgatgcgctaagtcgcaaggcctatcacaatgtagctcaaatacggcctgaccaagatcacctgtgcagagaattggagaagttaaggctgaccgtggtacagtcaggtgtccctgccagcttgacagtacagcctaccctagagtcgcaaatccgggaggctcagaaagacgacgaagggataaaagaattaataaaaagaatacaggagaagaaagacaccaatttctccatagacaaccaaggcacagtttggtgcggtccacgcatctgtgtaccggccaagaaggagttaagagatctcatcctaaaggaagcttatgagtccgcctattccattcatccaggaagtacgaagatgtaccaagatatcaaggcatacttctggtgggctggaatgaagcgagatgtcgcagaatacgtagccctgtgtgacatttgccaaagagtcaaggcggaacatcagaggccagctggtctgctgcaacccctaccgattcccgagtggaaatgggaagagatcggaatggatttcatcaccggtttgccaagaacccctaacgggtacgactccatctgggtaatcgtggaccgactcacgaaatcagctcatttcgtgccagtgaaaaccacctttgatggaaagaaactagcagaactctacatgacccatgtcgtatgtagatttggctgtcccaagaagatcatgtcagatcgaggcactcagttcacctcaaggttctggaaacaattgcacgaagccctcggaaccgatctaaattttagtacggcctaccatccgcagaccgatggtcagactgaaagggtaaaccaaatcctagaagacatgctacgtgcgtgtgccctggatttcgaaggcacttgggatcgttgtttgccgtatgctgagttctcatacaacaacagttatcaggccagcattcagatgtcgccgaatgaggcaatgttcggaagaaagtgccgcacccccttgtgctggaatgaggtgggcgaagcgctggcattcggtcctgacatactcaagtcagcagaagaacaagttaagctaatccgagaacgtttaaagacagcgcaggaccgtcagaaaagttacgctaacaatcgaaggcgtgaccttgagttcgaaaaaggagatcatgtgtacctgcgggtatcacccctccgtggtatgaggaggtttgggatgtccggcaagttagcaccccgctacatcggcccctacctcataaccgccagacgtggcgaagtggcttatcagcttgagctacctgaaggtctcgcagatgtgcacaacgtgttccacgtatcccagctaaagaaatgtcttcgagttccagaagagcaagttcccctgggtaatatcgtgctggaaaagaatctgacctacaaggaaagaccgaccaaggttcttgaagaggcagaacatgatataattgttgctagttcaacacagagtgcagtatcagctttgttgcaggatcttaaggaggattttgcactaaaggatttgggtgatttgcactatttccttggaatagaagtgaacaaggtaaatgatgggttgctactatctcaaggaaagtacactgctgacttgcttaagaaaaccaatatgagtgattgcaaaccttttaacacacctttatcaacatcagagaaactctctctacatgagggagatttacttgggtctagtgatgccacacagtatagaagcatagtaggggctctgcaatacttaactttgactagacctgatatctccttctcagtgaataaggtgtgtcagtttttacatgctcctactacagttcattgggcaacagtgaagaggattttaagatatttgaagtatacagccagtctaggacttaagtttgaaaaatcaaagtctggtcttgttagtgcttttacagatgcagattgggctggatcccttgatgacaggagatctactggaggctttgctatttatcttggctccaaccttgtgtcatggagtgcaagaaaacaggcaacagtgtctagatcaagcactgaagcggaatacaaagcacttgctaatgtaactgcagaattgatgtggatatag

SEQ ID NO: 15465 - DNA, 4971 bp, Oryza sativa
  Clone ID: TFbOSC400662j.C1.o1.np
atgactgtactcctactctataataaagagacctctgttgctgtgatattctatcttcctgtgataccagcactgtttcctgggactggtatcgattaacagatggcagtgaacgccagcttcagttcccacggttttggtgagggtcaccacgtcgctcagcttcgtgacctcgcccgtttccttggcttctcgtgtcccgagtacacggggtactccgtggaccgtgttccccctcactgtgagctctctgtgtacctttacccccgtggaggtatacacggagctggccttcgcccccaccacttcactgtggccaggcccactctccagatcgcccaccgtctcggaggttccgccttccggcagcttccacgccttccttctggccactcagacgccaggtacccttgtccgtacagcgagtctcagccagtgctgactcgcatggttgagctctcggaggctcaggccactcagcacgacctactccttgaggcttaccgctcccttgcccgccgctacgccgctttggaggcccgtttggccgaggagggtgtcacctcagttgacactatctcttgggactcaggccgcctctgccacgccagccacctgtcctcccacagctcccgcggctctgcccgcactcccagtggcccgcgctcccccagctcgcgtgcgccgtactcaccagtgtactccccctacccacacccagttagcccttcctacacccccggacacaccccagttgcttcctcccgccgtggcccacgctttatccgcaccgcgcggaagcgtgttgttggttcttccaccgtgttccgtttccactacccagctcccccaccgccagcggcccgtgctgctgccggccctcgacaggttccgccggtcccttcgcgtcagccgatcgacgtttcttcgactgaggagccgactacaggagcccgctttggttttgaagatggtagagttgaagcagaagcaaatcatgaatcagctaatgagcagtctcaccacagcaaccgttcgcaccgtactatttcccgcaacgcagaggttgagcaaccccgccgcagcaaccgctcgcatcgcacagcttcccgtgatgcagagatggaacagtctcaccgctctcaccgcactgccagtcacaattctggagaagaacgcctcccttccccacctcatgtggaaaacaacatgcaacacttaatggcagttcagacacaaatcttgcaaggaatagccgcagccgtagccggttatcagcataatgcgcatggaaatggccaccctcacatgggcaacaatagatccaagctgacagattttctgaggtcacgtccgccagagttctctcagaccgtcgagcccgtcgaggctgacgattggttgaaagatgttaatagaaaactcaacttagtgcagtgtactccggtcgagaagacgctctacgcctctcaccagctaagaggacctgctgcagattggtgggagaattactgcaatgcacaccctgaacccactaacattgcttgggatgagtttgctacggctttctgtgcagctcatgtgcctgaaagcaccattgacatgaagaaagaggaattcaacagacttaagcaaggcaacagcagtgtcaatgagtacctaagtatgttcaacaagttggctcggtacgcccctgaggaagtggactcagataagaagaagatcaggaaattcttgaaaggaatcgcagcacttctacttgaggatgccagaaaagaggctaccgaagaatacaagaaacgcaaatctaaccaccaggggaattcctcccaaggcgcacctcgccctcgctacggtcaacccatgcaataccaccagtcggtcactcaggctaaccgccagccaggctacgcccctcgtcctcagatgaaccgcccggcaccccagccacagcagcgtgcccctagtggcaatattgcgccaaacagtgttacctctttcaagtcaccgcagggaccgtcagcagttcagtgtttccggtgcaaccagatgggtcactatgccagacaatgccctcagaatcctaccaacaccaactcagggcatgctaatggcagcactgccagaactcctactccagcggcagctcagtctcgtcctagcactcaagcaagtggacaaggttcacgtgcttccaaccactttggtcgaggccgtgtgaatcacattcaagctgaaaccgctcaggatgctccagacgttgtgatgggtatgttctctgtcaactccgtacccgcaatagttctgtttgattcgggagcttcccattctttcatatcacaagcttttgtgaaaagaaatggttggaaaacccaaaatttacgtgtaccaatgatagtacattcccctggaaggaatataagggcaactcaaatatgcccggaagttaaccttagaattgaggaaattgacttcctagccaaaccgatagtcctagactcgcaaagcttggacaacatcctaggaatggattggttggctaagcacaaaggacagatagattgtgccgaaaagtccatcaccttgcaaggacctggaggaaagcaagtccgctttacccctaacactcctaccgcaagtcggtctatcttaacctgtttacaagtcacctccttggagtcggtgcccatagtttgtgaatatcccgacgtatttccggaagaattaacaagaatgccaccagaccgagagattgagttcgccatagaactggcaccaggcaccgcaccaattgcaaaaaaaccctaccgaatggcagctaatgagttagcagaaattaaaagacaaatcgaagagctggaaagtaaaggttatgtgcgacctagctcatccccttggggagccccagtgcttctggttaagaaaaaggatggctctgagagaatgctgaaaatcagatctgaagatatcccaaagaccgctttctcaacgcgttatggtctatatgagttcacagtaatgtccttcagactcaccaatgctccagcattcttcatgaacttaatgaacaaaatcttcatggaatacctggaccagtttgttgtggtattcatcgatgacatcctgatatactccaagaacgaggaagaacatgctgaacacctgaggttgataatggaaaagctcagggatcatcaactattcgcaaaattctcgaaatgcgaattctggttagtccgagtagcatttcttggacacgtgatttcctccaatggtgtcgaagtagatcccagcaaggttgaagctgtacttgcttggaacccgcccaagaatgtgtcagagattcgcagcttcctcggcttagctggatattatcgaagattcattgaaggattctctaagctagccagacctatgaccgagctgttaaagaaggaaaagaaatttcaatggtctgcagcctgtgaagacagcttccaagaaatgaagaaaaggttgaccactgccccagttctcaccttgccagatatccgaaaagatttcgagatcttctgtgatgcatcaagacaaggcttaggatgtgtcctaatgcaagaacgaaaggttgtggcctatgcatccaggcagctcaggcctcatgaagtcaattatcccacccatgatctcgagttggcagccgtggttcatgctcttaagatctggaggcactatttaatcgggaacagatgtgaagtatacactgatcaccaaagtcttaagtatatcttcacacagactgagttaaatatgagacagagaagatggttggaactaatcaaggattacgatcttggaatccactatcaccctggtaaagccaaggtggtcgctgatgcgctaagtcgcaaggcctatcacaatgtagctcaaatacggcctgaccaagatcacctgtgcagagaattggagaagttaaggctgaccgtggtacagtcaggtgtccctgccagcttgacagtatagcctaccctagagtcgcaaatccgggaggctcagaaagacgacgaagggataaaagaattaataaaaggaatacaggagaagaaagacaccaatttctccatagacaaccaaggcacagtttggtgcggtccacgcatctgtgtaccggccaagaaggagttaagagatctcatcctcaaggaagctcatgagtccgcctattccattcatccaggaagtacgaagatgtaccaagatatcaaggcatacttctggtgggctggaatgaagcgagatgtcacagaatacgtagccctgtgtgacatttgccaaagagtcaaggcggaacatcagaggccagttggtctgctgcaacccctaccgactcccgagtggaaatgggaagagatcggaatggatttcatcaccggtttgccaagaacccccaacggatacgactccatttgggtaatcgtggaccgactcacgaaatcagctcatttcgtgccagtgaaaatcacctatgatggaaagaaactagcagaactctacatgacctatgtcgtatgtagatttggctgtcccaagaaaattgtgtcagaccgaggcactcagttcacctcaagttatcaggccagcattcagatgtcgccgaatgaggcaatgttcggaagaaagtgccgcacccccttgtgctggaatgaggtgggcgaagcactggtattcggtccagacatactcaagtcagctgaagaacaagttaagctgatacgagaacgtttgaagacagcacaccgtcagaagaattacgcagacaatcgaaggtgtgaccttgagttcgaaaaaggagatcatgtgtacctgcgggtatcaccactccgcgcgctagcctccaagggccagaccgggtcgggccgaccccggtcggtccctccgcgtgcgcgcgatccaccgcgagccgtgaggctgcgcgtgggcccgccgcacctg

SEQ ID NO: 15466 - DNA, 4992 bp, Oryza sativa
  Clone ID: TFbOSC400702j.C1.o32.fg
atgactgtactcctactctgtaataaagagacctctgttgctatgatattctgtcttcctgtgataccagcattgtttcctgggactggtatcgatgaacagatggcagtgaacgccagcttcagttcccacggttttggtgagggtcaccacgtcgctcagcttcgtgacctcgcccgcttccttggcttctcgtgtcctgagtacacggggtactctgtggaccgtgttccctctcgttatgagctttcggtgtacctttaccctcgtggaggtatacacggggctggccttcgcccacaccacttcactgtggccaggcccactctccagatcgcccaccgcctcgggggctctgcctttcggcagctcctgcgccttccttctggccgcactgacactaggtacccttgcccgtacagcgagtctcagcctgtgctgactcgcatggttgagctctctgaggctcaggccacccagcacgaccttctccttgaggcttaccgctcccttgctcgccgctacgctgctttggaggcccgcctggccgaggagggtgtcacctcagttgacactgcctcttgggacttaggtcgcctctgccacgccagccacctgtcttcccacagctcccgcggctctgttcgcactcccagtggcccgcgcacccccagttcgcgtgtgccgtactccccagtgcactctccctaccctcacccagttagcccttcctacactcctggtcacaccccagttgcttcctcctgccgtggcccacgctttatccgcactgtgcggaagcgtgttgttggttcttccactgtgttccgctttgaccacccagctcgcccaccgccagcagcccgtgctgctgccggccctcgacaagttccgccgatctcttcgcgtcagccgatcgacgtctcttcgactgaggagccgactacaggagcccatttcggttttgaggaaggtagagttgagccagaagcaaatcatgagtcagctaatgagcagtctcaccacagcaaccgttcgcaccatactgcttcccgcaatgcagaagttgagcaaccccaccgcagcaaccgctcgcaccgcacagtttcccgtaatgcagaagtggaacagtctcaccgctctccccgcgctgccattcacaattctagggaagaacgcattccttccccaccccatgttgagaacaacatgcagcacttgatggcagttcagactcaaatcttgcaaggtttagccacagccatagccggtattcagcacaacgcgcatggaaatggccatccccacacgggcaacaacagatctaagctgacagactttctaaggtctcgtccgccagagttctcccagaccgtcgagcccgttgaggctgacgattggctgaaagatgttgagagaaaactcaacttagtgcagtgtactcctgttgagaagacgctctacgcctctcaccagctaagaggacctgctgcagattggtgggagaattattgcaacgcacaccccgaacccactaacattccatgggatgaattcgctgcagctttccgtgcagctcatgtgcctgaaagcactattgacatgaagaaggaagaatttaacaggctcaagcaaggcaataccagtgtcaatgagtatatgagtcagttcaacaagttggctcgatacgctcctgaggaagtggacacagacaagaagaagatcaggaagttcttgaaaggagtcacacacatgatcaacaagagacttctacttgaggatgccagaaaagaggctaccgaggagtataagaaacgcaagtctacccatcagggaaattcttcccgaggggaacctcgccctcgctttggacaacccatgcaatatcaccagtcagtcactcaggctaaccgccagccaagctatgcccctcgtcctcagatgaatcgtctggcacctcagccgcagcagcgtgccccaagtggcaataccgcgccaaacagtgttacctctttcaagtcaccgccaggactatcagcagttcagtgtttccggtgcaaccagatgggtcactatgccagacagtgccctcagaatcttaccaactccaactcagggcataccaatggcagcaccgccagaactcctactcctgcagcagctcagtcccgtcctagcacgcaggcaagtggacaaggttcccgtgcttccaacaactttggtcgagaccgagtgaaccacattcaagccgagaccgctcaggacgctccagacgttgttatgggtatgttctctgtcaactccgcacccgcaatagttctgtttgattcaggagcatcccattctttcatatcgcaagcttttgtgaaaagaaatggttggaaaacccaaaatttgcgagtaccaatgatagtacattcccctggaagggatataagggcaactaaaatatgctcggaagttaaccttagaattgaggaagttgacttcctagccaaaccgatagtcctagactcgcaaagcttggacatcattcttgggatggattggttggctaagcacaaaggacagatagattgtgccgaaaggtccatcaccttgcaaggacctggaggaaagcaagttcgctttacccccaacactcttactgcaagtcggtctatcctaaccagtttgcaagccacttctttggaatcggtacccatagtctgtgaatatcccgacgtatttccaaaagaattaacggaaatgccaccaaaccgagagattgagttcgccatagaactggcactaggcaccgcaccaattgcaaaaagtccctaccgaatggcagctaatgaattagcagaagtcaaaaagcagatcgaagaattggagagtaaaggttatgtgcgacctagctcatccccttggggagccccagtgcttctggttaagaaaaaggatggctctgagagaatgttgaaaatcagatatgaagatatcccgaagaccgctttctcaacgcgctatgggctgtatgagttcacagtgatgtccttcggactcaccaatgctccagcattcttcatgaacctgatgaacaaaatcttcatggagtacctggaccagtttgttgtggtattcatcgatgacatcctgatatactccaagaatgaggaagaacatgttgaacacctgaggctgataatggagaagctaagagatcatcaattgttcgctaagttctcaaaatgcgaattctggctggaccgagtagcattccttggtcacgtgatctcctctaacggtgtcgaagtagatcccagcaaggttgaagctgtccttgcttggtatcctcccaagaatgagtcagagatccgcagtttccttggcctagctggttactatcgaagattcatcgaagggttctctaagctagccagacctatgaccgagctgttaaagaaggaaaagaagtttgaatggtcagcagcctgtgaagacagctttcaagaaatgaagaaaagattgaccactgccccagttctcaccttgccagatatccgaaaagatttcgaaatcttctgtgatgcatcaagacaaggcttaggatgtgtcctaatgcaagagcgaaaggttgtggcctacgcatccaggcagcttaggcctcacgaagtcaactatcccacccatgatctcgagttggcagccgtggttcatgctcttaagatctggaggcactatttaatcgggaacagatgtgaagtatacaccgatcacaaaagtcttaagtacatcttcactcagaccgagttaaatatgaggcagagaagatggttggaactaatcaaggattacgatcttggaattcattaccatcccggtaaagctaatgtggtcgctgatacgctaagtcgcaagacctattgcaatgcagctcaaatatggccagaccaagatcgcctgtgcagagaattggagaagttaaggctgaccgtggtgcagtcaggtgtccctgccagcttgacagtgcagcctaccctagaatcgcaaatccgggaagctcagaaagatgatgaagggataaaagagctaataaaaagaatacagaagatgaaggacaccgatttctccatagacgatcaaggcacagtttggtgcggtccacgcatctgtgtaccggccaagaaggagttaagagacctcattttaaaagaagctcatgagtccgcctactccatctatccaggaagtacgaagatgtaccaggatatcaaggcatatttctggtgggttggaatgaagcgagatgtcgcagaatacgtagccctttgtgacatttgccagagagtcaaggcagagcatcagaggccagctggtctgctgcaacccctaccgattcccgagtggaaatgggaagagatcggaatggatttcataaccggtttgccaagaacccctagcgggtacgactccatctgggtaatcgtggatcgactcacgaaatcggcacatttcgtgccagcgaaaaccacctttgatggaaagaaactggcagaactctacatgacccatgtcgtgtgtcgatttggttgtcccaagaagattgtgtcggatcgaggcactcagttcacctcaagttatcaggccagcattcagatgtcgccgaatgaggcaatgttcggaagaaagtgccgcactcccttgtgctggaataaggttggcgaagcactggtgttcggtcctgacatactcaaggcagcagaagaacaagttaagctgatccgacaatgtttaaagacaactcagaaccgtcagaagaattacgctgacaatcggaggcgtgaccttgagtttgaaaaaggagatcttgtgtacttgcgggtatcacctctccgtggaatgaggaggtttgggatgtccggcaagttagcaccccgctacatcggcccctacctcataaccgccagacgtggtgtcacgccccgaactagccccgagcggaactag

SEQ ID NO: 15467 - DNA, 3969 bp, Oryza sativa
  Clone ID: TFbOSC400719j.C1.o29.fg
atggctagccgcccccgccgtgctgctcatgcaccagcccgcttcggttttgagcaaggtagagttgagccagaagcaaatcatgagtcagctaatgagcagtctcaccacagcaaccgttcgcaccatactgtttcccgcaatgcagaaattgagcaaccccaccgcagcaatcgctcgcatcacacagcttcccgtaatgcagaagtggaacagtctcaccgctctcatcgcactgccagtcacaattctggagaagaacgcctcccttccccacctcatgtggaaaacaatatgcagcacttaatggcagttcagacacaaatcgtgcaaggattagccgcagccatagccggctttcagcataatgcgcatggaaatggccaccctcacaggggcaacaatagatccaagctgacagactttctgaggtctcgtccgccagagttctctcagaccgtcaagcccgccgaggctgacgattggctgaaagatgttgatagaaaactcaacttagtgcagtgtactcctgttgagaagacgctctacgcctctcaccagctaagaggacctgctgcagattggtgggagaattactgcaatgcacaccctgaacccactaacattgcttgggatgagtttgttatggctttccatgcagctcatgtgcctaaaagcaccattgatatgaagaaagaggaatttaacaggcttaagcaaggcaacaacagtgtcaatgagtacctaagtcagttcaacaagttggctcgtgttacctctttcaagtcaccgctaggaccgtcagcagttcagtgtttccggtgcaaccagatgggtcactatgccagacagtgccctcagaatcctaccaacaccaactcagggcatgctaatggcagcactgccagaactcctactccagcggcagctcagtctcgtcctagctctcaggcaagtggacaaggttctcgggcttccaacaactttggtcgaggccgggtgaaccacattcaagctgagaccgctcaggatgctccagacgttgtgatgggtatgttctctgtcaactccgtacccgcaatagttctgtttgattcaggagcttcccattctttcatatcacaagcttttgtgaaaagaaatggttggaaaacccaaaatttacgtgtaccaatgatagtacattcccctgggaggaatataagggcaactcaaatatacccggaagttaaccttagaattgaggaagttgacttcctagccaaaccgatagtcctagactcgcaaagcttggacatcatcctagggatggattggttggctaagcacaaaggacagatagattgtgccgaaaagtccatcaccttgcaaggacctggaggaaagcaagtccgctttacctctaacacccctaccgcaagtcggtctatcctaacctatttacaagtcacctccttggagtcggtgcccatagtctgtgaatatcccgacgtatttccagaagaattaacgagtatgccatcagaccgagagattgagttcgccatagaactggcaccaggcaccgcaccaattgcaaaaagaccctaccgaatggcagctaatgagttagcagaagttaaaagacaaatcgaagaattggagagtaaaggttaccaccaattgaaaatcagatctgaagatatcccgaagaccgctttctcaacgcgttatggtctatatgagttcacagtgatgtccttcggactcaccaatgctccagcattcttcatgaacttaatgaacaaaatcttcatggaatacctggaccagtttgtcgtggtgttcatcgatgacatcctgatatactccaagaatgaggaagaacatgctgaacacctgatgctgataatagaaaagctcagggatcatcaactattcgctaaattctcgaaatgcgaattctggttagaccgagtagcatttcttggacacgtgatctcctccaacggtgtcgaagtagatcccagcaaggttgaggctgtacttgcttggaacccgcccaagaatgtgtcagagatccgcagcttccttggcttagctggatattatcgaagattcattgaaggattctctaagctagccagacctatgaccgagctgttaaagaaggaaaagaaatttcagtggtctacagcctgtgaagacagctttcaagaaatgaagaaaagacaaggcttaggatgtgtcctaatgcaagaacgaaaggttgtggcctatgcatccaggcagctcaggcctcatgaagtcaactatcccacccatgatctcgagttggcagccgtggttcatgctcttaagatctggaggcactatttaatcgggagtagatgtgaagtatacacagatcacaaaagtcttaagtacatcttcactcagaccgagttaaatatgaggcagagaagatggttggaactaatcaaggattacgatcttggaattcattaccaccccggtaaagctaatgtggtcgctgatgcgctaagtcgcaagacctattgcaatgtagctcaaatatggcctgaccaagatcacctgtgcagagaattggagaagttaaggctgaccgtggagaacaagggcaccgatttctccatagatgatcaaggcacagtttggtgcggtccacgcatctgtgtaccggccaagaaggagttaagagatctcattctaaaggaagctcatgagtccgcctactccattcatccaggaagtacgaagatgtaccaggatatcaaggcatacttctggtgggctggaatgaagcgagatgtcgcagaatacatagccctgtgtgacatttgccaaagagtcaaggcagagcatcagaggccagctggtctgctgcaacccctaccgattcccgagtggaaatgggaagagatcggaatggattttatcaccggtttgccaagaacccctagtgggtacgactccatctgggtaatcgtggatcgactcacgaaatcagctcatttcgtgccagtgaaaaccacctttgatggaaagaaactagcagaactgtacatgacccatgtcgtatgtagatttggctgtcccaagaagattgtgtcagaccgaggcactcagttcacctcaaggttctggaagcagttgcatgaagctctcggaaccgatctaaattttagtacagcttaccatccgcagaccgatggtcagacagaaagggtaaaccaaatcctagaagatatgctacgtgcgtgtgccctagatttcgaaggcacttgggatcgttgtttgccgtatactgagttctcatacaacaacagttatcaggccagcattcagatgtcgccgaatgaggcaatgttcggaagaaagtgccgcactcccttgtgctggaatgaggtgggcgaagcgctggtattcggtcctgacatgctcaaggcagcagaagaacaagttaagctgatccgagaacgtttaaagacatcgcagaactgtcagaagaattacgctgacaatcggaggcgtgaccttgagttcgaaaaaggagatcatgtgtacctgcgggtatcacctctccgtggtatgaggaggtttgggatgtccggcaagttagcaccccgctacatcggcccctacctcataaccgctagacgtggcgaagtggcttatcagcttgagttacctgaaggtctcgcagatgtgcacaacgtgttccacgtgtctcagttgaagaagtgtctccgtgttccagaagaacaagtccccctgggtaatattgagctggaaaagaacctggcctacaaggaaaggccgatcaaggttcttgaagaggcagaacgtcagacccgaaggaagaccatcaagttcgacaaggtccaatggagcaatcattctgaagatgaggcaacctgggaacgagaagatcttctccgcgccgagttcccggagctactcccttag

SEQ ID NO: 15468 - DNA, 5556 bp, Oryza sativa
  Clone ID: TFbOSC400741j.C1.o10.fg
atggcagtgaacgccagcttcagttcccacggttttggtgagggtcaccacgtcgctcagcttcgtgacctcgcccgtttccttggcttctcgtgtcccgagtacacggggtactctgtggaccgtgttccccctcactgtgagctctctgtgtacctttacccccgtggaggtatacacggagctggccttcgcccacaccacttcactgtggccaggcccaccctccagatcgcgtaccaggacctctcctggactgcgcttcgtcgcctggcccacgactacagccaccgtctcggaggctccgccttccggcagcttccacgccttccttctggccactcagacgccaggtacccttgtccgtacagcgagtctcagccagtactgactcgcatggttgagctttcggaggctcaggccactcagcacgacctactccttgaggcttaccgctcccttgcccgccgctacgccgctctggaggcccgtctggccgaggagggtgtcacctcagttgacactatctcttgggactcaggccgcctctgccacgccagccacctgtcctcccacagctcccgcggctctgcccgcactcccagtggcccgcgttcccccagctcgcgtgcgctgtactcaccagtgtactccccctacccgcacccagttagcccttcctacacccccagacacaccccagctgcttcctcccgccgtggcccacgctttatccgcactgcgcggaagcgtgttgttgggtcttccaccgggttccgtttccactacccagctcccctaccgccagcggcccgtgctgctgccggccctcgacagatggctagccgcccccgccgtgcagctcgtgcaccagcccgctttggttttgaagatggtagaaccgagccggaagcaaatcatgagtcagctaatgagcagtctcaccacagcaaccgttcacaccgtactgcttcccgcaatgcagaagttgagcaaccccgccgcagcaaccgctcgcatcgcacagcttcccgtgatgcagagatggaacagtctcaccgctctcaccgcactgccagtcacaattctggagaagaacgcctttcttccccacctcatgtggaaaacaacatgcagcacttaatggcagttcagacacaaatcttgcaaggattagccgcagccatagccggttttcagcataatacgcatggaaatggccaccctcacattagtaacaatagatccaagttgacagactttctgaggtctcgtccgccagagttctctcagaccgtcgagcccgtcgaggctgacgattggctgaaagatgttgatagaaaactcaacttagtgcagtgtactcctgttgagaagacgctctacgcctctcaccagctaagaggacccgctgcagattggtgggaaaattactgcaatgcacaccctgaacccactaacattgcttgggatgagtttgctacggctttccgtacagctcatgtgcctgaaagcgctattgatatgaagaaagaagaattcaacagacttaagcaaggcaacagcagtgtcaatgagtacctaagtatgttcaacaagttggctcggtacgcccctgaggaagtggacacagacaagaagaagatcaggaaattctttaaaggaatcgtagttggaatgagactccagttgattgctcatgatttccccacttttcaacatatgatcaacaaggcacttctactcgaggatgctagaaaagaggctaccgaagaatacaagaaacgcaagtctaaccataagggaaattcttcccgaggcgcacctcgcccttgctacggacaacccatgcaataccaccagtcggtcactcaggctaaccgccaaccaggctacgcccctcgtcctcagatgaaccgtccggcccctcagccacagcagcgtgcccctagtggcaatactgcgccaaacagcgttacctctttcaagtcaccgcagggaccgtcagcagttcagtgtttccggtgcaaccagatgggtcactatgctagacagtgccctcagaaccctaccaacaccaactcagggcatgcgaatggcagcactgccagaactcctaccccagcggcagctcagtctcgtcctagctctcaggcaagtggacaaggttcacatgtttccaacaactttggtcgaggccgggtgaaccacattcaagctgaaaccgctcaggatgctacagacgttgtgatgggtatgttctctgtcaactccgtacccgcgatagttctgtttgattcaggagcttcccattccatcatatcacaagcttttgtgaaaagaaatggttggaaaacccaaaatttacgtgtaccaatgataatacattcccctggaaggaatataagggcaactcaaatatgcccggaagttaaccttagaattgaggaagttaacttcctagccaaaccgatagtcctagactcgcaaagcttggacattatcctagggatggattggttggctaagcacaaaggacagatagattgtgccaaaaagtccatcaccttgcaaggacctagaggaaagcaagtccgctttacctctaacacccctaccacaagtcggtctatcctaacctgtttacaagtcaccaccttggagtcggtgcccatagtctgtgaatatcccgacgtattcccagaagaattaacgagtatgccaccagaccgagagattgagttcgccataaaactggcgccaggcaccgcaccaattgcaaaaagaccctaccgaatggcagctaatgagttagcagaagttaagagacaaatcgaagaattggagagtaaaggttatgtgcgacctagctcatccccttggggagccccagtgcttctggttaagaaaaaggatggctctgagagaatggtaatcgactatagagccctgaatgaagtaactataaagaacaagtacccgttgccacggattgacgatttgttcgatcaacttaaaggagcaagagttttctcaaaaattgacttgaggtcaggttaccaccaactgaaaatcagatctgaagatatcccgaagaccgctttctcaacgcgttatggtctatacgagttcacagtaatgtccttcggactcaccaatgctccagcgttcttcatgaacttaatgaacaaaatctttatggaatacctggaccagtttgtcgtggtgttcatcgatgacatcctgatatactccaagaatgaggaagaacatgctgaacacctgaggctgataatggaaaagctcagagatcatcaactattcgcaaaattctcgaaatgcgaattctggttagaccgagtagcatttcttggacacgtgatctcctccaacggtgtcgaagtagatcccagcaaggttgaagctgtacttgcttggaacccgcccacgaatgtgtcagagatccgcagcttccttggcttagctggatattatcgaagattcattgaaggattctctaagctagccagacctatgaccgagctgttaaagaaggaaaagaaatttcaatggtctgtagcctgtgaagacagctttcaagaaatgaagaaaaggttgaccactgccccagttctcaccttgccagatatccgaaaagatttcgagatcttttgtgatgcatcaagacaaggcttaggatgtgtcctaatgcaagaacgaaaggttgtggcctatgcatccaggcagctcaggcctcatgaagtcaattatcccacccatgatcttgagttggcagccgtggttcatgctcttaagatctggaggcactatttaattgggaacagatgtgaagtatacaccgatcacaaaagtctaaagtatatcttcacacagaccgagttaaatatgaggcaaagaagatggctggaactaatcaaggattacgatcttggaatccattaccatcctggtaaagctaacgtggtcgctgatgcgctaagtcgcaaggtctattgcaacgtagctcaaatatggcctgaccaagatcgcctgtgcagagaattggagaagttgaggctgaccgtggtacagtcaggtgtccctgccagcttgacagtacagcctaccctagagtcgcaaatccgggaagcccagaaagacgacgaagggataaaagagttaataaaaagaatacaggagaagaaagacaccaatttctccatagacgatcaaggcacggtttggtgcggtccacgcatctgtgtaccggccaagaaggagttaagagatctcatcctaaaggaagctcatgagtccgcctactccattcacccagggagtacgaagatgtaccaagatatcaaggcatacttctggtgggctggaatgaagcgagatgtcgcagaatacgtagccctgtgtgatgtttgccaaagagtcaaggcagaacatcagaagccagctggtctgctacaacccctaccgattcccgagtggaaatgggaagagatcggaatggatttcatcaccggtttgccaagaacccccagcgggtacgactccatttgggtaatcgtggaccgactcacgaaatcagctcatttcgtgccagtgaaaaccacctttgatggaaagaaactagcagaactctacatgacccgtgtcgtatgtagatttggctgtcccaagaaaatcgtgtcagaccgaggcactcagttcacctcaaggttctggaaccagttgcatgaagccctcggaaccgatttaaatttcagtacggcctaccatccgcagaccgatggtcagacagaaagggtaaaccaagtcctagaagacatgctacgagcgtgtgccttggatttcgaaggcacttgggatcgttgtttgccgtatgccgagttctcatacaacaacagctatcaggccagcattcagatgtcgccgaatgaggcaatgttcggaagaaagtgccgcactcccttgtgctggaatgaggcgggcgaagcactagtattcggtcctgacatactcaagacagcagaagaacaagttaagctaatccgagaacgtttaaagacagcgcagaacggtcagaaaaattacgctgacaatcggagacgtgaccttgagttcgaaaaaggagatcatgtgtacctgcgggtatcacccctccgtggtatgaagaggtttgggatgtccggcaagttagcaccccgctacatcggcccctacctcataaccgccagacgtggcgaggtggcttatcagcttgagctacctgaaggtctcgcagatgtgcacaacgtgttccacgtatcccagttaaagaaatgtcttcgagttccagaagagcaagtccccctgggtaacatcgagctggaaaagaatctaacctacaagaaaagaccgatcaaggttcttgaagaggcagaacgtcagactcgaaggaagaccatcaagttttacaaagtccaatggagcaatcattctgaagatgaggcaacctgggagcaagaagatcttctccgcgccgagttcccggagctgctcccttag

SEQ ID NO: 15469 - DNA, 4638 bp, Oryza sativa
  Clone ID: TFbOSC400773j.C1.o127.fg
atggcagtgaacgccagcttcagttcccacggtttcggtgagggtcaccacgtcgctcagcttcgtgacctcgcccgtttccttggcttctcgtgtcccgagtacacggggtactccgtggaccgtgttccccctcactgtgagctctctgtgtacctttaccctcgtggaggtatacacggagctggccttcgcccacaccacttcaccgtggccaggcccactctccagatcgcgtaccaggacctctcctggactgcgcttcgtcgcttggcccacgactacagccaccgtctcggaggctccgccttccggcagcttccacgccttccttctggccacgcagacgccaggtacccttgtccgtacagcgagtctcagccagtgctgactcgcatggttgagctttcggaggctcaggccactcagcacgacctactccttgaggcttaccgctcccttgcccgtcgctacgccgctttggaggcccgtctggccgaggagggtgtcacctcagttgacactatctcttgggactcaggtcgcctctgccgcgccagccacctgtcctcccacagctccagcggctctgcccgcactcccagtggcccgcgctcccccagctcgcgtgcgccgtactcaccagtgtactccccctacccacacccagttagcccctcctacacccccggacacaccccagttgcttcctcccgccgtggcccacgctttatccgcactgcgcggaagcgtgttgttggttcttccaccgtgttccgtttccactacccagctcccccaccgccagcgccccgtgctgctgccggccctcgacagctaagaggacctgctgtagattggtgggagaattactgcaatgcacaccctgaacccactaacattgcttgggatgagtttgctacggctttccgtgcagctcatgtgcctgaaagcaccattgacatgaagaaagaggaattcaacagacttaagcaaggcaacagcaatgtcaatgagtacctaagtatgttcaacaagttggctcggtacgctccggaagaagtggacacagacaaaaagaagatcaggaagttcttgaagggaatcgcagtcggaatgagactccagttgcttgctcctgacttccccacctttcaacatatgatcaacaaggcacttctacttgaggatgccagaaaagaggctaccaaagaatacaagaaacgcaagtctaaccatcagggaaattcttcccgaggcgcacctcgccctcgctacggtcaacccatgcaataccaccagtcggtcactcaggctaaccgccagccaggctacacccctcgtcctcagatgaaccgtccggcacctcagccacagcagcgtgcccctagtggcaatcctgcgccaaacagtgttacctctttcaagtcaccgcagggaccgtcagcagttcagtgtttccggtgcaaccagatgggtcactatgccagacagtgcccccagaatcctatcaacaccaactcagggcatgctaatggcagcactgccaggacttctactccagcggcagctcagtctcgtcctagctctcaggcaagtggacaaggttcacgtgcttccaacaactttggtcgaggtcgggtgaaccacattcaagctgaaaccgctcaggatgctccagacgttgtgatgggtatgttctttgtcaactccatacccacaatagttctgtttgattcgggagcttcccattccttcatatcacaagcttttgtaaaaagaaatggttggaaaacccaaaatttgcgtgtgccaatgatagtacattcccctggaaggaatataagggcaactcaaatatgcccggaagttaaccttagaattgaggaggttgacttcctagccaaaccaatagtcctagactcgcaaagcttggacatcatcctagggatggattggttggctaagcacaaaggacagatagattgtgccgaaaaatccatcaccttgcaaggacctggaggaaagcaagtccgctttacctctaacacccctaccgcaagtcggtctattctaacctgcttacaagtcaccaccttggagtcggtgcctatagtctgtgaatatcccgacgtatttccggaagaattaacgggtatgccaccagacagagaggttgagtttgccatagaactggcgccaggcaccgcaccaatcgcaaaaagaccctaccgaatggcagctaatgagttagcagaagttaaaagacaaaccgaagaattggagagtaagggttattttgtcgtggtgttcatcgacaacatcctgatatactccaagaatgaggaagaacatgctgaacacctgaggatgataattgaaaagctcagggatcatcaactatacgctaaattcttgaaatgcgaattctggttagatcgagtagcatttcttggacacgtgatctcctccaacggtgtcgaagtagatcccagcaaggttgaagctgtacttgcttggaacccgcccaagaatgtgtcagaaattcgcagcttccttggcttagctggatattatcgaagattcattgaaggattctctaagctagccagacctatgaccgagctgttaaagaaggaaaagaaatttcaatggactgcagcctgtgaagacagctttcaagaaatgaagaaaaggttgaccactgccccagttctcaccttgccagatatccaaaaagatttcgaaatcttctgtgatgcatcaagacaaggcttaggatgtgtcctaatgcaagaacgaaaggttgtggcctacgcatccaggcagctcaggcctcatgaagtcaattatcccacccatgatctcgagttggcagctgtggttcatgctcttaagatctggagacactatttaatcgggaacagatgtgaagtatacaccgatcacaaaagtcttaagtacatctttactcagaccgagttaaatatgaggcagagaagatggttggaactaatcaaggattacgatcttggaattcattaccaccccggtaaagctaacgtggtcgctgatgcgctaagtcgcaaggcctattgcaatatagctcaaatacggcctgaccaagatcgcctgtgcagagaaatggagaagttgaggctgaccgtggtacagtcaggtgtccctgccagcttgacagtacagcctaccctagagtcgcaaatccgggaagctcagaaagatgacgaagggataagagagttaataaaaagaatacaggagaagaaagacaccaatttctccatagacgatcaaggcacagtttggtgcggtccccgcatctgtgtaccggccaagaaggagttaagagatctcatcctaaaggaagctcatgagtccgcctactccattcatctaggaagtacgaagatgtaccaagatatcaaggcatacttctggtgggctggaatgaagcgagatgtcgcagaatacgtagccttgtgcgacatttgccaaagagtcaaggcagaacatcagaggccagctggtctgctgcaacccctaccgattcccgagtggaaatgggaagagatcggaatggattttatcaccggtttgccaagaacccctagcgggtacgactccatctgggtaatcgtggaccgactcacgaaatcagctcatttcgtgccagtgaaaaccacctttgatgggaagaaactagtagaactctacatgacccatgtcgtatgtagatttggctgtcccaagaagattgtatcagatcgaggcactcagtttacctcaaggttctggaagcagttgcatgaagcccttggaaccgatctgaattttagtacggcctaccatccgcagaccgatggacagacagaaagggtaaaccaaatcctagaagacatgctacgtgcgtgtgccctggatttcgaaggcacttgggatcgttgtttgccgtatgctgagttctcgtacaacaacagttatcaggccagcattcagatgtcgccgaatgaggcaatgttcggaagaaagtgccgcactcccttgtgctggaatgaggtgggcgaagcgctggtattcggtcctgacatactgaaggcagcagaagaacaagttaagctgatccgagaacgtttgaagacagcacagaaccgtcagaagaattacgctgacaatcggaggcgtgaccttgagttcaaaaagggagatcatgtgtacctgcgggtatcacccctccgtggtatgagaaggtttgggatgtccggcaagttagcaccccgctacatcggcccctacctcataaccgccagatgtggcgaagtggcttatcagcttgagttacctgaaggtctcgcagatgtgcacaacgtgttccacgtatcccagttaaagaaatgtcttcgagttccagaagaacaagttcccctgggtaatatcaagctggaaaagaatctgacctacaaggaaagaccgatcaaggttcttgaagaggcagaacgtcagactcgaaggaagaccaccaagttctacaaggtccaatggagcaaccattctgaagataaggcaacctgggagcgagaagatcttctccgcgccgagttcccggagctgctcaattag

SEQ ID NO: 15470 - DNA, 4629 bp, Oryza sativa
  Clone ID: TFbOSC400964j.C1.o53.fg
atggcagtgaacgccagcttcagttcccatggttttggtgagggtcaccacgtcgctcagcttcgtgacctcgcccgtttccttggcttctcgtgtcccgagtacacggggtactccgtgggccgtgttccccctcactgtgagctctctgtgtacctctacccccgtggaggtatacacggagctggccttgcccacaccacttcactttggccaggcccactctccagatcgcgtaccaggacctctcctggactgcgcttcgtcgcctggcccacgactacagccaccgtctcgggggctccgccttccggcagcttccacgccttccttctggccactcagacgccagctcgtgcgccagcccgctttggttttgaagatggtagagccgagccagaagtaaatcatgagcagtctccccacagcaaccgttcgcaccgtactgcttcccgcaacgcagaagttgagcaaccccgccgcagcaaccgctcgcatcgcacggcttcctgtgatgcagagatggaacagtctcaccgctctcaccacactgccagtcacaattctggagaagaacgcctcccttccccacctcatgtggaaaacaacatgcagcacttaatggcagttcagacacaaatcttgcaaggattagccgcagccgtagccggttttcagcataatgcgcatggaaatggccaccctcacatgagcaacaatagatccaagctgacagattttctgaggtctcgtccgccagagttctctcagaccgtcgagcccgtcgaggctgacgattggctgaaagatgttgatagaaaattcaacttagtgcagtgtacccctgttgagaagacgctctacgcctctcaccagctaagaggacctgctgcagattggtgggagaattactgcaatgcacaccctgaacccactaacattgcttgggatgagtttgctacagctttccgtgcagctcatgtacctgaaagcaccattgacatgaagaaagaggaattcaacagacttaagcaaggcaacagcaatgtcaatgagtacctaagtcagttcaacaagttggctcggtatgcccctgaggaagtggacacagacaagaagaagatcaggaagttcttgaagggaatcgcagttggaatgagactccagttgcttgctcatgacttccctacttttcaacatatgatcaacaaggcacttctacttgaggatgccagaaaagaggctaccgaagaatacaagaaacgcaagtctaaccatcagggaaattcttcccgaggcgcacctcgccctcgctacggtcaacccatgcaataccatcagtcggtcactcaagctaaccgccagccaggctacgcccctcgtcctcagatgaaccgtccggcaccccagccacagcagcgtgcccctagtggcaatactgcgccaaacagtgttacctctttcaagtcaccgcagggaccgtcagcagttcagtgtttccggtgcaaccagatgggtcactatgctagacagtgccctcagaatcctaccaacaccagctcagggcatgctaatggcagcactgctagaactcctactccagcggcagctcagtctcgtcctagctcccaggcaagtggacaaggttctcatgcgtccaacaactttggtcgaggccgagtgaaccacattcaagccgagactgctcaggatgctccagacgttgtgatgggtatgttctctgtcaactccatacccgcaatagttctgtttgattcaggagcttcccactccttcatatcacaagcttttgtgaaaagaaatggttggaaaacccaaaatttacgtgtaccgatgatagtacattcccctgggagggatataagggcaactcaaatatgcccggaagttaaccttagaattgaggaagttgacttcctagccaaaccgatagtcctagactcgcaaagcttggacatcatcctagggatggattggttggcaaagcacaaaggacagatagattgtgccgaaaagtccatcactttgcaaggacctggaggaaagcaagtccgctttacctctaacagtcctaccgcaagtcggtctatcttaacctgtttacaagtcacctccttggagtcggtgcccatagtctgtgaatatcccgacgtatttccagaagaattaacgagtatgccaccagaccgagagattgagttcgccatagaactggcaccaggcaccgcaccaattgcaaaaagaccctaccgaatggcagctaatgagttagcagaagtcaaaagacaaatcgaagaattggagagtaaaggttatgtgcgacctagctcatccccttggggagccccagtgcttctggttaagaaaaaggatggctctgaaagaatgtttgtcgtggtgttcatcgatgacatcctaatatactccaagaatgaggaagaacatgctgaacacctgaggctaataatggaaaagctcagggatcatcaactattcgctaaatttttgaaatgcgaattctggttagaccgagtagcattccttggacacgtgatctcctccaacggtgtcgaagtagatcccagcaaggttgaagctgtacttgcttggaacccgcccaagaatgtgtcagagattcgcagcttccttggcttagccggatattatcgaagattcatcgaaggattctctaagttagccagacccatgaccgagctgttaaagaaggaaaagaaatttcaatggtctgcagcctgtgaagacagctttcaagaaatgaagaaaaggttgaccactgccccagttctcaccttgccagatatccgaaaagatttcgagatcttctgtgatgcatcaagacaaggcttagaatgtgtcctaatgcaagaacgaaaggttgtggcctatgcatccaggcagctcagacctcatgaagtcaattatcccacccatgatctcgaattggcagccgtggttcatgctcttaagatctggaggcactatttaatcgggaacagatgtgaagtatacaccgatcacaaaagccttaagtacatcttcacacagacggagttaaatatgaggcagagaagatggttggaactaatcaaggattacgatcttggaattcattaccacccctgtaaagccaacgtggtcgctgatgcgctaagtcgcaaggcctattgcaatgtagctcgaatacggcctgaccaagatcgcctgtgcagagaattggagaagttgaggctgaccgtggtgcagtcaggtgtccctgccagcttgacagtacagcctaccctagagtcgcaaatccgggaagctcagaaaaacgacgaagggataaaagagttaataaaaagaatacaggagaagaaagacaccaatttctccatagacgaccaaggcacagtttggtgcggtccacgcatctgtgtaccggccaagaaggaattaagagatctcatcctaaaagaagctcatgagtccgcctactccattcatccaggaagtacgaagatgtaccaagatatcaaggcatatttctggtgggctggaatgaagcgagacgtcgcagaatacgtagccttgtgtgacatttgccaaagagtcaaggcagagcatcagaggcccgctggtctgctacagcccctaccaattcccgagtggaaatgggaagaaatcggaatggatttcatcaccggtttgccaagaacccctagcgggtacgactccatttgggtaatcgtggaccagctcacgaaaccggctcatttcgtgccagtgaaaaccacctatgatggaaagaaactagcagaactctacatgacccatgtcgtatgtagatttggctgtcccaagaaaattgtgtcagaccgaggcactcagttcacctcaaggttctggaagcagttgcatgaagccctcggaaccgatctaaactttagtacagcttaccatccgcagaccgatggtcagacagaaagaatgtcgccgaatgaggcaatgttcggaagaaagtgccgcacccccttgtgctggaatgaggtgggcgaagcgctggtattcggtcctgacatactcaaggcagcagaagaacaagttaagctaatccgagaacatttaaagacagcgcagaaccgtcagaagaattacgctgacaatcggaggcgtgaccttaagttcgaaaaaggagatcatgtgtacctgcgggtatcacccctccgtggtatgaggaggtttgggatgtccggcaagttagcaccccgctacatcggcccctacctcataactgccagacgaggcgaagtggcttatcagcttgagttacctgaaggtctcgcagatgtgcacaacgtgttccacgtatctcagttaaagaaatgtcttcgagttccagaagagcaagtccccctgggtaatatcgagctggaaaagaatctgacctacaagggaagaccaatcaaggttcttgaagaggcagaacgtcaaactcgaaggaagaccatcaagttctacaaagtccaatggagcaaccattctgaagatgaggcgacctgggagcgagaagatcttctccacgccgagttcccggagctgctcccttag

SEQ ID NO: 15471 - DNA, 5046 bp, Oryza sativa
  Clone ID: TFbOSC400966j.C1.o1.fg
atgggtggaatgggagacatgtggattcaccggggtggtgtctgggaggacccctgggcttcctggcacagtatggtctgggacctaacctgttgttggtctgggacccctctcgtcggcatatggcccactctccagatcgcgtaccaggacctctcctggactgcgcttcgtcgcctggcccacgactacagccaccgtctcgggggctccgccttccggcagcttccacgccttccttctggccactcagacgccaggtacccttgtccgtacagcgagtctcagccagtgctgactcgcatggttgagctttcggaggctcaggccactcagcacgacctactccttgaggcttaccgctcccttgcccgccgctacgccgccttggaggcccgtctggccgaggagggtgtcacctcagttgacactatctcttgggactcaggccgcccctgtcacgccagccacctgtcctcccacagctcccgcggctctgcccgcactcccagtggcccgcgctcccccagctcgcgtgcgccgtactcaccagtgtactccccctacccacacccagttagcccttcctacacccccggacacaccccagttgcttcctcccgccgtggcccacgctttatccgcaccgcgcggaagcgtgttgttggttcttccaccgtgttccatttccactacccagctcccctaccgccagcggcccgtgctgctgccggccctcgacagatggctagccgcccccgccgtgcagctcgtgcgccagcccgctttggttttgaagatggtagagccgagccagaagtaaatcatgagcagtctccccacagcaaccgttcgcaccgtactgcttcccgcaacgcagaagttgagcaaccccgccgcagcaaccgctcgcatcgcacggcttcctgtgatgcagagatggaacagtctcaccgctctcaccacactgccagtcacaattctggagaagaacgcctcccttccccacctcatgtggaaaacaacatgcagcacttaatggcagttcagacacaaatcttgcaaggattagccgcagccgtagccggttttcagcataatgcgcatggaaatggccaccctcacatgagcaacaatagatccaagctgacagattttctgaggtctcgtccgccagagttctctcagaccgtcgagcccgtcgaggctgacgattggctgaaagatgttgatagaaaattcaacttagtgcagtgtacccctgttgagaagacgctctacgcctctcaccagctaagaggacctgctgcagattggtgggagaattactgcaatgcacaccctgaacccactaacattgcttgggatgagtttgctacagctttccgtgcagctcatgtacctgaaagcaccattgacatgaagaaagaggaattcaacagacttaagcaaggcaacagcaatgtcaatgagtacctaagtcagttcaacaagttggctcggtatgcccctgaggaagtggacacagacaagaagaagatcaggaagttcttgaagggaatcgcagttggaatgagactccagttgcttgctcatgacttccctacttttcaacatatgatcaacaaggcacttctacttgaggatgccagaaaagaggctaccgaagaatacaagaaacgcaagtctaaccatcagggaaattcttcccgaggcgcacctcgccctcgctacggtcaacccatgcaataccatcagtcggtcactcaagctaaccgccagccaggctacgcccctcgtcctcagatgaaccgtccggcaccccagccacagcagcgtgcccctagtggcaatactgcgccaaacagtgttacctctttcaagtcaccgcagggaccgtcagcagttcagtgtttccggtgcaaccagatgggtcactatgctagacagtgccctcagaatcctaccaacaccagctcagggcatgctaatggcagcactgctagaactcctactccagcggcagctcagtctcgtcctagctcccaggcaagtggacaaggttctcatgcgtccaacaactttggtcgaggccgagtgaaccacattcaagccgagactgctcaggatgctccagacgttgtgatgggtatgttctctgtcaactccatacccgcaatagttctgtttgattcaggagcttcccactccttcatatcacaagcttttgtgaaaagaaatggttggaaaacccaaaatttacgtgtaccgatgatagtacattcccctgggagggatataagggcaactcaaatatgcccggaagttaaccttagaattgaggaagttgacttcctagccaaaccgatagtcctagactcgcaaagcttggacatcatcctagggatggattggttggcaaagcacaaaggacagatagattgtgccgaaaagtccatcactttgcaaggacctggaggaaagcaagtccgctttacctctaacagtcctaccgcaagtcggtctatcttaacctgtttacaagtcacctccttggagtcggtgcccatagtctgtgaatatcccgacgtatttccagaagaattaacgagtatgccaccagaccgagagattgagttcgccatagaactggcaccaggcaccgcaccaattgcaaaaagaccctaccgaatggcagctaatgagttagcagaagtcaaaagacaaatcgaagaattggagagtaaaggttatgtgcgacctagctcatccccttggggagccccagtgcttctggttaagaaaaaggatggctctgaaagaatgtttgtcgtggtgttcatcgatgacatcctaatatactccaagaatgaggaagaacatgctgaacacctgaggctaataatggaaaagctcagggatcatcaactattcgctaaatttttgaaatgcgaattctggttagaccgagtagcattccttggacacgtgatctcctccaacggtgtcgaagtagatcccagcaaggttgaagctgtacttgcttggaacccgcccaagaatgtgtcagagattcgcagcttccttggcttagccggatattatcgaagattcatcgaaggattctctaagttagccagacccatgaccgagctgttaaagaaggaaaagaaatttcaatggtctgcagcctgtgaagacagctttcaagaaatgaagaaaaggttgaccactgccccagttctcaccttgccagatatccgaaaagatttcgagatcttctgtgatgcatcaagacaaggcttagaatgtgtcctaatgcaagaacgaaaggttgtggcctatgcatccaggcagctcagacctcatgaagtcaattatcccacccatgatctcgaattggcagccgtggttcatgctcttaagatctggaggcactatttaatcgggaacagatgtgaagtatacaccgatcacaaaagccttaagtacatcttcacacagacggagttaaatatgaggcagagaagatggttggaactaatcaaggattacgatcttggaattcattaccacccctgtaaagccaacgtggtcgctgatgcgctaagtcgcaaggcctattgcaatgtagctcgaatacggcctgaccaagatcgcctgtgcagagaattggagaagttgaggctgaccgtggtgcagtcaggtgtccctgccagcttgacagtacagcctaccctagagtcgcaaatccgggaagctcagaaaaacgacgaagggataaaagagttaataaaaagaatacaggagaagaaagacaccaatttctccatagacgaccaaggcacagtttggtgcggtccacgcatctgtgtaccggccaagaaggaattaagagatctcatcctaaaagaagctcatgagtccgcctactccattcatccaggaagtacgaagatgtaccaagatatcaaggcatatttctggtgggctggaatgaagcgagacgtcgcagaatacgtagccttgtgtgacatttgccaaagagtcaaggcagagcatcagaggcccgctggtctgctacagcccctaccaattcccgagtggaaatgggaagaaatcggaatggatttcatcaccggtttgccaagaacccctagcgggtacgactccatttgggtaatcgtggaccagctcacgaaaccggctcatttcgtgccagtgaaaaccacctatgatggaaagaaactagcagaactctacatgacccatgtcgtatgtagatttggctgtcccaagaaaattgtgtcagaccgaggcactcagttcacctcaaggttctggaagcagttgcatgaagccctcggaaccgatctaaactttagtacagcttaccatccgcagaccgatggtcagacagaaagaatgtcgccgaatgaggcaatgttcggaagaaagtgccgcacccccttgtgctggaatgaggtgggcgaagcgctggtattcggtcctgacatactcaaggcagcagaagaacaagttaagctaatccgagaacatttaaagacagcgcagaaccgtcagaagaattacgctgacaatcggaggcgtgaccttaagttcgaaaaaggagatcatgtgtacctgcgggtatcacccctccgtggtatgaggaggtttgggatgtccggcaagttagcaccccgctacatcggcccctacctcataactgccagacgaggcgaagtggcttatcagcttgagttacctgaaggtctcgcagatgtgcacaacgtgttccacgtatctcagttaaagaaatgtcttcgagttccagaagagcaagtccccctgggtaatatcgagctggaaaagaatctgacctacaaggaaagaccaatcaaggttcttgaagaggcagaacgtcaaactcgaaggaagaccatcaagttctacaaagtccaatggagcaaccattctgaagatgaggcgacctgggagcgagaagatcttctccacgccgagttcccggagctgctcccttag

SEQ ID NO: 15472 - DNA, 5292 bp, Oryza sativa
  Clone ID: TFbOSC400993j.C1.o80.fg
atggcagtgaacgccagcttcagttcccacggttttggtgagggtcaccacgtcgctcagcttcgtgacctcgcccgcttccttggcttttcgtgtcccgagtacacggggtactccgtggaccgtgttccccctcgctgtgagctctctgtgtacctttaccctcgtggaggtatacacggagctggccttcgcccacaccacttcactgtggccaggcccactctccagatcgcgtaccaggacctctcctgtcgcgaccgagaaaaatacattttcccgaaagctagtgtattaatccccgtcccaggaaaagccgggactgagccacaaactaagccttacccactagacatgtggaagtacggtagtgctttgcaacagaggcccgagcttaatccttatattggccggggtgctacttcccacaactggcatgcacccaaaccccaccggaaaacaggttttaggggttttgaaagaggaagagagggtggaaccatgaatagagtacccactagttgggattttgtttatcctagggtgaacaaggtcgacggcgacgacgaaaaggcggccggagcggaggaaggcggcggcgcggctcgggtcgacggggacggcggcgctccgacgatcgacgagcgaaacggaggggtggacgaggtcggcgaggatgcggcgaagccgaaggaggcggcgccgaggtgggaggtggtccagggcgacgacgtcggcggaccggagctcggcggcgacggcggagagagagagcgacggcgcgagctcgattccgccgaggaggaagggcggcgagaggcggaaacggacggaggaggacgtgacatctcctggactacgcttcgtcgcttggcccacgactacagccaccgtctcgggggctctgccttccggcagctcccacgccttccttctggccaagcagacgccaggtacccttgtccgtacagcgagtctcagccagtgctgactcgcatggttgagctttcggaggctcaggccactcagcacgacctactccttgaggcttaccactcccttgcccgccgctacgccgctctggaggcccgtctggccgaggagggtgtcacctcagttgacactgtctcttgggactcaggccgcctctgccacgccagccacctgtcctcccacagctcccgcggctctgctcgcactcccagtggcccgcgctcccccagctcgcgtgcgccgtactcaccagtgtactctccctacccacacccagttagcccttcctacacccccggacacaccccagttgcttcctcccgccgtggcccacgctttatccgcactgcgcggaagcgcgttgttggttcttccaccgtgttccgcttcgactacccagctcccccaccgccagcggcccgtgctgctgccggccctcgacagatggctagccgcccccgccgtgctgcccatgcgccagcccgcttcggttttgaagaaggtagagttgtgacagaagcaaatcatgagtcagctaatgagcagtctcaccacagcaacagttcgcaccgtactgcttcccgcaacgcagaagttgagcaaccccgccgcagcaatcgctcgcatcacacagcttcccataatgcagaagtggaacagtctcaccgctctcaccgcactgccagtcacaattctggagaagaacgcctcccttccccacctcatgtggaaaacaacatgcagtacttaatggcagttcagacacaaatcttgcaaggattagccgcagccatagccggttttcagcatagtgcgcatggaaatggccaccctcacatgggcaacaatagatccaagctgacagactttctgaggtctcgtccgccagagttctctcagaccgtcgagcccgtcgaggctgacgattggctgaaagatattgatagaaaactcaacttagtacagtgtactcctgttgagaagacgctctacgcctctcaccagctaagaggacctgctgcagattggtgggagaattactgcaatgcacaccctgaacccactaacattgcttgggatgagtttgctacggctttccgtgcagctcatgtgcctgaaagcaccattgacatgaagaaagaggaatttaacaagcttaagcaaggcaacaacagtgtcaatgagtacctaagtctgttcaacaagttggctcggtacgcccctgaggaagtggacacagacaagaagaagatcaggaagttcttgaagggaatcgcagttggaatgagactccagttgcttgctcatgacttcctcacttttcaacatatgatcaacaaggcacttctacttgaggatgccagaaaagaggctaccgaagaatacaagaaacgcaagtcaccgctaggaccgtcagcagttcagtgtttccgatgcaaccagatgggtcactatgccagacagtgccctcagaatcctaccaacaccaactcagggcatgctaatggcagcactgccagaactcctactccagcggcagctcagtctcgtcctagctctcaggcaagtggacaaggttctcgtccttccaacaactttggtcgaggccgggtgaaccacattcaagctgagaccgctcaggatgctccagacgttgtgatggaggaattaacgagtatgccaccagaccgagagattgagtttgccatagaactggcaccaggcaccgcaccaattgcaaaaagaccctaccgaatggcagctaatgagttagcagaagttaaaaggcaaatcgaagaattggagagtaagggttatgtgcgacctagctcatccccttggggagccccagtgctcctggttaagaaaaaggatggctctgagagaatggtaatcgactatagagccctgaatgaagtaactataaagaacaagtacccgttgccacggattgacgatttgttcgatcaacttaaaggagcaagagttttctctaaaattgacttgagatcaggttaccaccaattgaaaatcagatctgaagatatcccgaagaccgctttctcaacgcgtatgtttgtcgtagtgttcatcgatgacatcctgatatactccaagaatgaggaagaacatgctgaacacctgaggctgataatggaaaagctcagggatcatcaactattcgctaaattctcaaaatgcgaattctggttaaaccgagtagcatttcttggacacgtgatctcctccaacggtgtcgaagtatatcccagcaaggttgaagctgtacttgcttggaacccgcccaagaatgtgtcagagattcgcagcttccttggcttagctggatattatcgaagattcattgaaggattctctaagctagccagacctatgaccgagctgttaaagaaggaaaagaaatttcaatggtctgcagcttgtgaagacagctttcaagaaatgaagaaaaggttgaccactgccccagttctcaccttgccagatatccgaaaagatttcaagatcttctgtgatgcctcaagacaaagcttaggatgtgtcctaatgcaaaaacgaagggttgtggcctatgcatccaggcagctcaggcctcatgaagtcaactatcccacccatgatctcgagttggcagccgtggttcatgctcttaagatctggaggcactatttaatcgggaacagatgtgaagtatacaccgatcacaaaagtcttaagtacatcttcactcagaccgagttaaatatgaggcagagaagatggttggaactaatcaaggattacgatcttggaattcattatcaccccggtaaagccaacgtggtcgctgatgcgctaagtcgcaagacctattgcaatgtagctcaaatacggcctaaccaagatcgcctgtgcaaagaattggagaagttgaggctgaccgtggtacagtcgggtgtccctgccagcctgacggtgcagccaaccctagaatcgcaaatccgggaggctcagaaagatgacgaagggataaaagaattaataaaaaaaatacgggagaagaaagacaccgatttctccatagacgatcaaggcacagtttggtgcggtccacgcatctgtgtaccggccaagaaggatttaagagatctcatcctaaaggaagctcatgagtccgcctactccattcatccaggaagtacgaagatgtaccaggatatcaaggcatatttctggtgggctggaatgaagcgagatgtcgcagaatacgtagccctgtgtgacatttgccaaagagtcaaggcagagcatcagaggccagctgggctgctgcaacccctaccgatccccgagtggaaatgggaagagatcggaatggatttcatcaccgggttgccaagaacccctagcgggtacgactccatctgggtaatcgtggaccgactcacgaaatcagctcatttcgtgccagtgaaaaccacctttgatggaaagaaactagcagaactctacatgacccatgtcgtgtgtagatttggctgtcccaagaagattgtgtcagaccgaggcactcagttcacctcaaggttctggaagcagttgcatgaagccctcggaaccgatctaaattttagtacagcctaccatccgcagaccgatggtcagacagaaagggtaaaccaaatcctagaagacatgctacgtgcgtgtgccctggatttcgaaggcacttgggatcgttgtttgccgtatgctgagttctcatacaacaacagttatcaggccagcattcagatgtcgccgaatgaggcaatgttcggaagaaagtgccgcactcccttgtgctggaatgaggtgggcgaagcgctggtattcggtcccgacatacttaaggcagcagaagaacaagttaaactgatccgagaacgtttaaagacagcgcagaacagtcagaagaattacgctgacaatcggagacgtgaccttgagttcgaaaaaggagatcatgtgtacctgcgggtatcgcctctccgtgatgtgcacaacgtgttccacgtatcccagttaaagaaatgtctccgtgttccagaagaacaagttcccctgggtaatatcgagctggaaaagaatctgacctacaaggaaagaccgatcaaggttcttgaagaggcagaacgtcagactcgaaggaagaccgtcaagttctacaaggtcaaatggagcaatcattctgaagatgaggcaacctgggagcgagaagatcttctccgcgccgagttcccggagctgcttccttag

SEQ ID NO: 15473 - DNA, 5364 bp, Oryza sativa
  Clone ID: TFbOSC401121j.C1.o38.fg
atggcagtgaacgccagcttcagctcccacggttttggtgagggtcaccacgtcgctcagcttcgtgacctcgcccgtttccttggcttctcgtgtcccgagtacacggggtactccgtggaccgtgttccccctcactgtgagctctctgtgtacctttacccccgtggaggtatacacggagctggccttcgtccacaccacttcaccgtggccaggcccactctccagatcgcgtaccaggacctctcctggactgcgcttcgtcgcctggcccacgactacagccaccgtctcgggggctccgccttccggcagcttccacgccttccttctggccactcagacgccaggtacccttgtccgtacagcgagtctcagccagtgctgactcgcatggttgagctttcggaggctcaggccactcagcacgacctactcctggaggcttaccgctcccttgcccgccgctacgccgccctggaggcccgtctggccgaggagggtgtcacttcagttgacactgtctcttgggactcaggccgcctctgccacgccagccacctgtcctcccacagctcccgcggctctgcccgcactcccagtggcccgcgctcccccagctcgcgtgcgccgtactcaccagtgtactccccctacccacacccagttagcccttcctacacccccggacacaccccagttgcttcctcccgccgtggcccacgctttatccgcaccgcgcggaagcgtgttgttggttcttccaccgtgttccgttttcactacccagctcccccaccgccagcggcccgtgctgctgccggccctcgacagatggctagccgtccccgccgtgcagctcgtgcaccagcccgctttggttttgaaaatggtagagttgagccagaagaaaatcatgagtcagctaatgagcagtctcaccacagcaaccgttcgcaccgtactgcttcccgcaacgcagaagttgagcaaccccgccgcagcagccgctcgcatcgcacagtttcccgtaatgcagagatggaacagtctcaccgctctcaccgcactgccagtcacaattctggagaagaacgcctcccttccccacctcatgtggaaaacaacatgcaacacttaatggcagttcagacacaaatcttgcaaggattagccgcagccgtagccggttttcagcataatgcgcatggaaatggccaccctcacatgagcaacaatagatccaagctgacagattttctgaggtcacgtccgccagagttctctcagaccgtcgagcccgttgaggctgacgattggctgaaagatgttgatagaaaactcaacttagtgcagtgtactccggtcgagaagacgctctacgcctctcaccagctaagaggacctgctgcagattggtgggagaattactgcaatgcacaccctgaacccactaacattgcttgggatgagtttgctacggctttccgtgcagctcatgtgcctgaaagcactattgacatgaagaaagaagaattcaacagacttaagcaaggcaacagcagtgtcaatgagtacctaagtatgttcaacaagttggctcggtacgcccctgaggaagtgggcacagacaagaagaagatcaggaaattcttgaaaggaatcgcagttggaatgagactccagttgcttgctcatgatttccccacttttcaacatatgatcaacaaggcgcttctacttgaggatgccagaaaagaggctaccgaagaatacaagaaacgcaagtctaaccatcagggaaattcttcccgaggcgcaccttgccctcgctacggtcaacccatgcaataccaccagtcggtcactcaggctaaccgccagccaggctacgcccctcgtcctcagatgaaccgtccggcacctcagccacagcagcgtgcccctagtggcaatactgcgccaaacagtgttacctctttcaagtcaccacagggaccgtcagcagttcagtgtttccggtgcaaccagatgggtcactatgccagacagtgccctcagaatcctaccaacaccagcttaggtcatgctaatggcagcactgccagaactcctactccagcggcagctcagtctcgtcctagctctcaggcaagtggacaaggttctcgtgcatccaacaactttggtcgaggccgggtgaaccacattcaagctgagaccgctcaggatgctccagacgttgtgatgggtatgttctctgtcaactccatacccgcaatagttctgtttgattcgggagcttcccattctttcatatcacaagcttttgtgaaaagaaatggttggaaaacccaaaatttacgtgtaccaatgatagtacattcccctgggaggaatataagggcaactcaagtatgcccggaagttaaccttagaattgaggaagttgacttcctagccaaaccgatagtcctagactcgcaaagcttggacatcatcctagggatggattggttggctaagcacaaaggacagatagattgtgccgaaaagaccatcaccttgcaaggacctggaggaaagcaagtccgctttacctctaacacccctaccgcaagtcggtctatcctaacctgtttacaagtcacctccttggagtcggtgcccatagtctgtgaatatcccgacgtattcccagaaaaattaacaagtatgccaccagaccgagagattgagttcgccatagaactagcgccaagcaccgcaccaattgcaaaaaggccctaccgaatggcagctaatgagttagcagaagttaaaagacaaatcgaagaattagagagtaaaggttatgtgcgacctagctcatccccttggggagccccagtgcttctggttaagaaaaaggatggctctgagagaatggtaatcgactatagagccctgaatgaagtaactataaagaacaagtacccgttgccacggattgacgatttgttcgatcaacttaaaggagcaagagttttctcaaaaattgacttaagatcaggttaccaccaatttaaaatcagatctgaagatattccgaagaccgctttctcaacgcgttatggtctatacgagttcacagtaatgtccttcggactcactaatgctccagcgttcttcatgaacttaatgaacaaaatctttatggaatacctggaccagtttgtcgtggtgttcatcgatgacatcctgatatactccaagaatgaggaagaacatgctgaacacctgcggctgataatggaaaagctcagagatcatcaactattcgctaaattctcgaaatgcaaattctggttagaccgagtagcatttctcggacacgtgatctcctccaatggtgtcgaagtagatcccagcaaggttgaagctgtacttgcttggaacccgcccaagaatgtgtcagagatccgcagcttccttggcttagctggatattatcgaagattcattgaaggattctctaagctagccagacctatgtccgagctgttaaagaagggcaagaaatttcaatggtctgcagcctgtgaacacagctttcaagaaatgaagaaaaggttgaccactgccccagttctcaccttgccagatatccgaaaagatttcgagatcttctgtgatgcatcaagacaaggcgtaggatgtgtcttaatgcaagaacgaaaggttgtggcctatgcatccaggcagctcaggcctcatgaagtcaattatcccacccatgatctcgagttggcagccgtggttcatgctcttaagatctggaggcactatttaatcgggaacagatgcgaagtatacaccgaccacaaaagtcttaagtatatcttcacacagaccgagttaaatatgagacagagaagatggttggaactaatcgaagattacgatcttggaatccattatcatcccggtaaagctaatgtggtcgctgatgcgctaagtcgcaaggcctattgcaatgtagctcaaatacggcctgaccaagatcgcctgtgcagagaattggagaagttgaggctgaccatggaattaagagatctcatcctaaaggaagctcatgagtccgcctactccattcatccaggaagtacgaagatgtaccaagatatcaaggcatacttctggtgggctggaatgaagcgagatgtcgcagaatacgtagccttgtgtgacatttgccaaagagtcaaggcagagcaccagaggccagctggtatgctacagcccctaccaattcccgagtggaaatgggaagaaatcggaatggatttcatcaccgggttgccaagaacccctagcgggtacgactccatctgggtaatcgtggaccgactcacgaaatcggctcatttcgtgccagtgaaaaccacctatgatggaaagaaactagcagaactctacatgacccatgtcgtatgtagatttggctgtcccaagaagattgtgtcagaccgaggcactcagttcacctcaaggttctggaagcagttgcatgaagctctcggaaccgatctaaattttagtacggcctaccatccgcagaccgatggtcagacagaaagggtaaaccaaatcctagaagacatgctacgtgcgtgtgccctggatttcgaaggcacttgggatcgttgtttgccgtatgctgagttctcatacaacaacagttatcaggccagcattcagatgtcgccgaatgaggctatgttcggaagaaagtgccgcactcccttgtgctggaatgaggcgggcgaagcactagtattcggtcctgacatactcaagacagcagaagaacaagttaagctaatccgagaacgtttaaagacagcgcagaaccgtcagaaaaatttggctgacaatcggagacgtgaccttgagttcgaaaaaggagatcatgtgtacctgcgggtatcacccctccgtggtatgaagaggtttgggatgtccggcaagttagcaccccgctacatcggcccctacctcataaccgccagacgtggcgaagtggcttatcagcttgagctacctgaaggtctcgcagatgtgcacaacgtgttccacgtatcccagctaaagaaatgtcttcgagttccagaagagcaagttcccctgggtaatatcgtactggaaaagaatctgacctacaaggaaagaccgatcaaggttcttgaagaggcagaacgtcagactcgaaggaagaccatcaagttctacaaagtccaatggagcaatcattctgaagatgaggcaacctgggagcgagaagatcttctccgcgccgagtttccggagctgctcccttag

SEQ ID NO: 15474 - DNA, 2510 bp, Oryza sativa
  Clone ID: TFbOSC401123j.C1.o15.np
atgactgtacttctactctataataaagagacttctgttgctgtgatattctgtctccctgtgataccagcactatttcctgggactggtatcgattaacagatggcagtgaacgccagcttcagctcccacggttttggtgagggtcaccacgtcgctcagcttcgtgacctcgcccgtttccttggcttctcgtgtcccgagtacacggggtactccgtggaccgtgttccccctcactgtgagctctctgtgtacctttacccccgtggaggtatacacggagctggccttcgtccacaccacttcaccgtggccaggcccactctccagatcgcccaccgtctcgggggctccgccttccggcagcttccacgccttccttctggccactcagacgccaggtacccttgtccgtacagcgagtctcagccagtgctgactcgcatggttgagctttcggaggctcaggccactcagcacgacctactcctggaggcttaccgctcccttgcccgccgctacgccgccctggaggcccgtctggccgaggagggtgtcacttcagttgacactgtctcttgggactcaggccgcctctgccacgccagccacctgtcctcccacagctcccgcggctctgcccgcactcccagtggcccgcgctcccccagctcgcgtgcgccgtactcaccagtgtactccccctacccacacccagttagcccttcctacacccccggacacaccccagttgcttcctcccgccgtggcccacgctttatccgcaccgcgcggaagcgtgttgttggttcttccaccgtgttccgttttcactacccagctcccccaccgccagcggcccgtgctgctgccggccctcgacaggttccgccggtcccttcgcgtcagccgatcgacgtttcttcgactgaggagccgaccacaggggcccgctttggttttgaaaatggtagagttgagccagaagaaaatcatgagtcagctaatgagcagtctcaccacagcaaccgttcgcaccgtactgcttcccgcaacgcagaagttgagcaaccccgccgcagcagccgctcgcatcgcacagtttcccgtaatgcagagatggaacagtctcaccgctctcaccgcactgccagtcacaattctggagaagaacgcctcccttccccacctcatgtggaaaacaacatgcaacacttaatggcagttcagacacaaatcttgcaaggattagccgcagccgtagccggttttcagcataatgcgcatggaaatggccaccctcacatgagcaacaatagatccaagctgacagattttctgaggtcacgtccgccagagttctctcagaccgtcgagcccgttgaggctgacgattggctgaaagatgttgatagaaaactcaacttagtgcagtgtactccggtcgagaagacgctctacgcctctcaccagctaagaggacctgctgcagattggtgggagaattactgcaatgcacaccctgaacccactaacattgcttgggatgagtttgctacggctttccgtgcagctcatgtgcctgaaagcactattgacatgaagaaagaagaattcaacagacttaagcaaggcaacagcagtgtcaatgagtacctaagtatgttcaacaagttggctcggtacgcccctgaggaagtgggcacagacaagaagaagatcaggaaattcttgaaaggaatcgcagcgcttctacttgaggatgccagaaaagaggctaccgaagaatacaagaaacgcaagtctaaccatcagggaaattcttcccgaggcgcaccttgccctcgctacggtcaacccatgcaataccaccagtcggtcactcaggctaaccgccagccaggctacgcccctcgtcctcagatgaaccgtccggcacctcagccacagcagcgtgcccctagtggcaatactgcgccaaacagtgttacctctttcaagtcaccacagggaccgtcagcagttcagtgtttccggtgcaaccagatgggtcactatgccagacagtgccctcagaatcctaccaacaccagcttaggtcatgctaatggcagcactgccagaactcctactccagcggcagctcagtctcgtcctagctctcaggcaagtggacaaggttctcgtgcatccaacaactttggtcgaggccgggtgaaccacattcaagctgagaccgctcaggatgctccagacgttgtgatgggtatgttctctgtcaactccatacccgcaatagttctgtttgattcgggagcttcccattctttcatatcacaagcttttgtgaaaagaaatggttggaaaacccaaaatttacgtgtaccaatgatagtacattcccctgggaggaatataagggcaactcaagtatgcccggaagttaaccttagaattgaggaagttgacttcctagccaaaccgatagtcctagactcgcaaagctt

SEQ ID NO: 15475 - DNA, 5547 bp, Oryza sativa
  Clone ID: TFbOSC401138j.C1.o20.fg
atggcagtgaacgccagcttcagttcccacggttttggtgagggtcaccacgtcgctcagcttcgtgacctctcccgtttccttggcttctcgtgtcccgagtacacggggtactccgtggaccgtgttccccctcactgtgagctctcggtgtacctttacccccgtggaggtatacacggagctggccttcgcccccaccacttcactgtggccaggcccactctccagatcgcgtaccaggacctctcctggactgcgcttcgtcgcctggcccacgactacagccaccgtctcggaggttccgccttccggcagcttccacgccttccctctggccactcagacgccaggtacccttgtccgtacagcgagtctcagccagtgctgactcgcatggtcgagctttcggaggctcaggccactcagcacgacctactccttgaggcttaccgctcccttgcccgccgctacgccgctttggaggcccgtctggccgaggagggtgtcacctcagttgacactatctcttgggactcaggccgcctctgccacgccagccacctgtcctcccacagctcccgcggctctgcccgcactcccagtggcccgcgctcccccagctcgcgtgcgccgtactcaccagtgtactccccctacccacacccagttagcccttcctacacccccggacacaccccagttgcttcctcccgccgtggcccacgctttatccgcaccgcgcggaagcgtgttgttggttcttccaccgtgttccgtttccactacccagctcccccaccgtcagcggcccgtgctgctgccggccctcgacagatggctagccgcccccgccatgccgctcgtgcaccagcccgctttggttttgaagatggtagagttgaagcagaagcaaatcatgaatcagctaatgagcagtctcaccacagcaaccgttcgcaccgtactgtttcccgcaacgcagaggttgagcaaccccgccgcagcagccgctcgcatcgcacagtttcccgtgatgcaaagatggaacagtctcaccgcactgccagtcacaattctggagaagaacgcctcccttccccatctcatgtggaaaccaacatgcaacacataatggcagtacagacacaaatcttgcaaggactaaccacagccatagccagttttcagcataatgcgcatggaaatggccaccctcacgtgggcaacaatagatccaagctgacagactttctgaggtcacgtccgccagagttctctcagaccgtcgagcccgtcgaggctgacgattggttgaaagatgttgatagaaaactcaacttagtgcagtgtactcctgttgagaagacgctctatgcctctcaccagctaagaggacctgctgcagattggtgggagaattactgcaatgcacatcctgaacccactaacattgcttgggatgagtttgctacggctttccgtgcagctcatgtgcctgaaagcactattgacatgaagaaagaagaattcaacagacttaagcaaggcaatagcagtgtcaatgagtacctaagtcagttcaacaagttggctcggtacgcccctgaggaaatagacacagataagaagaagatcaggaaattcttgaagggaattgcagttggaatgagactccagttgcttgctcatgacttccccacttttcaacatatgatcaacaaggcacttctgcttgaggatgccagaaaagaggctaccgaagaatacaagaaacgcaagtctaaccatcagggaaattcttcccgaggcgcacctcgccctcgctacggtcaacccatgcaataccaccagtcggtcactcaggctaaccgccagccaagctacgcccctcgtcctcagataaaccgtccggcacctcagccacagcagcgtgcccctagtggcaatactgcgcctaacagcgttacctctttcaagtcaccacagggaccgtcagcagttcagtgtttccggtgcaaccagatgggtcactatgctagacagtgccctcagaatcctaccaacaccaactcagggcatgctaatggcagcaccgccagaactcctactccagcggcagctcagtctcgtcctagctctcaggcaagtggacaaggttctcgtgcttccaaccactttggtcgaggacgtgtgaatcacattcaagctgaaaccgctcaggatgctccagacgttgtgatgggtatgttctctgtcaactccgtacccgcaatagttctatttgattcaggagcttcccattctttcatatcacaagcttttgtgaaaagaaatggttggaaaacccaaaatttgcgtgtaccaatgatagtacattcccctgggaggaatataagggcaactcaaatatgcccggaagttaaccttagaattgaggaagttgacttcctagccaaaccgatagtcctagactcgcaaagcttggacatcatcctagggatggattggttggctaagcacaaaggacagatagattgtgccgaaaagtccatcaccttgcaaggacctggaggaaagcaagtccgctttacccctaacacccctaccgcaagccggtctattctaacctgtttacaagtcacctccttggagtcggtgcccatagtctgtgaatatcccgacgtattcccagaagaattaacgagaatgccaccagaccgagaggttgagttcgccatagaactggcaccaggcacagctccaattgcaaaaagaccctaccgaatggcagctaatgagttagcagaagttaaaagacaaatcgaagaactggaaagtaaaggttatgtgcgacctagctcatccccttggggagccccagtgcttctggttaagaaaaaggatggctctgagagaatggtaatcgactatagagccctgaatgaagtaactataaagaacaagtacccgttgccacggattgacgatttattcgatcaacttaaaggagcaagagttttctcaaaaattgacttgaggtcaggttaccaccaactgaaaatcagatctgaagatatcccgaagaccgctttctcaacgcgttatggtctatatgagttcacagttatgtccttcggactcaccaatgctccagcattcttcatgaacttaatgaataaaatcttcatggaatacatggaccagtttgtcgtggtgttcatcgatgacatcctgatatactccaagaacgaggaagaacatgctgaacacctgaggctgataatggaaaagctcagagatcatcaactattcgctaaattctcgaaatgcgaattctggttagatcgagtagcatttcttggacacgtgatttcctccaacggtgtcgaagtagatcccagcaaggttgaagctgtacttgcttggaacccgcccaagaacgtgtcagagatccgtagtttccttggcttagcgggatattatcgaagattcattgaaggattctctaagctagccagacctatgaccgagctgttaaagaaggaaaagaaatttcaatggtctgcagcctgtgaagacagctttcaagaaatgaagaaaaggttgaccactgcaccagttctcaccttgccagatatccgaaaagattttgagatcttctgtgacgcatcaagacaaggcttaggatgtgtcctaatgcaagaacgaaaggttgtggcctatgcatccaggcagctcaggcctcatgaagtcaattatcccacccatgatctcgagttggcagccgtggttcatgctcttaagatctggaggcattatttaatcgggaacagatgtgaagtatacaccgatcacaaaagtcttaaatatatcttcacccagaccgagttaaatatgaggcagagaagatggttggaactaatcaaggattacgatcttggaatccactatcatcctggtaaagccaacgtggtcgctgatgcgctaagtcgcaaggcctattgcaatgtagctcaaatacggcctgaccaagatcatctgtgcagagaattggagaagttaaggctgaccgtggtacagtcaggagtccctgccagcttgacagtacagcctaccctagaatcgcaaatccgggaggctcagaaagatgacgaagggataaaagagttaataaaaagaatacaggagaagaaagacaccaatttctccatagacgatcaaggcacagtttggtgcggtccacgcatctgtgtaccggccaagaaggagttaagagatctcatcctaaaggaagctcatgagtccgcttactccattcatccaggaagtacgaagatgtaccaagatatcaaggcatacttttggtgggctggaatgaagcgagatgtcgcagaatacgtagccttgtgtgacatttgccaaagagtcaaggcagagcatcagaggccagctggtctgctgcaacccctaccgattcccgagtggaaatgggaagagatcggaatggatttcatcaccggtttgccaagaacccccagcgggtacaactccgtttgggtaatcgtggaccgactcacgaaatcagctcatttcgtgccagtgaaaaccacctatgatggaaagagactagcagaactctacatgacccatgtcgtatgtagatttggctgtcccaagaaaattgtgtcagaccgaggcactcagttcacctcaaggttctggaagcagttgcatgaagccctcggaactgatctaaattttagtacagcctaccatccgcagaccgatggtcagaccgaaagggtaaaccaaatcctagaagacatgctacgtgcgtgtgccttggatttcgaaggcacttgggatcgttgtttgccgtatgctgagttctcatacaacaacagttatcaggccagcattaagatgtcgccgaatgaggcaatgttcggaagaaagtgccgcactcccttgtgctggaatgaggtgggcgaagcactggtattcggtcctgacatactcaagtcagcagaagaacaagttaagctgatccgagaacgtttgaagacagcacagagccgtcagaagaattacgctgacaatcggaggcgtgaccttgagttcgaaaaaggagatcatgtatacctgcgagtatcacccctccgtggtatgaggaggtttgggatgtccggcaagttagcagcccgctacatcggcccctacctcataaccgccagacgtggcgaagtggcttatcagcttgagctacctgaaggtctcgcagatgtgcacaacgtgttccacgtatcccagttaaagaaatgtcttcgagttccagaagagcaagttcccctgggtaatatcgagctggaaaagaatctgacctacaaggaaagaccgttcaaggttcttgaagaggcagaacgtcagactcgaaggaagatcatcaagttctacaaagtccaatggagcaatcattctgaagatgaggcaacctgggaacgagaagatcttctccgcgccgagtttccggagctgctcccttag

SEQ ID NO: 15476 - DNA, 4716 bp, Oryza sativa
  Clone ID: TFbOSC401196j.C1.o71.fg
atggctagccgcccccgccgtgcagcccgtgcaccagcccgctttggttttgaagatggtagagttgagccagaagaaaatcatgagtcggctaatgagcagtctcgccgcagcaaccgttcgcatcgtactgcttcccgtaacgcagaagttgagcaaccccgccgcggcagccgctcgcatcgcgcagtttcccgtgatgcagagatggaacagtctcaccgctctcaccgcactgccagtcacaattctggagaagaacgcctcccttccccacctcatgtggaaaacaacatgcaacacataatggcagttcagacacaaatcttgcaaggactaaccacagccatagccagttttcagcataatgcgcatggaaatggccaccctcacgtgggcaacaatagatccaagctgacagattttctgaggtcacgtccgccagagttctctcagaccgtcgagcccgtcgaggctgacgattggttgaaagatgttgatagaaaactcaacttagtgcagtgtactcctgttgagaagacgctctacgcctctcaccagctaagaggacctgctgcagattggtgggagaattactgcaatgcacatcctgaacccactaacattgcttgggatgagtttgctacggctttccgtgcagctcatgtgcctgaaagcactattgacatgaagaaagaagaattcaacagacttaagcaaggcaacagcagtgtcaatgagtacctaagtcagttcaacaagttggctcggtacgcccctgaggaagtagacacagataagaagaagatcaggaaattcttgaaacgaatcgcagttggaatgagactccagttgcttgctcatgacttccccacttttcaacatatgatcaacaaggcacttctgcttgaggatgccagaaaagaggctaccgaagaatacaagaaacgcaagtctaaccatcagggaaattcttcccgaggcacacctcgccctcgctacggtcaacccatgcaataccaccagtcggtcactcaggctaaccgccagccaggctacgcccctcgccctcagatgaaccgtccgacacctccgccacagcagtgtgcccctagtggcaacactgcgccaaacagtgttacctctttcaactcaccacagggaccgtcagtagttcagtgtttccggtgcaaccagatgggtcactatgctagacagtgccctcagaatcctaccaacaccaacttagggcatgctaatggcagcatcgccaaaactcctactccagcggcagctcagtctcgtcctagctctcaggcaagtggacaaggttctcgtgcttccaaccactttggtcgaggacgtgtgaatcacattcaagctgaaaccgctcaggatgctccagacgttgtgatgggtatgttctctgtcaactccgtacccgcaatagttctatttgattcaggagcttcccattctttcatatcacaagcttttgtgaaaagaaacggttggaaaacccaaaatttacgtgtaccaatgatagtacattcccctggaaggaatataagggcaactcaaatatgcccggaagttaaccttaaaattgaggaagttgacttcctagccaaaccgatagtcctagactcgcaaagcttggacatcatcctagggatggattggttggctaagcacaaaggacagatagattgtgccgaaaagtccatcaccttgcaaggacctggaggaaagcaagtccgctttacccctaacacccctaccgcaagtcggtctatcctaaccagtctacaagtcacctccttggagtcggtacccatagtctgtgaatatcccgacgtatttccagaagaattaacgagtatgccaccagaccgagagattgagttcgccatagaactggcaccagggactgcaccaattgcaaaaaggccataccgaatggcagctaatgagttagcagaagttaaaagacaaatcgaagaactggaaagtaaaggttatgtgcgacctagctcatccccttggggagccccagtgcttctggttaagaaaaaggatggctcggagagaatggtaatcgactatagagccctgaatgaagtaactataaagaacaagtacccgttgccacggattgacgatttattcgatcaacttaaaggagcaagagttttctcaaaaattgacttgaggtcaggttaccaccaactgaaaatcagatctgaagatatcccgaagaccgctttctcaacgcgttatggtctatatgagttcacagttatgtccttcggactcaccaatgctccagcattcttcatgaacttaatgaacaaaattttcatggaatacctagaccagtttgtcgtggtgttcatcgatgacatcctgatatactccaagaacgaggaagaacatgctgaacacctgaggctgataatggaaaagctcagagatcatcaactattcgctaaattctcgaaatgggaattctggttggaccgagtagcatttcttggacacgtgatctcctctaacggtgtcgaagtagatcccagcaaggttgaagctgtacttgcttggaacccgcccaagaatgtgtcagagatccgcagcttccttggcttagcgggatattatcgaagattcattgaaggattctctaagctagccagacctatgaccgagctgttaaagaaggaaaagaaatttcactggtctacagcctgtgaagacagctttcaagaaatgaagaaaaggttgaccactgcaccagttctcaccttgccagatatccgaaaagattttgagatcttctgtgacgcatcaagacaaggcttaggatgtgtcctaatgcaagaacgaaaggttgtggcatatgcatccaggcagcttaggcctcatgaagtcaattatcccacccatgatctcgagttggcaaccgtggttcatgctcttaagatctggaggcattatttaatcgggaacagatccaacgtggtcgctgacgcgctaagtcgcaaggcctattgcaatatagctcaaatacggcctgaccaagatcacctgtgcagagaattggagaagttaagactgaccgtggtacagtcaggtgtccctgctagcttgacagtacagcctaccctagagtcgcaaatccgggaggctcagaaagacgacgaagggataaaagaattaataaaaagaatacaggagaagaaagacaccaacttctccatagacgatcaaggcacagtttggtgcggtccacgcatctgtgtaccggccaagaaggagttaagagatctcatcctaaaggaagctcatgagtccgcttactccattcatccaggaagtacgaagatgtaccaagatatcaaggcatacttttggtgggttggaatgaagcgagatgtcacagaatacgtagccttgtgtgacatttgccaaagagtcaaggcagagcatcagaggccagccgcagacagccatgattccgcgtcgcgcctgctcccggcgaaagtggagattgggagcttggagtctcacctagggtccccggccgaaccggcaaaggggggcctgcgcggtctcccggtgaggagccccacgctccgtcacctaccgattcccgagtggaaatgggaagagatcggaatggatttcatcaccggtttgccaagaacccccaacgggtacgactccatttgggtaatcgtggaccgactcacgaaatcagctcatttcgtgccagtgaaaaccacctatgatggaaagaaactagcagaactctacatgacccatgtcgtatgtagatttggctgtcccaagaaaattgtgtcagaccgaggcactcagttcacctcaaggttctggaagcagttgcatgaagccctcggaactgatctaaattttagtacggcctaccatccacagaccgatggtcagacggaaagggtaaaccaaatcctagaagacatgctgcgtgcgtgtgccttggatttcgaaggcacttgggatcgttgtttgccgtatgctgagttctcatacaacaacagttatcaggccagcattcagatgtcgccgaatgaggcaatgttcggaagaaagtgccgcacccccttgtgctggaatgaggtgggcgaagcactggtattcggtcctgacatactcaagtcagcagaagaacaagttaagctgatacgagaacgtttgaagacagcacagaaccgtcataagaattacactgacaatcggaggcgtgaccttgagttcgaaaagggagatcatgtgtacctgcgggtatcacccctccgtggtatgagaaggtttgggatgtccggcaagttagcaccccgctacatcggcccctacctcataaccgccagacgtggcgaagtggcttatcagcttgagctacctgaaggtctcgcagatgtgcacaacgtgttccacgtatcccagctaaagaaatgtcttcgagttccagaagagcaagttcccctgggtaatatcgagctggaaaagaatctgacctacaaggaaagaccgatcaaggttcttgaagaggcagaacgtcagactcgaaggaagaccatcaagttctacaaagtccaatggagcaatcattctgaagatgaggcaacctgggaacgagaagatcttctccgcgccgagttcccggacctgctcccttag

SEQ ID NO: 15477 - DNA, 5556 bp, Oryza sativa
  Clone ID: TFbOSC401200j.C1.o41.fg
atggcagtgaacgccagcttcagttcccacggttttggtgagggtcaccacgtcgctcagcttcgtgacctctcccgtttccttggcttctcgtgtcccgagtacacggggtactccgtggaccgtgttccccctcactatgagctctcggtatacctttacccccgtggaggtatacacggagctggccttcgcccccaccacttcactgtggccaggcccactctccagatcgcgtaccaggacctctcctggactgcgcttcgtcgcctggcccacgactacagccaccgtctcggaggctccgccttccggcagcttccacgccttccttctggccactcagacgccaggtacccttgtccgtacagcgagtctcagccagtgctgactcgcatggttgagctttcggaggctcaggccactcagcacgacctactccttgaggcttaccgctcccttgcccgccgctacgccgccttggaggcccgcctggccgaggagggtgtcacctcagttgacactatctcctgggactcaggccgcctctgccacgccagccacctgtcctcccacagctcccgcggctctgcccgcactcccagtggcccgcgctcccccagctcgcgtgcgccgtactcaccaatgtactccccctacccacacccagttagcccttcctacacccccggacacaccccagttgcttcctcccgccgtggcccacgctttatccgcactgcgcggaagcgtgttgttggttcttccaccgtgttccgtttccgccacccagctcccccaccgccagcggcccgtgctgctgccggccctcgacagatggctagccacccccgccatgcagcccgtgcaccagcccgctttggttttgaagatggtagagttgagccagaagaaaatcatgagtcggctaatgagcagtcacaccacagcaaccgttcgcaccatactgtttcccgcaacgcagagattgggcaaccccgccgcagcaaccgctcgcatcgcacagtttcccgtgatgcagagatgggacagtctcaccgctctcaccgcactgccagtcacaattctggagaagaacgcctcccttccctacctcatgtggaaaacaacatgcaacacataatgacagttcagacacaaatcttgcaaggactaaccacagccatagccagttttcagcataatgcgcatggaaatggccaccctcacgtgggcaacaatagatccaagctgacagattttctgaggtcacgtccgccagagttctctcagaccgtcgagcccgtcgaggctgacgattggttgaaagatgttgatagaaaactcaacttagtgcagtgtactcctgttgagaagacgctctacgcctctcaccagctaagaggacctgctgcagattggtgggagaattactgcaatgcacaccctgaacccactaacattgcttgggatgagtttgctacggctttccgtgcagctcatgtgcctgaaagcactattgacatgaagaaagaagaattcaacagacttaagcaaggcaacagcagtgtcaatgagtacctaagtcagttcaacaagttagctcggtacgcccctgaagaagtggacacagataagaagaagatcaggaaattcttgaaagggatcgcagttggaatgagactccagttgcttgctcatgacttccccacttttcaccatatgatcaacaaggcacttctacttgaggatgccagaaaagaggctaccgaagaatacaagaaacgcaagtctaaccatcagggaaattcttcccgaggcgcacctcgccctcgctacggtcaacccatgcaatatcaccagtcggtaactcaggctaaccaccagccaggctacgcccctcgtcctcagatgaaccgtccggcacctcagccacagcagcgtgcccctagtggcaatactgcgccaaacagtgttacctctttcaagtcaccacagggaccgtcagcagttcagtgtttccggtgcaaccagatgggacactatgccagacagtgtcctcagaatcctaccaacaccaactcagggcatgctaatggcagcactgccagaactcctgctccagcggcagctcagtctcgtcctagctctcaggcaagtggacaaggttctcgtgcgtccaaccactttggtcgaggacgtgtgaatcacattcaagctgaaatcgctcaggatgctccagacgttgtgatgggtatgttctctgtcaactccgtacccgcaatagttctgtttgattcaggagcttctcattctttcatatcgcaagcttttgtgaaaagaaatggttggaaaacccaaaatttgcgtgtaccgatgatagtacattcccctggaaggaatataagggcaactcaaatatgcccggaagttaaccttagaattgaggaagttgacttcctagccaaaccgatagtcctagactcgcaaagcttggacatcattctagggatggattggttggctaagcacaaaggacagatagattgtgccgaaaagtccatcaccttgcaaggacctggaggaaagcaagtccgctttacccctaacacccctaccgcaagtcggtctatcctaacctgtttacaagtcacctccttggagtcggtgcccatagtctgtgaatatcccgacgtatttccggaagaattaacaagaatgccaccagaccgagagatcgagttcgccatagaactggcaccaggcacagctccaattgcaaaaagaccctaccgaatggcagctaatgagttagcagaagttaaaagacaaatcgaagaactggaaagtaaaggttatgtgcgacctagctcatccccttggggagccccagtgcttctggttaagaaaaaggatggctctgagagaatggtaatcgactatagagccctaaatgaagtaactataaagaacaagtacccgttgccacggattgacgatttattcgatcaacttaaaggagcaagagttttctcaaaaattgacttgaggtcaggttaccaccaactgaaaatcagatctgaagatatcccgaagaccgctttctcaacgcgttatggtctatatgagttcacagtaatgtccttcggactcaccaatgctccagcattcttcatgaacttaatgaacaaaatctttatggaatatctggaccagtttgtcgtggtattcatcgatgacatcctgatatactctaagaacgaggaagaacatgctgaacacctgaggttgataatggaaaagctcagggaccatcaactattcgcaaaattctcaaaatgcgaattctggttagaccgagtagcatttcttggacacgtgatctcccccaacggtgtcgaagtagatcccagcaaggttgaagctgtacttgcttggaacccgcccaagaatgtgtcagagattcgcagtttccttggcttagctggatattatcgaagattcattgaaggattctctaagctagccagacctatgaccgagctgttaaagaaggaaaagaaattccaatggtctgtagcctgtgaagacagctttcaagaaatgaagaaaaggttgaccactgccccagttctcaccttgccagatatccgaaaagatttcgagatcttctgtgatgcatcaagacaaggcttaggatgtgtcctaatgcaagaacgaaaggttgtggcctatgcatccaggcagctcaggcctcatgaagttaattatcccacccatgatctcgagttggcagccgtggttcatgctcttaagatctggaggcattatttaatcgggaacagatgtgaagtatacaccgatcacaaaagtcttaagtatatcttcactcagaccgagttaaatatgagacagagaagatggttggaactaatcaaggattacgatcttggaatccactatcatcctggtaaagccaacgtggtcgctgatgcgctaagtcgcaaggcctattgcaatgtagctcaaatacggcctgaccaagatcacctgtgcagagaattggagaagttaagactgaccgtggtacagtcaggtgtccctgccagcttgacagtacagcctaccctagagtcgcaaatccgggaggctcagaaagacgacgaagggataaaagaattaataaaaagaatacaggagaagaaagacacaaatttctccatagacgatcaaggcacagtttggtgcggaccacgcatctgtgtaccggccaagaaggagttaagagatctcatcttaaaggaagctcatgagtccgcctactccatccacccaggaagtacgaagatgtaccaagatatcaaggcatacttctggtgggctggaatgaagcgagacgtcgcagaatacgtagccctgtgtgacatttgccaaagagtcaaggcggaacatcagaggccagctggtctgctgcaacccctaccgattcccgagtggaaatgggaagagatcggaatggatttcatcaccggtttgccaagaacccccagcgggtacgactccatctgggtaatcgtggaccgactcacgaagtcagctcatttcgtgccagtgaaaaccacctatgatggaaagaaactagcagaactctacatgactcatgtcgtatgtagatttggctgtcccaagaaaatagtgtcggaccgaggcactcagttcacctcaaggttctggaagcagttgcatgaagccctcggaactgatctgaattttagtacagcctaccatccgcagaccgatggtcagaccgaaagggtaaaccaaatcctagaagacatgctacgtgcgtgtgccttggatttcgaaggcacttgggatcgttgtttgccgtatgctgagttctcatacaacaacagttatcaggccagcattcagatgtcgccgaatgaggcaatgttcggaagaaagtgccgcacccccttgtgctgggatgaggtgggcgaagccctggtattcggtcctgacatacttaagtcagcagaagaacaagttaagctgatccgagaacgtttaaagacagcgcagaaccgtcagaaaaattacgctgacaatcggagacgtgaccttgagttcgaaaagggagatcatgtgtacctgcgagtatcacccctccgtggtatgagaaggtttgggatgtccggcaagttagcaccccgctacatcggcccctacctcataaccgccagacgtggcgaagtggcttatcagcttgagctacctgaaggtctcgcagacgtgcacaacgtgttccacgtatcccagttaaagaaatgtcttcgagttccagaagagcaagttcccctaggtaatatcgagctggaaaagaatctgacctacaaggaaagaccgatcaaggttcttgaagaggcagaacgtcagactcgaaggaagaccatcaagttctacaaagtccaatggagcaatcattccgaagacgaggcaacctgggagcgagaagatcttctccgcgccgagttcccggacttgctcccttag

SEQ ID NO: 15478 - DNA, 5556 bp, Oryza sativa
  Clone ID: TFbOSC401215j.C1.o49.fg
atggcagtgaacgccagtttcagttcccacggttttggtgagggtcaccacgtcgcccagcttcgtgacctcgcccgtttccttggcttctcgtgtcccgagtacacggggtactccgtggaccgtgttccccctcactgtgagctctctgtgtacctttaccctcgtggaggtatacacggagttggccttcgcccccaccacttcactgtggccaggcccactctccagatcgcgtaccaggacctctcctggactgcgcttcgccgcctggcccacgactacggccaccgtctcggaggctccgccttccggcagcttccacgtcttccttctggccacgcagacgccagatacccttgtccgtacagcgagtctcagccagtgctgactcgcatggtcgagctttcggaggctcaggccactcagcacgacctactccttgaggcttaccgctcccttgcccgccgctacgccgccttggaggcccgtctggccgaggagggtgtcacctcagttgacactatctcttgggactcaggccgtctctgccacgccagccacctgtcctcccacagctcccgcggctctgctcgcactcccagtggcccgcgctcccccagctcgcgtgcgccgtactcaccagtgtactccccctacccacacccagttagcccttcctacacccccggacacactccagtcgcttcctcccgccgtggcccacgctttatccgcactgcgcggaagcgtgttgttggttcttccaccgtgttccgtttccgccacccagctcccccaccgccagcggcccgtgctgctgccggccctcgacagatggctagccgcccccgtcgtacagctcgtgcaccagtccgctttggttttgaagatggtagagttgaagcagaagcaaatcacgaaccagctaatgagcattctcaccacagcaaccgttcgcaccgtactgtttcccgcaacgcagaggttgagcaacctcgccgcagcagccgctcgcatcgcacagtttcccgtgaagcagagttggagcagtctcaccgctctcaccgcactgccagtcacaattctggagaagaacgcctcccttccccacctcatgtggaaaacaacatgcaacacataatggcagttcagacacagatcttgcaaggtctaaccacagccatagccagctttcagcataatgcgcatggaaatggccaccctcacgtgggcaacaatagatccaagctgacagactttctgaggtcacgtccaccagagttctctcagaccatcgagcccgtcgaggctgacgattggttgaaagatgtggatagaaaactcaacttagtgcagtgtactcctgttgagaagacgctctacgcctctcaccagctaagaggacctgccgcagattggtgggagaattactgcaatgcacatcctgaacccactaacattgcttgggatgagttcgctacggctttccgtgtagctcatgtgcctgaaagcactattgacatgaagaaagaagaatttaacagactcaagcaaggccacagcagtgtcaatgagtacctaagtcagttcaacaagttggctcggtacgcccctgaggaagtagacaccgataagaaaaagatcaggaaattcttgaaaggaatcgcagttggaatgagactccagttgcttgctcatgacttccccacttttcaacatatgatcaacaaagcacttctacttgaggatgccagaaaagaggccaccgaagaatacaagaaacgcaagtctaaccatcagggaaattcttcccgaggcgcacctcgccctcgctacggtcagcccatgcaataccatcagtcggtcactcaggctaaccgccagtcaagctacgcccctcgtcctcagatgaaccgtccggcacctccgccacagcagcgtgcccctagtggcaacactgcgccaaacagtgttacctccttcaagtcaccacagggaccgtcagcagttcagtgtttccggtgcaaccagatgggtcactatgctagacagtgtcctcagaatcctaccaacaccagcccaggacatgctaatggcagcactgccagaactcctactccagcggcagctcagtctcgtcctagctctcaagcaagtggacaaggttctcgtgcttccaaccactttggtcgaggacgtgtgaatcacattcaagctgaaaccgctcaggatgctccagacgttgtgatgggtatgttctctgtcaactccgtacccgcaatagtcctgtttgattcgggagcttcccattctttcatatcgcaagcttttgtgaaaagaaatggttggaaaacccaaaatttgcgtgtaccaatgatagtacattcccctggaaggaatataagggcaactcaaatatgcccggaagttaaccttagaattgaggaagttaacttcctagccaaaccgatagtcctagactcgcaaagcttggacatcatcctagggatggattggttggctaagcacaaaggacagatagattgtgccgaaaagtccatcaccttgcaaggacctggaggaaagcaagtccgctttacccctaacacccctaccgcaagtcggtctatcctaacctgtttgcaagtcacctccttggagtcggtgcccatagtctgtgaatatcccgacgtatttccggaagaattaacaagaatgccaccagaccgagagattgagttcgccatagaactggcaccaggcacagctccaattgcaaaaagaccctaccgaatggccgctaatgagttagcagaagttaaaagacaaatcgaagaactggaaagtaaaggttatgtgcgacctagctcatccccttggggagccccagtgcttctggttaagaaaaaggatggctctgagagaatggtaattgactatagagccctgaatgaagtaactataaagaacaagtacccgttgcctcggattgacgacttattcgatcaacttaaaggagcaagagtcttctcaaaaattgacttgaggtcaggttaccaccaactgaaaatcagatctgaagatattccgaagaccgctttctcgacgcgttatggtctatatgagttcacagtaatgtccttcggactcaccaatgctccagcattcttcatgaacttaatgaacaaaatctttatggaatacctggaccagtttgtagtggtattcatcgatgacatcctgatatactctaagaatgaggaagaacatgctgaacacctgaggctgataatggaaaagctcagagatcatcaactattcgctaaattctcgaaatgcgaattctggttggaccgagtagcttttcttggtcacgtgatctcctccaacggtgtcgaagtagatcccagcaaagttgaagctgtacttgcgtggaacccgcccaagaatgtgtcggagattcgcagcttcctcggcttagctggatattatcgaagattcattgaaggattctctaagctagccagacctatgaccgagctgttaaagaaggaaaagaaatttcaatggtccacagcctgtgaagacagctttcaagaaatgaagaaaagattgaccactgccccagttctcaccttgccagatatccgaaaagacttcgagatcttctgtgatgcatcaagacagggcttaggatgtgtcctaatgcaagaacgaaaggttgtggcctatgcatccaggcagctcaggcctcatgaagtcaattaccccacccatgatctcgagttggcagccgtgattcatgctcttaagatctggaggcactacttaatagggaacagatgcgaagtatacaccgatcacaaaagtcttaagtatatcttcactcagaccgagttaaatatgagacagagaagatggttggaactaatcaaggattacgatcttggaatccactatcatcctggtaaagccaacgtggtcgctgatgcgctaagtcgcaaggcctattgcaatatagctcaaatacggcctgaccaagatcacctgtgcagagaattggagaagttaaggctgaccgtggtgcagtcaggtgtccctgccagcttgacagtacagcctaccctagagtcgcaaatccgggaggctcagaaagacgacgaagggataaaagaattaataaaaagaatacaggagaagaaagacaccaatttctccatagacgatcaaggcacaatttggtgcggtccacgcatctgtgtaccggccaagaaggagttaagaaatctcatcctaaaggaagctcatgagtccgcttactccattcatccaggaagtacgaagatgtaccaagatatcaaggcatacttttggtgggctggaatgaagcgagatgtcgcagaatacgtagccttgtgtgacatttgccaaagagtcaaggcagaacaccaaaggccagctggactgctacaacccctaccgattcccgagtggaaatgggaagagatcggaatggatttcatcaccggtttgccaagaacccccagcggatacgactccatttgggtaatcgtggaccgactcacgaagtcagcacatttcgtgccagtgaagaccacctatgatggaaagaaactagcagaactctacatgactcatgtcgtatgtagatttggctgtcccaagaaaatagtgtcggatcgaggcactcagttcacctcaaggttctggaagcaattgcatgaagcactcggaactgatctgaattttagtacggcctaccacccgcagaccgatggtcagacagaaagagtaaaccagatcctagaagacatgctgcgagcatgtgccttggatttcgaaggcacttgggatcgttgtttgccgtatgccgagttctcatacaacaacagttatcaggccagcattcagatgtcgccgaatgaggcaatgttcggaagaaggtgccgcactcccttgtgctggaatgaggtgggcgaagccttggtattcggtcctgacatactcaagtcagcagaagaacaagttaagctgatacgagaacgtttgaggacagcacagaaccgtcagaagaattacgctgacaatcggaggcgtgaccttgagttcgaaaaaggagatcatgtgtacctacgggtatcaccactccgaggaatgagaaggtttgggatgtccggcaagttagcaccccgctacatcggcccctacctcataaccgccagacgtggcgaagtggcttatcagcttgagctacctgaaggtctcgcagatgtgcacaacgtgttccacgtatcccagttaaagaaatgtcttcgagttccagaagagcaagttcccctaggtaatatcgagctggaaaagaatctgacctacaaggaaagaccgatcaaggttcttgaagaagcagaacgtcagactcgaaggaagacaatcaagttctacaaagtccaatggagcaatcattctgaagatgaagcaacctgggaacgagaagatcttctccgcgccgagtttccggagctgctcccttag

SEQ ID NO: 15479 - DNA, 5454 bp, Oryza sativa
  Clone ID: TFbOSC401237j.C1.o36.fg
atggcagtgaacgccagcttcagttcccacggttttggtgagggtcaccatgtcgctcagcttcgagacctcgcccgcttccttggcttctcgtgtcccgagtacacggggtactccgtggaccgtgttccccctcgctgtgagctctctgtgtacctttaccctcgtggaggtatacacggagctggccttcgcccacaccacttcactgtggccaggcccactctccagatcgcgtgccaggacctctcctggactgcgcttcgtcgcttggcctacgactacagccaccgtctcgggggctctgccttccggcagcttccacgccttccttctggccacgcaaacgccaggtacccttgtccttacagtgagtttcagccagtgctgactcgcatggttgagctttcggaggctcaggccactcagcacgacctactccttgaggcttaccgctcccttgcccgccgctacgccgctctggaggcccgtctggccgaggagggtgtcacctcagttgacactgtctcttgggactcaggtcgcctctaccacgccagccacctgtcctcccacagctcccgcggctctgctcgcactcccagtggcctgcgctcccccagctcgcgtgcgccgtactcaccagtgtactccccctaccctcacccagttagcccctcctacacccctggacacaccccagttgcttcctcccaccgtggcccacgctttatccgcactgcgcggaagcgtgttgttggttcttccaccgtgttccgtttcgactacccagctcccacaccgccagcggcccgtgctgctgtcggccctcgacagatggctagccgcccccgccgtgctgctcgtgcaccagcccgctttggttttgaggaaggtagagttgagccagaagcaaatcatgagtcagctaatgagcagtctcaccacagcaaccgttcgcaccgtactacttcccgcaacgcagaagttgagcaaccccgccgcagcaaccgctcgcatcacacagcttcccgtaatgcagagatggaacagtctcaccgctctcaccgcactgccagtcacaattctggagaagaacgcctcccttccccacctcatgtggaaaacaacatgcaacacttaatggcagttcagacacaaatcttgcaaggattagccgcagccgtagccggttatcagcacaatgcgcatggaaatggccaccctcacatgggcaacaatagatccaatctaacagactttctgaggtctcgtccgccagagttctctcagaccgtcgagcccgtcgaggctgacgattggctgaaagatgttgatagaaaactcaacttagtgcagtgtactcctgttgagaagacgctctacgcctctcaccagctaaaaggacctgctgcagattggtgggagaattactgcaatgcacaccctgaacccactaacattgcttgggatgagtttgctacggctttccgtgcagctcatgtgcctgaaagcaccattgatatgaagaaagaggaattcaacagacttaagcaaggcaacaacagtgtcaatgagtacctaagtatgttcaacaagttggctcggtacgcccctgaggaagtggacacagacaagaagaagatcaggaagttcttgaagggaatcgcagtaggaatgagactccagttgcttgctcatgacttccccacttttcaacatatgatcaacaaggcacttctacttgaggatgccagaaaagaggctaccgaagaatacaagaaacgcaagtctaaccatcagggaaattcttcccgaggcgcacctcgccctcgctatggtcaacccatgcaataccaccagtcggtcactcaggctaaccgccagccaggctacgcccctcgtcctcagatgaaccgtccggcacctcagccacagcagcgtgcccctagtggcaatactgcaccaaacagtgttacctctttcaagtcaccgctaggaccgtcagcagttcagtgtttccggtgcaaccagatgggtcactatgcccgacagtgccctcagaatcctaccaacaccaactcagggcatgctaatggcagcactgccagaactcctactccagcggcagctcagtctcgtcctagctctcaggcaagtggacaaggctctcgtgcttccaacaactttggtcgaggccgggtgaaccacattcaagctgagaccgctcaggatgctccagacgttgtgatgggtatgttctctgtcaactccgtacccgcaatagttctgtttgattcagaagcttcccattctttcatatcacaagcttttgtgaaaagaaatggttggaaaacccaaaatttacgtgtaccaatgatagtacattcccctgggaggaatataagggcaactcaaatatgcccggaagttaaccttagaattgaggaagttgacttcctagccaaaccgatagtcctagactcgcaaagcttggacatcatcctagggatggattggttggctaagcacaaagggcagatagattgtgccgaaaagtccatcaccttgcaaggacctggaggaaagcaagtccgctttacctctaacacccctaccgcgagtcggtctatcctaacctgtttacaagtcacctccttggagtcggtgcccatagtctgtgaatatcccgacgtatttccagaagaattaacaagtatgccaccagaccgagagattgagttcgccatagaactggcaccaggcaccgcaccaattgcaaaaagaccctaccgaatggcagctaatgagttagcagaagttaaaagacaaatcgaagaattggagagtaaaggttatgtgcgacctagctcatccccttggggagccccagtgctcctggtcaagaaaaaggatggctgtgagagaatggtaatcgactatagagccctaaatgaagtaactataaagaacaagtacccgttgccacggattgacgatttgttcgatcaacttaaaggagcaagagttttctctaaaattgacttgagatcaggttaccaccaattgaaaatcagatctgaagatatcccgaagaccgctttctcaacgcgttatggtctatatgagttcacagtgatgtccttcggactcaccaatgctccagcattcttcatgaacataatgaacaaaatcttcatggaatacctggaccagtttgtcgtggtgttcatcgatgacatcctgatatactccaagaatgaggaagaacatgctgaacacctgaggctgataatggaaaagctcagggatcatcaactattcgctaaattctcgaaatgcgaattttggttagaccgagtagcatttcttggacacgtgatctcccccaatggtgtcgaagtagatcccagcaaggttgaagctgtacttgcttggaacccgcccacgaatgtgtcagagattcgcagcttccttggcttagctggatattatcgaagattcattgaaggattctctaagctagccagacctatgaccgagctgttaaagaaggaaaagaaatttcaatggtctacagcctgtgaagacagctttcaagaaatgaagaaaaggtttaccactgccccagttctcaccttgccagatatccgaagagatttcgagatcttctatgatgcaacaagacaaggcttaggatgtgtcctaatgcaagaacgaaaggttgtggcctatgcatccaggcagctcaggcctcatgaagtcaactatcccacccatgacctcgagttggcagccgtggttcatgctcttaagatctggaggcactatttaatcgggaacagatgtgaagtatacaccaatcacaaaagtctcaagtacatcttcactcagaccgagttaaatatgaggcagagaaaatggttggaactaatcaaggattacgatcttggaattcattaccaccccagtaaagctaacgtggtcactgatgcgctaagtcgcaaggcctattgcaatgtagctcaaatacggtcttaccaagatcgcctgtgcagagaattggagaagttaaggctgaccgtggtacagtcaggtgtccctgccagcttgacagtgcagcctaccctagaatcgcaaatccgggaggctcagaaagatgacgaagggataaaagaattaataaaaagaatacaggagaagaatgacaccaatttctccatagacgatcaaggcacagtttggtgcggtccacgcatctgtgtaccggccaagaaggagttaagagatctcatcctaaaggaagctcatgagtccgcctactccattcatccaggaagtacgaagatgtaccaagatatcaaggcatacttctggtgggctggaatgaagcgagatgtcgcagaatgcgtagccttgtgtgacatttgccaaagagtcaaggcagaacatcagaggccagctggtctgctgcaacccctaccgattcccgagtggaaatgggaagagatcggaatggatttcatcaccggtttgccaagaacccctagcgggtacaactccatctgggtaatcgtggaccgactcacgaaatcagctcatttcgtgctagtgaaaaccacctttgatggaaagaaactagcagaactctacatgacccatgtcgtgtgtagatttggctgtcccaagaaaattgtgtcagaccgaggcactcagttcacctcaaagttctggaagcagttgcatgaagccctcggaaccgatctaaatttattacagcctaccatccgcagaccgatggtcagacagaaaggttatcaggccagcattcagatgtcgccgaatgaggcaatgttcggaagaaagtgccgcactcccttgtgctggaatgaggtgggcgaagcactggtattcggtcctgacgtactcaaggcagcagaagaacaagttaaactgatccgagaacgtttaaagacagcgcagaaccgtcagaagaattacgcggacaatcgaaggcgtgaccttgagttcgaaaaaggagatcatgtgtacctgcgggtatcgcctctccgtggtataaggaggtttgggatgtccggcaagttagcaccccgctacatcggcccctacctcataaccgccagacgtggcgaagtggcttatcagcttgagttacctgaaggtctcgcatatgtgcacaacgtgttccacgtatcccagttaaagaaatgtcttcgagttccagaagagcaagtccccctgggtaatatcgagctggaaaagaatctgacctacaaggaaagactgatcaagatttttgaagaggcagaacgtcagactcgaaggaagaccatcaagttctacaaagtccaatggagcaaccattctgaagatgaggcaacctgggagcaagaagatcttctccgcgccgagttcccggagctgctcccttag

SEQ ID NO: 15480 - DNA, 4689 bp, Oryza sativa
  Clone ID: TFbOSC401329j.C1.o28.fg
atggcagtgaacgccagcttcagttcccacggttttggtgagggtcaccacgtcgctcagcttcgtgacctcgcccgtttccttggcttctcgtgtcccgagtacacggggtactccgtggaccgtgttccccctcactgtgagctctctgtgtacctttacccccgtggagacgccaggtacccttgtccgtacagcgagtctcagccagtgctgactcgcatggttgagctttcggaggctcaggccactcagcacgacctactccttgaggcttaccgctcccttgcccgccgctacgccgccttggaggcctgtctggccgaggagggtgtcacctcagttgacactatctcttgggactcaggccgcctctgccacgccagccacctgtcctcccacagctcccgcggctctgcccgcactcccagtggcccgcgctcccccagctcgcgtgcgccgtactcaccagtgtactccccctacccacacccagttagcccttcctacacccccggacacaccccagttgcttcctcccgccgtggcccacgctttatccgcactgcgcggaagcgtgttgttggttcttccaccgtgttccgtttccactacccagctcccccaccgctagcgatggctagccgcccccgccgtacagctcgtgcgccagcccgctttggttttgaagatggtagagtcgaaccagaagcaaatcatgaatcagctaatgagcagtctcaccacagcaaccgttcgcaccgtactgtttcccgcaacgcagaggttgagcaaccccgccgcagcagccgctcgcatcgcacagtttcccgtgatgcagagatggaacagtctcaccgctctcaccacactgccagtcacaattctggagaagaacgcctcccttccccacctcatgtggaaaacaacatgcaacacttaatggcagttcagacacaaatcttgcaaggactaaccacagccatagccagttttcagcataatgcgcatggaaatggccaccctcacatgggcaacaacagatccaagctgacagactttctgaggtctcgtccgccagagttctctcagaccgtcgagcccgtcgaggctgacgattggttgaaagatgttgatagaaaactcaacttagtgcagtgtactccggttgagaagacgctctacgcctctcaccagttaagaggacctgccgcagattggtgggagaattactgcaatgcacaccttgaacccactaacattgcttgggatgagtttgctacggctttccgtgcagctcatgtgcctgaaagcactattgacatgaagaaagaagaattcaacagacttaagcaaggcaacagcagtgtcaatgagtacctaagtcagttcaataagttggctcggtacgcccctgaggaagtggacacagacaagaagaagattaggaaattcttgaaagggatcgcagttggaatgagactccagttgcttgcgcatgacttccccacttttcaacatatgatcaacaaggcacttctacttgaggatgccagaaaagaggctaccgaagaatacaagaaacgcaagtctaaccatcagggaaattcttcccgaggcgcacctcgccctcgctacggtcaacccatgcaataccaccagtcggtcactcaggctaaccgccagccaggctacgcccctcgccctcagatgaaccgtccggcacctccgccacagcagcgtgcccctagtggcaacactgcgccaaacagtgttacctctttcaagtcaccacagggaccgtcagcagttcagtgtttccggtgcaaccagatgggtcactatgctagacagtgtcctcagaatcctaccaacaccaactcaggacatgctaatggcagcactgccagaactcctactccagcggcagctcagtctcgtcctagctctcaggcaagtggacaaggttcacgtgcttccaacaactttggtcgaggccgtgtgaatcacattcaagctgaaaccgctcaggatgctccagacgttgtgatgggacctggaggaaagcaaatccgctttacccctaacacccctaccgcaagccggtctattctaacctgtttacaagtcacctccttggagtcggtgcccatagtctgtgcataccccgacgtatttccggaagaattaacaagaatgccaccagaccgagagatcgagttcgccatagaactggcactaggcactgccccaattgcaaagagaccctaccgaatggcagctaatgagttagcagaagttaaaagacaaatcgaagaattggagagtaaaggttatgtgcgacctagctcatccccttggggagccccagtgcttctggttaagaaaaaggatggctctgagagaatggtaatcgactatagagccctgaatgaagtaactataaagaacaagtacccgttgccacggattgacgatttattcgatcaactcaaaggagcaagagttttctcaaaaattgacttgaggtcaggttaccaccaactgaaaatcagatctgaagatattccgaagaccgctttctcaacgcgttatggtctatacgagttcacatttgtcgtggtgttcatcgatgacatcctgatataccccaagaatgtgtcagagattcgcagcttccttggcttagcgggatattatcgaagattcattaaaggattctctaagctagccagacctatgactgagctgttaaagaaggaaaagaaatttcaatggtctgcagcctgtgaagacagctttcaagaaatgaagaaaaggttgaccactgccccagttcttaccttgccagatatccgaaaagatttcgagatcttctgtgacgcatcaagacaaggcttaggatgtgtcctaatgcaagaacgaaaggttgtggcctatgcatccaggcagctcaggcctcatgaagtcaattatcccacccatgatctcgagttggcagccgtggttcatgctcttaagatctggaggcactatttaatcgggaacagatgtgaagtatacaccgatcacaaaagtcttaagtatatcttcacacagaccgagttaaatatgagacagagaagatggttggaactaatcaaggattacgaccttggaatccactatcatcctggtaaagccaacgtggtcgctgatgcgctaagtcgcaaggcctattgcaacgtagctcaaatacggcccgaccaagatcacctgtgcagagaattggagaagttaaggctgaccatggtacagtcaggtgtccctgccagcttgacagtacagcctaccctagagtcgcaaatccgggaggcacagaaagacgacgaagggataaaagagttaataaaaagaatacaggagaagaaagacaccaatttttccatagacgatcaaggcacagtttggtgcggtccacgcatctatgtaccggccaagaaggagttaagagatctcatcctaaaagaagctcatgagtccgcctactccattcatccaggaagtacgaagatgtaccaagatatcaaggcatacttctggtgggctggaatgaagcgagatgtcgcagaatacgtagccttgtgtgacatttgccaaagagtcaaggcagagcatcagaggccagctggtctgctgcaacccctaccgattcccgagtggaaatgggaagagatcggaatggatttcatcaccggtttgccaagaacccctagcgggtacgactccatttgggtaatcgtggatcgcctcacgaaatcagctcatttcgtgctagtgaaaaccacctatgatggaaagaaactagcagaactctacatgacccatgtcgtatgtagatttggctgtcccaagaagatcgtgtcagaccgaggcactcagttcacctcaaggttctggaagcagttgcatgaagctctcggaactgatctaaattttagtacagcctaccatccgcagaccgatggtcagaccgaaagggtaaaccaaatcctagaagacatgctacgtgcgtgtgccctggatttcgaaggcacttgggatcgttgtttgccgtatgccgagttctcatacaacaacagctatcaggccagcattcagatgtcgccgaatgaggcaatgttcggaagaaagtgccgcactcccttgtgctggaatgaggtgggcgaagcgctagtattcggtcctgacatactcaagtcagcagaagaacaagttaagctgatccgagaacgtttgaagacagcgcagaaccgccaaaagaattacgctgacaatcggagacgtgaccttgagttcgaaaaaggagatcatgtatacctgcgagtatcacccctccatggtatgagaaggtttgggatgtccggcaagttagcaccccgctacatcggcccctacctcataaccgccagacgtggcgaagtggcttatcagcttgagctacctgaaggtctcgcagatgtgcacaacgtgttccacgtatcccagttaaagaaatgtcttcgaattccagaagagcaagttcccctggtttcagagcccgaagacccgcagtgcgaggatttcgaggatcaagctccagatctcgagcaaggcaagccacctttgaacatcttgaacctatatttgaaatttaattatgttgcttga

SEQ ID NO: 15481 - DNA, 4490 bp, Oryza sativa
  Clone ID: TFbOSC401436j.C1.o1.np
atgactgtactcctactctataataaagagacctctgttgctgtgatattctgtcttcctgtgataccagcactgtttcctgggactggtatcgattaacagatggcagtgaacgccagcttcagctcccacggttttggtgagggtcaccacgtcgctcagcttcgtgacctcgctcgtttccttggcttctcgtgtcccgagtacacggggtactccgtggaccgtgttccccctcactgtgagctctctgtgtacctttaccctcgtggaggtatacacggagctggccttcgcccacaccacttcaccgtggccaggcccactctccagatcgcccaccatctcgggggcttcgccttccggcagctaccacgccttccttctggccactcagacgccaggtacccttgtccgtacagcgagtctcagccagtgctgactcgcatggttgagctttcggaggctcaggccactcagcacgacctactccttgaggcttaccgctcccttgcccgccgctacgccgccgcctctgtcacggcagccacctgtcctcccacagctcccgcggctctgcccgcactcccagtggcccgcgctcccccagctcgcgtgcgccgtactcaccagtgtactccccctacccacacccagttagcccctcctacacccccggacacaccccagttgcttcctcccgccgtggcccacgctttatccgcaccgcgcggaagcgtgttgttggttcttccaccgtgttccgtttccactacccagctcccccaccgccagcggcccgtgctgctgtcggccctcgacaggttccgccggtcccttcgcgtcagccgatcgacatttcttcgactgaggagccgactacaggagcccgctttggttttgaagatggtagagccgagccagaagcaaatcatgagcagtctcaccacagcaaccgttcgcaccgtactgcttcccgcaatgcagaagttgagcaaccccgccgcagcaaccgctcgcatcgcacggcttcctgtgatgtagagatggaacagtctcaccgctctcaccgcactgccagtcacaattctggagaagaacgcctcccttccccacctcatgtggaaaacaacatgcagcacttaatggcagtttagacacaaatcttgcaaggattagccgcagccgtagccggttttcagcatactgcgcatggaaatggccaccgtcacatgagcaacaatagatccaagctgacagactttctgaggtctcgtccgccagagttctctcagaccgtcgagcccgtcgaggctgacgattggctgaaagatgtggatagaaaactcaacttggtgcagtgtactccggttgagaagacgctctatgcctctcaccagctaagaggacctgctgcagattggtgggaaaattactgcaatgcacaccctgaacccactaacattgcttgggatgagtttgctacgtctttccgtgcagctcatgtgcctgaaagcaccattgacatgaagaaagtggaattcaacagacttaagcaaggcaacagcagtgtcaatgagtacctaagtatgttcaacaacttggctcgatacgcccctgaggaagtggacacagataagaagaagatcaggaaattcgtgaaaggaatcgcagcgcttctacttgaagatgccagaaaagaggctaccgaagaatacaagaaacgcaactctaaccatcagggaaattcttcccgaggcgcacctcgccctcactacggtcaacccatgcaataccaccagtcggtcactcaggctaaccgccagccaggctacgcccctcgtcctcagatgaactgtccggcacctcagccacagcagcgtgcccctagtggcaatactgcgcccaacagtgttacctctttcaagtcaccacagggaccgtcagcagttcagtgtttccggtgcaaccagatgggccactatgccagacagtgccctcagaatcctaccaacaccagctcagggcatgctaatggcagcactgccagaactcctactccagcggcagctcagtctcgtcctagctctcaggcaagtggacaaggttctcgtgtgtccaacaaccttggtcgaggccgggtgaatcacattcaagccgagaccgctcaggatgctccagacgttgtgatgggtatgttctctgtcaactccatacccgcaatagttctgtttgattcaggagcttcccactctttcatatcacaagcttttgtgaaaagaaatggttggaaaacccaaaatttacgtgtaccaatgatagtacattcccctgggagggatataagggcaactcaaatatgcctggaagttaaccttagaattgaggaagttgacttcctagccaaaccgatagtcctagactcgcaaagcttggacatcatcctagggatggattggttggcaaagcacaaaggacagatagattgtgccgaaaagtccatcaccttgcaaggacctggaggaaagcaagtccgctttacccctaacactcctaccgcaagtcggtctatcttaacctgtttacaagtcacctccttggagtcggtgcccatagtctgtgaatatcccgacgtatttccagaagaattaacgagtatgccaccagaccgggagattgagttcgccatagaactggcaccaggcaccgcaccaattgcaaaaagaccctaccgaatggcagctaatgagttagtagaagttaaaagacaaatcgaagaattggagagtaaaggttatgtgcgacctagctcatccccttggggagccccagtgcttctggttaagaaaaaggatggctctgagagaatgttgaaaatcagatctgaagatatcccgaagaccgctttctcaacgcgttatggtctatatgagttcacagaaatgtccttcggactcaccaatgctccagcgttcttcatgaacttaatgaacaaaatctttatggaatacctggaccagtttgtcgtggtgttcatcgatgacatcctgatatactccaagaatgaggaagaacatgctgaacacctgaggctaataatggaaaagctcagggatcatcaactattcgctaaattctcgaaatgcgaattctggttagaccgagtagcattccttggacacgtgatctcctccaacggtgtcgaggtagatcccagcaaggttgaagctgtacttgcttggaacccgcccaagaatgtgtcagagattcgcagcttccttggcttagttggatattatcgaagattcattgaagaattctctaagctagccagacctatgaccgagctgttaaagaaggaaaagaaatttcaatggtctgcagcctgtgaagacagctttcaagaaatgaagaaaaggttgaccactgccccagttctcaccttgccagatatccgaaaagatttcgagatcttctgtgatgcatcaagacaaggcttaggatgtgtcctaatgcaagaacgaaaggttgtggcctatgcatccaggcagctcaggcctcatgaagtcaattatcccacccatgatctcgaattggcagccgtggttcatgctcttaagatctggaggcactatttaatcgggaacagatgtgaagtatacaccgatcacaaaagtcttaagtacatcttcacacagacggagttaaatatgaggcagagaagatggttggaactaatcaaggattacgatcttggaattcattaccaccccggtaaagccaacgtggtcgctgatgcgctaagtcgcaaggcctattgcaatgtagctcaaatacggcctgaccaagatcgcctgtgcagagaattggagaagttgaggctgaccgtggtacagtcaggtgtccctgccagcttgacagtacagcctaccctagagtcgcaaatccgggaagctcagaaagacgacgaagggataaaagagttaataaaaagaatacaggagaagaaagacaccaatttctccatagacgatcaaggcacagtttggtgcggtccacgtatctgtgtaccggccaagaaggaattaagagatctcatcctaaaggaagctcatgagtccgcctactccattcatccaggaagtacgaagatgtaccaagatatcaaggcatacttctggtgggctggaatgaagcgagatgtcgcagaatacgtagccttgtgtgacatttgccaaagagtcaaggcagagcaccagaggccagctggtctgctacagcccctaccaattcccgagtggaaatgggaagaaatcggaatggatttcatcaccggtttgccaagaacccctagcgggtacgactccatttgggtaatcgtggatcgactcacgaaattggctcatttcgtgccagtgaaaacaacctgggagcgagaagatcttctccgcgccgagttcccgcacattatttttgtttttaaattctct

SEQ ID NO: 15482 - DNA, 5400 bp, Oryza sativa
  Clone ID: TFbOSC401685j.C1.o111.fg
atggcagtgaacgccagcttcagttcccacggttttggtgagggtcaccacgtcgcccagcttcgtgacctcgcccgtttccttggcttctcgtgtcccgagtacacggggtactccgtggaccgcgttccccctcactgtgagctctctgtgtacctttacccccgtggaggtatacacggagctggccttcgcccacaccacttcactgtggccaggcctactctccagatcgcgtaccaggacctctcctggactgcgcttcgtcgcctggcccacgactacagccaccgtctcggaggctccgccttccggcagtttccacgccttccttctggccactcagacgccaggtacccttgcccgtacagcgagtctcagccagtgctgactcacatggttgagctttcggaggctcaggccacccagcacgacctactccttgaggcttaccgctctcttgctcgccgctacgccgctttggaggcccgtctggccgaggagggtgtcacctcagttgacactatctcttgggactcaggtcgcctctgccacgccagccacctgtcctcccacagctcccgcggctctgctcgcactcccagtggcccgcgctcccccagctcgcgtgcgccgtactcaccagtgtactccccctacccacacccagttagcccttcctacacccccggtcacaccccagttgcttcctcccgccgtggcccacgctttatccgcactgcgcggaagcgtgttgttggttcttccaccgtgttccgtttccactacccagctcctccaccgccagcggcccgtgctgctgccggccctcgacagatggctagccgcccccgccgtgcagcccgtgcaccagctcgctttggttttgaagatggtagagtcgaagcagaagcaaatcatgaatcagctaatgagcagtctcaccacagcaaccgttcgcaccgtactgtttcccgcaacgcagaagttgagcaaccccgccgcagcaactgctcgcatcgcacagtttcccgtgatgcagagatggaacagtctcaccgctcttaccgcactgccagtcacaattctggagaagaacgcctcccttccccacctcatgtggaaaacaacatgcaacacttaatggcagttcagacgcaaatcttgcaaggactaaccacagccatagccagttttcagcataatgcgcatggaaatggccacccccacatgggcaacaacagatccaagctgatagactttctgaggtctcgtccgctagagttctctcagaccgtcgagcccgtcgaggctgacgattggttgaaagatgttgatagaaaactcaacttagtgcagtgtactcctgttgagaagacgctctacgcctctcaccagctaagaggacctgccgcagattggtgggaaaattactgcaatgcacatcctgaacccactaacattgcttgggatgagtttgctacggctttccgtgcagctcatgtgcctgaaagcaccattgacatgaagaaagaagaattcaacaggcttaagcaaggcaacagcagtgtcaatgagtacctaagtcagttcaacaagttggctcggtacgcccctgaagaagtggacacagataagaagaagatcaggaaattcttgaaaggcgcacctcgccctcgctacggtcaacccatgcaataccaccagtcggtcactcagactaaccgccagccaggctacgcccctcgtcctcagatgaaccgtccggcacctccgccacagcagcgtgcccctagtggcaatactgcgccaaacagtgttacctctttcaagtcaccacagggaccgtcagcagttcagtgtttccggtgcaaccagatgggtcactatgctagacagtgccctcagaatcctaccaacaccaactcagggcatgctaatggcagcaatgccagaactcctactccagcggcagctcagtctcgtcctagctctcaggcaagtggacaaggttcacgtgcttccaacaacttcggtcgaggccgtgtgaatcacattcaagctgaaaccgctcaggatgctccagaagttgtgatgggtatgttctctgtcaactccgtacccgcaatagttctgtttgattcgggagcttcccattctttcatatcgcaagcttttgtgaaaagaaatggttggaaaacccaaaatttgcgtgtgccaatgatagtacattcccctggaaggaatataagggcaactcaaatatgcccggaagttaaccttagaattgaggaagttgacttcctagccaaaccgatagtcctagactcgcaaagcttggacatcatcctagggatggattggttggcaaagcacaaaggacagatagattgtgccgaaaagtccatcactttgcaaggacctggaggaaagcaagtccgctttacccctaacactcctaccgcaaatcggtctattctaacctgtttacaagtcacctccttggagtcggtgcccatagtctgtgaatatcccgacgtatttccggaagaattaacaagaatgccaccagaccgagaaatcgagttcgccatagaactggcaccaggcactgcaccaattgcaaaaagaccctaccgaatggcagctaatgagttagcagaagttaaaagacaaatcgaagagttggagagtaaaggttatgtgcgacctagctcatctccttggggagccccagtgcttctggttaagaaaaaggatggctctgagagaatggtaatcgactatagagccctgaatgaagtaactataaagaacaagtacccgttgccacggattgacgatttattcgatcaacttaaaggagcaagagttttctcaaaaattgacttgaggtcaggttaccaccaactgaaaatcagatctgaagatatcccgaagaccgctttctcaacgcgttatggtctatacgagttcacagtaatgtccttcggactcaccaatgctccagcatttttcatgaacctaatgaacaaaatctttatggaatacctggaccagtttgtcgtggtattcatcgatgacatcctgatatactccaagaacgagaaagaacatgctgaacacctgaggctgataatggaaaagctcagaaatcatcgactattcacaaaattcttgaaatgcgaattctggttggaccgagtagcatttcttggacacgtgatctcctccaacggtgtcgaagtagatcccagcaaagttgaagctgtacttgcttggaacccgcccaagaacgtgtcagagatccgcagcttccttggcttagctggatattatcgaagattcattgaaggattctctaagctagccagacctatgaccgagctgttaaagaaggaaaagaaatttcaatggtctgcagcctgtgaagacagctttcaggaaatgaagaaaaggttgaccactgccccagttctcaccttgccagatatccgaaaagatttcgagatcttctgtgatgcatcaagacaaggcttaggatgtgtcctaatgcaagaacgaaaggttgtggcctatgcatccaggcagcttaggcctcatgaagtcaattatcccacccatgatctcgagttggcagccgtggttcatgctcttaagatctggaggcattatttaatcgggaacagatgtgaagtatacaccgatcacaaaagtcttaagtatatcttcacacagaccgagttaaatatgaggcagagacgatggttggaactaatcaaagattacgatcttggaatccactatcatcctggcaaagccaacgtggtcgctgatgcgctaagtcgcaaggcctattgcaatatagcccaaatacggcctgaccaagatcacctgtgcaaagaattggagaagttgagggtgaccgtggtacagtcaggtgtccctgccagcttgacggtacaacctaccctagagtcgcaaatccgggaggctcagaaagacgacgaagggataaaagagttaataaaaagaatacaagaaaagaaagacaccaatttctccatagacgatcaaggcacagtttggtgcggtccacgcatctgtgtaccggccaagaaggagttaagagatctcatcctaaaggaagctcatgagtccgcctactccattcatccaggaagtacgaagatgtaccaagatatcaaggcatacttctggtgggctggaatgaagcgagatgtcgcagaatacgtagccttgtgtgacatttgccaaagagtcaaggcagagcatcagaggccagctggtctgctgcaacccctaccgattcccgagtggaaatgggaagaggtcggaatggatttcatcaccggtttgccaagaacccccagcgggtacgactccatctgggtaatcgtggatcgactcacgaaatcagctcatttcgtgccagtgaaaaccacctatgatggaaagaaactagcagaactctacatgacccatgttgtatgtagatttggctgtcctaagaaaattgtgtcggaccgaggcactcagttcacctcaaggttctggaagcagttgcatgaagccctcggaactgatctgaattttagtacagcctaccatccgcagaccgatggtcagaccgaaagggtaaaccaaatcctagaagacatgctacgtgcgtgtgccttggatttcgaaggcacttgggatcgttgtttgccgtatgccgagttctcgtacaacaacagttatcaggccagcattcaaatgtcgccgaatgaggcaatgttcggaagaaagtgccgcacccccttgtgctggaatgaggtgggcgaagccctggtattcggtcctgacatactcaagtcagcagaagaacaagttaagctgatccgagaacgtttaaagacagcgcaaaaccgtcagaaaaattacgctgacaatcggagacgtgaccttgagttcgaaaaaggagatcatgtgtacctacgggtatcacccctccggggtatgagaaggtttgggatgtccggcaagttagcaccccgctacatcggcccctacctcataaccgccagacgtgacgaagtggcttatcagcttgagctacctgaaggtctcgccgatgtgcacaacgtgtttcatgtatcccagttaaagaaatgtcttcgagttccagaagagcaagttcccctgggtaatatcgacctggaaaagaatctgaccaacaaggaaagaccgatcaaggttcttgaagaggcagaacgtcagactcgaaggaagaccatcaagttctacaaagtccaatggagcaatcattctgaagatgaggcaacctgggaacgagaagatcttctccgcgccgagtttccggagctgctcccttag

SEQ ID NO: 15483 - DNA, 4716 bp, Oryza sativa
  Clone ID: TFbOSC401686j.C1.o1.np
atggctagccgtccccgccgtgcagctcgtgcaccagcccgctttggtgttgaggatggtagagttgagccagaagaaaatcatgaatcagctaatgagcagtctcaccacagcaaccgttcgcatcgtactgtttcccgcaacgcagaggttgagcaaccccgccgcagcagccgctcgcatcgcacagtttcccgtgatgcagagatggaacagtctcaccgctctcaccgcactgccagtcacaattctggagaagaacgcctcccttccccacctcatgtggaaaccaacatgcaacacttaatggcagttcagacacaaatcttgcaaggactaaccacagccatagccagttttcagcataatgcgcatggaaatggccaccctcacatgggcaacaacagatccaagctgacagactttttgaggtctcgtccgccagagttctctcagaccgtcgagcccgtcgaggctgacgattggttgaaagatgttgatagaaaactcaacttagtgcagtgtactcctgttgagaagacgctctacgcctctcaccaactaagaggacctgccgcagattggtgggagaattactgcaatgcacaccctgaacccactaacattgcttgggatgagttcgctacggctttccgtgcagctcatgtgcctgaaagcactattgacatgaagaaagaagaattcaacagacttaagcaaggcaacagcagtatcaatgagtacctaagtcagttcaacaagttggctcggtacgcccctgaggaagtggacacagacaagaagaagatcaggaaattcttgaaaggaatcgcagttggaatgagactccagttgcttgctcatgacttccccacttttcaacatatgatcaacaacgcacttctacttgaggatgccagaaaagaggctaccgaagaatacaagaaacgcaagtctaaccatcagggaaattcttcccgaggcgcacctcgccctcgctacggtcaacccatgcaataccaccagtcggtcactcaggctaaccgccagccaggctacgcccctcgtcctcagataaaccgtccggcacctcagccacagcagcgtgcccctagtggcaatactgcgcctaacagcgttacctctttcaagtcaccgtagggaccgtcagcagttcagtgtttccggtgcaaccagatgggtcactatgctagacagtgtcctcagaatcctaccaacaccaactcagggcatgctaatggcagcactgccagaactcctactccagcggcaactcagtctcgtcctagctctcaggcaagtggacaaggttcacgtgcttccaacaactttggtcgaggccgtgtgaatcacattcaagctgaaaccgctcaggatgctccagacgttgtgatgggtatgttctctgtcaactccgtacccgcaatagttctgttcgattcgggagcttcccattctttcatatcgcaagcttttgtgaaaagaaatggttggaaaacccaaaatttgcgtgtaccaatgatagtacattcccctggaaggaatataagggcaactcaaatatgcccggaagttaaccttagaattgaggaagttgacttcctagccaaaccgatagtcctagactcgcaaagcttggacatcattctagggatggattggttggctaagcacaaaggacagatagaatgtgccgaaaagtccatcaccttgcaaggacctagaggaaagcaagtccgctttacccctaacacccctaccgcaagtcggtctatcctaacctgtttacaagtcacctccttggagtcggtgcccatagtctgtgaatatcccgacgtatttccggaagaattaacaagaatgccaccagaccgagagatcgagttcgccatagaactggcaccaggcacagctccaattgcaaaaagaccctaccgaatggcagctaatgagttagcagaagttaaaagacaaatcgaagaactggaaagtaaaggttatgtgcgacctagctcatccccttggggagccccagtgcttctggttaagaaaaaggatggctcggagagaatggtaatcgactatagagccctgaatgaagtaactataaagaacaagtacccgttgccacggattgacgatttattcgatcaacttaaaggagcaagagttttctcaaaaattgacttgaggtcaggttaccaccaactgaaaatcagatctgaagatatcccgaagaccgctttctcaacgcgttatggtctatatgagttcacagttatgtccttcggactcaccaatgctccagcattcttcatgaacttaatgaacaaaatcttcatggaatacctagaccagtttgtcgtggtgttcatcgatgacatcctgatatactccaagaacgaggaagaacatgctgaacacctgaggctgataatggaaaagctcagagatcatcaactattcgctaaattctcgaaatgcgaattctggttggacagagtagcatttcttggacacgtgatttcctccaacggtgtcgaagtagatcccagcaaggttgaagctgtacttgcttggaacccgcccaagaacgtgtcagagatccgcagcttccttggcttagctggatattatcgaagattcattgaaggattctctaagctagccagacctatgaccgagctgttaaagaaggaaaagaaatttcaatggtctgcagcctgtgaagacagcttccaagaattgaagaaaaggttgaccactgccccagttctcaccttgctagatatccaaaaagatttcgagatcttctgtgacgcatcaagacaaggcttaggatgtgtcctaatgcaagaacaaaaggttgtggcctatgcatccaggcagctcaggcctcatgaagccaattatcccacccatgatctcgagttggcagccgtggttcatgctcttaagatctggaggcactatttaatcgggaacagatgtgaagtatacaccgatcacaaaagtcttaagtatatcttcactcagaccgagttaaatatgagacagagaagatggttggaactaatcaaggattacgatcttggaatccactatcatcctggtaaagccaacgtggtcgctgatgcgctaagtcgcaaggcctattgcaatgtagctcaaatacggcctgaccaagatcacctgtgcggagaattggagaagttaagactgaccgtggtacagtcaggtgtccctgccagcttgacagtacagcctaccctagagtcgcgaatccgggaggctcagaaagacgacgaagggataaaagaattaataaaaagaatacaggagaagaaagacacaaatttctccatagacgatcaaggcacagtttggtgcggaccacgcatctgtgtaccggccaagaaggagttaagagatctcatcctaaaggaagctcatgagtccgcctactccattcacccaggaagtacgaagatgtaccaagatatcaaggcatacttctggtgggctggaatgaagcgagacgtcgcagaatacgtagccctgtctgacatttgccaaagagtcaaggcggaacatcagaggccagctggtctgctgcaacccctaccgattcccgagtggaaatgggaagagatcggaatggatttcatcaccggtttgccaagaacccccaacgggtacgactccatttgggtaatcgtggaccgactcacgaaatcagctcatttcgtgccagtgaaaaccacctatgatggaaagaaactagcagaactctacatgacccatgtcgtatgtagatttggctgtcccaagaaaattgtgtcagaccgaggcactcagttcacctcaaggttctggaagcagttgcatgaagccctcggaactgatctgaattttagtacagcctaccatccgcagaccgatggtcagaccgaaagggtaaaccaaatcctagaagacatgctacgtgcgtatgccttggatttcgaaggcacttgggatcgttgtttgccgtatgccgagttctcatacaacaacagttatcaggccagcattcagatgtcgccgaatgaggcaatgttcggaagaaagtgccgcacccccttgtgctggaatgaggtgggcaaagcactggtattcggtcctgacatactcaagtcagcagaagaacaagttaagctgatacgagaacgtttgaagacagcacagaaccgtcagaagaattacgctgacaatcggaggcgtgaccttgagttcgaaaaaggagatcatgtgtacctgcgggtatcacccctccgtggtatgagaaggtttgggatgtccggcaagttagcaccccgctacatcggcccctacctcataaccgccagacgtggcgaagtggcttatcagcttgagctacctgaaggtctcgcagacgtgcacaacgtgttccacgtatcccagttaaagaaatgtcttcgagttccagaagagcaagttcccctgggtaatatcgagctagaaaagaatctgacctacaaggaaagaccgatcaaggttcttgaagaggcagaacgtcagactcgaaggaagaccatcaagttctacaaagtccaatggagcaatcattccgaagacgaggcaacctgggagcgagaagatcttctccgcgccgagttcccggacctgctccct

SEQ ID NO: 15484 - DNA, 5559 bp, Oryza sativa
  Clone ID: TFbOSC401716j.C1.o78.fg
atggcagtgaacgccagcttcagttcccacggttttggtgagggtcaccacgtcgcccagcttcgtgacctcgcccgtttccttggcttctcgtgtcccgagtacacggggtactccgtggaccgtgttccccctcactgtgagctctctgtgtacctttaccctcgtggaggtatacacggagttggccttcgccctcaccacttcactgtggccaggcccactctccagatcgcgtaccaggacctctcctggactgcgcttcgccgcctggcccacgactacggccaccgtctcggaggctccgccttccggcagcttccacgtcttccttctggccactcagacgccaggtacccttgtccgtacagcgagtctcagccagtgctgactcgcatggtcgagctttcggaggctcaggccactcagcacgacctactccttgaggcttaccgttcccttgcccgccgctacgccgccttggaggcccgtctggccgaggagggtgtcacctcagttgacactatctcttgggactcaggccgtctctgccacgccagccacctgtcctcccacagctcccgcggctctgctcgcacacccagtggcccgcgctcccccagctcgcgtgcaccgtactcaccagtgtactccccctacccacacccagttagcccttcctacacccccggacacactccagtcgcttcctcccgccgtggcccacgctttatccgcactgcgcggaagcgtgttgttggttcttccaccgtgttccgtttccgccacccagctcccccaccgccagcggcccgtgctgctgccggccctcgacagtctggttctcctaggaggtgtgcgcacagtcaagctcggcgtagctctgtgactagtccacacccgttgtatcagatggctagccgcccccgtcgtacagctcgtgcaccagtccgctttggttttgatgatggtagagttgaagcagaagcaaatcacgaaccagctaatgagcattctcaccacagcaaccgttcgcaccgtactgtttcccgcgacgcagaggttgagcaacctcgccgcagcaaccgctcgcatcgcacagtttcccgtgaagcagagttggagcagtctcaccgctctcaccacactgccagtcacaattctggaggagaacgcctcccttccccacctcatgtggaaaacaacatgcaacacataatggcagttcagacacaaatcctgcaaggtctaaccacagccatagccagctttcagcataatgcgcatggaaatggccaccctcacgtgggcaacaacagatccaagctgacggactttctgaggtctcgaccgccagagttctctcagaccgtcgagcccgtcgaggctgacgattggttgaaagatgttgatagaaaactcaacttagtgcagtgtactcctgttgagaagacgctctacgcctctcaccagctaagaggacctgccgcagattggtgggagaattactgcaatgcacatcctgaacccactaacattgcttgggatgagtttgcagctgccttccgtgcagctcatgtgcctgaaagcactattgacatgaagaaagaagaatttaacagacttaagcaaggccacagcagtgtcaatgagtacctaagtcagttcaacaagttggctcggtacgcccctgaggaagtagacaccgataagaaaaagatcaggaaattcttgaaaggaatcgcagttggaatgagactccagttgcttgctcatgacttccccacttttcaacatatgatcaacaaagcacttctacttgaggatgccagaaaagaggccaccgaagaatacaagaaacgcaagtctaaccatcagggaaattcttcccgaggcgcacctcgccctcgctacgataaaccgtccggcacctcagccacagaagcatgccctagtggcaacactgcgccaaacagtgttacctccttcaagtcaccacagggaccgtcagcagttcagtgtttccggtgcaaccagatgggtcactatgctagacagtgtcctcagaatcctaccaacaccaactcagggcatgctaatggcagcaccgccagaactcctactccagcggcagctcagtctcgtcctagctctcaggcaagtggacaaggttcccgtgcttccaaccactttggtcgaggacgtgtgaatcacattcaagctgaaaccgctcaggatgctccagacgttgtgatgggtatgttctctgtcaactccgtacccgcaatagttctgtttgattcaggagcttcccattctttcatatcgcaagcttttgtgaaaagaaatggttggaaaacccaaaatttgcgtgtaccaatgatagtacattcccctggaagaaatataagggcaactcaaatatgcccggaagttaaccttagaattgaggaagttgacttcctagccaaaccgatagtcctagactcgcaaagcttggacatcattctagggatggattggttggctaagcacaaaggacagatagattgtgccgaaaagtccatcaccttgcaaggacctggaggaaagcaagtccgctttacccctaacacccctaccgcaagtcggtctatcctaacctgtttgcaagtcacctccttggagtcggtgcccatagtctgtgaatatcccgacgtatttccggaagaattaacaagaatgccaccagatagagagattgagttcgccatagaactggcaccaggcacagctccaattgcaaaaagaccctaccgaatggccgctaatgaattagcagaagttaaaagacaaatcgaagaactggaaagtaaaggttatgtgcgacctagctcatccccttggggagccccagtgcttctggttaagaaaaaggatggctctgagagaatggtaattgactatagagccctgaatgaagtaactataaagaacaagtacccgttgcctcggattgacgacttattcgatcaacttaaaggagcaagagtcttctcaaaaattgacttgaggtcaggttaccaccaactgaaaatcagatctgaagatattccgaagaccgctttctcgacgcgttatggtctatatgagtttacagtaatgtccttcggactcaccaatgctccagcattcttcatgaacttaatgaacaaaatctttatggaatacctggaccagtttgtcgtggtattcatcgatgacatcctgatatactctaagaacgaggaagaacatgctgaacacctgaggctgataatggaaaagctcagagatcatcaactattcgctaaattctcgaaatgcgaattctggttggaccgagtagcttttcttggtcacgtgatctcctccaacggtgtcgaagtagatcccagcaaagttgaagctgtacttgcgtggaacccgcccaagaatgtgtcagagattcgcagcttcctcggcttagctggatattatcgaagattcattgaaggattctctaagctagccagacctatgaccgagctgttaaagaaggagaagaaatttcaatggtccacagcctgtgaagacagctttcaagaaatgaagaaaagattgaccactgccccagttctcaccttgccagatatccgaaaagacttcgagatcttctgtgatgcatcaagacagggcttaggatgtgtcctaatgcaagaacgaaaggttgtggcctatgcatccaggcagctcaggcctcatgaagtcaattaccccacccatgatctcgagttggcagccgtgattcatgctcttaagatctggaggcactatttaatcgggaacagatgtgaagtatacaccgatcacaaaagtcttaagtatatcttcactcagaccgagttaaatatgagacagagaagatggttggaactaatcaaggattacgatcttggaatccactatcatcctggtaaagccaacgtggtcgctgatgcgctaagtcgcaaggcctattgcaatatagctcaaatacggcctgaccaaggtcaactgtgcagagaattggagaagttaaggctgaccgtggtacagtcaggagtccctgccagcttgacagtacagcctaccctagaatcgcaaattcgggaggcacagaaagaagacgaagggataaaagagttaatagaaagaatacaggagaagaaagacaccaacttctccatagacgatcaaggcacagtttggtacggtccacgcatctgtgtaccggccaagaaggagttaagagacctcatcctaaaggaagctcatgagtccgcctactccattcacccaggaagtacgaagatgtaccaagatatcaaggcatacttctggtgggctggaatgaaacgagatgtcgcagaatacgtagccctgtgtgacatttgccaaagagtcaaggcagaacaccaaaggccagctggactgctacaacccttaccgattcccgagtggaaatgggaagagatcggaatggatttcatcaccggtttgccaagaacccccagcggatacgactccatttgggtaatcgtggaccgactcacgaagtcagcacatttcgtgccagtgaagaccacctatgatggaaagaaactagcagaactctacatgactcatgtcgtatgtagatttggctgtcccaagaaaatagtgtcggatcgaggcactcagttcacctcaaggttctggaagcaattgcatgaagcactcggaactgatctgaattttagtacggcctaccacccgcagaccgatggtcagacagaaagagtaaaccagatcctagaagacatgctgcgagcatgtgccttggatttcgaaggcacttgggatcgttgtttgccgtatgccgagttctcatacaacaacagttatcaggccagcattcagatgtcgccgaatgaggcaatgttcggaagaaggtgccgcactcccttgtgctggaatgaggtgggcgaagccttggtattcggtcctgacatactcaagtcagcagaagaacaagttaagctgatacgagaacgtttgaagacagcacagaaccgtcagaagaattacgctgacaatcggaggcgtgaccttgagttcgaaaaaggagatcatgtgtacctacgggtatcaccactccgaggaatgagaaggtttgggatgtccggcaagttagcaccccgctatatcggcccctacctcataaccgccagacgtggcgaagtggcttatcagcttgagctacctgaaggtctcgcagatgtgcacaacgtgttccacgtatcccagttaaagaaatgtcttcgagttccagaagagcaagttcccctgggtaacatcgagctggaaaagaatctgacctacaaggaaagaccgatcaaggttcttgaggaagcagaacgtcagactcgaagaaagaccatcaagttctacaaggtccaatggagcaatcattctgaagatgaggcaacctgggaacgagaagatcttctccgcgccgagtttccggagctgctcccttag

SEQ ID NO: 15485 - DNA, 4044 bp, Oryza sativa
  Clone ID: TFbOSC401828j.C1.o26.fg
atggctagccgcccctgccgtgcagctcgtgcgccagcccacttcggttttgaagaaggtagagtcgaaccagaagcaaatcatgaatcagctaatgagcagtctcaccgcagcaacaattcgcaccgtactgtttcccgtaacgcagaagttgagcaaccccgccgtagcaaccgctcgcatcgcacagcttcccgtgattcagagatggaacagtctcaccgctctcaccgcactgctagtcacaattctggagaagaacgcctcccttccccacctcatgtggaaaacaacatgcaacacttaatggcagttcagacacaaatcttgcaaggaatagccgcagccgtagccggttatcagcataatgtgcatggaaatggccaccctcacatgggcaacaatagatccaagctgacagattttctaaggtcacgtccgccagagttctctcagaccgtcgagcccgtcgaggctgacgattggctgaaggatgttgaaagaaaattcaacttagtgcagtgtactcctgttgagaagacgctctacgcctctcaccaactaagaggacctgctgcagattggtgggagaattactgcaatggacaccctgaacccactaacattgcttgggatgagtttgccacggctttccgtgcagctcatgtgcctgaaagcaccattgacatgaagaaagaggaattcaacaggcttaagcaaggcaacaccagtgtcaatgagtacctaagtcagttcaacaagttggctcggtacgcccctgaggaggtggacacagacaagaagaagatcaggaagttcttgaagggaatcgcagttgggatgagactccagttgcttgctcatgacttccccacttttcaacacatgatcaacaaggcacttctacttgaggatgccagaaaagaggctaccgaagagtacaagaaacacaagtctaaccatcagggaaattcttcccgaggcgcgcctcgccctcgctacggtcaacccgtgcaataccaccagtcggtcactcaggctaaccgccagccaggctacgcccctcgtcctcagataaaccgtccggcacctcagccacagcagcgtgcccctagtggcaatactgcgccaaacagcgttacctccttcaagtcacctcaaggaccgtcagcagttcagtgtttccggtgcaaccagatgggtcactatgctagacagtgccctcagaatcctaccaacaccaactcagggcatgctaatggcagcactgccagaactcctactccagcggcagctaagtctcgtcctagcactcaggcaagtggacaaggttcacgtgcttccaaccactttggtcgaggccgtgtgaatcacattcaagctgaaaccgctcaggatgctccagacgttgtgatgggtatgttctctgtcaactccgtacccgcaatagttctgtttgattcaggagcttcccattctttcatatcacaagcttttgtgaaaagaaatggttggaaaacccaaaatttacgtgtaccaatgatagtacattcccctggaaggaatataaaggcaactcaaatatgcccggaagttaaccttagaattgaggaagttgacttcctagccaaaccgatagtcctagactcgcaaagcttggacatcatcctagggatggattggttggctaagcacaaaggacagatagattgtgccgaaaagtccatcaccttgcaaggacctggaggaaagcaagtccgctttacccctaacactcctaccgcaagtcggtctatcttaacctgtttacaagtcacctccttggagtcggtgcccatagtttgtgaatatcccgacgtatttccggaagaattaacaagaatgccactagaccgagagattgagttcgccatagaactggcaccaggcaccgcaccaattgcaaaaagaccctaccgaatggcagctaatgagttagcagaagttaaaagacaaatcgaagagctggaaagtaaaggttatgtacgacctagctcatccccttggggagccccagtgcttctggttaagaaaaaggaaggctctgagagaatggtaatcgactatagagccctgaatgaagtaactataaagaacaagtacccgttgccacggatcgacgatttattcgatcaacttaaaggagcaagagttttctcaaaaattgacttgaggtcaggttaccaccaactgaaaatcagatctgaagatatcccaaagaccgctttctcaacgcgttatggtctatatgagttcacagtaatgtccttcggactcaccaatgctccagcattcttcatgaacttaatgaacaaaatcttcatggaatacctggaccagtttgttgtggtattcatcgatgacatcctgatatactccaagaacgaggaagaacatgctgaacacctgaggttgataatggaaaatcttagggatcatcaactattcgcaaaattctcgaaatgcgaattctggttagaccgagtagcatttcttggacacgtgatttcctccaatggtgtcgaagtagatcccagcaaggttgaagctgtacttgcttggaacccgcccaagaatgtgtcagagatccgcagcttccttggcttagctggatattatcgaagattcattgaaggattctctaagctagccagacctatgaccgagctgttaaagaaggaaaagaaatttcaatggtctgcagcctgtgaagacagcttccaagaaatgaagaaaaggttgaccactgccccagttctcaccttgccagatatccgaaaagatttcgagatcttctgtgatgcatcaagacaaggcttaggatgtgtcctaatgcaagaacgaaaggttgtggcctatgcatccaggcagctcaggcctcatgaagtcaattatcccacccatgatctcgagttggcagccgtggttcatgctcttaagatctggaggcactatttaatcgggaacagatgtgaagtatacactgatcacaaaagtcttaagtatatcttcacacagaccgagttaaatatgagacagagaagatggttggaactaatcaaggattacgatcttggaatccactatcaccctggtaaagccaacgtggtcgctgatgcgctaagtcgcaaggcctattgcaatgtagctcaaatacggcctgaccaagatcacctgtgcagagaattgcagaagttaatgctgaccgtggtacagtcaggtgtccctgccagcttgacagtacagcctaccctagagtcgcaaatccgggaggctcagaaagacgacgaagggataaaagaattaataaaaagaatacaggagaagaaagacaccaatttctccatagacaaccaaggcacagtttggtgcggtccacgcatctgtgtaccggccaagaaggagttaagagatctcatcctaaaggaagctcatgagtccgcctattccattcatccaggaagtacgaagatgtaccaagatatcaaggcatacttctggtgggctggaatgaagcgagatgtcgcagaatacgtagccctgtgtgacatttgccaaagagtcaaggcggaacatcagaggccagctggtctgctgcaacccctaccgattcccgagtggaaacccgttaggaggtttgggatgtccggcaagttagcaccccgctacatcggcccctacctcataaccgccagacgtggcgaagtggcttatcagcttgagctacctgaaggtctcgcagatgtgcacaacgtgttccacgtatcccagctaaagaaatgtcttcgagttccagaagagcaagttcccctgggtaatatcgtgctggaaaagaatctgacctacaaggaaagaccgatcaaggttcttgaagaggcagaacgtcagactcgaaggaagaccatcaagttctacaaagtccaatggagcaaccattctgaagatgaggcaacctgggagcgagaagatcttctccgcgccgagtttccggagctgctcccttag

SEQ ID NO: 15486 - DNA, 5280 bp, Oryza sativa
  Clone ID: TFbOSC401909j.C1.o14.fg
atggcagtgaacgccagcttcagttcccacggttttggtgagggtcaccacgtcgctcagcttcgtgacctcgcccgcttccttggcttctcgtgtcccgagtacacggggtactccgtggaccgtgttccccctcgctgtgagctctctgtgtacctttaccctcgtggagatcgcgtaccaggacctctcctggactgcgcttcgtcgcttggcccacgactacagccaccgtctcgggggctctgccttccggcagcttccacgccttccttctggccatgcagacgccaggccactcagcactacctactccttgagacttaccgctcccttgcccgccgctacgccgctctggaggcccgtctggccgaggagggtgtcacctcagttgacactgtctcttgggactcaggccgcctctgccacgccagccacctgtcctcccacagctcccgcggctctgctcgcactcctagtggcccgcgctcccccagctcacgtgcgccgtactcaccagtgtactccccctacccacacccagttagcccctcctacacccccggacacaccccagttgcttcctcccgccgtggcccacgctttatccgcactgcgcggaagcgtgttgttggttcttccaccgtgttccgattcgactacccagctcccccaccgccagcggcccgtgctgctatcggccctcgacagatggctagccgcccccgccgtgctgctcgtgcgccagcccgcttcggttttgaagaaggtagagttgagccagaagaaaatcatgagtcagctaatgagcggtctcaccacagcaaccgttcgcaccgtactgcttcccgcaacgcagaagttgagcaaccccgccgcagcaaccgctcgcatcacacagcttcccgtaatgcagagatggaacagtctcaccgctctcaccgcactgctagtcacaattctggagaagaacgcctcccttccccacctcatgtggaaaacaacatgcagcacttaatggcagttcagacacaaatcttgcaaggattagccgcagccatagccggttttcagcatagtgcgcatggaaatggccaccctcacatgggcaacaatagatccaagctgacagactttctgaggtctcgtccgccagagttctctcagaccgtcgagcccgtcgaggctgacgattggctgaaagatgttgatagaaaactcaacttagtgcagtgtactcctgttgagaagacgctctacgcctctcaccagctaagaggacctgctgcagattggtgggagaattactgcaatgcacaccctgaacccactaacattgcttgggctgagtttgctacggctttccgtgcagctcatgtgcctgaaagcgccattgatatgaagaaagaggaattcaacaaacttaagcaaggcaataatagtgtcaatgagtacctaagtctgttcaacaagttggctcgaaaagaggctaccgaagaatacaagaaacgcaagtctaaccatcagggaaattcttcccgaggcgcacctcgccctcgctacggtcaacccatgcaataccaccagtcggtcactcaggctaaccgccagccaggctacgcccctcgtcctcagatgaaccgtcaggcacctcagccacagcagcgtgcccctagtggcaatactgcgccaaacaatgttacctctttcaagtcatcgctaggaccgtcagcagttcagtgtttccggtgcaaccagatgggccactatgcccgacagtgccctcagaatcctaccaacaccaactcagggcatgctaatggcagcactgccagaactcctactccagcggcagctcagtctcgtcctagctctcaggcaagtggacaaggttctcgtgtttccaacaactttggtcgaggccgggtgaaccacattcaagctgagaccgctcaggatgctccagacgttgtgatgggtatgttctctgtcaactccgtacccgcaatagttctgtttgattcaggagcttcccattctttcatatcacaagcttttgtgaaaagaaatggttggaaaacccaaaatttacgtgtaccaatgatagtacatttccctgggaggaatataagggcaactcaaatatgcccggaagttaaccttagaattgaggaagttgacttcctagccaaaccgatagtcctagactcgcaaagcttggacatcatcctagggatggattggttggctaagcacaaagggcagatagattgtgccgaaaagtccatcaccttgcaaggacctggaggaaagcaagtccgctttacctctaacacccctaccgcgagtcggtctatcctaacctgtttacaagtcacctccttggagtcggtgcccatagtctgtgaatatcccaacgtatttccagaagaattaacgagtatgccaccagaccgagagattgagttcgccatagaactggcaccaggcaccgcaccaattgcaaaaagaccctaccgaatggcagctaatgagttagcagaagttaaaagacaaatcgaagaattggagagtaaaggttatgtgcgacctagctcatccccttggggagccccagtgctcctggttaagaaaaaggatggctctgagagaatggtaatcgactatagagccctgaatgaagtaactataaagaacaagtacccgttgccacggattgacgatttgttcgatcaacttaaaggagcaagagttttctcaaaaattgacttgagatcaggttaccaccaattgaaaatcagatcagaagatatcccgaagaccgctttctcaacgcgttatggtctatatgagttcacagtgatgtccttcggactcaccaatgctccagcattcttcatgaacttaatgaacaaaatcttcatggaatacctggaccagtttgtcgtggtgttcatcaatgacatcctgatatactccaagaatgaggaagaacatgctgaacacctgaggctgataatggaaaagctcagggatcatcaactattcgctaaattctcgaaatacgaattctggttagaccgagtagcatttcttggacacgtgatctcccccaacggtgtcgaagtagatcccagcaaggttgaggctgtacttgcttggaacccgcccaagaatgtgtcagagattcgcagcttccttggcttagctggatattatcgaagattcattgaaggattctctaagctagccagacctatgaccgagctgttaaagaaagaaaagaaatttcaatggtctacagcctgtgaagacagctttcaagaaatgaagaaaaggttgaccactgccccagttctcaccttgccagatatccgaaaagatttcgagatcttctgtgatgcatcaagacaaggcttaggatgtgtcctaatgcaagaacgaaaggttgtggcctatgcatccaggcagctcaggcctcatgaagtcaactatcccacccatgatctcgagttggcagccgtggttcatgctcttaagatctggaggcactatttaatcgggaacagatgtgaagtatacaccgatcacaaaagtcttaagtatatcttcacacagaccgagttaaatatgaggcagagaagatggttggaactaatcaaggattacgatcttggaatccattaccaccccggtaaggctaatgtggtcgctgatgcgctaagtcgcaagacctattgtaatgtagatcaaatacggcccgaccaagatcgcctgtgcagagatctggaaaagttaaggctgaccgtagtacagtcaggtgtcgctgccagcttgacagtacagcctaccctagaatcgcaaatccggaaagctcagaaagacgacgaagggataaaagagttaataaaaagaatacaggagaagaaagacaccgatttctccatagacgatcaaggcacagtttggtatggtccacgcatctgtgtaccggccaagaaggagttaagagatctcatcctaaaggaagctcatgagtccgcctactccattcatccaggaagtacgaagatgtaccaagacatcaaggcatacttttggtgggctggaatgaagcgagatgtcgcagaatacgtagccttgtgtgacatttgccaaagagtcaaggcagaacatcagaggccagctggtctgctgcaacccctaccgatccccgagtggaaatgggaagagatcggaatggatttcatcaccggtttgccaagaacccctagcgggtacgactccatctgggtaatcgtggaccgactcacgaaatcagctcatttcgtgccaatgaaaaccacctttgatggaaagaaactagcagaactctacatgacccatgtcgtgtgtagatttggctgtcccaagaagattgtgtcagaccgaggcactcagttcacctcaaggttctggaagcagttgcatgaagccctcggaaccgatctaaattttagtacggcctaccatccgcagaccgatggtcagacagaaagggtaaaccaaatcctagaagacatgctacgtgcgtgtgccctggatttcgaaggcacttgggatcgttgtttgccgtatgcggagttctcatacaacaacagttatcaggccagcattcagatgtcatcgaatgaggaaatgttcggaagaaagtgccgcactcccttgtgctggaatgaggtgggcgaagcgctggtattcggtcctgacatactcaaggcagcagaagaacaagttaagctgatccgagaacgtttaaaggcagcgcagaaccgtcagaagaattacgttgacaatcggaggcgtgaccttgagttcgaaaaaggagatcatgtgtacctgcgggtatcgcctctccgtggtataaggaggtttgggatgtccggcaagttagcaccccgctacatcggcccctacctcataaccgccagacgtggcgaagtggcttatcatcttgagttacctgaaggtctcgcagatgtgcacaacgtgttccacgtatcccagttaaagaaatgtcttcgagttccagaagagcaagtccccctgggtaatatcgagctggaaaagaatctgacctacaaggaaagaccgatcaaggttcttgaagaggcagaacgtcagactcgaaggaagaccatcaagttctacaaagtccaatggagcaaccattctgaagatgaggcaacctgggagcaagaagatcttctccgcgccgagttcccggagctgctcccttag

SEQ ID NO: 15487 - DNA, 5058 bp, Oryza sativa
  Clone ID: TFbOSC404112j.C1.o3.fg
atggcagtgagcgccagcttcagttcccacggttttggtgagggtcaccacgtcgctcagcttcgtgacctcgcctgtttccttggcttctcgtgtcccgagtacacggggtactccgtggaccgtgttccccctcactgtgagctctctgtgtacctttacccccgtggaggtatacacggagccggccttcgtccacaccacttcaccgtggccaggcccactctccagatcgcgtaccaggacctctcctggactgcgcttcatcgcctggcccacgactacaaccaccgtctcggaggctccgccttccggcagcttccacgccttccttctggccactcagacgccaggtacccttgtccgtacagcgagtctcagctagtgctgactcgcatggttgagctttcggaggctcaggccactcagcacgacctactccttgaggcttaccgctcccttgcccgccgctacgccgccttggaggcccgtctggccgaggagggtgtcacctcagttgacactatctcctgggactcaggccgcctctgccacgccagccacctgtcctcccacagctcccgcggctctgcccgcactcccagtggcccgcgctcccccagctcgcgtgcgccgtactcaccagtgtactccccctacccacacccagttagcccttcctacacccccggacacaccccagttgcttcctcccgccgtggcccacgctttatccgcactgcgcggaagcgtgttgttggttcttccaccatgttccgtttccgccacccagctcccccaccgccagcggcccgtgctgctgccggccctcgacagctgacagattttctgaggtcacgtccgccagagttctctcagaccgtcgagcccgtcgaggctgacgattggttgaaagatgttgatagaaaactcaacttagtgcagtgtactccggttgagaagacgctctacgcctctcacaagctaagaggacctgctgcagattggtgggagaattactgcaatgcacaccctgaacccactaacattgcttgggatgagtttgctacggctttccgtgcagctcatgtgcctgaaagcactattgacatgaagaaagaagaattcaacagacttaagcaaggcaacagtagtgtcaatgagtacctaagtcagttcaacaagttagctcagcacgcccctgaagaagtggacacagataagaagaagatcaggaaattcttgaaagggatcgcagttggaatgagactccagttacttgctcatgtcttccccacttttcaacatatgatcaacaaggcacttctgcttgaggatgccagaaaagaggctaccgaagaatacaagaaacgcaagtctaaccatcagggaaattcttcccgaggcacacctcgccctcgctacggtcaatccatgcaataccaccagtcggtcactcaggctaaccgccagccaggctacgcccctcgtcctcagatgaaccgaccggcacctcagccacagcagcgtgcccctagtggcaatactgcgccaaacagtgttacctctttcaagtcaccgcaaggaccgtcagcagttcagtgtttccggtgcaaccagatgggtcactatgcaagacagtgtcctcagaatcctaccaacaccaactcagggcatgctaatggcagcactgctagaactcctactccagcggcagctctgtctcgtcctagctctcaggcaagtggacaaagttcacgtgcttccaaccactttggtcgaggacgtgtgaatcacattcaagctgaaaccgctcaggatgctccagacgttgtgatgggtatgttctctgtcaactccgtacccgcaatagttctgtttgattcaggagcttctcattctttcatatcgcaagcttttgtgaaacgaaatggttggaaaacccaaaatttgcgtgtaccgatgatagtacattcccctgggaggaatataagggcaactcaaatatgcccggaagttaaccttagaattgaggaagttgacttcctagccaaaccgatagtcctagactcgcaaagcatggacatcatcctagggatggattggttggctaagcataaaggacagatagattgtgccgaaaagtccatcaccttgcaaggacctggaggaaagcaagtccgctttacccctaacactcctaccgcaaatcggtctattctaaccagtttacaagtcacctccttggagtcggtgcccgtagtctgtgaatatcccgacgtatttccggaagaattaacgagaatgccaccagaccgagagattgaattcgccatagaactggcgccaggcaccgcaccaattgcaaaaagaccctaccgaatggcagctaatgagttagcagaagttaagagacaaatcgaagagctggaaagtaaaggttatgtgcgacctagctcatccacttggggagccccagtgcttctggttaagaaaaaggatggctctgagagaatggtaatcgactatagagccctaaatgaagtaactataaagaacaagtacccgttgccacggattgacgatttattcgatcaacttaaaggagcaagagttttctcaaaaattgacttgaggtcaggttaccaccaactgaaaattagatctgcagatatcccgaagaccgctttctcaacgtgttatggtctatatgagttcacagttatgtccttcggactcaccaatgctccagcattcttcatgaacttaatgaacaaaatctttatggaatacctggaccagtttgtcgtggtattcatcgatgacatcctgatatactctaagaacggggaagaacatgctgaacacctgaggttgataatggaaaagctcagggaccatcaactattcgcaaaattctcaaaatgcgaattctggttagaccgagtagcatttcttggacacgtgatctcctccaacggtgtcaaagtagatcccagcaaggttgaagctgtacttgcttggaacccgcccaagaatgtgtcagagattcgcagtttccttggcttagctggatattatcgaagattcatcgaaggattctctaagctagccagacctatgaccgagctgttaaagaaggaaaagaaatttcaatggtctgcagcttgtgaagacagctttcaagaaatgaagaaaaggttgaccactgccccagttctcaccttgccagatatccgaaaagatttcgagatcttctgtgatgcatcaagacaaggcttaggatgtgtcctaatgcaggaacgaaaggttgtggcctatgcatccaggcagctcaggcctcatgaagttaattatcccacccatgatctcgagttggcagccgtggttcatgctcttaagatctggaggcattatttaatcgggaacagatgtgaagtatacaccgatcacaaaagtcttaagtatattttcacacagaccgagttaaatatgagacagagaagatggttggaactaatcaaggattacgatcttggaatccactatcatcctggtaaagccaacgtggtcgctgatgcgctaagtcgcaaggcctattgcaatgtagctcaaatacggcctgaccaagatcacctgtgcagagaattagagaagttaaggctgaccgtggtacagtcaggtgtccctgccagcttgacagtacatcctaccctagagtcgcaaatccgggaagctcagaaagacgacgaagggataaaagagttgataaaaagaatacaggagaagaaagacaccaatttctccatagacgatcaaggcacagtttggtgcggtccacgcatctgtgtaccggccaagaaggagttaagagatctcatcctaaaggaagctcatgagtccgcctactccattcacccaggaagtacgaagatgtaccaagatatcaaggcatacttctggtgggctggaatgaagcgagatgtcgcagaatactggaaatgggaagagatcggaatggatttcatcaccggtttgccaagaacccccagcgggtatgactccatctgggtaatcgtggaccgactcacgaaatcagctcatttcgtgccagtgaaaaccacctatgatggaaagaaactagcagaactctacatgacccatgtcgtatgtagatttggctgtcccaagaaaattgtgtcagatcgaggcactcagttcacctcaaggttctggaagcagttgcatgaagctctcggaactgatctaaattttagtacggcctaccatccgcagaccgatggtcagacagaaagggtaaaccaaatcctagaagacatgctacgtgcgtgtgccctggatttcgaaggcacttgggatcgttgtttgccgtatgctgagttctcatacaacaacagctatcaggccagcattcagatgtcgccgaacgaggcaatgttcggaagaaagtgccgcactcccttgtgctggaatgaggtgggcgaagcgctggtattcggtcctgacatactcaagtcagcagaagaacaagttaagctgatacgagaacgtttgaagacagcacagaaccgtcagaagaattacgctgacaatcgaacgcgtgaccttgagttcgaaaaaggagatcatgtatacctgcgggtatcacccctccgtggtatgaggaggtttgggatgtccggcaagttagcaccccgctacatcggcccctacctcataaccgccagacgtggcgaagtggcttatcagcttgagttacctgaaggtctcgcagatgtgcacaacgtgttccacgtatcccagctaaagaaatgtcttcgagttccagaagagcaagtccccctaggtaatatcgagctggaaaagaatctgacctataaggaaagaccgatcaaggttcttgaagaggcagaacgtcatactcgaaggaagaccatcaagttctacaaggtccaatggagcaatcattctgaagatgaggcaacctgggagcgagaagatcttctccgcgccgagttcccggagctgctcccttag

SEQ ID NO: 15488 - DNA, 5556 bp, Oryza sativa
  Clone ID: TFbOSC408311j.C1.o20.fg
atggcagtgaacgccagcttcagttcccacggttttggtgagggtcaccacgtcgctcagcttcgtgacctcgcccgtttccttggcttctcgtgtcccaagtacacggggtactccgtggaccgtgttccccctcactgtgagctctctgtgtacctttacccccgtggaggtatacacggagctggccttcgcccacaccacttcactgtagccaggcccactctccagatcgcgtaccaggacctctcctggactgcgcttcgtcgcctggcccacgactacagccaccgtctcgaaggctccgccttccggcagcttccacgccttccttctggccactcagacgccaggtacccttgtccatacagcgagtctcagccagtgctgactcgcatggttgagctttcggaggctcaggccactcagcacgacctactccttgaggcttaccgctcccttgcccgccgctacgccgccttggaggcccgtctggccgaggagggtgtcacctcagttgacactatctcctgggactcaggccgcctctgccacgccagccacctgtcctcccacagctcccgcggctctgcccgcactcccagtggcccgcgctcccccagctcgcgtgcgccgtactcaccagtgtactcgccctacccacacccagttagcccttcctacaccccaggacacaccccagttgcttcctcccgccgtggcccacgctttatccgcactgcgcggaagcgtgttgttggttcttccaccgtgttccgtttccactacccagctcccccaccgccagcggcctgtgctgctgccggccctcgacagatggctagccgcctccgccgtgcagctcgtgcactagcccgctttggttttgaggatggtagagttgagccagaagaaaatcatgaatcagctaatgagcagtctcaccacagcaaccgttcgcatcgtactgtttcccgcaacgcagaggttgagcaaccccgccgcagcagccgctcgcatcgcatagtttcccgtgatgcagagatggaacagtctcaccgctctcaccgtactgccagtcacaattctggagaagaacgcctcccttcccgacctcatgtggaaaccaacatgcaacacttaatggcagttcagacacaaatcttgcaaggactaaccacagccatagccagttttcagcataatgcgcatggaaatggccaccctcacatgggcaacaacagatccaagctgacagactttctgaggtctcgtccgccagagttctctcagaccgtcgagcccgtcgaggctgacgattggttgaaagatgttgatagaaaactcaacttagtgcagtttactcctgttgagaagacgctctacgcctctcaccaactaagaggacctgccgcagattggtgggagaattactgcaatgcacaccctgaacccactaacattgcttgggatgagtttgctacggctttccgtgcagctcatgtgcctgaaagcactattgacatgaagaaagaggaattcaacagacttaagcaaggcaacagcagtgtcaatgagtacctaagtatgttcaacaagttggctcggtacgcccctgaggaagtggacacagacaagaagaagatcaggaaattcttgaaagggatcgtagttggaatgagactccagttgcttgctcatgacttccctacctttcaacacatgatcaacaaggcacttctacttgaggatgccagaaaagaggctaccgaagaatacaagaaacgcaagtctaaccatcagggaaattcctcccgaggcgcacctcgccctcgctacggtcaacccatgcaataccaccagtcggtcactcaggctaaccgccagccaggctacgcccctcgtcctcagatgaactgcccggcaccccagccacagcagcgtgcccctagtggcaatactgcgccaaacagtgttacctctttcaagtcaccacagggaccgtcagcagttcagtgtttccggtgcaaccagatgggtcactatgctagacagtgccctcagaatcctaccaacaccaactcagggcatgctaatggcagcactgccagaactcctactccagcggcagctcagtctcgtcctagcactcaagcaagtggacaaggttcacgtgcttccaaccactttggtcgaggccgtgtgaatcacattcaagctgaaaccgctcaggatgctccagacgttgtgatgggtatgttctctgtcaactccgtacccgcaatagttctgtttgattcgggagcttcccattctttcatatcacaagcttttgtgaaaagaaatggttggaaaacccaaaatttacgtgtaccaatgatagtacattcccctagaaggaatataagggcaactcaaatatgcccggaagttaaccttagaattgaggaagttgacttcctagccaaaccgatagtcctagactcgcaaagcttggacatcatcctagggatagattggttggctaagcacaaaggacagatagattgtgccgaaaagtccatcaccttgcaaggacctggaggaaagcaagtccgctttacccctaacactcctaccgcaagtcggtctatcttaacctgtttacaagtcacctccttggagtcggtgcccatagtttgtgaatatcccgacgtatttcgggaagaattaacaagaatgccaccagaccgagagattgagttcgccatagaactggcaccaggcaccgcaccaattgcaaaaagaccctaccgaatgacagctaatgagttagcagaagttaaaagacaaatcgaagagttggagagtaaaggttatgtgcgacctagctcatccccttggggagccccagtacttctagttaagaaaaaggatggctctgagagaatggtaatcaactatagagccctgaatgaagtaactataaagaacaagtacccgctgccacggatcgacgatttattcgatcaacttaaaggagcaagagttttctcaaaaattgacttgaggtcaggttaccaccaactgaaaatcagatctgaagatatcccaaagaccgctttctcaacgcgttatggtctatatgagttcacagtaatgtccttcggactcaccaatgctccagcattcttcatgaacttaatgaacaaaatcttcatggaatacctggaccagtttgttgtggtattcatcgatgacattctgatatactccaagaacgaggaagaacatgctgaacacctgaggttgataatggaaaagctcagggatcatcaactattcgcaaaattctcgaaatgcgaattctggttagaccgagtagcatttcttggacacgtgatttcctccaatggtgtcgaagtagatcccagcaaggttgaagctgtacttgcttggaacccgcccaagaatgtgtcggagattcgcagcttcctcggcttagctggatattatcgaagattcattgaaggattccctaagctagccagacctatgaccgagctgttaaagaaggaaaagaaatttcaatggtctgcagcctgtgaagacagcttccaagaaatgaagaaaaggttgaccactgccccagttctcaccttgccagatattcgaaaagatttcgagatcttctgtgatgcatcaagacaaggcttaggatgtgtcctaatgcaagaacgaaaggttgtggcctatgcatccaggcagctcaggcctcatgaagtcaattatcccacccatgatctcgagttggcagccgtggttcatgctcttaagatctggaggcactatttaatcgggaacagatgtgaagtatacaccgatcacaaaagtcttaagtatatcttcacacagaccgagttaaatatgagacagagaagatggttggaactaatcaaggattacgatcttggaatccactatcaccctggtaaagccaacgtggtcgctgatgcgctaagtcgcaaggcctatctcaatgtagctcaaatacggcctgaccaagatcacctgtgcagagaattggagaagttaaggctgaccgtggtacagtcaggtgtccctgccagcttgacagtacagcctaccctagaatcgcaaatccgggaggctcagaaagacgacgaagggataaaagagttaataaaaagaatacaggagaagaaagacatcaatttctccatagacgaccaaagcacggtttggtgcggtccacgcatctgtgtaccggccaaaaaggagttaagagatctcatcctaaaggaagctcatgagtccgcctactccattcacccaggaagtacgaagatgtaccaagatatcaaggcatacttctggtgggctggaatgaagcgagatgtcgcagaatacgtagccctgtgtgacgtatgccaaagagtcaaggcagaacatcagaggccagctggtctgctgcaacccctaccgattcccgagtggaaatgggaagagatcggaatggatttcatcaccggtttgccaagaacccctaacgcgtgcgactccatttgggtaatcgtggaccgactcacgaaatcagctcatttcgtgccagtgaaaaccacctatgatggaaagaaactagcagaactctacatgacccatgtcgtatgtagatttggctgtcccaagaaaattgtgtcagaccgaggcactcagttcacctcaaggttctggaagcagttgcatgaagccctcggaactgatctgaattttagtacagcctaccatccgcagaccgatggtcagaccgaaagggttaaccaaatcctagaagacatgctacgtgcgtgtgccttggatttcgaaggcacttgggatcgttgtttgccgtatgccgagttctcatacaacaacagttatcaggccagcattcagatgtcgtcgaatgaggcaatgttcggaagaaagtgccgcacccccttgtgctggaatgaggtgggcgaagcactggtattcggtcctgacatactcaagtcagctgaagaacaagttaagctgatacgagaacgtttgaagacagcacagaaccgtcagaaaaattacgctgacaatcggagacgtgaccttgagttcgaaaaaggagatcatgtgtacctgcgggtatcacccctccgtggtatgaggaggtttgggatgtccggcaagttagcaccccgctacatcggcccctacctcataaccaccagacgtggcgaagtggcttatcagcttgagctacctgaaggcctcgcagatgtgcacaacgtgttccacgtatcccagctaaagaaatgtcttcgagttccagaagagcaagttcccctgggtaatatcgtactggaaaagaatctgacctacaaggaaagaccgaccaaggttcttgaagaggcagaatgtcagactcgaaggaagaccatcaagttctacaaagtccaatggagcaaccattctgaagatgaggcaacctgggagcgagaagatcttctccgcgccgagtttccggaactgctcccttag

SEQ ID NO: 15489 - DNA, 4092 bp, Oryza sativa
  Clone ID: TFbOSC408596j.C1.o1.fg
atgagcaacaatagatccaagctgacagattttctgaggtctcgtccgccagagttctctcagaccgtcgagcccgtcgaggctgacgattggctgaaagatgttgatagaaaactcaacttagtgcagtgtactcctgttgagaagacgctctacgcctctcaccagctaagaggacctgctgcagattggtgggagaattactgcaatgcacaccctgaacccactaacattgcttgggatgagtttgctacggctttccgtgtagctcatgtgcctgaaagcactattgacatgaagaaagaggaattcaacagacttaagcaaggcaacagcagtgtcaatgagtacctaagtatgttcaacaagttggctcggtacgcccctgaggaagtggacacagacaagaagaagatcaggaaattcttgaaagggatcgctgttggaatgagactccagttgcttgctcatgacttccccacttttcaacatatgatcaacatggcacttctacttgaagatgccagaaaagaggctaccgaagaatacaagaaacgcaagtctaaccatcagggaaattcttcccgaggcgcacctcgccctcgctacggtcaacccatgcaatatcaccagtcggtcactcaggctaaccgccagccaggctacgcccctcgtcctcagatgaaccgtccggcacctcagccacagcagcgtgcccctagtggcaatactgcgccaaacagtgttacctctttcaagtcaccgcagggaccgtcagcagttcagtgtttccggtgcaaccagatgggtcactatgccagacagtgccctcagaatcctaccaacaccaactcagggcatgctaatggcagcactgccagaactcctactccagcggcagctcagcctcgtcctagctctcaggcaagtggacaaggttcacgtgcttccaacaactttggtcgaggccgggtgaaccacattcaagctgagaccgctcaggatgctccagacgtcgtgatgggtatgttctctgtcaactccgtacccgcaatagttctatttgattcaggagctttccattctttcatatcacaagcttttgtgaaaagaaatggttggaaaacccaaaatttgcgtgtaccaatgatagtacattcccctgggaggaatataagggccactcaaatatgcccggaagttaaccttagaattgaggaagttgactttctagccaaaccgatagtcctagactcgcaaagcttggacatcatcctagggatggattggttggctaagcacaaaggacagatagattgtgccgaaaagtccatcaccttgcaaggacctggaggaaagcaagtccgctttacctctaacacccctaccgcaagtcggtctatcctaacctgtttacaagtcacctccttggagtcggtgcccatagtctatgaatatcccgacgtatttccagaagaattaacgagtatgccaccagaccgagagattgagttcaccatagaactggcaccaggcaccgcaccaattgcaaaaagaccctaccgaatggcagctaatgagttagcagaagttaaaagacaaatcgaagaattggagagtaagagttatgtgcgacctagctcatccccttggggagccctagtgcttctggttaagaaaaaggatggctctgagagaatggtaatcgactatagagccctgaatgaagtaactataaagaacaagtacccgttgccacagattgacgatttgttcgatcaacttaaaggagcaagagttttctcaaaaattgacttgagatcaggttaccaccaactgaaaatcagatctgaagatatcccgaagaccgctttctcaacgcgttatggtctatatgagttcacagtgatgtccttcggactcaccaatgctccagcattcttcatgaacttaatgaacaaaatcttcatggaatacctggaccagtttgtcgtggtgttcatcgacgatatcctgatatactccaagaataaggaagaacatgctgaacacctgaggctgataatggaaaagctcagggatcatcaactattcgctaaattctcgaaatgcgaattctggttagaccgagtagcatttcttggacacgtgatctcctccaacggtgtcgaagtagatcccagcaaggttgaagctgtacttgcttggaacccacccaagaatgtgtcagagattcgcagcttccttgacttagctggatattatcgaagattcattgaaggattctctaagctagccagacctatgaccgagctgttaaagaaggaaaataaatttcaatggtctgcagcctgtgaagacagctttcaaaaaatgaagaaaaggttgactactgccccagttctcaccttgctagatatccgaaaagatttcgagatcttctgtgatgcatcaagacaaggcttaggatgtgtcctaatgcaagaacgaaagaggcactatttaatcgggaacagatgtgaagtatacaccgatcacaaaagtcttaagtacatcttcactcagaccgagttaaatatgaggcaaagaagatggttggaactaatcaaggattacgatcttggaattcatgaccaccccggtaaagctaatgtggtcggtgatgcgctaagtcgcaaggcctacagtaatgtagctcaaatacggcctgaccaagaccgcctgtgcagagaattggagaagttgaggctgaccgtggtacagtcaggtgtccctgccagcttgacggtgcagccaaccctagaatcgcaaatccgggaggctcagaaagatgacgaagggataaaagaattaataaaaagaatacaagagaagaaagacaccgatttctccatagacgatcaaggcacagtttggtgcggtccacgcatctgtgtaccggccaagaaggagttaagagatctcatcctaaaggaagctcatgagtccgcctactccattcatccaggaagtacgaagatagtcaaggcagagcatcagaggccagctggtctgctgcaacccctaccgattcccgagtggaaatgggaagagatcggaatggatttcatcaccggtttgccaagaacacctagcgggtacgactccatctgggtaatcgtggaccgactcacgaaatcagctcatttcgtgccagtgaaaaccacctttgatggaaagaaactagcagaactctacatgacccatgtcgtatgtagatttggctgtcccaagaaaattgtgtcagaccgaggcactcagttcacctcaaggttctggaagcagttgcatgaagccctcggaaccgatctaaattttagtacggcctaccatccgcagaccgatggtcagaccgaaagggtaaaccaaatcctagaagacatgttgcgtgcgtgcgccctggatttcgaaggcacttgggattgttgtttgccgtatgcggagttctcatacaacaacagctatcaggccagcattcagatgtcgccgaatgaggcaatgttcggaagaaagtgccgcactcccttgtgctggaatgaggtgggcgaagcactggtattcggtcctgacatactcaaggcagcagaagaacaagttaagctgatccgagaacgtttgaagacagcgcagaaccgtcagaagaattacgctgacaatcggaggcgtgaccttgagttcgaaaaaggagatcatgtgtacctgcgggtatcgcccctccgtggtatgaggaggtttggaatgtccggcaagttagcaccccgctacatcggcccctacctcataaccgccagacgtggcgaagtggcttatcagcttgagttacctgaaggtctcgtagatgtgcacaacgtgttccacgtatcccagttaaagaaatgtctccgtgttccagaagaacaagttcccctgggtaatatcgtgctggaaaagaatctgacctacaaggaaagaccgatcaaggttcttgaagaggcagaacgtcagactcgaaggaagaccatcaagttctacaaagtccaatggagcaaccattctgaagatgaggcaacctag

SEQ ID NO: 15490 - DNA, 5286 bp, Oryza sativa
  Clone ID: TFbOSC414072j.C1.o1.fg
atgactgtacctctactctataataaagagacctctgttgctgtgataatctgtcttcctatgataccagcactgtttcctgggtctggtatcaatttacagatggcagtgaacgcaagcgtcagctcccacggttttggtgagggtcaccacgtcgctcagcttcgtgacctcgcccgtttccttggcttctcgtgtcccgagtacacggggtactccgtggaccgtgttccccctcgctgtgagctctctgtgtacctttacccccgtggaggtatacacggagctggccttcgcccacaccacttcactgtggccaggcccactctccagatcgcgtaccaggacctctcctggactgcgcttcgtcgcctggcccacgactacagccaccgtctcgggggctccgccttccggcagcttccacgccttccttctggccacgcagacgccaggtacccttgtccgtacagcgagtctcagccagtgctgactcgcatggttgagctttcggaggctcaggccactcagcacgacctactccttgaggcttaccgctcccttgcccgccgctacgccgctctggaggcccatatggccgaggagggtgtcacctcagttgacactgtctcttgggactcaggccgcctctgtcacgccagccacctgtcctcccacagctcccgcggctctgcccgcactcccagtggcccgcgctcccctagctcgcgtgcgccgtactcaccagtgtactccccctacccacacccagttagcccctcctacacccccggacacaccccagttgcttcctcccgccgtggcccacgctttatccgcaccgcgcggaagcgtgttgttggttcttccaccgtgttccgtttccactacccagctcccccaccgccagcggcctgtgctgctgccggccctcgacagcacttaatggcagttcagatacaaatcttgcaaggattagccgcagccgtagccggttatcagcacaatgcgcatggaaatggccaccctcacatgggcaataatagatccaagctgacagattttctgaggtctcgtccgccagagttctctcagaccgtcgagcccgtcgaggctgacgattggctgaaagatgttgatagaaaactcaacttggtgcagtgtactccggttgagaagacgctctacgcctctcaccagctaagaggacctactgcagattggtgggagaattactgtaatgcataccctgaacccactaacattgcttgggatgagtttgctacggctttccgtgcagctcatgtgcctgaaagcaccattgacatgaagaaagaggaattcaacagacttaagcaaggcaacagcagtgtcaatgagtacctaagtatgttcaacaagttggctcggtacgcccctgaggaagtggacacagataagaagaagatcaggaaattcttgaaaggaatcgcggttggaatgagactccagttgcttgctcacgacttccccacttttcaacatatgatcaacaaggcacttctacttgaggatgccagaaaagaggctaccgaagaatacaagaaacgcaagtctaaccatcagggaaattcctcccgaggcgcacctcgccctcgctacggtcaacccatgcaataccaccagtcggtcactcaggctaaccgccagccaggctacgccccttgtcctcaaatgaaccgtccggcacctcagccacagcagcgtgcccctagtggcaatactgcgccaaacagtgttacctctttcaagtcaccgcaaggaccgtcagctgttcagtgtttccggtgcaaccagatgggccactatgccagacagtgccctcagaatcctaccaacaccagctcacggcatgctaatggcagcactgccagaactcctactccagcggcagctcagtctcgtcctagctctcaggcaagtggacaaggtacttgtgcttccaacaactttggtcgaggccgggtgaaccacattcaagctgagaccgctcaggatgctccagacgttgtgatgggtatgttctctgtcaactccgtacccgcaatagttctgtttgattcaggagcttcccattctttcatatcacaagcttttgtgaaaagaaatggttggaaaacccaaaatttacgtgtaccaatgatagtacattcccctgggaggaatataagggcaactcaaatatgcccggaagttaaccttagaattgaggaagttgacttcctagccaaaccgatagtcctagactcgcaaagcttggacatcatcctagggatggattggttggctaagcacaaaggacagatagattgtgccgaaaagtccatcaccttgcaaggacctggaggaaagcaagtccgttttacctctaacacccctaccgcaagtcggtctatcttaacctgtttacaagtcacctccttggagtcggtgcccgtagtctgtgaatatcccgacgtatttccagaagaattaacgagtatgccaccagaccgagagattgagttcgccatagaactggcaccaggcaccgcaccaattgcaaaaagaccctaccgaatggtagccaatgagctagcagaagttaaaagacaaatcgaagaattgaagagtaaaggttatgtgcgacctagctcatccccttggggagccccagtgcttctggttaagaagaaggatggctctgagagaatgataatcgactatagagccctgaatgaagtgactataaagaacaagtacccgttgccacggattgacgatttgttcgatcaacttaaaggagcaagagttttctcaaagattgacttaagatcaggttaccaccaattgaaaatcagatctgaagatatcccgaagactgctttctcaacgcgttatggtctatatgagttcacactggaccagtttgtcgtggtgttcatcgatgacatcctgatatactccaagaatgaggaagaacatgctgaacacctgaggctaataatggaaaagctcagggatcatcaactattcgctaaattctcgaaatgcgaattctggttagaccgagaagcattccttggacacgtgatctcctccaacggtgtcgatgtagatcccagcaaggttgaagctgtacttgcttggaacccgcccaagaacgtgttagagattcgcagcctccttggcttagctggatattatcgaagattcattgaaggattctctaagctagtcagacctatgaccgagctgttaaagaaggaaaagaagtttcactggtctgcagcctgtgaagacagctttcaagaaatgaagaaaaggttgaccactgccccagttctcaccttgccagatatccgaaaagatttcgagatcttctgtgatgcatcaagacaaggcttaggatgtgtcctaatgcaagaacgaaaggttgtggcctatgcattcaggcagctcaggcctcatgaagtcaactatcccacccatgatctcgagttggcagccgtgtttcatgctcttaagatctggaggcactatttaatcgggaacagatgtgaagtatacactgatcacaaaagtcttaagtatatcttcactcagaccaaattaaatatgaggcagagaagatggttggaactaatcaaggattacgatcttggaattcattaccaccccggtaaagctaatgtggtcgctgatgcgctaagtcgcaaggcctattgcaatgtagctcaaatacggcctgaccaagatcgcctgtgcagagaattggagaagttgaggctgaccgtggtacagtcaggtgtccctgccagcttgacagtacagcctaccctagagtcgcaaatccgggaagctcagaaagacgacgaagggataaaagagttaataaaaagaatacaggagaagaaagacaccaatttctccatagacgatcaaggcacagtttggtgcggtccacgcatctgtgtaccggccaagaaggaattaagagatctcatcctaaaggaagctcatgagtccgcctactccattcatccaggaagtacgaagatgtaccaagatatcaaggcatacttctggtggactggaatgaagcgagatgtcgcagaatacgtagccttgtgtgacatttgccaaagagtcaaggcagagcaccagaggccagctggtctgctacagcccctaccaattcccgagtggaaatgggaagaaatcggaatgtatttcatcaccggtttgccaagaacccctagcgggtacgactccatctgggtaatcgtggatcgactcacgaaatcggctcatttcgtgccagtgaaaaccatctttgatggaaagaaactagcagaactctacatgacccatgtcgtatgtagatttggctgtcccaagaagatcgtgtcagaccgaggcactcagttcacctcaaggttctggaaacagttgcatgaagctctcggaaccgatctaaattttagtacagcctaccatccgcagaccgatggtcagaccgaaagggtaaaccaaatcctagaagacatgctacgtgcgtgtgccctggatttcgaaggcacttgggatcgttgtttgccgtatgctgagttctcatacaacaacagttaccaggccagtattcagatgtcgccgaatgaggcaatgttcggaagaaagtgccgcacccccttgtgctggaatgaggtgggcgaagcgctggtattcggtcctgacatactcaaggcagcagaagaacaagttaagctgatccgagaacgtttaaagacagcgcagaaccgccaaaagaattacgctgacaatcggaggcgtgaccttgagttcgaaaaaggagatcatgtgtacctgcgggtatcacctctccgtggtatgaggaggtttgggatgtccggcaagttagcaccccgctacatcggcccctaccttataaccgccagacgtggcgaagtggcttaccagcttgagttacctgaaggtctcgcagatgtgcacaacgtgttccacgtatcccagttaaagaaatgtcttcgagttccagaagaacaagtccccctgggtaacatcgagctggaaaagaatctgacctacaaggaaagaccgatcaaggttcttgaagaggcagtacgtcagactcgaaggaagaccattaagttctacaaagtccaatggagcaaccactctgaagatgaggcaacctgggagcgagaagatcttctccgcgccgagttcccggagctgctcccttag

SEQ ID NO: 15491 - DNA, 2847 bp, Oryza sativa
  Clone ID: TFbOSC415317j.C1.o1.gm
atgggcaacaatagatccaagctgacagattttctgaggtcacgtccgccagagttctctcagaccgtcgagctcgtcgaggctgacgattggttgaaagatgttgatagaaaactcaacttagtgcagtgtacaccggtcgagaagacgctctacgcctctcaccagctaagaggacctgcggcagattggtgggagaattactgcaatgcacaccctgaacccactaacattgcttgggatgagtttgctacggctttccgtgtagctcatgtgcctgaaagcaccattgacatgaagaaagaggaattcaacagacttaagcaaggcaacagcagtgtcaatgagtacctaagtatgttcaacaagttggctcggtacgcccctgaggaagtggactcagataagaagaagatcaggaaattcttgaaaggaatcgcagttggaatgagactccagttgctagcgcatgacttccccacttttcaacatatgatcaacaaggcacttctacttgaggatgccaaaaaagaggctaccgaagaatacaagaaacgcaaatctaaccaccaggggaattcctcccgaggcgcacctcgccctcgctatggtcaacccatgcaataccaccagtcggtcactcaggctaaccgccagccaggctacgcccctcgtcctcagatgaaccgcccggcaccccagccacagcagcgtgcccctagtggcaatactgcgccaaacagtgttacctctttcaagtcaccacagggaccgtcagcagttcagtgtttccggtgcaaccagatgggtcactatgctagacagtgccctcagaatcctacaaacaccaactcagggcatgctaatggcagcactgccagaactcctactccagcggcagctcagtctcgtcctagcactcaggcaagtggacaaggttcacgtgcttccaaccactttggtcgaggccgtgtgaatcacattcaagctgaaactgctcaggatgctccagacgttgtgatgggagcaagagttttctcaaaaattgacttgaggtcaggttaccaccaactgaaaatcagatctgaagatatcccaaagaccgctttctcaacgcgttatggtctatatgagttcacagtaatgtccttcggactcaccaatgctccagcattcttcatgaacttaatgaacaaaatcttcatggaatacctggaccagtttgttgtggtattcatcgatgacatcctgatatactccaagaacgaggaagaacatgctgaacacctgaggttgataatggaaaagctcagggatcatcaactattcgcaaaattctcgaaatgcgaattctggttagaccgagtagcatttcttggacacgtgatttcctccaatggtgtcgaagtaaatcccagcaaggttgaagctgtacttgcttggaacccacccaagaatgtgtcagagattcgcagcttcctcggcttagctggatattatcgaagattcattgaaggattctctaagctagccagacctatgaccgagctgttaaagaaggaaaagaaatttcaatggtctgcagcctgtgaagacagcttccaagaaatgaagaaaaggttgaccactgccccagttctcaccttgccagatatccgaaaagatttcgagatcttctgtgatgcatcaagacaaggcttaggatgtgtcctaatgcaagaacgaaaggttgtggcctatgcatccaggcagctcaggcctcatgaagccaattatcccacccatgatctcgagttggcagccgtggttcatgctcttaagatctggaggcactatttaatcgggaacagatgtgaagtatacaccgatcacaaaagtcttaagtatatcttcacacagaccgagttaaatatgagacagagaagatggttggaactaatcaaggattacgatcttggaatccactatcaccctggtaaagccaacgtggtcgctgatgcgctaagtcgcaaggcctatcgcaatgtagctcaaatacggcctgaccaagatcacctgtgcagagaattggagaagttaaggctgaccgtggagaagaaagacaccaatttctccatagacaaccaaggcacagtttggtgcggtccacgcatctgcgtaccggccaagaaggagttaagagatctcatcctaaaggaagctcatgagtccgcctattccattcatccaggaagtacgaagatgtaccaagatatcaaggcatacttctggtgggctggaatgaagcgagatgtcgcagaatacgtagccctgtgtgacgtttgccaaagagtcaaggcagaacatcagaggccagctggtctgctgcaacccctaccgattcccgagtggaaatgggaagagattggaatggatttcatcaccggtttgccaagaacccctaacgggtacgactccatctgggaccgtcagaaaagttacgctgacaatcgaaggcgtgaccttgagttcgaaaaaggagatcatgtgtacctgcgggtatcacccctccatggtatgaggaggtttgggatgtccggcaagttagcaccccgctacatcggcccctacctcataaccgccagacgtggcgaagtggcttatcagcttgagctacctgaaggtctcgcatatgtgcacaacgtgttccacgtatcccagctaaagaaatgtcttcgagttccagaagagcaagttcccctgggtaatatcgtgctggaaaagaatctgacctacaaggaaagaccaatcaaggttcttgaagaggcagaacgtcagactcgaaggaagaccatcaagttctacaaa

SEQ ID NO: 15492 - DNA, 5610 bp, Oryza sativa
  Clone ID: TFbOSC415507j.C1.o7.fg
atgactgtacctctactctataataaagagacctctgttgctgtgtacacggggtactccgtggaccgtgttccccctcactgtgagctctctgtgtacctttacccccgtggaggtatacacggagctggccttcgcccacaccacttcaccgtggccaggcccactctccagatcgcgtaccaggacctctcctggactgcgcttcgtcacctggcccacgactacagccaccgtctcggaggctccgccttccggcagcttccacgccttccctctggccactcagacgccaggtacccttgtccgtacagcgagtctcagccagtgctgactcgcatggttgagctttcggaggctcaggccactcagcacgacctactccttgaggcttaccgctcccttgcccgccgctacgccgccttggaggcccgtctggccgaggagggtgtcacctcagttgacactatctcttgggactcaggacgcctctgccacgccagccacctgtcctcccacagctcccgcggctctgcctgcactcccagtggcccgcgctcccccagctcgcgtgcgccgtactcaccagtgtactccccctacccacacccagttagcccttcctacaccccggacacaccccagttgcttcctcccgccgtggcccacgctttatccgcaccgcgcggaagcgtgttgttggttcttccaccgtgttccgtttccgccacccagctcccccaccgccagcggcccgtgctgctgccggccctcgacaggttccgccggtcccttcgcgccagccgatcgacgtttcttcgactgaggagccgactacaggaggcagccaggccgacgaggagtagaggaggcagtcttcagcagccgtccatggctagccgcccccgccgtgcagctcgtgcaccagcccgctttggttttgaagatggtagagttgaagcagaagcaaatcatgaatcagctaatgagcagtctcaccacagcaaccgttcgcaccgtactgtttcccgcaacgcagaggttgagcaaccccgccgcagcaaccgctcgcatcgcacagttttccgtaatgcagagatggaacaatctcaccgctctcaccgcactgccagtcacaattctggagaagaacacctccctcccccacctcatgtggaaaacaacatgcaacacataatggcagttcagacacaaatcttgcaaggactaaccacagccatagccagttttcagcataatgcgcatggaaatggccaccctcacgtgagcagcaatagatccaagctgacagattttctgaggtcacatccgccagagttctctcagaccgtcgagcccgtcgaggctgacgattggctgaaagatgttgataggaaactcaacttagtgcagtgtactccggttgagaagacgctctacgcctctcaccagctaagaggacacgctgcagattggtgggagaattactgcaatgcacaccctgaacccactaacattgcttgggatgagttcgctacggctttccgtgcagctcatgtgcctgaaagcactattgacatgaagaaagaagaattcaacagacttaagcaaggcaacatcagtgtcaatgagtacctaagtatgttcaacaagttggctcggtacgcccctgaggaagtggacacagacaagaagaagatcaggaaattcttgaaagggatcgcagttggaatgagactccagttgcttgctcatgacttccccacctttcaacatatgatcaacaaggcacttctacttgaggatgccagaaaagaggctaccgaagaatacaagaaacgcaagtctaaccatcagggaaattcttcccgaggcgcacctcgccctcgctacggtcaacccatgcaataccaccagtcggtcactcaggctaaccgccagccaggctacgcccctcgtcctcagatgaaccgtccggcacctcagccacagcagcgtgcccctagtagcaataccgcgccaaacagtgttacctccttcaagtcaccacagggaccgtcagcagttcagtgtttccggtgcaaccagatgggtcactatgctagacagtgccctcagaatcctaccaacaccaactcagggcatgctaatggcagcaccgccagaactcctactccagcggcagctcagtctcgtcctagctctcaggcaagtggacaaggttctcgtgcttccaaccactttggtcgaggaagtgtgaatcacattcaagctgaaaccgctcaggatgctccagacgttgtgatgggtatgttctctgtcaactccgtacccgcaatagttctatttgattcaggagcttcccattctttcatatcacaagcttttgtgaaaagaaatggttggaaaacccaaaatttgcgtgtaccaatgatagtacattcccctggaaggaatataagggcaactcaaatatgcccggaagttaaccttagaattgaggaagttgacttcctagccaaaccgatagtcctagactcgcaaagcttggatatcatcctagggatggattggttggctaagcacaaaggacagatagattgtgccgaaaagtccatcaccttgcaaggacctggaggaaagcaagtccgctttacccctaacacccctaccgcaagtcggtctatcctaacctgtttacaagtcacctccctggagtcggtacccatagtctgtgaatatcccgacgtatttccagaagaattaacgagtatgccaccagaccgagagattgagttcgccatagaactggcaccaggcactgcaccaattgcaaaaagaccataccgaatggcagctaatgaattagcagaagttaaaagacaaatcaaagaactggaaagtaaaggttatgtgcgacctagctcatccccttggggagccccagtgcttctggttaagaaaaaggatggctctgagagaatggtaatcgactatagagccctgaatgaagtaactataaagaacaagtacccgttgccacggattgacgatttattcgatcaacttaaaggagcaagagttttctcaaaaattgacttgaggtcaggttaccaccaactgaaaatcagatctgaagatatcccgaagaccgctttctcaacgcgttatggtctatatgagttcacagttatgtccttcggactcactaatgctccagcattcttcatgaacttaatgaacaaaatcttcatggaatacctggaccagtttgtcgtggtgttcatcgatgacatcctgatatactccaagaacgaggaagaacatgttgaacacctgaggctgataatggaaaagctcagagatcatcaactattcgctaaattctcgaaatgcgaattctggttggaccgagtagcatttcttggacacgtgatttcctccaacggtgtcgaagtagatcccagcaaggttgaagctgtacttgcttggaacccgcccaagaacgtgtcagagatccgcagcttccttggcttagcgggatattatcgaagattcattgaaggattctctaagctagccagacctatgaccgagctgttaaagaaggaaaagaaatttcaatggtctgcagcctgtgaagacagctttcaagaaatgaagaaaaggttgaccactgcaccagttctcaccttgccagatatccgaaaagatttcgagatcttctgtgacgcatcaagacaaggcttaggatgtgtcctaatgcaagaacgaaaggttgtggcctatgcatccaggcagctcaggcctcatgaagtcaattatcccacccatgatctcgagttggcagccgtggttcatgctcttaagatctggaggcattatttaatcgggaacagatgtgaagtgtacaccgatcacaaaagtcttaaatatatcttcacacagaccgagttaaatatgaggcagagaagatggttggaactaatcaaggattacgatcttggaatccactatcatcctggtaaagccaacgtggtcgctgatgcgctaagtcgcaaggcctattgcaatgtagctcaaatacggcctgaccaagatcatctgtgcagagaattggagaagttaaggctgaccgtggtacagtcaggagtccctgccagcttgacagtacagcctaccctagaatcgcaaatccgggaggctcagaaagatgacgaagggataaaagagttaataaaaagaatacaggagaagaaggacaccaatttctccatagacaatcaaggcacagtttggtgcggtccacgcatctgtgtaccggccaagaaggagttaagagatctcatcctaaaggaagctcatgagtccgcttactccattcatccaggaagtacgaagatgtaccaagatatcaaggcatacttttggtgggctggaatgaagcgagatgtcgcagaatacgtagccttgtgtgacatttgccaaagagtcaaggcagagcatcagaggccagcaggtctgctgcaacccctaccgattcccgggtggaaatgggaagagatcggaatggatttcatcaccggtttgccaagaacccccagcgggtacgactccatttgggtaatcgtggaccgactcacgaaatcagctcatttcgtgccagtgaaaaccacctatgatggaaagaaactagcagaactctacatgacccatgtcgtatgtagatttggctgtcccaagaaaattgtgtcagaccgaggcactcagttcacctcaaggttctggaagcagttgcatgaagccctcggaactgatctgaattttagtacagcctaccatccgcagaccgatggtcagaccgaaagggtaaaccaaatcctagaagacatgctacgtgcgtgtgccttggatttcgaaggcacttgggatcgttgtttgccgtatgccgagttctcatacaacaacagttatcaggccagcattcagatgtcgccgaatgaggcaatgtacggaagaaagtgccgcacccccttgtgctggaatgaggtgggcgaagcactggtattcggtcctcacatactcaagtcagcagaagaacaagttaagctgatacgagaacgtttgaagacagcacagaaccgtcagaagaattacgctgacaatcggaggcgtgaccttgagttcgaaaaaggagatcatgtgtacctgcgggtatcacccctccgtggtatgagaaggtttgggatgtccggcaagttagcaccccgctacatcggcccctacctcataaccgccagacgtggcgaagtggcttatcagcttgagctacctgaaggtctcgcagatgtgcacaacgtgttccacgtatcccagttaaagaaatgtattcgagttccagaagagcaagttcccctgggtaatatcgagctggaaaagaatctgacctacaaggaaagaccgatcaaggttcttgaagaggcagaacgtcagactcgaaggaagaccatcaagttctacaaagtccaatggagcaatcattctgaagatgaggcaacctgggaacgagaagatcttctccgcgccgagtttccggagctgctcccttag

SEQ ID NO: 15493 - DNA, 3414 bp, Oryza sativa
  Clone ID: TFbOSC415705j.C1.o1.fg
atggcagtgaacgccagcttcagttcccacggtttcggtgagggtcaccacgtcgctcagcttcgtgacctcgcccgcttccttggcttctcgtgtcccgagtacacggggtactccgtggaccgtgttccccctcgctgtgagctctctgtgtacctttaccctcgtggaggtatacacggagctggccttcgcccacaccacttctctgtggccaggcccactctccagatcgcgtaccaggacctctcctggactgcgcttcgtcgcctggcccacgactacagccaccatctcgggggctctgccttccggcagcttccacgccttccttctggccacgcagacgccagatggctagccgcccccgccgtgcagctcgtgcaccagcccgcttcggttttgaagaagctaagaggacctgctgcagattggtgggagaattactgcaatgcacaccctgaacccactaacattgcttgggatgagtttgctacggctttccgtgcagctcatgtgcctgaaagcactattgacatgaagaaagaggaattcaacagacttaagcaaggcaacagcagtgtcaatgagtacctaagtatgttcaacaagttggctcggtacgcccctgaggaagtggacacagacaagaagaagatcaggaaattcttgaaagggatcgcagttggaatgagactccagttgcttgctcatgacttccccacttttcaacatatgatcaacaaggcacttctacttgaagatgccagaaaagaggctaccgaagaatacaagaaacgcaatgttacctctttcaagtcaccgcagggaccgtcagcagttcagtgtttccggtgcaaccagatgggtcactatgccagacagtgccctcagaatcctaccaacaccaactcagggcatgctaatggcagcactgccagaactcctactccagcggcagctcagtcttgtcctagctctcaggcaagtggacaaggttctcgtgcttccaacaaccttggtcgaggccgggtgaaccacattcaagccgagaccgctcaggatgctccagacgttgtgatggtgcttctggttaagaaaaaggatggctctaagagaatggtaatcgactatagagccctgaatgaagtaactataaagaacaagtacccgttgccacagattgacgatttattcgatcaacttaaaggagcaagagttttctcaaaaattgacttgagatcaggttaccaccaactgaaaatcagatctgaagatatcccgaagaccgctttctcaacgcgctatggtctatatgagttcacagtgatgtccttcggactcaccaatgctccagcgttcttcatgaacttaatgaacaaaatcttcatggaatacctggaccagtttgtcgtggtgttcatcgatgacatcctgatatactccaagaatgaggaagaacatgctgaacacctgaggctgataatggaaaagctcagagatcatcaactattcgctaaattctcgaaatgcgaattctggttagaccgagtagcatttcttggacacgtgatctcctccaatggtgtcgaggtagatcccagcaaggttgaagctgtacttgcttggaacccgcccaagaatgtgtcagagattcgcagcttccttggcttagctggatattatcgaagattcattgaaggattctctaagctagccagacctatgaccgagctgttaaagaaagaaaagaaatttcaatggtctgcagcctgtgaagacagctttcaagagatgaagaaaaggcagctcaggcctcatgaagtcaattatcccacccatgatctcgagttggcagccgtggttcatgctcttaagatctggaggcactatttaatcgggaacagatgtgaagtatacaccgatcacaaaagtcttaagtacatcttcactcagaccgagttaaatatgaggcagagaagatggttggaactaatcaaggattacaatcttggaattcattaccaccccggtaaagctaatgtggtcgctgatgcgctaagtcgcaaggcctattgcaatgtagctcgaatacggcctgaccaagatcgcctgtgcagagaattggagaagttaaggctgaccgtggtacagtcaggtgtccctgccagcttgacagtgcagcctaccctagaatcgcaagtccgggaggctcagaaagatgacgaagggataaaagagttaataaaaagaatacaggagaagaaagacaccgatttctccatagacgaccaaggcacagtttggtgcggtccacgcatctgtgtaccggccaagaaggagttaagagatctcatcctaaaggaagctcatgagtccgcctactccattcatccaggaagtacgaagatgtaccaagatatcaaggcatacttctggtgggctggaatgaagcgagatgtcgcagaatacgtagccttgtgtgacatttgccaaagagtcaaggcagagcatcagaggccagctggtctgttgcaacccctaccaattcccgagtggaaatgggaagagatcggaatggatttcatcaccggtttgccaagaacccctagcgggtacgactccatttgggtaatcgtggaccgactcacgaaatcagctcatttcgtgccagtgaaaaccacctttgatggaaagaaactagcagaactctacatgacccatgtcgtatgtagatttggctgtcccaagaagattgtgtcagaccgaggcactcagttcacctcaaggttctggaagcagttgcatgaagccctcggaaccgatctaaattttagtacggcctaccatccgcagaccgatgcgctggtattcggtcctgacatactcaaggcagcagaagaacaagttaagctaatccgagaacgtttaaagacagcgcagaaccgtcagaagaattacgctgacaatcggaggcgtgaccttgagttcgaaaaaggagatcatgtgtacctgcgggtatcacccctccgtggtatgaggaggtttgggatgtccggcaagttagcaccccgctacatcggcccctacctcataaccgccagacgtggcgaagtggcttatcagcttgagttacctgaaggtctcgcagatgtgcacaacgtgttccacgtatcccagttaaagaaatgtcttcgagttccagaagagcaagtccccctgggtagtatcgagctggaaaagaatctgacctacaaggaaagaccgatcaaggttcttgaagaggcagaacgtcagactcaaaggaagaccatcaagttctacaaagtccaatggagcaaccattctgaagatgaggcaacctgggagcgagaagatcttctccgcgccgagttcccggagctgctcccttag

SEQ ID NO: 15494 - DNA, 5463 bp, Oryza sativa
  Clone ID: TFbOSC416839j.C1.o10.fg
atggcagtgaacgccagcttcagttcccacggttttggtgagggtcaccacgtcgctcagcttcgtgacctcacccgtttccttggcttctcgtgtcccgagtacacggggtactccgtggaccgcgttccccctcactgtgagctctctgtgtacctttacccccgtggaggtatacacggagctggccttcgccctcaccacttcactgtggccaggcccactctccagatcgcgtaccaggacctctcctggactgcgcttcgtcgcctggcccacgactacagccaccgtctcggaggctccgccttccggcagcttccacgccttccatctggccactcagacgccagatacccttgtccgtacagcgagtctcagccagtgctgactcgcatggttgagctttcggaggctcaggccactcagcacgaccttctccttgaggcttaccgctcccttgcacgtcgctacgccgccttggaggcccgtctggccgaggagggtgtcacctcagttgacactatctcctgggactcaggacgcctctgccacgccagccacctgtcctcccacagctcccgcggctctgcccgcactcccagtggcccgcgctcccccagctcgcgtgcgccgtactctccagtgtactccccctacccacacccagttagcccttcctacactccaggacacaccccagttgcttcctcccgccgtggcccacgctttatccgcactgcgcggaagcgtgttgttggttcttccaccgtgttccgtttccaccacccagctcccccaccgccagcagcccgtgctgctgccggccctcgacagatggctagccgcccccgccgtgcaactcgtgcaccagcccgcttgggtttcgaagatggtagagtcgaagcagaagcaaatcatgaacccgctaatgagcagtctcaccacagcaaccgttcgcaccgtaccgctccccgcaacgcagaagttgagcaaccccgccgcagcaaccgctcgcatcgcacagtttcccgtgatgcagaaatggagcagtctctccgctctcaccgcactgccagtcacagttctggagaagaacgtatcccttccccacctcatgtggaaaacaacatacaacacataatggcagtacagacacaaatcttgcaaggactaaccacagccatagccagttttcagcataatgcgcatggaaatggccaccctcacgtgggcaataatagatccaagctgacagactttctgaggtcacgtccgccagagttctctcagaccgtcgagcctgtcgaggctgacgattggttgaaagatgttgatagaaaactcaacttagtgcagtgtactcctgttgagaagacgctctacgcctctcaccagctaagaggacctgccgcagattggtgggagaattactgcaatgcacaccctgaacccactaacattgcttgggatgagttcgctacggctttccgtgcagctcatgtgcccgaaagcactattgatatgaagaaagaagaatttaacagacttaagcaaggcaacagcaatgacaatgagtacctaagtcagttcaacaagttggctcggtacgcccctgaggaagtaaacaccgataagaaaaagatcaggagattcttgaaaggaatcgcagttggaatgagactccagttgcttgttcatgacttccccacttttcaacatatgatcaacaaagcacttctacttgaagatgccagaaaagaggccaccgaagaatacaagaaacgcaagtctaaccaccagggaaattcttcccgaggcgcacctcgccctcgctacggtcaacccatgcaatatcaccagtcggtcactcaggctaaccgccagccaggttacgcccctcgccctcagatgaaccgtccggcaccccagccacagcagcgtgcccctagtggcaatacggcgccaaacagtgttacctctttcaagtcaccgcagggaccgtcagtagttcagtgtttccggtgcaaccagatgggtcactatgccagacagtgccctcagaatcctaccaacaccaactccgggcatgctaatggcagcaccgccagaactcctactccagcggcagctcagtctcgtcctagctctcaggcaagtggacaaggatctcgtgcgtccaacaacttcggtcgaggacgtgtgaatcacattcaagctgaaaccgctcaggatgctccagacgttgtgatgggtatgttctctgtcaactccgtacccgcaatagttctatttgattcaggagcttcccattctttcatatcacaagcttttgtgaaaagaaatggttggaaaacccaaaatttgcgtgtaccaatgatagtacattcccctgggaggaatataagggccactcaaatatgcccggaagttaaccttagaattgaggaagttgacttcctagccaaaccgatagtcctagactcgcaaagcttggacatcatcctaggaatggattggttggctaagcacaaaggacagatagattgtgccgaaaagtccatcaccttgcaaggacctggagggaagcaagtccgctttacccctaacacccctaccgcaagtcgaatgccaccagaccgagagatcgagttcgccatagaactggcaccaggcacagctccaattgcaaaaagaccctaccgaatggcagctaatgagttagcagaagtcaaaagacaaattgaagagttggagagtaaaggttatgtgcgacctagttcatccccttggggagccccagtgcttctggttaagaaaaaggatggctctgagagaatggtaatcgactatagagccctgaatgaagtaactataaagaacaagtacccgttgccacggattgacgatttattcgatcaacttaaaggagcaagagttttctcaaaaattgacttgaggtcaggttaccaccaattgaaaatcaggtctgaagatatcccgaagaccgctttctcaacgcgttatggtctatatgagttcacagtaatgtccttcggactcaccaatgctccagcattcttcatgaacttaatgaacaaaatctttatggaatacctggaccagtttgtcgtggtattcatcgatgacatcctgatatactctaagaacgaggaagaacatgctgagcacctgaggctgataatggaaaagcttagagatcatcaactattcgctaaattctcgaaatgcgaattctggttagaccgagtagcatttcttggacacgtaatctcctccaacggtgtcgaagtagatcccagcaaggttgaagctgtacttgcttggaacccgcccaagaatgtgtcagagattcgcagcttccttggcttagctggatattatcgaagattcattgaaggattctctaagctagccagacctatgaccgagctgttaaagaaggaaaagaaatttcaatggtctgcagcctgtgaaggcagctttcaagaaatgaagaaaaggttgaccactgccccagtacttaccttgccagatatccgaaaagatttcgagatcttctgtgatgcatcaagacaaggcttaggatgtgtcctaatgcaagaacgaaaggttgtggcctatgcatccaggcagctccggcctcatgaagtcaattatcccacccatgatctcgagttggcagccgtggttcatgctcttaagatctggaggcactatttaatcgggaacagatgtgaagtatacaccgatcacaaaagccttaaatatatcttcacacagaccgagttaaatatgagacagagaagatggttggaactaatcaaggattacgaccttggaatccactatcatcctggtaaagccaacgtggtcgccgatgcgctaagtcgcaaggcctattgcaatgtagctcaaatacggcctgaccaagatcatctgtgcagagaattggagaagttaaggctgaccgtagtacagtcaggagtcccagccagcttgacagtacagcctaccctagagtcgcaaatccgggaggctcagaaagatgacgaagggataaaagagttaataaaaagaatacaggagaagaaagacaccaatttctccatagacgatcaaggcacagtttggtgcggcccacgcatctttgtaccggccaaggagttaagagatctcatcctaaaggaagctcatgagtccgcttactccattcatccaggaagtacgaagatgtaccaagatatcaaggcatacttctggtgggctggaatgaagcgagatgtcgcagaatacgtagccttgtgtgacatttgccaaagaatcaaggcagagcatcagaggccagctggtctgctgcaacccctaccgattcccgagtggaagtgggaagagatcggaatggatttcatcaccggtttaccaagaacccccagcgggtacgactccatttgggtaatcgtggaccgactcacgaaatccgcacatttcgtgcccgtaaaaaccacctatgatgggaagaagctagcagaactctacatgacccatgtcgtatgtagatttggctgtcccaagaaaattgtgtcagaccgaggcactcagttcacctcaaggttctggaagcagttgcatgaagccctcggaactgatctgaattttagtacggcctaccatccgcagaccgatggtcagacagaaagagtaaaccaaatcctagaagacatgctacgagcgtgtgccttggatttcgaaggcacttgggatcgttgtttaccgtacgcggagttctcatacaacaacagttatcaggccaacattcagatgtcgccgaatgaggcaatgttcggaagaaagtgccgcactcccttgtgctggaatgaggtgggcgaagccctggtattcggtcctgacatactcaagtcagcagaagaacaagttaagctaatccgaggacgattaaagacagcgcagaaccgtcagaagaactacgctgacaatcggaggcgtgaccttgagttcgaaacaggagatcatgtatacctgcgggtatcacccctccgtggtatgaagaggtttgggatgtccggcaagttagcaccccgctacatcggcccctacctcataaccgccagacgtggcgaagtggcttatcagcttgagctacctgaaggactcgcagatgtgcacaacgtgttccacgtatcccagctaaagaaatgtcttcgagttccagaagagcaagttctcctgggtaatatcgagctggaaaggaatctgacctacaaggaaagaccgatcaaggttcttgaagaggcagaacgtcagactcgaaggaagaccatcaagttctacaaagtccaatggagcaatcattctgaagatgaggcaacatgggaacgagaagatcttctccgcgccgagtttccggagctgctcccttag

SEQ ID NO: 15495 - DNA, 4689 bp, Oryza sativa
  Clone ID: TFbOSC417333j.C1.o7.fg
atggcagtgaacgccagcttcagttcccacggttttggtgagggtcaccacgtcgctcagcttcgtgacctcgcccgtttccttggcttctcgtgtcccgagtacacggggtactccgtggaccgtgttccccctcactgtgagctctctgtgtacctttacccccgtggagacgccaggtacccttgtccgtacagcgagtctcagccagtgctgactcgcatggttgagctttcggaggctcaggccactcagcacgacctactccttgaggcttaccgctcccttgcccgccgctacgccgccttggaggcctgtctggccgaggagggtgtcacctcagttgacactatctcttgggactcaggccgcctctgccacgccagccacctgtcctcccacagctcccgcggctctgcccgcactcccagtggcccgcgctcccccagctcgcgtgcgccgtactcaccagtgtactccccctacccacacccagttagcccttcctacacccccggacacaccccagttgcttcctcccgccgtggcccacgctttatccgcactgcgcggaagcgtgttgttggttcttccaccgtgttccgtttccactacccagctcccccaccgctagcgatggctagccgcccccgccgtacagctcgtgcgccagcccgctttggttttgaagatggtagagtcgaaccagaagcaaatcatgaatcagctaatgagcagtctcaccacagcaaccgttcgcaccgtactgtttcccgcaacgcagaggttgagcaaccccgccgcagcagccgctcgcatcgcacagtttcccgtgatgcagagatggaacagtctcaccgctctcaccacactgccagtcacaattctggagaagaacgcctcccttccccacctcatgtggaaaacaacatgcaacacttaatggcagttcagacacaaatcttgcaaggactaaccacagccatagccagttttcagcataatgcgcatggaaatggccaccctcacatgggcaacaacagatccaagctgacagactttctgaggtctcgtccgccagagttctctcagaccgtcgagcccgtcgaggctgacgattggttgaaagatgttgatagaaaactcaacttagtgcagtgtactccggttgagaagacgctctacgcctctcaccagttaagaggacctgccgcagattggtgggagaattactgcaatgcacaccttgaacccactaacattgcttgggatgagtttgctacggctttccgtgcagctcatgtgcctgaaagcactattgacatgaagaaagaagaattcaacagacttaagcaaggcaacagcagtgtcaatgagtacctaagtcagttcaataagttggctcggtacgcccctgaggaagtggacacagacaagaagaagattaggaaattcttgaaagggatcgcagttggaatgagactccagttgcttgcgcatgacttccccacttttcaacatatgatcaacaaggcacttctacttgaggatgccagaaaagaggctaccgaagaatacaagaaacgcaagtctaaccatcagggaaattcttcccgaggcgcacctcgccctcgctacggtcaacccatgcaataccaccagtcggtcactcaggctaaccgccagccaggctacgcccctcgccctcagatgaaccgtccggcacctccgccacagcagcgtgcccctagtggcaacactgcgccaaacagtgttacctctttcaagtcaccacagggaccgtcagcagttcagtgtttccggtgcaaccagatgggtcactatgctagacagtgtcctcagaatcctaccaacaccaactcaggacatgctaatggcagcactgccagaactcctactccagcggcagctcagtctcgtcctagctctcaggcaagtggacaaggttcacgtgcttccaacaactttggtcgaggccgtgtgaatcacattcaagctgaaaccgctcaggatgctccagacgttgtgatgggacctggaggaaagcaaatccgctttacccctaacacccctaccgcaagccggtctattctaacctgtttacaagtcacctccttggagtcggtgcccatagtctgtgcataccccgacgtatttccggaagaattaacaagaatgccaccagaccgagagatcgagttcgccatagaactggcactaggcactgccccaattgcaaagagaccctaccgaatggcagctaatgagttagcagaagttaaaagacaaatcgaagaattggagagtaaaggttatgtgcgacctagctcatccccttggggagccccagtgcttctggttaagaaaaaggatggctctgagagaatggtaatcgactatagagccctgaatgaagtaactataaagaacaagtacccgttgccacggattgacgatttattcgatcaactcaaaggagcaagagttttctcaaaaattgacttgaggtcaggttaccaccaactgaaaatcagatctgaagatattccgaagaccgctttctcaacgcgttatggtctatacgagttcacatttgtcgtggtgttcatcgatgacatcctgatataccccaagaatgtgtcagagattcgcagcttccttggcttagcgggatattatcgaagattcattaaaggattctctaagctagccagacctatgactgagctgttaaagaaggaaaagaaatttcaatggtctgcagcctgtgaagacagctttcaagaaatgaagaaaaggttgaccactgccccagttcttaccttgccagatatccgaaaagatttcgagatcttctgtgacgcatcaagacaaggcttaggatgtgtcctaatgcaagaacgaaaggttgtggcctatgcatccaggcagctcaggcctcatgaagtcaattatcccacccatgatctcgagttggcagccgtggttcatgctcttaagatctggaggcactatttaatcgggaacagatgtgaagtatacaccgatcacaaaagtcttaagtatatcttcacacagaccgagttaaatatgagacagagaagatggttggaactaatcaaggattacgaccttggaatccactatcatcctggtaaagccaacgtggtcgctgatgcgctaagtcgcaaggcctattgcaacgtagctcaaatacggcccgaccaagatcacctgtgcagagaattggagaagttaaggctgaccatggtacagtcaggtgtccctgccagcttgacagtacagcctaccctagagtcgcaaatccgggaggcacagaaagacgacgaagggataaaagagttaataaaaagaatacaggagaagaaagacaccaatttttccatagacgatcaaggcacagtttggtgcggtccacgcatctatgtaccggccaagaaggagttaagagatctcatcctaaaagaagctcatgagtccgcctactccattcatccaggaagtacgaagatgtaccaagatatcaaggcatacttctggtgggctggaatgaagcgagatgtcgcagaatacgtagccttgtgtgacatttgccaaagagtcaaggcagagcatcagaggccagctggtctgctgcaacccctaccgattcccgagtggaaatgggaagagatcggaatggatttcatcaccggtttgccaagaacccctagcgggtacgactccatttgggtaatcgcggatcgcctcacgaaatcagctcatttcgtgctagtgaaaaccacctatgatggaaagaaactagcagaactctacatgacccatgtcgtatgtagatttggctgtcccaagaagatcgtgtcagaccgaggcactcagttcacctcaaggttctggaagcagttgcatgaagctctcggaactgatctaaattttagtacagcctaccatccgcagaccgatggtcagaccgaaagggtaaaccaaatcctagaagacatgctacgtgcgtgtgccctggatttcgaaggcacttgggatcgttgtttgccgtatgccgagttctcatacaacaacagctatcaggccagcattcagatgtcgccgaatgaggcaatgttcggaagaaagtgccgcactcccttgtgctggaatgaggtgggcgaagcgctagtattcggtcctgacatactcaagtcagcagaagaacaagttaagctgatccgagaacgtttgaagacagcgcagaaccgccaaaagaattacgctgacaatcggagacgtgaccttgagttcgaaaaaggagatcatgtatacctgcgagtatcacccctccatggtatgagaaggtttgggatgtccggcaagttagcaccccgctacatcggcccctacctcataaccgccagacgtggcgaagtggcttatcagcttgagctacctgaaggtctcgcagatgtgcacaacgtgttccacgtatcccagttaaagaaatgtcttcgaattccagaagagcaagttcccctggtttcagagcccgaagacccgcagtgcgaggatttcgaggatcaagctccagatctcgagcaaggcaagccacctttgaacatcttgaacctatatttgaaatttaattatgttgcttga

SEQ ID NO: 15496 - DNA, 4863 bp, Oryza sativa
  Clone ID: TFbOSC4900j.C1.o6.fg
atggggtactccgtggacgtgttccccctcgctgtgagctctctgtgtacctttaccctcgcggaggtatacacggagctggccttcgcccacaccacttcactgtggctaggcccaccctccagatcgcgtaccaggacctctcctggactgcgcttcgtcgcttggcccacgactacagccaccgtctcgggggctctgccttccggcagctcccacgtcttccttctggctacgcagatgccagcccgcttcagttttgaggaaggtagagttgagccagaagcaaatcatgagtcagctaatgagcagtctcaccacagcatccgttcgcaccatactgcttcccgcaatgcagaagttgagcaaccccaccgcagcaatcgctcgcatcacacagcttcccgtaatgcagaagtggaacaatctcaccgctctcaccgcactgccagtcacaattctggagaagaacgcatcccttccccacctcatgtggaaaacaacatgcagcacttaatgacagttcagacacaaatcttgcaaggattagccgcagccatagccggctttcagcataatgcccatggaaatggccaccctcacatgggcaacaatagatccaagctgacagactttctgaggtctcgtccgccagagttctctcagaccgtcgagcccgtcgaggctgacgattggctgaaagatgttgatagaaaactcaacttagtgcagtgtactcctgttgagaagatgctctacgcctctcaccagctaagaggacatgctgcagattggtgggagaattactgcaatgcacaccctgaacccactaacattgcttgggatgagtttgctacggctttccgtggagctcatgtgcctgaaagcaccattgatacgaagaaagaggaatttaacaggcttaagcaaggcaacaacagtgtcaatgagtacctaagtcagttcaacaagttggctcggtacgcccctaaggaagtggacacagacaagaagaaaatcaggaagttcttgaagggaatcgcagttggaatgagactccagttgcttgctcatgacttccccacttttcaacatatgatcaacaaggcacttctacttgaggatgccagaaaagaggctaccgaagaatacaagaaacgcaagtttaaccatcaggggaattcttcccgaggcgcacctcgccctcgctatggtcaacccatgcaatatcaccaatcggtcactcaggctaaccgccagccaggctacgcccctcgtcctcagatgaaccgtccggcacctcagccacagcagcatgccccaagtggcaatactgcgccaaatagtgttacctctttcaagtcaccactaggactatcagcagttcagtgtttccggtgcaaccagatgggtcactatgccagacagtgccctcagaatcctaccaacaccaactcagggcatgctaatggcagcactgccagaactcctactccagcggcagctcagtctcgtcctagctctcaggcaagtggacaaggttctcgtgcttccaacaactttggtcgaggccgggtgaaccacattcaagctgagaccgctcaggatgctccagacgttgtgatggtacattcccctgggaggaatataagggcaacccaaatatgcccggaagttaaccttagaattgaggaagttgacttcctagccaaaccgatagtcctagactcgcaaagcttggacatcatcctagggatggattggttggctaagcacaaaggacagatagattatgccgaaaggtccatcaccttgcaaggacctagaggaaagcaagtctgcttcaccactaacacccctaccgcaagtcggtctatcctaacctatttacaagtcacctccttggagtcggtgcccatagtctgtgaatatcccgacgtatttcccgaagaattaacaagtatgccaccagaccgagagattgagttcgccatagaactggcaccaggcaccgcaccaattgcaaaaagaccctaccaaatggcagctaatgagttagcagaagtcaaaagacaaatcgaagaattggagagtaaaggttatgtgcgacctagctcatccccttggggagccccagtgctcctggttaagaaaaaggatggctctgagagaatggtaatcgactatagagccctgaatgaagtaactataaagaacaagtacgcattgccacggattgacgatttgttcgatcaacttaaaggagcaagagttttctctaaaattgacttgagatcaggttaccaccaattgaaaattagatctgaagatatcccgaagaccgctttctcaacgcgttatggtctatatgagttcacagtgatgtccttcggaatcaccaatgctccagcattcttcatgaacttaatgaacaagatcttcatggaatacctggaccagtttgtcgtggtattcatcgatgacatcctgatatactccaagaatgaggaagaacatgctgaacacctgaggctgataatggggaagctcagggatcatcaactattcgctaaattctcgaaatgcgaattctggttggaccgagtagcatttcttggacacgtgatctccttcaacggtgtcgaagtagatcccagcaaggttggagctgtacttgcttggaacccgcccaagaatgtgtcagagatccacagcttccttggcttagctggatattatcgaagatttattgaaggattctctaagctagccagacctatgaccgagctgttaaagaatgaaaagaaatttcaatggtctacagcctgtgaagacagctttcaagaaatgaagaaaaggttgaccaccgccccagttctcaccttgccagatatccgaaaggatttcgagatcttctgtgatgcatcaagacaaggcgtaggatgtgtcctaatgcaagaacgaaaggttgtggcctatgcatccaggcagctcaggcctcatgaagtcaactatcccacccatgatctcgagttggcagccgtggttcatgctcttaagatctggaggcactatttaatcgggaacagatgtgaagtatacaccgatcacaaaagtcttaagtacatcttcacccagaccgagttaaatatgaggcagagaagatggttggaactaatcaaggattacgatcttggaattcattaccatcccggtaaagctaatgtggtcgctgatgcgctaagtcgcaagacctactacaatgtagctcaaatatggccagaccaagatcgcctgtgcggagaattggagaagttaaggctgaccgtggtacagtcaggtgtccctgccagcttgaccgtgcagcctaccctagagtcgcaaatccgggaagctcagaaagatgatgaagggataaaagaattaataaaaagaatacaggagaagaaggacaccgatttctcaaatagacgatcaaggcacagtttgaaggagttaagagatcccatcctaaaggaagctcatgagtccgcctactccattcatccaggaagtacgaagatgtaccaggatatcaaggcatatttctggtgggctggaatgaagcgagatgtcgcagaatacgtggcgttgtgtaacatttgccaaagagtcaaggcagagaatcagaggccagcgggtctgctgcaacccctaccgattcccgagtggaaatgggaagagatcggaatggatttcatcaccggtttgccaagaacccctagcgggtacgactccatctgggtaatcgtggaccgactcacgaaatcagctcatttcgtgccagtgaaaaccacctttgatggaaagaaactagcagaactctacatgacccatgtcgtgtgtagatttggctgtcccaagaagattgtgtcagaccgaggcactcagttcacctcaaggttctggaagcagttgcatgaagctctcggaaccgatctaaattttagtacagcttaccatccgcagaccgatggtcaaacagaaagggtaaaccaaatcctagaagacatgctacccttggtcacatcactgacctcgcggcagtcggatcttgtcaccggccttggtctagtcgccgcatccgcccacgcccccgcctccgtgtccaactccgtcggtccaagcaagctccagaatggctctttgaggtcagaggtcaccacctccttcgccgatccatcgctttacccccttccccttcagatccatcgctgccacctctcagtgccgccagatctggcctatttgaggtcagaagctgcggtggggactacaaagtcgttagcaattttgatgaaggcgctcatactcttggtccccgcccgcgtcgctcaagggttgggcgacacgggcgtcgcctccctccccagccgacccatcatctcctcccacctctacctcattgccgcccaagcaagccaccagaaaaccgtgcctttcttctcctccctgaaagtcttgagactagagcccgtggcccgatccacgatggggcagccgccgcgacatagggtggaaagccggtggcgtagttttagagagggcaccggtgaccagcggcacgcgcgtaggagcctgagggtggcctccatgcaggcggagaggagggcatcttcgcagcgaagtcggaactattatgtcgcttgtggaaagcttggtaacgataacacatgtgggggtgatggaattcttactgggatttggggggaggcaagggtgacgaaaaaatcaccgcacctatcaggcaacgaatggaaaaatacgaatatttatattagttatagaaatgtcggcaacaacctaaccatcgaaaagaaataa

SEQ ID NO: 15497 - DNA, 5157 bp, Oryza sativa
  Clone ID: TFbOSC832j.C1.o1.fg
atggcagtgaacgccagcttcagttcccacggttttggtgagggtcaccacgtcgctcagcttcgtgacctcgcccgcttccttggcttctcatgtcccgagtacacggggtactccgtggaccgtgttccccctcgctgtgagctctctgtgtacctttaccctcgtggaggtatacacggagctggccttcgcccacaccacttcactatggccaggcccactctccagatcgcgtaccaggacctctcctggactgcgctttgtcgtttggcccacgactacagccaccgtcttgggggctctgccttccggcagctcccacaccttccttctagccacgcagacgccaggtacccttgtccgtacaacgagtctcagccagtgctgactcgcatggttgagctttcggaggctcaggccactcagcacaacctactcctcgaggcttactgctcccttgcccgccgctacgccgctctggaggcccatctggccgaggagggtgtcacctcagttgacactgtctcttgggactcaggccgcctctgccacgccagccacctgtcctcccacagctctcgcggctctgcccgcactcccagtggcccgcgctcccccagctcgcgtgcgccgtactcacaagtgtactccccctacccacacccagttagcccctcctacacccccggacacaccccagttgcttcctcccgccgtggcccacgctttatccgcactgcgcggaagcgtgttgttggttcttccaccgtgttctgcttcgactacccagctcccccaccgctagcggcccgtgctgttgggggccctcgacagatggctagccacccccaccgtgctgctcgtacaccagcctgcttcggttttgaggaaggtagagttgagccagaagcaaatcatgagtcagctaatgagcagtctcaccagagcaaccgttcgcaccgtactgcttcccgcaatgcagaagttgagcaaccccaccgcagcaatcgctcgcatcacacagcttcccgtaatacagaagtggaacagtctcaccgctctcaccgcactgccagtcacaattctggagaagaacgcatcccttccccacctcatgtggaaaacaacatgcagcacttgatggcagtacagacacaaatcttgcaaggattagccgcagccatagccggctttcagcataatgcacatggaaatggccaccctcacatgggcaacaatagatccaagctgacagactttctgaggtctcgtccgccagagttctctcagaccatcgagcccatcgaggctgacgattggctgaaagatgttgatagaaaactcaacttagtgcaatgtactcctgttgagaagacgctctacgcctctcaccagctaagaggacctgctgcagattggtgggagaattactgcaatgcacaccctgaacccactaacattgcttggggtgagtttgctatggctttccgcgcagctcatgtgcctgaaagcgccattgatatgaagaaagaggaatttaacaggcttaagcaaggcaacaacggtgtcaatgagtacctaagtcagttcaacaagttggctcggtatgcccctgaggaagtggacacagacaagaagaagatcaggaagttcttgaagggaattgcagttggaatgagactccagttgcttgctcatgacttccccacttttcaacatatgatcaacaagacacttctacttgaggatgctagaaaagaggctaccgaagaatataagaaacgcaagtctaaccatcaggggaattcttccctaggcgcacctcaccctcgctatggtcaacccatgcaatatcaccagtcagtcactcaggctaaccgccagccgggctacgcccctcgtcctcagatgaaccgtccggcacctcagccacagcaacataccccaagtggcaatactgcaccaaacagtgttacctctttcaagtcaccgctaggactgtcagcagttcagtgtttccggtgcaaccagatgggtcactatgccagacagtgccctcagaatcctaccaacaccaactcagggcatgctaatggcagcactgccagaactcgtactccagcggcagctcagtctcgacctagctctcaggcaagtggacaaggttctcgtgcttccaacaactttggtcgaggccgggtgaaccacattcaagctgagacagctcaggatgctccagacgttgtgatggtacattcccctggaaggaatataagggcaactcaaatatgcccgggagttaaccttagaattgaggaagttgacttcctagccaaaccgatagtcctagactcgcaaagcttggacatcatcctagggatggattggttggctaagcacaaaggacagatagattgtgccgaaaggtccatcaccttgcaaggacctggaggaaagcaagtccgctttacctctaacgcccctaccgcaagtcggtctatcctaacctgtttacaagtcacctccttggagtcggtgcccatagtctgtgaatatcccgacgtatttccagaagaattaacgagtatgccaccagaccgagagattcagttcgccatagaactagcaccaggcactgcaccaattgcaaaaagaccctaccgaatggcagctaatgagttagcagaagtcaaaagacaaatcgaagagttggaaagtaaaggttatgtgcgacctagctcatccccttggggagccccagtgcttctggttaagaaaaaggatggctctgagagaatggtaatcgactatagagccctgaatgaagtaactataaagaacaagtacccgttgccacggattgacgatttgttcgatcaacttaaaggagcaagagttttctctaaaattgacctgagatcaggttaccgccaattgaaaatcagatctgaagatatcccgaagaccgctttctcgacgcgttatggtctatatgagttcacagtgatgtccttcggactcaccaatgctccagcattcttcatgaacttaatgaacaaaatcttcgtggaatacctggaccagtttgtcgtggtattcatcgatgacatcctgatatactccaagaatgaggaagaacatgctgaacacctgaggctgataatgggaaagctcagggatcatcaactattcgctaagttctcaaaatgcgaattctgcaaggttgaagctgtacttgcttggaacccgcccaagaatgtgtcagagatccgcaacttccttggcttagctggatattatcgaatattcattgaaggattctctaagctagccagacctatgaccgagctgttaaagaaggaaaagaaatttgaatggacagcagcctgtgaagacggctttcaagaaatgaagaaaaggttgaccactgtcccagttctcaccttgccagatatccgaaaagatttcgagatcttctgtgatgcatcaagacaaggcttaggatgtgtcctaatgcaagaacgaaaggttgtggcctatgcatccaggcagctcaggcctcatgaagtcaactatcctacccatgatctcgagttggcagccgtggttcatgctcttaagatctggaggcactatttaatcgggaatagatgtgaagtatacaccgatcacaaaagtcttaagtatatcttcacacagaccgagttaaatatgaggcagagaagatggttggaactaatcaaggattacgaccttggaattcattaccatcccggtaaagctaatgtggtcgcggatgcgctaagtcgcaagacctattgcaatgaagctcaaatatggccagcccaagatcgcctgtgcagagaattggagaagttaaagctgaccgtggtacagtcaggtgtccctgccagcttgacagtgcagcctaccctagaatcgcaaatccgggaagctcagaaagatgatgaagggataaaagaattaataaaaagaatacaggagaagaaggacaccgatttctccatagacgatcaaggcacagtttggtgcggtccacgcatctgtgtaccggccaagaaggagttaagaaatctcattctaaaggaagctcatgagtccgcctactccattcatccaggaagtacgaagatgtaccaggatatcaaggcatacttctggtgggcgggaatgaagcgagatgtcgcagaatacgtagccctgtgtgacatttgccagagagtcaaggcagagcatcagaggccagctggtctgctgcaacccctaccgattcccgagtggaaatgggaagagatcggaatggatttcatcaccggcttgccaacaacccctagcggatttggctgccccaaaaagattgtgtcagaccgaggcactcagttcacctcaaggttctggaagcagttgcatgaagctctcggaaccaatctaaattttagtacagcttaccatccacagaccgatggtcagacagaaagggtaaaccaaatcctagaagacatgctacgtgcgtgtgccctagatttcgaaggcacttgggatcgttgtttgccgtatgctgagttttcatacaacaacagttatcaggccagcattcagatgtcgccgaatgagacaatgtttggaagaaagtgccgcactcccttgtgctggaatgaggtgggcgaagcactgaattacgctgacaatcggaggcgtgaccttgagttcgaaaaaggagaccacgtgtacctgcgggtatcacctctccgtggtatgaggaggtttgggatgtccggcaagttagcaccccgctacatcggcccctacctcataaccgctagacgtggcgaagtggcttatcagcttgagttacctgaaagtctcgcagatgtactcaacgtgttccacgtgtctcagttgaagaagtgtctccgtgttccagaagaacaagttcccctggataatatcgaactggaaaagaatctgacctacaaggaaataccgatcaaggttcttgaagaggcagaacgtcagactcgaaggaagaccatcaagttctacaaggtccaatggagcaatcattctgaagacgaggcaacctgggaacgagaagatctcctccgcgccgagttcccggagctgctcccttag

SEQ ID NO: 15498 - DNA, 4251 bp, Oryza sativa
  Clone ID: TFbOSC900019j.C1.o10.fg
atggaacagtctcaccgctctcaccacactgccagtcacaattctggagaagaacgcctcccttccccacctcatgtggaaaacaacatgcaacacctaatggcagttcagacacaaatcttgcaaggactaaccacagccatagccagttttcagcataatgcgcatggaaatggccaccctcacatgggcaacaacagatccaagctgacagactttctgaggtctcgtccgccagagttctctcagaccgtcgagcccgtcgaggctgacgattggttgaaagatgttgatagaaaactcaacttagtgcagtgtactcctgtggagaagacgctctacgcctctcaccagctaagaggacctgccgcagattggttggagaattactgcaatgcacaccctgaacccactaacatttcttgggatgagttcgctacggctttccgtgcagctcatgtgcctgaaagcactattgacatgaagaaagaagaatttaacagacttaagcaaggcaacagcagtgtcaatgagtacctaagtcagttcaacaagttggctcggtacgcccctgaggaagtagacacagataagaaaaagatcaggaaattcttgaaaggaatcgcagttggaatgagactccagttgcttgctcatgacttccccacttttcaacatatgatcaacaaagcacttctacttgaggatgccagaaaagaggctaccgaagaatacaagaaacgcaagtctaaccatcagggaaattcttcccgaggcgcacttcgccctcgctacggtcaacccatgcaataccaccagtcggtcactcaggctaaccgccagccaggctacgcccctcgtcctcagatgaaccgtccggcacctcagccacagcagcgtgcccctagtggcaatactgcgcctaacagtgttacctctttcaagtcaccgcagggaccgtcagcagttcagtgtttccggtgcaaccagatgggtcactatgctagacagtgtcctcagaatcctaccaacaccaactcagggcatgctaatggcagcactgccagaactcctactccagcggcagctcagtttcgtcctagctctcaggcaagtggacaaggttcacgtgcttccaaccactttggtcgaggccgtgtgaatcacattcaagctgaaaccgctcaggatgctccagacgttgtgatgggtatgttctctgtcaactccgtacccgcaatagttctatttgattcaggagcttcccattctttcatatcacaagcttttgtgaaaagaaatggttggaaaacccaaaatttgcgtgtaccaatgatagtacattcccctgggaggaatataagggcaactcaaatatgcccggaagttaaccttagaattgaggaagttgacttcctagccaaaccgatagtcctagactcgcaaagcttggacatcattctagggatggattggttggctaagcacaaaggacagatagattgtgccgaaaagtccatcaccttgcaaggacctggaggaaagcaagtccgctttacccctaacacccctaccgtaagtcggtctatcctaacctgtctacaagtcacctccttggagtcggtgcccatagtctgtgaatatcccgacgtattcccagaagaattaacgagtatgccaccggaccgagagattgagttcgccatagaactagcaccaggcacagctccaattgcaaaaagaccctaccgaatggcagctaatgagttagcagaagttaaaagacaaatcgaagagttggaaagtaagggttatgtgcgacccatctcatccccttggggagccccagtgcttctggttaagaaaaatgatggctctgagaggatggtaatcgactatagagccctgaatgaagtaactataaagaacaagtacccgttgccacggattgacgacttattcgatcaacttaaaggagcaagagtcttctcaaaaattgacttgaggtcaggttaccaccaactgaaaatcagatctgaagatatcccgaagaccgctttctcaacgcgttatggtctatatgagttcacagtaatgtccttcggactcaccaatgctccagcattcttcatgaacttaatgaacaaaatctttatggaatacctggaccagtttgtcgtagtattcatcgatgacatcctgatatactccaagaacgaggaggaacatgctgaacacctgaggctgataatggaaaagctcagagatcatcaactattcgcaaaattctcgaaatgcgaattctggttagaccgagtagcatttcttggacacgtgatctcctccaacggtgtcgaagtagatcccagcaaggttgaagctgtacttgcttggaacccgcccaagattgtgtcagagattcgcagcttccttggcttagcgggatattatcggagattcattgaaggattctctaagctagccagacctatgaccgagctgttaaagaaggaaaagaaatttcaatggtctgtagcctgtgaagacagctttcaagaaatgaagaaaaggttgaccactgccccagttctcaccttgccagatatccgaaaagatttcgagatcttctgtgatgcatcgagacaaggcataggatgtgtcctaatgcaagaacgaaaggttgtggcctatgcatccaggcagctcaggcctcatgaagccaattatcccacccatgatctcgagttggcagccgtggttcatgctcttaagatctggaggcattatttaatcgggaacagatgtgaagtatacaccgatcacaaaagtcttaagtatattttcacacagaccgagttaaatatgaggcagagaagatggttggaactaatcaaggattacgatcttggaatccactatcatcctggtaaagccaacgtagtcgctgatgcgctaagccgcaaggcctattgcaatgtagctcaaatacggcctgaccaagatcatctgtgcagagaattggagaagttaaggctgaccgtggtacagtcaggagtccctgccagcttgacagtacagcctaccctagaatcgcaaatccgggaggctcagaaagatgacgaagggataaaagagttaataaaaagaatacaggagaagaaagacaccaatttctccatagacgatcaaggcacagtttggtgcggtcaacgcatctgtgtaccgaccaagaaggagttaagagatctcatcctaaaggaagctcatgagtccgcttactccattcatccaggaagtacgaagatgtaccaggatatcaaggcatacttctggtgggctggaatgaagcgagacgtcgcagaatacgtagccctgtgtgacatttgccaaagagtcaaggcagaacatcagaggccagctggtctgctgcaacccctaccgattcccgagtggaaatgggaagagatcggaatggatttcatcaccggtttggcaagaacccccagcggatacgactccatttgggtaatcgtggaccgactcacgaaatcagctcatttcgtgccagtgaaaaccacctatgatggaaagaaactggcagaactctacatgactcatgtcgtatgtagatttggctgtcccaagaaaattgtgtcggaccgaggcactcagttcacctcaaggttctggaagcagttgcatgaagctctcggaactgatctgaattttagtacagcctaccatccgcagaccgatggtcagaccgaaaggacagcacaaagccgtcagaagaattacgctgacaatcgaaggcgtgaccttgagttcgaaaaaggagatcatgtgtacctgcgggtatcacccctccgtggtatgagaaggtttgggatgtccggcaagttagcaccccgctacatcggcccctacctcataaccgccagacgtggcgaagtgacttatcagcttgagctacctgaaggtctcgcagatgtgcacaacgtgttccacgtatcccagctaaagaaatgtcttcgagttccagaagagcaagtccccttgggtaacatcgagctggaaaagaatctgacctacaaggaaagaccgatcaaggttcttgaagaggcagaacgtcagactcgaaggaagaccatcaagttctacaaagtccaatggagcaatcattctgaagatgaggcaacctgggaacgagaagatcttctccgcgccgagtttccagagctgctcccttag

SEQ ID NO: 15499 - DNA, 3981 bp, Oryza sativa
  Clone ID: TFbOSC900174j.C1.o21.fg
gtcgactctagaggatccccgggtaccgagctcgaattcaacagacttaagcaaggcaacagcagtgtcaatgagtacctaagtatgttcaacaagttggctcggtacgcccctgaggaagtggacacagataagaagaagatcaggaaattcttgaaaggaatcgcggttggaatgagactccagttgcttgctcacgacttccccacttttcaacatatgatcaacaaggcacttctacttgaggatgccagaaaagaggctaccgaagaatacaagaaacgcaagtctaaccatcagggaaattcctcccgaggcgcacctcgccctcgctacggtcaacccatgcaataccaccagtcggtcactcaggctaaccgccagccaggctacgccccttgtcctcaaatgaaccgtccggcacctcagccacagcagcgtgcccctagtggcaatactgcgccaaacagtgttacctctttcaagtcaccgcaaggaccgtcagctgttcagtgtttccggtgcaaccagatgggccactatgccagacagtgccctcagaatcctaccaacaccagctcacggcatgctaatggcagcactgccagaactcctactccagcggcagctcagtctcgtcctagctctcaggcaagtggacaaggtacttgtgcttccaacaactttggtcgaggccgggtgaaccacattcaagctgagaccgctcaggatgctccagacgttgtgatgggtatgttctctgtcaactccgtacccgcaatagttctgtttgattcaggagcttcccattctttcatatcacaagcttttgtgaaaagaaatggttggaaaacccaaaatttacgtgtaccaatgatagtacattcccctgggaggaatataagggcaactcaaatatgcccggaagttaaccttagaattgaggaagttgacttcctagccaaaccgatagtcctagactcgcaaagcttggacatcatcctagggatggattggttggctaagcacaaaggacagatagattgtgccgaaaagtccatcaccttgcaaggacctggaggaaagcaagtccgttttacctctaacacccctaccgcaagtcggtctatcttaacctgtttacaagtcacctccttggagtcggtgcccgtagtctgtgaatatcccgacgtatttccagaagaattaacgagtatgccaccagaccgagagattgagttcgccatagaactggcaccaggcaccgcaccaattgcaaaaagaccctaccgaatggtagccaatgagctagcagaagttaaaagacaaatcgaagaattgaagagtaaaggttatgtgcgacctagctcatccccttggggagccccagtgcttctggttaagaagaaggatggctctgagagaatgataatcgactatagagccctgaatgaagtgactataaagaacaagtacccgttgccacggattgacgatttgttcgatcaacttaaaggagcaagagttttctcaaagattgacttaagatcaggttaccaccaattgaaaatcagatctgaagatatcccgaagactgctttctcaacgcgttatggtctatatgagttcacactggaccagtttgtcgtggtgttcatcgatgacatcctgatatactccaagaatgaggaagaacatgctgaacacctgaggctaataatggaaaagctcagggatcatcaactattcgctaaattctcgaaatgcgaattctggttagaccgagaagcattccttggacacgtgatctcctccaacggtgtcgatgtagatcccagcaaggttgaagctgtacttgcttggaacccgcccaagaacgtgttagagattcgcagcctccttggcttagctggatattatcgaagattcattgaaggattctctaagctagtcagacctatgaccgagctgttaaagaaggaaaagaagtttcactggtctgcagcctgtgaagacagctttcaagaaatgaagaaaaggttgaccactgccccagttctcaccttgccagatatccgaaaagatttcgagatcttctgtgatgcatcaagacaaggcttaggatgtgtcctaatgcaagaacgaaaggttgtggcctatgcattcaggcagctcaggcctcatgaagtcaactatcccacccatgatctcgagttggcagccgtgtttcatgctcttaagatctggaggcactatttaatcgggaacagatgtgaagtatacactgatcacaaaagtcttaagtatatcttcactcagaccaaattaaatatgaggcagagaagatggttggaactaatcaaggattacgatcttggaattcattaccaccccggtaaagctaatgtggtcgctgatgcgctaagtcgcaaggcctattgcaatgtagctcaaatacggcctgaccaagatcgcctgtgcagagaattggagaagttgaggctgaccgtggtacagtcaggtgtccctgccagcttgacagtacagcctaccctagagtcgcaaatccgggaagctcagaaagacgacgaagggataaaagagttaataaaaagaatacaggagaagaaagacaccaatttctccatagacgatcaaggcacagtttggtgcggtccacgcatctgtgtaccggccaagaaggaattaagagatctcatcctaaaggaagctcatgagtccgcctactccattcatccaggaagtacgaagatgtaccaagatatcaaggcatacttctggtggactggaatgaagcgagatgtcgcagaatacgtagccttgtgtgacatttgccaaagagtcaaggcagagcaccagaggccagctggtctgctacagcccctaccaattcccgagtggaaatgggaagaaatcggaatgtatttcatcaccggtttgccaagaacccctagcgggtacgactccatctgggtaatcgtggatcgactcacgaaatcggctcatttcgtgccagtgaaaaccatctttgatggaaagaaactagcagaactctacatgacccatgtcgtatgtagatttggctgtcccaagaagatcgtgtcagaccgaggcactcagttcacctcaaggttctggaaacagttgcatgaagctctcggaaccgatctaaattttagtacagcctaccatccgcagaccgatggtcagaccgaaagggtaaaccaaatcctagaagacatgctacgtgcgtgtgccctggatttcgaaggcacttgggatcgttgtttgccgtatgctgagttctcatacaacaacagttaccaggccagtattcagatgtcgccgaatgaggcaatgttcggaagaaagtgccgcacccccttgtgctggaatgaggtgggcgaagcgctggtattcggtcctgacatactcaaggcagcagaagaacaagttaagctgatccgagaacgtttaaagacagcgcagaaccgccaaaagaattacgctgacaatcggaggcgtgaccttgagttcgaaaaaggagatcatgtgtacctgcgggtatcacctctccgtggtatgaggaggtttgggatgtccggcaagttagcaccccgctacatcggcccctaccttataaccgccagacgtggcgaagtggcttaccagcttgagttacctgaaggtctcgcagatgtgcacaacgtgttccacgtatcccagttaaagaaatgtcttcgagttccagaagaacaagtccccctgggtaacatcgagctggaaaagaatctgacctacaaggaaagaccgatcaaggttcttgaagaggcagtacgtcagactcgaaggaagaccattaagttctacaaagtccaatggagcaaccactctgaagatgaggcaacctgggagcgagaagatcttctccgcgccgagttcccggagctgctcccttag

SEQ ID NO: 15500 - DNA, 5280 bp, Oryza sativa
  Clone ID: TFbOSC900225j.C1.o12.fg
atgtggtcgtacttgtcttatgtttggatgaaattccaaggaaatcggtccttaagtgcgagagcgggaaaccgtacacccgttatggcagtgaacgctagcttcagttcccacggttttggtgagggtcaccacgtcgcccagcttcgtgacctcgcccgtttccttggcttctcgtgtcccgagtacacggggtactccgtggaccgtgttccccctcactgtgagctctctgtgtacctttacccccgtggaggtatacacggggctggccacttcactgtggccaggcccaccctccagatcgcgtaccaggacctctcctggactgcgcttcgtcgcctggcccacgactacagccaccgtctcggaggctccgccttccggcagcttccacgtcttccttctgggcactcagacgccaggtacccttgtccgtacagcgagtctcagccagtgctgactcgcatggtcgagctttcggaggctcaggccactcagcacgacctactccttgaggcttaccgctcccttgcccgccgctacgccgccttggaggcccgtctggccgaggagggtgtcacctcagttgacactatctcttgggactcaggccgtctctgccacgccagccacctgtcctcccacagctcccgcggctctgctcgcactcccagtggcccacgctcccccagctcgcgtgcgccgtactcaccagtgtactccccctacccacacccagttagcccttcctacacccccggacacactccagtcgcttcctcccgccgtggcccacgttttatccgcactgcgcggaagcgtgttgttggttcttccaccgtgttccgtttctgccacccagctcccccaccgccagcggcccgtgctgctgccggccctcgacagacacaaatcttacaaggtctaaccacagccatagccagctttcagcataatgcgcatggaaatggccaccctcacgtgggcaacaatagatccaagctgacagactttctgaggtcacgtccaccaaagttctctcagaccgtcgagcccgtcgaggctgacgattggttgaaagatgttgatagaaaactcaacttagtgcagtgtactcctgttgagaagacgctctacgcctctcaccagctaagaggacctgccgcagattggtgggagaattactgcaatgcacaccctgaacccactaacattgcttgggatgagttcgctacggctttccgtgcagctcatgtgcctgaaagcactattgacatgaagaaagaagaatttaacagacttaagcaaggccacagcagtgtcaatgagtacctaagtcagttcaacaagttggctcggtacgcccctgaggaagtagacaccgataagaaaaagatcaggaaattcttgaaaggaatcgcagttggaatgagactccagttgcttgctcatgacttccccacttttcaacatatgatcaacaaagcacttctacttgaggatgccagaaaagaggccaccgaaaaatacaagaaacgcaagtctaaccatcagggaaattcttcccgaggcgcacctcgccctcgctacggtcaacccatgcaataccatcagtcgctcactcaggctaaccgccagccaggctacgcccctcgtcctcagataaaccgtccggcacctcagccacagaagcatgcccctagtggcaacactgcgccaaacagtgttacctccttcaagtcaccacagggaccgtcagcagttcagtgtttccggtgcaaccagatgggtcactatgctagacagtgtcctcagaatcctaccaacaccaactcagggcatgctaatggcagcaccgccagaactcctactccagcggcagctcagtctcgtcctagctctcaggcaagtggacaaggttctcgtgcttccaaccactttggtcgaggacgtgtgaatcacattcaagctgaaaccgctcaggatgctccagacgttgtgatgggtatgttctctgtcaactccgtacccgcaatagttctgtttgattcgggagcttcccattctttcatatcgcaagcttttgtgaaaagaaatggttggaaaacccaaaatttgcgtgtaccaatgatagtacattcccctggaaagaatataggggcaactcaaatatgcccggaagttaaccttagaattgaggaagttgacttcctagccaaaccgatagtcctagactcgcaaagcttgaacatcatccttgggatggattggttggctaagcacaaaggacagatagattgtgccgaaaagtccatcaccttgcaaggacctggaggaaagcaagtccgctttacccctaacacccctaccgcaagtcggtctatcctaacctgtttgcaagtcacctccttggagtcggtgcccatagtctgtgaatatcccgacgtatttccggaagaattaacaagaatgccaccagaccgagagatcgagttcgccatagaactggcaccaggcacagctccaattgcaaaaagaccctaccgaatggccgctaatgagttagcagaagttaaaagacaaatcgaagaactggaaagtaaaggagccccagtgcttctggttaagaaaaaggatggctctgagagaatggtaattgactatagagccctgaatgaagtaactataaagaacaagtacccgttgcctcggattgacgacttattcgatcaacttaaaggagcaagagtcttctcaaaaattgacttgaggtcaggttaccaccaactgaaaatcagatctgaagatattccgaagaccgctttctcgatgcgttatggtctatatgagttcacagtaatgtccttcggactcaccaatgctccagcattcttcatgaacttaatgaacaaaatctttatggaatacctggaccagtttgtcgtggtattcatcgatgacatcctgatatactctaagaacgaggaagaacatgctgaacacctgaggctgataatggaaaagctcagagatcatcaactattcgctaaattctcgaaatgcgaattctggttggaccgagtagcatttcttggacacgtgatctcctccaacggtgacgaagtagatcccagcaaggttgaagctgtacttgcttggaacccgcccaagaatgtgtcagtgattcgcagcttcctcggcttagctagatattatcgaagattcattgaaggattctctaagctagccagacctatgaccgagctgttaaagaaggaaaagaaatttcaatggtctacagcctgtgaagacagctttcaagaaatgaagaaaagattgaccactgccccagttctcaccttgccagatatccgaaaagatttcgagatcttctgtgacgcatcaagacagggcttaggatgtgtcctaatgcaagaacgaaaggttgtggcctatgcatccaggcagctcaggcctcatgaagtcaattatcccacccatgatctcgagttggcagccgtgattcatgctcttaagatctggaggcactacttaataggaaacagatgtgaagtatacaccgatcacaaaagtcttaaatatatcttcacacagaccgagttaaatatgaggcagagaagatggttggaactaatcaaggattacgatcttggaatccactatcatcctggtaaagccaacgtggtcgctgatgcgctaagtcgcaaggcctattgcaatgtagctcaaatacggcctgaccaagatcatctgtgcagagaattggagaagttaaggctgaccgtggtacagtcaggagtcccagccagcttgacagtacagcctaccctagagtcgcaaatccgggaggctcagaaagatgacgaagggataaaagagttaataaaaagaatacaggagaagaaagacaccaatttctccatagacgatcaaggcacagtttggtgcggttcacgcatctgtgtaccggccaagaaggagttaagagatctcatcctaaaggaagctcatgagtccgcttactccattcatccaggaagtacgaagatgtaccaggatatcaaggcatacttttggtgggctggaatgaagcgagatgtcgctgaatacgtagccttgtgtgacatttgccaaagagtcaaggcagagcatcagaggccagctggtctgctgcaacccctaccgattcccgagtggaaatgggaagagatcggaatggatttcatcaccggtttgccaagaacccccagcgggtacgactccatttgggtaatcgtggaccgactcacgaaatcagctcatttcgtgccagtgaaaaccacctatgatggaaagaaactggcagaactctacatgacccatgtcgtatgtagatttggctgccccaagaaaattgtgtcagaccgaggcactcagttcacctcaaggttctggaagcagttgcatgaagccctcgggactgatctaaactttagtacagcctaccatccgcagaccgatggtcagacagaaagggtaaaccaaatcctagaagacatgctgcgtgcgtgtgccttggatttcgaaggcacttgggatcgttgtttgccgtatgccgagttctcttacaacaacagttatcaggccagcattcagatgtcaccgaatgaggcaatgttcggaagaaagtgccgtacccccttgtgctggaacgaggtgggcgaagccctggtattcggtcctgacatactcaagtcagcagaagaacaagttaagctaatccgagaacgattaaagacagcgcaggaccgtcagaagaattacgctgacaatcggaggcgtgaccttgagttcgaaaaaggagatcatgtatacctgcgggtatcacccctccgtggtatgagaaggtttgggatgtccggcaagttagcaccccgctacatcggcccctacctcataaccgccagacgtggcgaagtggcttatcagcttgagctacctgaaggtctcgcagatgtgcacaacgtgttccacgtatcccagttaaagaaatgtcttcgagttccagaagagcaagttcccctgggtaatatcgagctggaaaagaatctgacctacaaggaaagaccgatcaaggttcttgaagaagcagaacgtcagactcgaaggaagacaatcaagttctacaaagtccaatggagcaatcattctgaagatgaagcaacctgggaacgagaagatcttctccgcgccaagtttccggagctgctcccttag

SEQ ID NO: 15501 - DNA, 4890 bp, Oryza sativa
  Clone ID: TFbOSC900240j.C1.o1.fg
atggtcgagctttcggaggctcaggccactcagcacgacctactccttgaggcttaccgctcccttgcccgccgctacgccgctttggaggcctgtctagccgaggagggtgtcacctcagttgacactatctcttgggactcaggccgcctctgccacgccagccacctgtcctcccacagctcccgcggctctgccctcactcccagtggcccgcgctcccccagctcgcgtgcgccgtactcaccagtgtactccccctacccacacccagttagcccttcctacacccccggacacaccccagttgcttcctcccgccgtggcccacgctttatccgcaccgcgcggaagcgtgttgttggttcttccaacgtgttccgtttccactacccagctcccccaccgccagcggcccgtgctgctgctggccctcgacagatggctagccgtccccgccgtgcagctcgtgcaccagcccgctttggttttgaggatggtagagttgagccagaagaaaatcatgaatcagctaatgagcagtctcaccacagcaaccgttcgcatcgtactgtttcccgcaacgcagaggttgagcaaccccgccacagcagccgctcgcatcgcacagtttcccgtgatgcagagatggaacagtctcaccgctctcaccgcactgccagtcacaattctggagaagaacgcctcccttccccacctcatgtggaaaccaacatgcaacacttaatggcagttcagacacaaatcttgcaaggactaaccacagccatagccagttttcagcataatgcgcatggaaatggccaccctcacatgggcaacaacagatccaagctgacagactttctgaggtctcgtccgccagagttctctcagaccgtcgagcccgtcgaggctgacgattggttgaaagatgttgatagaaaactcaacttagtgcagtgtactcctgttgagaagacgctctacgcctctcaccaactaagaggacctgccgcagattggtgggagaattactgcaatgcacaccctgaacccactaacattgcttgggatgagttcgctacggctttccgtgcagctcatgtgcctgaaagcactattgacatgaagaaagaagaattcaacagacttaagcaaggcaacagcagtgtcaatgagtacctaagtcagttcaacaagttggctcggtacgcccctgaggaagtagacacagataagaagaagatcaggaaattcttgaaaggaatcgcagttggaatgagactccagttgcttgctcatgacttccccacttttcaacatatgatcaacaaggcacttctacttgaggatgccagaaaagaggctaccgaagaatacaagaaacgcaagtctaaccatcagggaaattcttcccgaggcgcacctcgccctcgctacggtcaacccatgcaataccaccagtcggtcacccaggctaaccgccagccaggctacgcccctcgtcctcagataaaccgtccggcacctcagccacagcagcgtgcccctagtagcgatactgcgcctaacagtgttacctctttcaagtcaccgcagggaccgtcagcagttcagtgtttccggtgcaaccagatgggtcactatgctagacagtgtcctcagaatcctaccaacaccaactcagggcatgctaatggtagcactgccagaactcctactctagcggcagctcagtctcgtcctagctctcaggcaagtggacaaggttcacgtgcttccaacaactttggtcgaggccgtgtgaatcacattcaagcagaaaccactcaggatgctccagacgttgtgatgggtatgttctctgtcaactccgtacccgcaatagttctgttcgattcgggagcttcccattctttcatatcgcaagcttttgtgaaaagaaatggttggaaaacccaaaatttgcgtgtaccaatgatagtacattcccctggaaggaatataagggcaactcaaatatgcccggaagttaaccttagaattgaggaagttgacttcctagccaaaccgatagtcctagactcgcaaagcttggacatcattctagggatggattggttggctaagcacaaaggacagatagattgtgccgaaaagtccatcaccttgcaaggacctggaggaaagcaagtccgctttacccctaacacccctaccgcaagtcggtctatcctaacctgtttacaagtcacctccttggagtcggtgcccatagtctatgaatatcccgacaaaaaggatggctcagagagaatggtaatcgactatagagccctgaatgaagtaactataaagaacaagtacccgttgccacggattgacgatttattcgatcaacttaaaggagcaagagttttctcaaaaattgacttgaggtcaggttaccaccaactgaaaatcagatctgaagatatcccgaagaccgctttctcaacgcgttatggtctatatgagttcacagttatgtccttcggactcaccaatgctccagcattcttcatgaacttaatgaacaaaatcttcatggaatacctagaccagtttgtcatggtgttcatcgatgacatcctgatatactccaagaacaaggaagaacatgctgaacacctgaggctgataatggaaaagctcagagatcatcaactattcgctaaattctcgaaatgcgaattctggttggaccgagtagcatttcttggacacgtgatttcctccaacggtgtcgaagtagatcccaacaaggttgaagctgtacttgcttggaacccgcccaagaacgtgtcagagatccgcagcttccttggcttagctggatattatcgaagattcattgaaggattctctaagctagccagacctatgaccgagctgttaaagaaggaaaagaaatttcaatggtctgcagcctgtgaagacagcttccaagaattgaagaaaaggttgaccactgccccagttctcaccttgccagatatccgaaaagatttcgagatcttctgtgacgcatcaagacaaggcttaggatgtgtcctaatgcaagaacaaaaggttgtggcctatgcatccaggcagctcaggcctcatgaagccaattatcccacccatgatctcgagttggcagctgtggttcatgctcttaagatctggaggcactatttaatcgggaacagatgtgaagtatacaccgatcacaaaagtcttaagtatatcttcactcagaccgagttaaatatgagacagagaagatggttggaactaatcaaggattacgatcttggaatccactatcatcctggtaaagccaacgtggtcgctgatgcgctaagtcgcaaggcctattgcaatgtagctcaaatacggcctgaccaagatcacctgtgcagagaattggagaagttaagactgaccgtggtacagtcaggtgtccctgccagcttgacaatacagcctaccctggagtcgcaaatccgggaggctcagaaagacgacgaagggataaaagaattaataaaaagaatacaggagaagaaagacacaaatttctccatagacgatcaaggcacagtttggtgcggaccacgcatctgtgtaccggccaagaaggagttaagagatctcatcctaaaggaagctcatgagtccgcctactccattcacccaggaagtacgaagatgtaccaagatatcaaggcatacttctggtgggctggaatgaagcgagatgtcgcagaatacgtagccctgtgtgacatttgccaaagagtcaaggcggaacatcagaggccagctggtctgctgcaacccctaccgattcccgagtggaaatgggaagagatcggaatggatttcatcaccggtttgccaagaacccccaacgggtacgactccatttgggtaatcgtggaccgactcacgaaatcagctcatttcgtgccagtgaaaacctcctatgatggaaagaaactagcagaactctacatgacccatgtcgtatgtagatttggctgtcccaagaaaattgtgtcagaccgaggcactcagttcacctcaaggttctggaagcagttgcatgaagccctcggaactgatctgaattttagtacagcctaccatccgcagaccgatggtcagaccgaaagggtaaaccaaatcctagaagacatgctacgtgcgtgtgccttggatttcgaaggcacttgggatcgttgtttgccgtatgccgagttctcatacaacaacagttatcaggccagcattcagatgtcgccgaatgaggcaatgttcggaagaaagtgccgcacccccttgtgctggaatgaggtgggcaaagcactgcacagaaccgtcagaagaattacgctgacaatcggaggcgtgaccttgagttcgaaaaaggagatcatgtgtggagatcatgtgtacctgcgggtatcacccctccgtggtatgagaaggtttgggatgtccggcaagttagcaccccgctacatcggcccctacctcataaccgccagacgtggcgaagtggcttatcagcttgagctacctgaaggtctcgcagacgtgcacaacgtgttccacgtatcccagttaaagaaatgtcttcgagttccagaagagcaagttcccctgggtaatatcgagctggaaaagaatctgacctacaaggaaagaccgatcaaggttcttgaagaggcagaacgtcagactcgaaggaagaccatcaagttctacaaagtccaatggagcaatcattccgaagacgaggcaacctgggagcgagaagatcttctccgcgccgagttcccggacctgctcccttag

SEQ ID NO: 15502 - DNA, 5475 bp, Oryza sativa
  Clone ID: TFbOSC900246j.C1.o23.fg
atgaaccggatcctgcagatgaggagttcttccaggagcaagccagctacgatggcagtgaacgccagcttcagttcccacggttttggtgagggtcaccacatcgctcagcttcgtgacctcgcccgtttccttggcttctcgtgtcccgagtacacggggtactccgtggaccgtgttccccctcgctgtgagctctctgtgtacctttaccctcgtggaggtatacacggagctggccttcgcccacaccacttcaccgtggccaggccccctctccagatcgagtaccaggacctctcctggactgcgcttcgtcgcctggcccacgactacagccaccgtctcgggggctccgccttccggcagcttccacgccttccttctggccacgtagtcgccaggtacccttgtccgtacagcgagtctcagccagtgctgactcgcatggttgagctttcggaggctcaggccactcagcacgacctactccttgaggcttaccgctcccttgcccgccgctacgccgctttggaggcccgtctggccgaggagggtgtcacctcagttgacactgtctcctgggactcaggccgcctctgccacgccatccacctgtcctcccatagctcccgcggctctgcccgcactcccagtggcccgctctcccccagctcgcgtgcgccgtactcaccagtgtactccccctacccaaacccagttagcccttcctacacccccggacacaccccagttgcttcgtcccgccgtggcccacgctttatccgcactgcgcggaagcgtgttgttggttcttccaccgtgttccgtttcgactacccagctcccccaccgccagtggcccttgctgctgtcggccctcgacagatggctagccgcccccgccgtgcagctcgtgcaccagcccgcttcgtttttgaggaaggtagagttgagccagaagaaaatcatgagtcagctaatgagcggtctcaccacagcaaccgttcgcaccgtactgcttcccgcaacgcagaagttgagcaaccccgccgcatcaaccgctcgcatcgcacagcttcccgtaatgcagagatggaacagtcccaccgctctcaccgcactgccagtcacaattctggagaagaacgcctcccttccccacctcatgtggaaaacaacatgcagcacttaatggcagttcagacacaaatcttgcaaggattagccgcagccgtagccggttttcagcataatgcgcatggaaatggccaccctcacatgagcaacaatagatccaagctgacagattttctgaggtctcgtccgccagaattctctcagaccatcgagcctgtcgaggctgacgattggctgaaagatgttgatagaaaactcaacttagtgcagtgtactccggtagagaagacgctctacacctctcaccagctaagaggacctgctgcagattggtgggagaattactgcaatgcacaccctgaacccactaacattgcttgggatgagtttgctacggctttccgtgcagctcatgtgcctgaaagcactattgacatgaagaaagaggaattcaacagacttaagcaaggcaacagcagtgtcaatgagtacctaagcatgttcaacaagttggctcggtacgcccctgaggaagtggacacagacaagaagaagatcaggaaattcttgaaagggatcgcagttggaatgagactccagttgcttgctcatgacttccccacttttcaacatatgatcaacaaggcacttctacttgaggatgccagaaaagaggctaccgaagaatacaagaaacgcaagtctaaccatcagggaaattcttcccgaggcgcacctcgccctcgctacggtcaacccatgcaataccaccagtcggtcactcaggctaaccgccagccaggctacgcccctcgtcctcagatgaaccgtccggcacctcagccacagcagcgtgcccctagtggcaatactgcgccaaacagtgttacctctttcaagtcaccgcagggaccgtcagcagttcagtgtttccggtgtaaccagatgggtcactatgccagacagtgccctcagaatcctaccaacaccagctcagggcatgctaatggcagcactgccagaactcctactccagcggcagctcagtctcgtcctagctctcaggcaagtggacaaggttctcgtgcttccaacaactttggtcgaggccggatgaaccacattcaagctgaaaccgctcaggatgctccagacgttgtgatgggtatgttctctgtcaactccgtacccgcaatagttctgtttgattcgggagcttcccattctttcatatcacaagcttttgtgaaaagaaatggttggaaaacccaaaatttacgtgtaccaatgatagtacattcccctaggagcaatataagggcaactcaaatatgcccggaagttaaccttagaattgaggaagttgacttcctagccaaaccgatagtcctagactcgcaaagcttggacatcatcctagggatggattggttggctaagcacaagggacagatagattgtgccgaaaagtccatcaccttgcaaggacctggaggaaagcaagcccgctttacctctaacacccctaccgcaagtcggtctatcctaacctgtttacaagtcacctccttggagtcggtgcccatagtctgtgaatatcccgacgttgagttcgccatagaactggcgccaagcaccgcaccaattgcaaaaagaccctaccgaatggcagctaatgagttagcagaagttaaaagacaaatcgaagaattggagagtaaaggttatgtgcgacctagctcatctccttggggagccccagtgcttctggttaagaaaaaggatggctctgagagaatggtaatcgactatagagccctgaatgaagtaactataaagaacaagtacccgttgccacggattgacgatttgttcgatcaacttaaaggagcaagagttttctcaaagattgacttgagatcaggttaccaccaattgaaaatcagatctgaagatatcccgaagaccgctttctcaacgcgttatggtctatatgagttcacagtgatgtccttcggactcaccaatgctccagcattcttcatgaacttaatgaacaaaatctttatggaatacctggaccagtttgtcgtggtgttcattgatgacatcctgatatactccaagaatgaggaagaacatgctgaacacatgaggctgataatggaaaagctcagagatcatcgactattcgctaaattctcgaaatgcgaattctggttagaccgagtagcatttcttggacacgtgatctcctccaacggtgtcgaagtagatcccagcaaggttgaagctgtacttgcttggaacccgcccaagaatgtgtcagagattcgcagcttccttggcttagctggatattatcgaagattcattgaaggattctctaaactagccagacccatgaccgagctgttaaagaaggaaaagaaatttcaatggtctgcagcctgtgaagacagctttcaagaaatgaagaaaaggttgaccactgccccagttctcaccttgccagatatccgaaagcatttcgagatcttctgtgatgcatcaagacaaggcttaggatgtgtcctaatgcaagaacgaaaggttgtggcttatgcatccaggcagctcaggcctcatgaagtcaattatcccacccatgatctcgagttggcagctgtggttcatgctcttaagatctggaggcactatttaatcgggaacagatgtgaagattacgatcttggaattcattatcaccccagtaaagctaacgtggtcgctgatgcgctaagtcgcaaagtctattgcaacgtagctcaaatatggcctgaccaagatcgcctgtgcagagaattggagaagttgaggctgaccgtggtacagtcaggtgtccctgccagcttgacagtacagcctaccctagagtcgcaaatccgggaagctcagaaagacgacgaagggataaaggagttaataaaaagaatacaagagaagaaagacaccgatttctccatagacgaccaaggcacagtttggtgcggtccatgcatctgtgtaccggccaaaaaggagttaagagatctcatcctaaaagaagctcatgagtccgcctactccattcatccaggaagtacgaagatgtaccaagatatcaaggcatacttctggtgggctggaatgaagcgagatgtcgcagaatacgtagccttgtgtgacatttgccaaagagtcaaggcagaacatcagaggccagctggtctgctgcaacccctaccgattcccgagtggaaatgggaagagatcggaatggatttcatcaccggtttgccaagaacccctggcgggtacgactccatttgggtaatcgtggaccgactcacgaaatcagctcatttcgtgccagtgaaaaccacctttgatggaaagaaactagcagaactctacatgacccatgtcgtatgtagatttggctgtcccaagaagattgtgtcagaccgaggcactcagttcacctcaaggttctggaagcagttgcatgaagccctcggaaccgatctaaattttagtacggcctaccatccgcagaccgatggtcagacagaaagggtaaaccaaatcctagaagacatgctacgtgcgtgtgccctggatttcgaaggcacttgggatcattgtttgccgtatgctgagttctcatacaacaacagttatcaggccagcattcagatgtcgccgaatgaggcaatgttcggaagaaagtgccgcactcccttgtgctggaatgaggtgggcgaagcgctggtattcggtcctgacatactcaagtcagcagaagaacaagttaagctaatccgagaacgcttaaagacagcgcagaaccgtcagaaaaattacgctgacaatcggaggcgtgaccttgagttcgaaaaaggagatcatgtgtacctgcgggtatcacccctccgtggtatgaggtttgggatgtccggcaagttagcaccccgctacatcggcccctacctcgtaaccgccagacgtggcgaagtggcttatcaacttgagttacctgaaggtctcgcagatgtgcacaacgtattccacgtatcccagttaaagaaatgtcttcgagttctagaagaacaagttcccctgggtaatatcgagctggaaaagaatctgacctacaaggaaagaccgatcaaggttcttgaagaggcagaacgtcagactcgaaggaagaccgtcaagttctacaaggtccaatggagcaatcattctgaagatgaggcaacctgggagcgagaagatcttctccgcgccgagttcccggagctgctcccttag

SEQ ID NO: 15503 - DNA, 5379 bp, Oryza sativa
  Clone ID: TFbOSC900308j.C1.o18.fg
atgatggcagtgaacgccagcttcagttcccacggttttggtgagggtcaccacgtcgcccagcttcgtgacctcgcccgtttccttggcttctcatgtcccgagtacacggggtactccgtggaccgtgttccccctcactgtgagctctcggtgtacctttacccccgtggaggtatacacggagctggcctttgcccccaccacttcactgtggccaggcccactctccagatcgcgtaccaggacctctcctggactgcgcttcgtcgcctggcccacgactacagccaccgtctcggaggttccgccttccggcagcttccacaccttccctctggccactcagacgccaggtacccttgtccgtacagcgagtctcagccagtgctgactcgcatggtcgagctttcggaggctcaggccactcagcacgacctactccttgaggcttaccgctcccttgcccgccgctacgccgctttggaggcccgtctggccgaggagggtgtcacctcagttgacactatctcttgggactcaggccgcctctgccacgccagccacctgtcctcccacagctcccgcggctctgcccgcactcccagtggcccgcgctcccccagctcgcgtgcgccgtactcaccagtgtactccccctacccacacccagttagcccttcctacacccccggacacaccccagttgcttcctcccgccgtggcccacgctttatccgcaccgcgcggaagcgtgttgttggttcttccaccgtgttccgtttccactacccagctcccccaccgccagcggcccgtgctgctgccggccctcgacagatggctagccgtccccgccgtgcagctcgtgcaccagcccgctttggttttgaggatggtagagttgagccagaagaaaatcatgaatcagctaatgagcagtctcaccacagcaaccgttcgcatcgtactgtttcccgcaacacagaggttgagcaaccccgccgcagcagccgctcgcatcgcacagtttcccgtgatgcagagatggaacagtctcaccgctctcaccgcactgccagtcacaattctggagaagaacgcctcccttccccacctcatgtggaaaccaacatgcaacacttaatggcagttcagacacaaatcttgcaaggactaaccacagccatagccagttttcagcataatgcgcatggaaatggccatcctcacatgggcaacaacagatccaagctgacagactttctgaggtctcgtccgccagagttctctcagaccgtcgagcccgtcgaggctgacgattggttgaaagatgttgatagaaaactcaacttagtgcagtgtactcctgttgagaagatgctctacgcctttcaccaactaagaggacctgccgcagattggtgggagaattactgcaatgcacaccctgaacccactaacattgcttgggatgagttcgctacggctttccgtgcagctcatgtgcctgaaagcactattgacatgaagaaagaagaattcaacagacttaagcaaggcaacagcagtgtcaatgagtacctaagtcagttcaacaagttggctcggtacgcccctgaggaagtagacacagataagaagaagatcaggaaattcttgaagggaatcgcagttggaatgagactccagttgcttgctcatgacttccccacttttcaacatatgatcaacaaggcacttctgcttgaggatgccagaaaagaggctaccgaagaatacaagaaacgcaagtctaaccatcagggaaattcttcccgaggcacacctcgccctcgctatggtcaacccatgcaataccaccagtcggtcacccaggctaaccgccagccaggctacacccctcgccctcagatgaaccgtccggcacctccgccacagcagtgtgcccctagtggcaacactgcgccaaacagtgttacctctttcaagtcaccacagggaccgtcagcagttcagtgtttccggtgcaaccagatgggtcactatgctagacagtgccctcagaatcctaccaacaccaactcagggcatgctaatggcagcaccgccagaactcctactccagcggcagctcagtctcgtcctagctctcaggcaagtagacaaggttctcgtgcttccaaccactttggtcgaggccgtgtgaatcacattcaagctgaaaccgctcaggatgctccagacgctgtgatgggtatgttctctgtcgactccgtacccgcaatagttctgttcgattcgggagcttcccattctttcatatcgcaagcttttgtgaaaagaaatggttggaaaacccaaaaattgcgtgtaccaatgatagtacattcccctgggaggaatataagggcaactcaaatatgcccggaagttaaccttagaattgaggaagttgacttcctagccaaaccgatagtcctagactcgcaaagcttggacatcattctagggatggattggttggctaagcacaaaggacagatagattgtgccgaaaagtccatcaccttgcaaggacctgcaggaaagcaagtccgctttacccctaacacccctaccgcaagtcggtctatcctaacctgtttacaagtcacctccttggagtcggtgcccatagtctatgaatatcccgacgtatttctggaagaattaacaagaatgccaccagaccgagagatcgagttcgccatagaactggcaccaggcacagctccaattgcaaaaagaccctaccgaatggcagctaatgagttagcagaagttaaaagacaaatcgaagagttggagagtaaaggttatgtgcgacctagctcatccccttggggagccccagtacttctggttaagaaaaaggatggctctgagagaatggtaatcgactatagagccctgaatgaagtaactataaagaacaagtacccgttgccacggattgacgatttattcgatcaacttaaaggagcaagagtcttctcaaaaattgacttgaggtcaggttaccatcaactgaaaatcagatctgaagatattccgaagaccgctttctcaacgcgttatggtctatatgagttcacagttatgtccttcggactcaccaatgctccagcattcttcatgaacttaatgagcaaaatcttcatggaatacctggaccagtttgtcgtggtattcatcgatgacattctgatatactctaagaacgaggaagaacatgctgaacacctgaggttgataatggaaaagctcagggaccatcaactattcgcaaaattctcgaaatgcgaattctggttagaccgagtagcatttcttggacacgtgatctcccccaacggtgttgaagtagatcccagcaaggttgaagctgtacttgcttggaacccgcccaagaatgtgtcagagattcgcagtttccttggcttagctggatattatcgaagattcattgaaggattctctaagctagccagacctatgaccgagctgttaaagaaggaaaagaaatttcaatggtctgcagcctgtgaagacagctttcaagaaatgaagaaaaggttgaccactgccccagttctcaccttgccagatatccgaaaagatttcgagatcttctgtgatgcatcaagacaaggcttaggatgtgtcgtaatgcaggaacgaaaggttgtggcctatgcatccaggcagctcaggcctcatgaagtcaattatcccacccatgatcttgagttggcagccgtggttcatgctcttaagatctggaggcattatttaatcgggaacagatgtgaagtatacaccgatcacaaaagtcttaagtatattttcacacagaccgagttaaatatgagacagagaagatggttggaactaattaaggattacgatcttggaatccactatcatcctggtaaagccaacgtggtcgctgatgcgctaagtcgcaaggcctattgcaatgtagctcaaatacggcctgaccaagatcacttgtgcagagaattagagaagttaaggctgaccgtggtacagtcaggtgtccctgccagcttgacagtacagcctaccctagagtcgcaaatccgggaagctcagaaagacgacgaagggataaaagagttgataaaaagaatacaggagaagaaagacaccaatttctccatagacgatcaaggcacagtttggtgcggtccacgcatctgtgtaccggccaagaaggagttaagagatctcatcctaaaggaagctcatgagtccgcctactccattcacccaggaagtacgaagatgtaccaagatatcaaggcatacttctggtgggccggaatgaagcgagatgtcgcggaatacgtagccttgtgtgacatttgccaaagagtcaaggcagagcatcagaggccagctggtctgctgcaacccctaccgattcccgagtggaaatgggaagagatcggaatggatttcatcaccggtttgccaagaacccccaacgggtacgactccatttgggtaatcgtggaccgactcacgaaatcagctcatttcgtgccagtgaaaaccacctatgatggaaagaaactagcagaactctacatgacccatgtcgtatgtagatttggctgtcccaagaaaattgtgtcagatcgaggcactcagttcacctcaaggttctggaagcagttgcatgaagctctcggaactgatctaaattttagtacggcctaccatccgcagaccgatggtcagacagaaagggtgggcgaagcgctgatattcggtcctgacatactcaagtcagcagaagtacaagttaagctgatacgagaacgtttgaagacagcacagaaccgtcagaagaattacgctgacaatcgaaggcatgaccttgagttcgaaaaaggagatcatgtatacctgcgggtatcacccctccgtggtatgaggaggtttgggatgtccggcaagttagcaccccgctacatcggcccctacctcataaccgccagacgtggcgaagtggcttatcagcttgagttacctgaaggtctcgcagatgtgcacaacgtgttccacgtatcccagctaaagaaatgtcttcgagttccagaagagcaagtccccctgggtaatatcgagctggaaaagaatctgacgtacaaggaaagaccgatcaaggttcttgaagaggcaaaacgtcagactcgaaggaagaccatcaagttctacaaggtccaatggagcaatcattctgaagatgaggcaacctgggagcgagaagatcttctccgcgccgagttcccggagctgctcccttag

SEQ ID NO: 15504 - DNA, 4797 bp, Oryza sativa
  Clone ID: TFbOSC900308j.C1.o26.fg
atggcggccaactcgatccgtgcacaggaacttgcctgggtggttgagctgtccatgatggctaactcggtgcagtacatggctagccgtccccgccgtgcagctcgtgcaccagcccgctttggttttgaggatggtagagttgagccagaagaaaatcatgaatcagctaatgagcagtctcaccacagcaaccgttcgcatcgtactgtttcccgcaacgcagaggttgagcaaccccgccgcagcagccgctcgcatcgcacagtttcccgtgatgcagagatggaacagtctcaccgctctcaccgcactgccagtcacaattctggagaagaacgcctcccttccccacctcatgtggaaaccaacatgcaacacttaatggcagttcagacacaaatcttgcaaggactaaccacagccatagccagttttcagcataatgcgcatggaaatggccaccctcacatgggcaacaacagatccaagctgacagactttttgaggtctcgtccgctagagttctctcagaccgtcgagcccgtcgaggctgacgattggttgaaagatgttgatagaaaactcaacttagtgcagtgtactcctgttgagaagacgctctacgcctctcaccaactaagaggacctaccgcagattggtgggagaattactgcaatgcacaccctgaacccactaacattgcttgggatgagttcgctacggctttccgtgcagctcatgtgcctgaaagcactattgacatgaagaaagaagaattcaacagacttaagcaaggcaacagcagtgtcaatgagtacctaagtcagttcaacaagttggctcggtacgcccctgaggaagtagacacagataagaagaagatcaggaaattcttgaaagaaatcgcagttggaatgagactccagttgcttgctcatgacttccccacttttcaacatatgatcaacaaggcacttctacttgaggatgccagaaaagaggctaccgaagaatacaagaaacgcaagtctaaccatcagggaaattcttcccgaggcgcacctcgccctcgctacggtcaacccatgcaataccaccagtcggtcacccaggctaaccgccagccaggctacgcccctcgtcctcagataaaccgtccggcacctcagccacagcagcgtgcccctagtagcgatactgcgcctaacagtgttacctctttcaagtcaccgcagggaccgtcagcagttcagtgtttccggtgcaaccagatgggtcactatgctagacagtgtcctcagaatcctaccaacaccaactcagggcatgctaatggtagcacttccagaactcctactccagcggcagctcagtctcgtcctagctctcaggcaagtggacaaggttcacgtgcttccaacaactttggtcgaggccgtgtgaatcacattcaagcagaaaccgctcaggatgctccagacgttgtgatgggtatgttctctgtcaactccgtacccgcaatagttctgttcgattcgggagcttcccattctttcatatcgcaagcttttgtgaaaagaaatggttggaaaacccaaaatttgcgtgtaccaatgatagtacattcccctggaagcaatataagggcaactcaaatatgcccggaagttaaccttagaattgaggaagttgacttcctagccaaaccgatagtcctagactcgcaaagcttggacatcattctagggatggattggttggctaagcacaaaggacagatagattgtgccgaaaagtccatcaccttgcaaggacctggaggaaagcaagtccgctttacccctaacacccctaccgcaagtcggtctatcctaacctgtttacaagtcacctccttggagtcggtgcccatagtctgtgaatatcccgacgtatttccggaagaattaacaagaatgccaccagaccaagagatcgagttcgccatagaactggcaccaggcacagctccaattgcaaaaagaccctaccgaatggcagctaatgagttagcagaagttaaaagacaaatcgaagaactggaaagtaaaggttatgtgcgacctagctcatccccttggggagccccagtgcttctggttaagaaaaaggatggctcggagagaatggtaatcgactatagagccctgaatgaagtaactataaagaacaagtacccgttgccacggattgacgatttattcgatcaacttaaaggagcaagagttttctcaaaaattgacttgaggtcaggttaccaccaactgaaaatcagatctgaagatatcccgaagaccgctttctcaacgcgttatggtctatatgagttcacagttatgtccttcggactcaccaatgctccagcattcttcatgaacttaatgaacaaaatctttatggaatacctagaccagtttgtcgtggtgttcatcgatgacatcctgatatactccaagaacgaggaagaacatgctgaacacctgaggctgataatggaaaagctcagagatcatcgactattcgctaaattctcgaaatgcgaattctggttggaccgagtagcatttcttggacacatgatttcctccaacggtgtcgaagtagatcccagcaaggttgaagctgtacttgcttggaacccgcccaagaacgtgtcagagatccgcagcttccttggcttagctggatattatcgaagattcattgaaggattctctaagctagctagacctatgaccgagctgttaaagaaggaaaagaaatttcaatggtctgcagcctgtgaagacagcttccaagaattgaagaaaaggttgaccactgccccagttctcaccttgccagatatccgaaaagatttcgagatcttctgtgacgcatcaagacaaggcttaggatgtgtcctaatgcaagaacaaaaggttgtggcctatgcatccaggcagctcaggcctcatgaagccaattatcccacccatgatctcgagttggcagccgtggttcatgctcttaagatctggaggcactatttaatcgggaacagatgtgaagtatacaccgatcacaaaagtcttaagtatatcttcactcagaccgagttaaatatgagacagagaagatggttggaactaatcaaggattacgatcttggaatccactatcatcctggtaaagccaacgtggtcgctgatgcgctaagtcgcaaggcctattgcaatgtagctcaaatacggcctgaccaagatcacctgtgcagagaattggtgaagttaagactgaccatggtacagtcaggtgtccctgccagcttgacagtacagcctaccctagagtcgcaaatccgggaggctcagaaagacgacgaagggataaaagaattaataaaaagaatacaggagaagaaagacacaaatttctccacagacgatcaaggcacagtttggtgcggaccacgcatctgtgtaccggccaagaaggagttaagagatctcatcctaaaggaagctcatgagtccgcctactccattcacccaggaagtacaaagatgtaccaagatatcaaggcatacttctggtgggctggaatgaagcgagacgtcgcagaatacgtagccctgtgtgacatttgccaaagagtcaagccggaacatcagaggccagctggtctgctgcaacccctaccgattcccgagtggaaatgggaagagatcggaatggatttcatcaccggtttgccaagaacccccaacgggtacgactccatttgggtaatcgtggaccgactcacgaaatcagctcatttcgtgccagtgaaaaccacctatgatggaaagaaactagcagatctctacatgacccacgtcgtatgtagatttggctgtcccaagaaaattgtgtcagaccgaggcactcagttcacctcaaggttctggaaccagttgcatgaagccctcggaactgatctgaattttagtacagcctaccatccgcagaccgatggtcagaccgaaagggtaaaccaaatcctagaagacatgctacgtgcgtgtgccttggatttcgaaggcacttgggatcgttgtttgccgtatgccaagttctcatacaacaacagttatcaggccagcattcagatgtcgccgaatgaggcaatgttcggaagaaagtgccgcacccccttgtgctggaatgaggtgggcaaagcactggtattcggtcctgacatactcaagttagcagaagaacaagttaagctgatacgagaacgtttgaagacagcacagaaccgtcagaagaattacgctgacaatcggaggcgtgaccttgagttcgaaaaaggagatcatgtgtacctgcaggtatcacccctccgtggtatgagaaggtttgggatgtccggcaagttagcaccccgctacatcggcccctacctcataaccgccagacgtggcgaagtggcttatcagcttgagctacctgaaggtctcgcagatatgcacaacgtgttccacgtatcccagttaaagaaatgtcttcgagttccagaagagcaagttcccctgggtaatatcgagctagaaaagaatctgacctacaaggaaagaccgatcaaggttcttgaagagacagaacgtcagactcgaaggaagaccatcaagttctacaaagtccaatggagcaatcattccgaagacgagacaacctgggagcgagaagatcttctccgcgccgagttcccggacctgctcccttag

SEQ ID NO: 15505 - DNA, 2067 bp, Oryza sativa
  Clone ID: TFbOSC400732j.C1.o19.fg
atgtcgcatctagagggaaccggggggttggatgacaagggagacgcttctagcaccaaggatactggacccaagggagctactattcactttgattacggcaaacttaatgttcctcctcataactttgtctccgtgccttccgggcgtgttcctcaatttgatgggacacattacgccgcttggaagcacaagatgaagttgcatctaatttctttgcatccaagtatttggaaagttgtttgtacagaggagttcaacaaggttgatggacttgaggaggccaaggagatatgggagaggaggccaaggagatatgggatactttgcaattggctcatgagggatcacccgccgttcagacttctccgtgcttttggtccaagaaatcccactcttgtattaatgatacgggaaaggaaagacttcaagaggctcaccccaagtgacattcttggaagaattgtgtgtcatgagatgcaagaagaggaagctcgtgaagtaaggcaaatggtgaagaatgccaccatgatcaaaaatcaagaagtggttttgaaggcaaaacaagaagaagagtcaagttatgaagaaagtgaagatgaagagatggcttttattgtcaagagattcaagcactttcttcgcaagagtggctatggcaaagggaggaaggaagatgacaagggaaagaggcaatcaaagagagcttgcttcaattgtggcaaatatggccacttcattgccgattgtcccaagtcaaatgaagctaaggttaagggaggcaagaagaagccggagcgtgctcatgtggcggaggcacacatggcggaggagagcctagctaaagaatgtgctaaaaatgaacaactagctaatgagcttaatttggctaatggttctctagctagccttagggatgtcaatgaaactcttcaagacaaatttgctaatttagacaaaagtcataaagatcttgaagttcaatttgacactctttcaaatagcacttatcaaccaaatgtggtttctaatccttccaacccatctactagtaatggttgtgctaggtgttacaatattgatttgaactcttatgatactaatgttgatgctatgcaagctcttaagaaagagaatgaaaggttgggcacattgatgaaatatggatgcatgaagacataccattcaaaagatgccctttacaagaccatcaccgctcatcctaacaaggatggacacgggctcaggttttctggtggaagtcctgtgtctaagcgtgtgatggtaaatgggaaagaatgcttgatgtttgtgagagaaggtaaagctccacaagcaagtgaggtgacttgtcccttcactggtcagacacccggaagttccgggcaaaatgaccggaagttcctgccctgtaagacaggaagtttcaaacattttgtcaggaagttccgggcttctgataggcagaaggggctgaccggaagttccgggtataatacaaggaagttccggccagaggatctttactatgattcatatgtaatttccaaaaattcagagggcaaaatggttgcttattttaatgggaattacaatgatgagtaccgcacttgtgtgggggtgccaaaggctttggcatactcctccggtggctcaagttgggttgtggacagtggctgcaccaattatatgatgggagagaggagtatgtttacaagtcttgatgaggagggtggaagtcgtgaaaatattgtctttggagataatggtaagggaaaggtaatgggtctcggatttaattgcttgtttaccgatgttgatatgaccgtttttaagcgagatgactcttccatagcattgaaaggtgtgttaaagggtgatctctatctcgttgattttgacgtcgatagagtgaatccggaggcatgcttgattgctaaatcctctatgcgttggctatggcaccgtaggctagcccatgttggaatgaggaatttggcatctcttctaaaaggggaacacattattggtctatctaatgtttcttttgagaaggatcgtgtctga

SEQ ID NO: 15506 - DNA, 1464 bp, Oryza sativa
  Clone ID: TFbOSC14509j.C1.o1.fg
atgtcatggcacaaggccggtgtcctgctgctagggggctcaatcctgcctgcctgtcccggaggttccggccgtaggtggggttggatgtttaacagagaaaaagaaaagaatgtcagagggtatgcctccagtaactcaagttttcaactcaatccaccactggcctcaagagagttaacaagggcacacccttggtccattccgagcatgctgcttggttcacagctaccattggttggaagtcaagaccaaaatcagtatgtgtttgatcaagcatttgccacccaggtcaatgagcttccaatgccagaagagcatgtccccttttgtcatgattgtagagagcaaggacactatgccctgaattgtccatgggtatatgccaaagaagccccttcctttggtttagcagggcagacatcgctaaacccgcctcctcgcaccaagtcaagcttgcagcctagtgtgcaaggtagagagcccaatggagagaatccattgaatcccgagaattgctttcctcctagcctttcgtaccacgtggggtcacgtactaagcaagccaaaggcaagaagagtaagagtcagaagagaaaagcgccgatgcgaactaaagaagaagtacgtaagatgactattaccagcgccgaatggcctccagcagggataactattcctagacgtcaaagaggaaataccttccgaggtgcacgacggttgacccagcacctcctaagccatggtggcagagtatctgatcaagtctcctcggatgatgaagatgagtctccccgacatctcggcgaggaagagatggaatcaaaggcatgcacccgttgtggagaaattggacacgttgctagcatgtgtctcacactctgccttcattgtgaggaagaccatccacccgacaggtgtccaacgagcaggatcacttgtttcttttgtgaaggaactgatcatgtaccaaaagattgtcaatccagttttctgctgacgaagaagatggccaaccaacccgccagttccaacggagagaagcatcaaggcaacacaaatcctcgccaagattacagtttcagcctaactccagtgccaggacagaggaaccaaaatgagaaaagaaaatgccgagtccgggaagatatctgttgcttcaattgtcaaggaatgggtcatttcgccgacaagtgcccaaaaccgagaaacatagctgccagcacgtcagtccacgcaactccctgcaatcagaagcttgctcctcagcgaattgtcatccatgcatcccgaagcagtcctatagcccgcgttgcaacagctccaactccagcgagtgcattaccacaaggtgtcaatgctcaatttcagccccagccatcagttgacaagacagaggccagtatcggcattgtacctttggatgttccagcacagcagccaaagaaatcaagtacaagatga

SEQ ID NO: 15507 - DNA, 1233 bp, Oryza sativa
  Clone ID: TFbOSC400775j.C1.o63.fg
atggacatctctaggacaaatgaaggcttcacaagctgcggcccggtagtcgagatgtcatggcacagggctggtgtcctgctgctaggggctcaatcctgcctacctgtcccggaggttccggccgtaggtggggttgggtcggtactcttgtctatggctaggatgggttggaaactatgtcacgtcttccgtccgtataccgtggtggtggatgagcttccaatgccagaagaggatgtccccttttgtcacgattgtagagagcaaggacactatgccctgaattgtccatgggtatatgccaaagaagctccttcctttggtttagcagggcaggcatcgctaaaccagcctcctcgcaccaagtcaagcttgcagcctagtgtgcaaagtagagagcccaatggagagaatccattgaatcccgagaattgctttcctcctatcctttcgtaccacgtggggtcacgtactaagcaagccaaaggcaagaagagtaagaatcagaagagaaaagcaccgatgcgaactgaagaagaagtacgtaagatgactattaccagcaccgaatggcctccagcaaggataactattcctagacgtcaaagaggaaataccttccgaggtgcacgacagttgacccagcacctcctaagccatggtggcagagtatctgatagtgaagggtcagatcaagtctcctcggatgatgaagatgagtctccccgacatctcggcgaggaagaaatggaatcaaaggcatgcacccgttgtggagaaattggacacgttgctagcatgtgtctcacactctgccctcattgtgaggaagaccatccaccaggtgaatgtcccacccgcaaggtgacatgttttctgtgcgaaggtacaaaccatgtgctcaaggattgccaactcagtgtgttgttgaccaagaccgcagaaatccaacgaacaaccctacggttgtctcatcagctagtcagctccaatagcaacatcgacaatatcatccacaacaccaatgctcctcctgctccacctgactctgcaataaatcatagcaataataccttcagcaccaaccattctctgcaccgacagcctcagcaaagaattgttgtcgatggaagaagttgtgtctctccccgacctactccaggccgagcaaagggcaatcaatctcaggagggcgataccaagcagaagaccgttctctgcttcaaatag

SEQ ID NO: 15508 - DNA, 1347 bp, Oryza sativa
  Clone ID: TFbOSC411686j.C1.o1.fg
atggacatctctaggacaaatgaaggctacacgagctgcggcccggtagtcgagatgtcatggcacagggctggtgtcctgctgctaggggctcaatcctgcctacctgtcccggaggttccggccgtaggtggggttgggtcggtactcttgtttatggctaggatgggttgggaactatgtcacgtcttccgtccgtataccatggtgaataagcctaacatacatcataacagcaaaagacttagatctgttaagatggctgacaatgagaaaggcaataaggtcagaagtcaggacattggtacctcaagctcccgagtgaatgaagcaccagacaccagttgtgtgacactggtccaacacctgattaaccagaaccaattgcttatagagatactacagcagcatcagacgccaattctgaacctgagtcagatgcaacctcaagtgcagttggaggcagtccaagcactcacaccacaagtcagcatgccgccagcatcccgaaggacccatggtgacgtgccacatgttgactcaaaagaagcaagtatcatttgttttatgtgtgatgagcaagggcactatgcaagggagtgtcctcagcagaaaagaaaaacaccaatgcgaaccgaagatgaagtccgtaagatgatcattaccagcacagaatggcctccaccaggaatgacaaaacgtcagagaagacataccttccgaggtgcaccacagttgacagagcatcttttagctaatggaggtagagtgtctgatagtgaagattcagatcaagtctcctcagatgatgaagatgaaatggaacgtaaggcatgctctcgttgtggagaaaatcggtcatgttgccagctcttttctgctgacgaagaagatggccaaccaacccgccagttccaacggagagaagcatcaaggcaacacaaatctcgccaagattacagtttcagcctaactccagtgccaggacagaggaatcaaaatgagaaaagaaaatgccgagtccgggaagatatctgttgcttcaattgtcaaggaatgggtcatttcgccgacaagtgcccaaaaccgagaaacatagctgccagcacgtcagtccacgcaactccctgcaatcagaagcttgctcctcagcgaattgtcatccatgcatcccgaagcagtcctatagcccgcgttgcaacagctccaactccagcgagtgcattaccacaaggtgtcaatgctcaatttcagccccagccatcagttgacaagacagaggccagtatcggcattatacctttggatgttccagcacagcagccaaaaaaatcaagtacaagatga

SEQ ID NO: 15509 - DNA, 1056 bp, Oryza sativa
  Clone ID: TFbOSC900406j.C1.o3.fg
atggctgacaatgagaaaggcaataaggtcagaagtcaggacattggtacctcaagctcccgagtgaatgaagcaccagacaccagttgtgtgacactggtccaacacctgattaaccagaaccaattgcttatagagatactacagcagcatcagacgccaattctgaacctgagtcagatgcaacctcaagtgcagttggaggcagtccaagcactcacaccacaagtcagcatgccgccagcatcccgaaggacccatggtgacgtgccacatgttgactcaaaagaagcaagtatcatttgttttatgtgtgatgagcaagggcactatgcaagggagtgtcctcagcagaaaagaaaaacaccaatgcgaaccgaagatgaagtccgtaagatgatcattaccagcacagaatggcctccaccaggaatgacaaaacgtcagagaagacataccttccgaggtgcaccacagttgacagagcatcttttagctaatggaggtagagtgtctgatagtgaagattcagatcaagtctcctcagatgatgaagatgaaatggaacattgtcaattcagttttctgctgacgaagaagatggccaaccaacccgccagttccaacggagagaagcatcaaggcaacacaaatcctcgccaagattacagtttcagcctaactccagtgccaggacagaggaatcaaaatgagaaaagaaaatgccgagtccgggaagatatctgttgcttcaattgtcaaggaatgggtcatttcgccgacaagtgcccaaaaccgagaaacatagctgccagcacgtcagtccacgcaactccctgcaatcagaagcttgctcctcagcgaattgtcatccatgcatcccgaagcagtcctatagcccgcgttgcaacagctccaactccagcgagtgcattaccacaaggtgtcaatgctcaatttcagccccagccatcagttgacaagacagaggccagtatcggcattatacctttggatgttccagcacagcagccaaaaaaatcaagtacaagatga

SEQ ID NO: 15510 - DNA, 4413 bp, Oryza sativa
  Clone ID: TFbOSC14180j.C1.o3.fg
atggcaagccgacgtcgggcaacaaccagcaatgacgaaactcagacacccgacttaaacactctggccggaattatggccacccaaactcaacttctgcaagctatcgcgagcaaccaaggcaaccgcggagggtcaagctttggagagtttatgaggaccaagccgcccacgttcgctacggccgatgagcccatggaagcagaagactggctacgcatcatagaaaagaaactgactctagtcagggtacgcgaagccgacaaggtgatcttcgcagtgaaccagctggaaggacccgctggtgattggtgggatacctacaaggaggcccgagaagacggtgctggagaacccacctgggaggagttcactgcagcgtttcgcgagaatttcgtacctactgcagtgatgcgcatgaagaagaacgagtttagaagactgcggcaagggaatacaacggtgcaggagtatctaaacaagttcactcagttggctcgctacgcaattggagacctggcggatgaagaagaaaagatcgacaagttcatagaagggctgaatgatgaattgcgtggacctatgatcgggcaggatcacgagagtttccagagcctgatcaacaaggtcgtcaggctagagaacgatcaaaggacggtggaacacaaccgcaagaggaggcttgctatgagtcgcccacctcagacaatgcctcagcgacttaagggagccactccgtccggatggaagccccctgtcatggtgaccaaccgtcccgctgcacttagcaacttcaacaggccagttgcacttcagaaccgcacccctacaccaactttggctgcccctggggccaagaagaatgtggactgcttcaactgtgggaaatacgggcactacgctaacaactgccctcatccacgcaaaacccctgtccgaactggcgcgaacgcaatgactgttcgcggcactactacccctgctgtcgggcgaggcctattcaagactccgcaaccgaacaggaccaccactggatttgggcgcgggcaagtgaaccatgttcgagctgaagaggcccaggaagatcaaggcgtactgatgggtatgttttcactcaactccactccaattaaagttctcttcgattcaggagcattgcattcatttatatctttgaaagcaagtcaacaacacaatttaaccagagttaaattaagacaaccaatgttagtacattcgcctgggggtgagatagcagtggatacagcttgcattgacgtacccatccgccttagggatgtggtatttccctccaatcttatggtgctaataccccaaactcttgatgtcattttgggtatggattggttagcaaagcatagaggagtaattgactgtagacgtagagaagttaccctgaccacaccctggggatcggatatgagagcaaccatggatcaagatcctaggctaaccgaacgtgccggaggtatatttaccatgctacccctaaagggaatgccagtagtgcagcgatttcctgatgtgttcccagaagatttacctggaatgccaccagatcgtgacatagagttcattattgacctgatacccggaactgcccccatatccaagagaccatatcggatgccggtcaatgagttagaagaacttaaaaagcaaattagggagttgcaagagaagggatttgtacgccccagttcgtcaccttggggagccccagtgttatttgttaaaaagaaagacggtagcatgagaatgtgtgtagactaccgatcactgaacgaagtgactatcaaaaataagtatcccctaccacggattgatgacctcttcgaccaacttaagggagctaaggtgttttcaaagatagaccttcgatcaggataccaccaactgaagattaggaccgaggatatccccaaaaccgcgttttcaacacgctatgggttgtatgaattcacagtaatgtcgtttggtctaaccaatgccccagcatacttcatgaatcttatgaacaaagtattcatggattacttggataagtttgtggtggtattcattgatgacattctaatctactccaaagatgaggaagaacatgcggaacacttaagattggttctccagaaactccgaaagcacaagttatacgcaaaattcagcaagtgcgaattttggttgaaggaagtcgcttttctgggtcacgtaatctcagccggtggagtagcagtggaccctgctaaagtggaggctgtcacggaatggaaagcacccaaatcggtgactgaaatccggagttttctaggcttggctggatactaccgaaggttcattgaagggttctctaagatagcccgaccaatgacacaattactcaagaaggaaaagaagtttgcatggtcggaacagtgtcaaggaagctttgagcagctcaaagaaaagctgacctcagcacctattttagttcttcccgacatcaggaaagactttgttgtatattgtgatgcgtcgaggcaaggactaggaggtgtactgatgcaggagggaaaagtggtggcctatgcgtcgcgacaattgcgaccacatgaggaaaactaccctacccatgacctagaactcgcagctgtggttcatgcactaaagatttggagacattatctgattggaaaccattgcgatatctacactgaccacaagagtctaaagtatatcttcacccagtcagatctcaacttgaggcaaaggcgatggttagaattaatcaaggactatgatttagaggttcattatcacccaggcaaagcaaacgtcgtagccgacgctctgagtcgtaagagccattgcaatcatctgagaacggaagggatggtccctgagcttagggaggaaatggcgcagctgaacctacatatagtaccccatggacagataaacaccctggatattcaacctcttttgagaacccaaatagaagaagcccagaaggacaatgaggaagtccgagaggtgaaggaacgcttagctgccggacgtgcaaaggaattttcaaccgacgaaaaagatgttctatggtataaaaagagaatttacgtacccgaacagggtggactgaggggattaattttaaaggaagctcacgaatcggcatattcattgcaccccggaagtacgaagatgtaccaagatctgaaggaaggatactggtggcccaacatgaagagagatgtggccgaatacgtagcactctgcgacgtatgccagaaggtgaaggctgaacaccagaggccggcaggtttgttgcaacctctcaggattcccgaatggaaatgggatgagataggtatggatttcattgttggattgcccaagaccgcaacaggatatgattccatttgggtaatcgtggatcgactcaccaagacggcgagattcattcccgttaagacaaattatagcagtgcaaaactcgccgagttgtatatgaccaggatagtgtgtcttcatggtatacctaagaagattatatctgatcgaggcacacagtttacctcacatttctgggagaaagtccatgaagccctgggaagttacctcgcatttagcaccgcttatcatccacagacagatggccagacggagagaaccaaccaggtcctggaggacatgctgagggcttgtgctctggattttagcaaggactgggagaggtgtttgccctacgccgaattctcttacaacaacagctttcaagcaagcctaaagatgtcacccaatgaggcattgtttggtcgacgatgtcgtaccccgctaatgtggtccgagactggagaacgggcggtatttggacctgacattattcaagaagccgaagaaaaggttcgcttgatccgtgatcgtctaaaagtagcacaatcacgacaaaagagttacgccgacactcgaagaagaaacctggaatttaaggaaggagattacgtttatctaaaggtttctccgatgaggggaacaaaaaggtttaaggttaaaggaaaactggcaccaagatatgtggggccattccagatcatcgccaggcgaggagaagtcgcatatcagttacagctaccagaatatatcgccgatgtgcacccagtcttccatgtgtcccaattaaagaaatgcttacgagtgccggaagaacaagccccgctggaagagattcacattagcaatgatctcacatatccagaacacccgatccggatattggatgaagcagaaaagaggactaggagcaaagtgtggcgtatgtacaaggtacaatggagtaatcacactgaggacgaagccacctgggaaggcgaagaattcttgaggacggagtacccgcatctattcggcaactggtaa

SEQ ID NO: 15511 - DNA, 1581 bp, Oryza sativa
  Clone ID: TFbOSC900039j.C1.o14.fg
atggctgacaatgagaaaggcaataaggtcagaagtcaggacattggtacctcaagctcccgaatgaatgaagcaccagacaccagttgtgtgacactggtccaacacctgattaaccagaaccgattgcttatagagatactagagcagcatcagacgccaattctgaacctgagtcaaatacaacctcaagtgcagttggaggcagtccaagcactcacaccacaagtcagcatgccgccagcatcccgaaggacccatggtgatgtgccacatgttggctcaaaagaagcaagtatcatttgttttatgtgtgatgagcaagggcactatgcaagggagtgtcctcagcagaaaagaaaaacaccaatgcgaaccgaagatgaagtccgtaagatgatcattaccagcacagaatggcctccaccaggaatgacaaaacgtcagagaagaaataccttccgaggtgtatcacagttgacagagcatcttttagctaatggaggtagagtgtctgatagtgaagattcagatcaagtctcctcagatgatgaagacgaaatggaacgtaaggcatgctctcgttgtggagaaatcggtcatgttgccagctcgtgtgccactacatgcgttcattgtgaggaagaccatccacccgacaggtgtccaacgagcaggatcacttgtttcttttgtgaaggaactgatcatataccaaaagattgtcaattcaattttctgctgacgaagaagatggccaaccaacccgccagttccaacggagagaagcatcaaggcaacacaaatcctcgccaagattacagtttcagcctaactccagtgccaggacagaggaatcaaaatgagaaaagaaaatgccgagtccgggaagatatctgttgcttcaattgtcaaggaatgggtcatttcgccgacaagtgcccaaaaccgagaaacatagctgccggcacgtcagtccacgcaactccctgcaatcagaagcttgcttctcagcgaattgtcatccatgcatcccgaagcagtcctatatcccgcgttgcaacagctccaactccagcgagtgcattaccacaaggtgtcaatgctcaatttcagccccagccatcagttgataagacagaggccagtatcggcattgtacctttggatgttccagcacagcagccaagaaatcaagtacaagatgaagaacccgagccaataatacctttagcaccaaccattctctgcaccgacagcctcagcaaagaattgtcgtcgatggaagaagttgtgtctctccccgacctactccaggccgagccaagggcaatcaacctctggagggcgataccaagcagaagaccgtcatccgcttcaaacagcactcagaaggaagcttctcctgtgaatgatggcaatatgcagtcctatcacatcatcacagaaccaatcaaggatgatgcagtcactagaacaacgccagctatatctctccagaatcaaaatgagcagccacgcttgtggttttcagttcgctacttatcattgtgtaatcgaaagtttgcagcaatcatgtaa

SEQ ID NO: 15512 - DNA, 2448 bp, Oryza sativa
  Clone ID: TFbOSC29958j.C1.o1.fg
atgtcaggtacaagttccgatgaaccaacactggagaatctagcgcataaactgaagggcatggaaaattggtatgaagagttgatgcgtaatagtaaatcatacaaggaaagcacagataaacatttaaaaaccttaagtgaaaacctagtgaaagtagtggatcaaattgagcaaatgaatcaatcgcataaacaattaactgaaaacatccagaatatgaatattggacatgaaaatattgtgcgatgcattggtttacttgagactgcaggtgaagaaggtgcaggtgccactgctcatcgacaccaaagatatgacgatgaagacgaagagcaatctgttgctgacgatgaggaggaagacgagagtgttggaaatagaagacgacatcgagttagggacaaagatgatcctttatctaaggtaaaatttactatgctttcttttgatggtaagttcgagccttctgtttatctagactgggagctagctgttgagcaaaaattctcttgctatgattttactgataataagaaagttaaagctgccattagtgaacttacatcctttgcatctctatggtggaatgatatatgtggtagaggacttagacctagaacatgggattatatgaaacgtataatgaggtctagatttgtttcttcttactatgcttgtgacatgttaaataaactgcaacttttaagacaaggttccagttctgtagaaacatactatcaagagatgatgattgctttgtcacgatgtgatatgcaagaaactgaggatgctagaatttctaggttctatggaggtcttaatagagagatttgggatattcttgaatataaagaatacaataccatgaatagattattccattttgcttgcaaagctgaaagagaagtgcagggactcaacaagcataggagttcttttgcaggtgctacttccacacgacaattaacaccacgtcaatctactactgcctttcgtccacctacctccacgccatcccatgctcaagaaacaagcaaaaacgcttcagttcagactccagccaagagtgcaacttcagtagcttccactagacgtacccgtgaaattacatgtcataggtgccatgacattggacacattgctcgcgactgtccaaatcggcgagctctatttatgaatgatgatggtgagtatacttctgctagtgattgtgatgatgaatatgctttagctgccactgaccatgcaggaggacaagataacgatgtcatcaaggaagtccatttgcatccagagtcgctagatcagtatcctagcctaattgtcaagctagcacttagtgctaaagagaagtgtgaagagcaaaaccaacatcacaatttgttccaaagcaaagttcttgtgaaaggccataccatcaaaatgattattgataacgggagttgcaacaatttagcaagtgaagagatggtcaagaagcttggcttgactaccatccacatccacatccgtatcatattcagtggctcctaccatgatcaaattgaatgtgatgttgtgcatatgcaagcttgttctgttattttggggcgaccatggcaatatgatagagaagttgtttttgatggtaggactaaaacatataaatttatgttcaatggtaaaagagttgttttgcattctatgactccagccgctgctttgaaagatgatcttgcaagacttgaatgtgaaaagaaagcgaaaagtgaaaatcagattattactaagaatcttgtttcacctagtacaacagaaccaagtgccacaaagaatgaaattaagttgacgggtgctttgttagcttctaaatataatatttgtgcactatatgagccagattcttgttgctatgctctattttgcaaagatcctatactcactttggctactgcttctagttccttatattctttgccacctgctattactaaccttttgcatggatatgagggtgtttttcatgatgagatacatccaaggatgacccctgaacgagagagtgaacatgatcacgaagatgagattgagtcgaggacaactccaattcaagaaggggaggatgatgaggacatcaattcatcggatacgctcataacttcacacgttcaaatgataatttcaagtccaagtccagttcggcctccggagacaacactgacttcaaacggatctagcgccttcatgccaactccgatttgggtgatcttggactttatggaaaacttatctgctaactttcaaacgcatccggtctcatgtccaaattcatctcgagtcaacggaaatcgccaaaacaagacagcgctgttgctgaaactgaatttgggccttgggccttgtaatagattaggcccatctcggaagtgtctcccttcacctccacgaattagcacttatccttag

SEQ ID NO: 15513 - DNA, 389 bp, Oryza sativa
  Clone ID: TFbOSC29958j.C1.o3.np
gtattgaaataatttacattatgttcatgttatactgaatatacggctagcttatctgggagatgctttggtacgggtataatgtttgcatatgcaattactctatgtcatgacgatgatattagattagtatctagtagtttagatgtggtgtctagattacaggatatcattatttagggttatatgctgcggatgagaggtgggccgctgatggtgatagctcagtacgggtattcctccgtgcctgtatataatcctaagttaattccctggggagggtattcctccgtatttagccccggttgtatggtcatgacgggctgtcgtaaggaactcggcagtcaggggtggcttctcgaagtaccaagagggcatcggatagagga

SEQ ID NO: 15514 - DNA, 3012 bp, Oryza sativa
  Clone ID: TFbOSC17176j.C1.o5.fg
atggcgaagtttgtgggggacatcacggcagtggggcaacgtgatgtcgctctcaacattgttggcgccgttggattttccggtgatgccgatgatcttcgaaccaaccttgatgaagtccatgccaataaggtgagcgatagggggtttggtgagctcttcaccaatgttgaagatgctatgtcaatgcagtgtgcacgacatagccgaagtggtcattgtggccatcttgcaagatcagctagaggcgtaaaaaggcttcttggtcctctaatgatggtagagccgctgatcctcatgcatcggtgttaccatctgccacaaaccagagtcgccaaagtttgttgtctagcattgaaccccaaacaacggtgggactctggctcagggaacatcaaggagatcaaaattcgtggcgagctcggactcagagatgaacaatcatcgtcagacgctgcactcacgtggcaatcgacgcggacactgagaaaacatcttctcatacgacgtggtgaatgttggtcggagtactcctccatcgtcaacaccgacgacgaagcaaaggcgacctgcaactcattttgtgagacatgttggaagattctacggtttcgctccaaccagacattccaccagctgaacccgttcctcaatctccgaaacagatgtaatcgggttaagcatggcaatccaatggttgtcttgcagttccacctggagattatttccctttcttttggcaagcttgaaaatagagggcgcaatgtgttgagggggagactgaggtatttgcaggggaaagatttcaggcttcctgtgaaagaagggagaaggccttcaacatcaataccagagcatgatattgggaagatttcagttttgattaaatcattatatgcctataatctcaacaatccaaaaacttattataggcactgtgattttactatggctggttttgccgatgcactgaggccggataaatttaccggtgtgcattttaagagatggcagatcagggtcactctgtggctgacagctatgaaatgcttctgggtgagtactggcaaacctgaaggagttcttactgctgaacagcagaagcaattcgaggaagccactactctctgtgtaggatgcattcttagcgttcttggcgatcgtctggtcgaggtgtatatgcatatgaccgacgcaaaggagttgtgggatgcactgaatactaaattcggtgctactgatgctagcaatgatctgtatatcatggagcagtttcatgactacaagatggctgacaaccgttctgtagtcgaacaggctcatgagatacaaaccatggctaaggaacttgaactccttaagtgtgttttacccgacaaatttgtggccaggtgcattattgcgaaactacctccatcttggagaagtttcggtactgcactcaaacacaagagacaggaatactccgttgaggggttgatagcgtctcttgatgttgaggagaaagctcgggaaaaagatgccgcgtctaagggcgatggtgggcagtccagtgccaatgttgtgcacaaggcccagaacaagagcaaggggaaatacaaagctcagcagaccaccaacttcaagaagcagaagaagaacaacaacaatcctaatcaggatgagaggacttgctttgtgtgtggccaacttggtcatctggctaggaagtgtccacagcgcaaggggatgaaggcacctacagggcagacttctaagtctgctaatgtgaccattagcaacactggagatggaagcgggtatggtaatttacctgctattttttcagttaatcagtctactaattggtgggttgatactaggtccaatgtcgcacggggttccaccgtcctaatggggaatgggtcacatgtttctgttcatggtgttggcacggtagatctgaagtttacttcgggaaagatcgtgcagctgaagaacgtgcagcatgtcccttctatcgacaggaatcttgttagtggctcccgtctgactagagctggatttaagttggtttttgagtctaataaagtagtcgtgtccaaacatggatattttattggtaaaggttatgagtgcggaggcctgttccgcttttccctttctgatttctgcaataagtctgtgaaccatatttgtggcagtgtggatgatgaggctaatgtttggcactcacgtttatgtcatattaattttggcttgatgtctcggctttccagcatgtgtttaattcctaagttttccattgtcaaaggttctaagtgccatagttgtgtgcaatcgaagcaacctcgcaagcctcacaaggttgccgaggaaagaaacttggcaccactagaactcttacattcagatctttgtgaaatgaatggggtgttgacaaagggtggaaaacgatatttcatgactttgattgatgatgctactagattttgctatgtgtacttgttgaaaacgaaagacgaagctctagactattttaaaatttataaggcagaagttgaaaatcaacttgacagaaagataaaaagacttatgtctgatcgtagtggagagtttttctcaaacgagtttgacttattctgtgaggaacaggacatcatacatgagaggacgcccccctattctcccgagtctaatgggattgctaaaaggaagaaccgcacactgactgacttggtgaatgccatgttggacactgcgggactacctaaggcatggtggggggaggcattgttgacctcaaattatgtgttaaacagagttcctaacagaaataaggacaaaacaccatatgagatatggatcgggagaaaaccatcactttcttacttgcgcacatgggggtgcttggcgcaagtcaatgtaccaataacgaataagcacaaacttggacctaagactgtagactgtgtctttctgggatatgcttatcacaacattgcctatagatttttaatagttaaatctgag

SEQ ID NO: 15515 - DNA, 3675 bp, Oryza sativa
  Clone ID: TFbOSC30381j.C1.o1.fg
atggctggttttgccgatgcactgaggccggataaattcaccggtgtgcattttaagagatggcagatcagggtcactctgtggctgacagctatgaaatgcttctgggtgagtactggcaaacctgaaggagttcttactgctgaacagcagaagcaatttgaggaagccactactctctttgtgggatgcattcttagcgttcttagcgatcgtctggtcgaggtgtatatgcatatgaccgacgctaaggagttgtgggatgcactgaatactaaattcgatgctactgatgctagcaatgatctgtatatcatggagcagtttcatgaatacaagatggctgacaaccgttctgtagtcgaacaggctcatgagatacaaaccatggctaaggaactcgaactccttaagtgtgtcttacccgacaaatttgttgccgggtgcattattgcgaaactacctccatcttggagaagtttcggtactgcactcaaacacacgagacaggaatactccgttgaggggttgatagcgtctcttgatgttgaggagaaagctcgggaaaaagatgtcgcatctaagggcgatggtggacagtccagtgccaatgttgtgcgcaaggcccagaacaagagcaaagggaagtacaaagctcaacagaccaccaacttcaagaagcaaaagaagaagaacaacaatcctaatcaggatgagaggacttgctttgtgtgtggccaacttggtcatctggctaggaagtgtccacagcgcaaggggatgaaggcacctgcagggcatacttctaagtctgctaatgtgaccattggcaacactggagatggaagcgggtatggtaatttacctactgttttttcagttaatcagtctactaattggtgggttgatactggggccaatgtacatgtttgtgctgacatctcattgttttcttcttatcaggacgcacggggttccaccgtcctaatggggaatgggtcacatgcttctgttcatggtgttggcacggtagatctgaagtttacttcaggaaagatcgtgcagctgaagaacgtgcagcatgtcccttctatcgacaggaatcttgttagtggctcccgtctgactagagatggatttaagttggtttttgagtctaataaagtagtcgtgtctaaacatggatattttattggtaaagattataagtgcggaggcctgttccgcttttacctttctgatttctgcaacaagtctgtgaaccatatttgtggcagtgtggatgatgaggctaatgtttggcactcacgtttatgtcatattagttttggcttgatgtctcggctttccagcatgtgtttaattcctaagttttccattgtcaaaggttctaagtgccatagttgtatgcaatcgaagcaacctcgcaagcctcacaaggctgccgaggaaagaaacttggcaccactagaactcctacattcagatctttgtgaaatgaatggggtgttgacaaaggatggaaaacgatatttcatgactttgattgatgatgctactagattttgctatgtgtacttgttgaaaacgaaagacgaggctctagactattttaaaatttataaggcagaagttgaaaatcaacttgacagaaaaataaaaagacttaggtctgatcgtggtggagagtttttctcaaacgagtttgacttattctgtgaggaacatgacatcatacatgagaggatgcctccctattctcccgagtctaatgggattgctgaaaggaagaaccgcacactgactgacttggtgaatgccatgttggacactgcgggactacctaaggcatggtggggggaggcattgttgacctcgaatcatgtgttaaacagagttcctaatagaaataaggacaaaacaccatatgagatattgattgggagaaaaccatcactttcttatttgcgcacatgggggtgcttggcgaaagtcaatgtaccaataacgaagaagcgcaaactgggacctaagactgtggactgtgtctttctgggatatgctcatcacagcattgcctatagatttttaatagtcaaatctgaggtacctaacatacatgttggtacaattatggagtctcgtgatgctaccttctttgagagctttttcccaatgaaggatacacatagtagttcgagccaaccatctgaaataattctcagttcaatcacaccaccagaacaaactgaacatacacatgaacatgtcactgaggaggatgacagtgaagctcctcgaaggagtaagagacaaaggacggctaagtcctttggtgatgatttcactgtgtacctcgtggatgacactcctaaatcaatttcagaagcatatgcatctcctgatgcagactactggaaggaggctgtccgtagtgaaatggattccattatcgctaacgggacttgggaggtgacagagcgaccctatgggtataaacctgtgagatgcaagtgggtgttgaagaagaagcttaggcctgacggtactattgaaaagtacaaggctcggcttgttgctaagggctacactcagaaagaaggcgaagatttctttcgcacttactcacctgttgctagattgaccacaattcgtgtgctactttccctagcagcctcacatggtcttctcgttcatcaaatggacgttaagacagcttttcttaatggagagctggatgaggagatctatatggatcagcctgatgggtttgtagttgaaggcttcgcagtcaatgaggcagataaatgtgtatactatcgccatggtgggggtgagggagttattttatgcttgtatgttgatgacatactgatatttgggacaaaccttgaggtgataaatgaggttaaatcatttttgtctcaaaattttgatatgaaggatttgggagtagctgatgttatcttaaacattaagctaattagaggtgagaatgggattacactcttgcagtcccattatgtggagaagatcttgaatcgctttggctacattgatagtaagccttctccaacaccttatgatcctagcttgttacttcgcaagaacaagagaattgctaggaatcaactggaatacttccaaatcattggctcgttgatgtacctggctagtgcaactaggcctgatatctcctttgttgtgagcaagttgagccgatttacctctaatccgggagatgatcattggcgtgcgcttgagcgagtaatgcgctatctgaaaggtactgtggaattggggcttcactatactgggtatcctgcggtactggagggttatagtgattctaactggatctctgatgtggatgagatcaaagccactagtggatatgtcttcacactgggtggtggtgctgtttcatggaggtcttgcaaacagaccattttgacgaggtcaaccatgcaagcagagctgatggcactggataccgctactgttgaggcagaatggctgcgtgatctattaatggatctgactattgttgaaaaaccggtggcggctatccttatgaactgtgacaatcaaacgacatgtgaaaagatgattgaagtctgtcaggaaattaagaaactccggagttataacgttggattacatccaaacagctag

SEQ ID NO: 15516 - DNA, 1301 bp, Oryza sativa
  Clone ID: TFbOSC401605j.C1.o25.np
atggctggttttgccgatgcactgaggccggataaattcaccggtgtgcattttaagagatggcagatcagggtcactctgtggctgacagctatgaaatgcttctgggtgagtactggcaaacctgaaggagttcttattgctgaacagcagaagcaattcgaggaagccactactctctttgtgggatgcattcttagcattcttggcgatcgtctggtcgaggtgtatatgcatatgaccgacgctaaggagttgtgggatgcactgaatactaaattcggtgctattgatgctagcaatgatctgtatatcatggagcagtttcatgactacaagatggctgacaaccgttctgttatcaaacaggctcatgagatacaaaccatggctaaggaactcaaactccttaagtgtgtcttacccgacaaatttgtggccgggtgcattattgcgaaactacctccatcttggagaagtttcggtactgcactcaaacacaagagacaggaatactccgttgaggggttgatagcgtctcttgatgttgaggagaaagctcaggaaaaagatgccgtgtctaagggcgatggtgggcagtccagtgccaatgttgtgcacaaggcccagaacaagagcaaagggaaatacaaagctcagcagaccaccaacttcaagaagcagaagaagaacgacaacaatcctaatcaggatgagaggacttgctttgtgtgtggccaacttggtcatctggctaggaagtgtccacagcgcaaggggatgaaggcacctgcagggcagacttctaagtctgctaatgtgactattggtaacactggagatggaagcgggtatggtaatttacctattgttttttcagttaatcagtctactaattggtgggttgatactggggccaatgtacatgtttgtgctgacatctcattgttttcttcttatcaggacgcacggggttccaccgtcctaatggggaatgggtcacatgcctctgttcatagtgttggcacggtagatctgaagtttacttcgggaaagatcgtgcagctgaagaatgtgcagcatgtcccttctatcgacaggaatcttgttagtggctcccgtatgactagagacggatttaagttagtttttaagtctaataaagtagtcgtgtctaaacatggatattggggcgcgcgaggcgtgggcgctgacggactcagaaagatcacgttgggtgtgcacattcatatctctcttacagcgataaatgcagaaatgaaaatctaagctacgggata

SEQ ID NO: 15517 - DNA, 2607 bp, Oryza sativa
  Clone ID: TFbOSC414535j.C1.o29.gm
atgaggtggaggatgaggtcgtcctccgtccgagcttccttctcgccagcggtgcgcgggctccgccgattctttccaccgacgacacaaagaggggacgaggagcagtgtttggagcagcgacgacgagacacgacggcgtggagtgcgctccccatctcctctgatgccttccatcgcgccaccgttgtctccaccgccatctcccttttcgccttctccacccgccgccggtctacctcgccgtcgcccctctccgcccaccaccggtctacctcatcatcggcccactccgcccgccgccgccccgctccatcctgccggctccatgcgccgccgctccacggtttaacaggtctccagaacctctgccttcgacgtttttgcctccgactctgtgctgcaccgtcgctcgtagattactccatcccgctcgccggcgtgcacctgcgatcgggagagcaggtctccagaacctctgccttcgacgttccgcaccgggagaaggcggcaataaagtttttgggaagcgctttgcgcgactgctccctggtcactctgtggctgacagctatgaaatgcttctgggtgagtactggcaaacctgaaggagttcttactgctgaacagcagaagcaattcgaggaagccactactctctttgtgggatgcattcttagcgttcttggcgatcgtctggtcgaggtgtatatgcatatgaccgacgctaaggagttgtgggatgcactgaatactaaattcggtgctactgatgctagcaatggtctgtatatcatggagcagtttcataactacaagatggctgacaaccgttctgtagtcgaacaggctcatgagatacaaaccatggctaaggaactcgaactccttaagtgtgtcttacccgacaaatttgtggccgggtgcattattgcgaaactacctccatcttggagaagtttcggtactacactcaaacacaagagacaggaatactccgttgaggggttgatagcgtcttttgatgttgaggagaaagctcgggaaaaagatgccgcgtctaagggcgatggtggacagtccagtaccaatgttgtgcacaaggcccagaacaagagcaaagggaaatacaaagctcagcagaccaccaacttcaagaagcagaagaagaataacaacaatcctaatcaggatgaaaggacttgctttgtgtgtggccaacttggtcatctggctaggaagtgtccacagcgcaaggggatgaaggcacctgcagggcagacttctaagtctgctaatgtgaccattgacaacactggagatggaagcaggtatggtaatttacctactgacgcacggggttccaccgtcctaatggggaatgtgtcacatgcttctgttcatggtgttggcacggtagatctgaagtttacttcgggaaagatcgtgcagctgaagaacgtgcagcatgtcccttctatcgacaggaatcttgttagtggctcccgtctgactagagacggatttaagttggtttttgagtctaataaagtagtcgtgtctaaacatggatattttattggtaaaggttatgagtgcggaggcctattccgcttttccctttctgatttctgcaataatgaagctcctcgaaggagtaagagacaaaggacggctaagtcctttggtgatgatttcactgtgtacctcgtggatgacactcctaagtcaatttcagaagcatatgcatctcctgatgcagactactggaaggaggttgtccgtagtgaaatggattccattatcgctaacgggacttgggaggtgacagagcgaccctatgggtgtaaacctgtgggatgcaagtgggtgttcaagaagaagcttaggcctgacgagctggatgatgagatctatatggatcagcctgatgggtttgtagttgaaggtcaagaaggcaaggcttcgcagtcaatgaggtggggcccacctgtcgggtccttcccccacctcccgccgatcccggcgcgccgccgcgccgaaaccgccgccgcgcccacgcctccgtctctcccgggccacgtcggccacgcccgcgcgtgcgccgcgtctcccgcgccctttcccctctccctcccgttcgcgcccgcgcccgagatggccgggattcggaaaccgaatcccgcctctctctcctccccactccccccacgctcgtcgccgtctcgcgccgtcgccgccgttagcttcgcggggtcgagatctacctcggccgcctcttccccgtcgaggttcgtcgccggagccctcatccccacgcgcacggggcacgccgaagctcgtccgccgtcgccgtcgcctcccgtggcccgccgtcgccgttcgccatcgtcttcctccgcgccggccaccctcggtgaggcatctcctctcctctcctttcccgtttccccgtgcgtcgccgccacccgcgctcgccgtcgctttgggtcgttgccgccgtccgctgccgccgcttttgcgtcgcctccgccgccgggtgccgtcgccggcaacccgttcgcgcgcgcgccgtcgccgtcgccgcggccggtcggccggtcttga

SEQ ID NO: 15518 - DNA, 3855 bp, Oryza sativa
  Clone ID: TFbOSC900320j.C1.o19.fg
atggctagttttgccgatgcactgaggccggataaattcactggtgtgcattttaagagatggcagatcagggtcactctgtggctgacagctatgaaatgcttctggaagcaattcgaggaagccactactctctttgtgggatgcattcttagcgttcttggcgatcgtctggtcgaggtgtatatgcatatgaccgacgctaaggagttgtgggatgcactgaatactaaattcggtgctactgatgctagcaatgatctgtatatcatggagcagtttcatgactacaagatggctgacaaccgttctgtagtcgaacaggctcatgagatacaaaccatggctaaggaactcgaactccttaagtgtgtcttacccgacaaatttgtggtcggatgcattattgcgaaactacctccatcttggagaagtttcggtactgtactcaaacacaagagacaggaatactccgttgaggggttgatagcgcctcttgatgttgaggagaaagctcgggaaaaagatgccgcgtctaagggcgatggcgggcagtccagtgccaatgttatgcacaaggcccagaacaagagcaaagggaaatacaaagctcagcagaccaccaacttgaaaaagcagaagaagaacaacaacaatcctaatcaggatgagaggacttgctttgtgtgtggccaacttggtcatctagctaggaagtgtccacagcgcaaggggatgaaggcacctgtagggcagacttctaagtctgctaatgacgcacggggttccaccgtcctaatggggaatgggtcacatgcttctgttcatggtgttggcacggtatatctgaagtttacttcgggaaagatcgtgcagctgaagaacgtgcagcatgtcccttctatcgacaggaatcttgttagtggctcccgtctgattagagacagatttaagttggtttttgagtctaataaagtagtcgtgtctaaacatggatattttattggtaaaggttatgagtgcggaggcctgttccgcttttccctttctgatttctgcaataagtctgtgaaccatatttgtggcagtgtggatgatgaggctaatgtttggcactcatgtttatgtcatattaattttggcttgatgtctcggctttccagcatgtgtttaattcctaagttttccattgtcaaaggttctaagtgccatagttgtgtgcaatcgaagcaacctcgcaagcctcacaaggctgccgaggaaagaaacttggcaccactagaactcctacattcagatctttgtgaaatgaatggggtgttgacaaagggtggaaaaagatatttcatgactttgattgatgatgctactagattttgctatgtgtacttgttgaaaacgaaagacgaggctctagactattttaaaatttataaggcagaagttgaaaatcaacttgacagaaagataaaaagacttaggtctgatcgtggtggagagtttttctcaaacgagtttgacttattttgtgaggaacatggcatcatacatgagaggacgcctccctattctcccgagtctaatgggattgctgaaaggaagaaccgcacactgactgacttgattgggagaaaaccatcactttcttatttgcgcacatgggggtgcttggcgaaagtcaatgtaccaataacgaagaagcgcaaactgggacctaagactgtggactgtgtctttctgggatatgctcattacaacattgcctatagaattttaatagtcaaatctgaggtacctgacatgcatgttggtacaattatggagtctcgtgatgctaccttctttgagagcttttttccaatgaaggatacacatagtagtttgagccaaccatctgaaataattaccagttcaatcacaccaccagaacaaactgaacatacacatgaacatgtcactgaggaggatgacagtgaagctcctcgaaggagtaagagacaaaggacggctaagtcctttggtgatgatttcactgtgtacctcgtggatgacactcctaagtcaatttcagaagcatatgcatctcctgatgcagactactggaaggaggttgtccgtagtgaaatggattccattatcgctaacgggactttggaggtgacagagcgaccctatgagtgtaaacctgtgggatgcaagtgggtgttcaagaagaagcttgggcatgacggtactattgaaaagtacaaggctcggcttgttgctaagggctacactcagaaagaaggcgaagatttctttgacacttactcacctgttgctagattgaccacaattcgtgtgctactttccctagcagcctcacatggtcttctcgttcatcaaatggacgttaagacatcttttcttactggagagctggatgaggagatctatatggatcagcctgatgggtttgtagttgaaggtcaaaaaggcaaggtgtgcaaattgttgaagtctttgtatggtctgaaacaagctcctaagcaatggcatgagaaatttgacaagacattgacatctacaggcttcgcagtcaatgaggcagataaatgtgtgtactatcgctatggtgggggtgagggagttattttatgcttgtatgttgatgacatactgatatttgggacaaaccttgaggtgataaatgaggttaaatcatttttgtctcaaaattttgatacgaaggatttgggagtagttgatgttatcttaaacattaagctaattaaaggtgagaatgggattacactcttgcagtcccattatgtggagaagatcttgaatcgctttggctacattgatagtaagccttctccaacaccttatgatcctagcttgttgcttcgcaagaacaagagaattgctaggaatcaactggaatactcccaaatcattggctcgttgatgtacctggctagtacaactaggcctgatatctcttttgttgtgagcaagttgagccgatttacctctaatccgggagataatcactggcgcgcgcttgagcgagtaatgcgctatctgaaaggtactgtggaattggggcttcactatactgggtatcctgcggtactggagggttatagtgattctaactggatctctgatgtggatgagatcaaagccactagtggatatgtcttcacactgggtggtggtgctgtttcatggagatcttgcaaacagaccattttgacgaggtcaaccatggaagcagagctgacggcactggatactgctactgttgaggcggaatggctacgtgatctattaatggatctgcctattgttgaaaaaccggtgccggctatcgttatgaactgtgacaatcaaacggtaattgtcaaagtgaatagttctaaggataatatgaaatcgtctagacatgtgaaaagacgattgaagtctgtcaggaaattaagaaactccggagttataacgttggattacatccaaacagctagaaacctggcagatcccttcacgaagggactatcacgaaatgtgatagacaatgcatcaaaggagatgggtttgagacccatcgaagatgctgtcctgcagagcattcttgaaagaactcacctttttgagcttgactgttggtcgcagtctatggagattttgggtgaatcttctaggaagcttactaaagacctaggattttgttttgctgcaaattcggattcgtttttgttttggaaacgttccgaaaaatctgattactccatcccgctcgccggcgtgcacctgcgatcgggagagcaggtctccggaacctctgccttcgacgttctgcaccgggagtag

SEQ ID NO: 15519 - DNA, 1350 bp, Oryza sativa
  Clone ID: TFbOSC10753j.C1.o1.fg
atggataacactggtaacaaaggctatgggaatgatggatccgatgactcaagaacccaagccaatgggaatgagaaaagcatcaacgaaacctcaccagagctaatccaaattgtggttaaccaaaccaacatgttggcaacagcctttcaactattacagaatcggaacaacccagcaggggcaaccaacgttcaagtacctacagtccagcaacagtgcaagttatcagaatttctcaaaacggggcctccaacctttgccattgccgtcgatcctatggaagccagtgattggttgcgcacaatcgagaagaagctagggttgattcagtgcaccgaccaggagcgggttggcttcgcaactcatcagctggttggaccggcttcagagtggtgggatagctacgaaacatcacggccagaaggacatgccatcacctggaacgagttttcatctgtattcaagagatcacatgttcccgcaggaatgatcacactaagaaaacgagagtttcgctacctgaagcaaggagatttgaccgtcacagagtacctgcacgagttctatcgtttggctcactatgcaccagaagacgtggaaacggatgaaggcaaacaagagaagtttctccaggggttaaaagatgagctcgcagtgcaactactcctagaggattatgaagattttgagaaacttgtggacaaagccatgcaactcgaaagtgagcataatcggatgacgaactgcaagagaaggattgtcaacatcccagtaattccaggtggtaaccaaagacagcgcactgagccacttcagatcaccggatcttctgttgtgcatcaagagttcctgccccaagaagatgaacgcaatgcagacaacaacactagcaatactaatgatgatgataccaccaacaaccatggttcttgccccattagtgaccactcgaacaaagcgtgcaatgtcagtagcattcaccaagatgtcaacgatagtatcaatgttggaacccagaatgacaaccttagcaattttgactctgggaaggactccaatggtgatagcaataatggtaccactgatgccaatgttagcaaggattcccaaccaccaattccaactccaagtcaaaatgatcgtccccagatggacagctcagtaaagaagacgttgatttgttacaactgcaaagaaccaggtcatttctctagagattgtccacagccgaagcgtaacctgcgccatcactccggccattatgcaagaagaagacaagtcactcgccttgtggtcactggagcaaacgccatacctgtgaggcctcatgttaattctaacccatag

SEQ ID NO: 15520 - DNA, 1700 bp, Oryza sativa
  Clone ID: TFbOSC12554j.C1.o1.np
atggatagtactggtaacaaaggctatgggaatgatggatccgatgactcaagaacccaagccaatgggaatgagaaaagcatcaacgaaacctcaccagagctaatccaagttgtggttaaccaaaccaacatgttggcaacagcctttcaactattacagaatcggaacaacccagcaggggcaaccgacgttcaagtacctacagtccagcaacagtgcaagttatcagaatttctcaaaacggggcctccaacctttgccatggccgtcgatcctatggaagccagtgattggttgcgcacagtcgagaagaagctagggttgattcagtgcaccgaccaggagcgggttggcttcgcaactcatcagctggttggaccggcttcagagtggtgggatagctacgaagcatcacggccagaaggacataccatcacctggaacgagttttcatctgtattccggagatcacatgttcccgccggaatgatcacactaagaaaacgagagttcgctacctgaagcaaggagatttgaccgtcacagagtacctgcatgagttctatcgttcggctcactatgcaccagaagatgtggaaacggatgaagacaaacaagagaagttcctccaggggttaaaagatgagctcgcagtgcaactacttttagaggattatgaagattttgagaaacttgtggacaaagccatgcaactcgaaagtgagcatagtcggatgacgaactgcaagagaaggatggttaacaacccagtatttccaggtggcaaccaaagacagcgcactgagccacttcagatcaccggatcttctgttgtgtatcaagagttcctgccccaaggagatgaacgcaacgcagacaaccacaatagcaatactaatgctgatgataccaccaacaaccatggttctggccccattagtgaccactcgaataaagcgtgcaatgtcagtagcattcaccaagatgtcaacgatagtatcaatgttggaacccagaatgacaaccttagcaattttgactctgagaaagactccaatggtgatagcaactatggtaccactgatgccaatgttagcaaggatttccaaccgccaattccaactccacgtcacaatgatcatccccagatggacagctcagcaaagaagacgttgatttgttacaactgcaaagaaccaggtcatttctctagagattgtccacagccgaagcgtaacctgcgccatcactccggccattatgcaagaagaagacaggtcactcgccttgtggtcactggagcaaacgccgtacctgtttcactgaaaggtagcagaccaaaggacctcatcgccaccagaagcatccacaactctcggagtgaagagtacttagtgaccaaggttgactccaaagatatgaactatgcaaagttctggaactgaagccccatcttcaagtgccgcaacccagtcgaagtcagctaaaggttcaaccagggacaagtcaggtgaagagaagattccatctgcaacaggagatcgagccaagcagtccagagtgaagaagttttgttaggcaagtttgttatagaagacagagcctcctccctctctttctctccctctccttctctccctcctcttgggcctcctcccctctcggcccagctccatttccccccctctctctcccgg

SEQ ID NO: 15521 - DNA, 1587 bp, Oryza sativa
  Clone ID: TFbOSC12554j.C1.o2.np
atgcggaccccacatgtcaacctaaaggaccacggacgagggcggggaagcgagaggacggatccttaccaccacgcgacgaggcgcgggaacgacaacgacgaacgggcgcggcggagacagacgggcacaacggagacgaacggcgaggggacggcttcggcggcgatccttggacgaaggcgagacgcggccggcacgaggcttgacgacgcggaggcgaggacgaagacgatgacgggggctgcagcgaccttgacgaagcgaggacgacgaacgggaacggcttgacggaggggcgaacgccacgacgaccgggaacgacgagaggacgacgacgacgacgacgaccgggaccggcgagggggcgacgagggcagccggcagtggctgcacagagacggggacgacgcggaacacgccgcagcgatgacgatgacggaggcggcgccgcgagacgacgagccgagcgaggatgaacgggacgtcgacgacgagaacgatcggagacgacgatgatggaccgcggaggggtttggatggaggggaaacgatgccgaggacgaccttgccgctgcgatgccgaagatggtggtggaggtggccgaccgatgcacggcgaggagggacgggcggccgaacaactccggtgaggcggacggagaggttcgcggcgacgttccggcgaaaccgagggcaggccggggtggagggcgatgcggcgacgccgagggaggagacggcgacgtcggccgacgctctggcgcggcgaccggggcagccggaggagatgccgccgaggaggaaggagaaaccggcgcgggcgacggtgttccggcgaagttcgggcgaggcggaggtgatgccggggatgagagcggcgtcgtggagccgaggaaggtggtggcgacgtcggccggcgctccggggacgtggcagaggcggccggaggcggagaagtggtggcgacgccactggacgccggcgagggcgcgtctccggtgatttccccgcgaaacggagggctgaccgagggagagggggcagctgcgaggccgagggagaagacggcgcggccgggcggcgttcgggcgaggagaggaaggcggctggaggtggccggcgcgagggaaaggggagggcgacggcgggaacgtagttccgggggtctcctcgcgaaacggagggcaggccggcgtggaggaggtggcggcgatgctgtaggaggcgacgacgcgaccggacggcgctcgggcgaggcgggagaggcggctggaggcggccggcggcacgggagagagaggaggacggcggggagagaatagagcggatttagaggaggaatggcgctagggctcgctcgggagggagagaggaggacggccggcgcgggaggaggaagacgacgctggcgcgtgggccccacgcggtcgggcggcggcgtcagcgcgcgcacgcgcgcgcacgtgcgcggcacggggcgggggcgcggctagggttgggccgggcgaccggcccaggaggagaggaggggaagcggcttgggccgagggaggccgggaggaaggaggggggggggaaaaaaaa

SEQ ID NO: 15522 - DNA, 1350 bp, Oryza sativa
  Clone ID: TFbOSC16506j.C1.o1.fg
atggataacattggtaacaaaggctatgggaatgatggatccgatgactcaagaacccaagccaatgggaatgagaaaagcctcaacgaaacctcaccagagctaatccaaattgtggttaaccaaaccaacatgttggcaacagcctttcatctattacagaatcggaacatcccagcaggggcaaccaacgttcaagtacctacagtcccgcaacagtgcaagttatcagaatttctcaaaacggggcctccaacctttgccatggccgtcgatcctatggaagccagtgattggttgcgcacagtcgagaagaagctagggttgattcagtgcaccgaccaggagcgggttggcttcgcaactcatcagttggttggaccggcttcagagtggtgggatagctacgaagcatcacggccagaaggacataccatcacctggaacgagttttcatctgtattcaagagatcacatgttcccacaggaatgatcacactaagaaaacgagagtttcgctacctgaagcaaggagatttgaccgtcacagagtacctgcatgagttctatcgtttggctcactatgcaccagaagatgtggaaacggatgaagacaaacaagagaagtttctccaggggttaaaagatgagcttgcagtgcaactacttctagaggattatgaagattttgagaaacttgtggacaaagccatgccactcgaaagtgagcataatcggatgacgaactgcaagagaaggattgtcaacatcccagtatttccaggtagtaaccaaagacagcgcactgagccacttcagatcaccggatcttctgttgtgcatcaagagttcctgccccaagaagatgaatgcaatgcagacatcaacactagcaatactaataatgatgacacctccaacaaccaaggttctggccccattagtgaccactcgaataaagcgtgcaatgtcagtagcattcaccaagatgtcaacgatagtatcaatgttggaacccagaatgacaaccttagcaattttgacactgagaaagactccaatggtgatagcaactatggtaccactgatgccaatgttagcaaggatttccaaccaccaattccaactccaagtcacaatgatcatccccagatggacagctcagcaaagaagacgttgatttgttacaactgcaaagaaccaggtcatttctctagagattgtccacagccgaagcgtaacttgcgccatcactccggccattatgcaagaagaagacaggtcactcgccttgtggtcactggagcaaacgccgtacctgtgaggcctcatgttaattctaacccatag

SEQ ID NO: 15523 - DNA, 1350 bp, Oryza sativa
  Clone ID: TFbOSC16879j.C1.o1.fg
atggatagtactggtaacaaaggctatgggaatgatggatccgatgactcaagaacccaagccaatgggaatgagaaaagcatcaacgaaacctcaccagagctaatccaagttgtggttaaccaaaccaacatgttggcaacagcctttcaactattacagaatcggaacaacccagcaggggcaaccgacgttcaagtacctacagtccagcaacagtgcaagttatcagaatttctcaaaacggggcctccaacctttgccatggccgtcgatcctatggaagccagtgattggttgcgcacagtcgagaagaagctagggttgattcagtgcaccgaccaggagcgggttggcttcgcaactcatcagctggttggaccggcttcagagtggtgggatagctacgaagcatcacggccagaaggacataccatcacctggaacgagttttcatctgtattccggagatcacatgttcccgccggaatgatcacactaagaaaacgagagtttcgctacctgaagcaaggagatttgaccgtcacagagtacctgcatgagttctatcgttcggctcactatgcaccagaagatgtggaaacggatgaagacaaacaagagaagttcctccaggggttaaaagatgagctcgcagtgcaactacttttagaggattatgaagattttgagaaacttgtggacaaagccatgcaactcgaaagtgagcatagtcggatgacgaactgcaagagaaggatggttaacaacccagtatttccaggtggcaaccaaagacagcgcactgagccacttcagatcaccggatcttctgttgtgtatcaagagttcctgccccaaggagatgaacgcaacgcagacaaccacaatagcaatactaatgctgatgataccaccaacaaccatggttctggccccattagtgaccactcgaataaagcgtgcaatgtcagtagcattcaccaagatgtcaacgatagtatcaatgttggaacccagaatgacaaccttagcaattttgactctgagaaagactccaatggtgatagcaactatggtaccactgatgccaatgttagcaaggatttccaaccgccaattccaactccacgtcacaatgatcatccccagatggacagctcagcaaagaagacgttgatttgttacaactgcaaagaaccaggtcatttctctagagattgtccacagccgaagcgtaacctgcgccatcactccggccattatgcaagaagaagacaggtcactcgccttgtggtcactggagcaaacgccgtacctgtgaggcctcatgttaattctaacccatag

SEQ ID NO: 15524 - DNA, 1149 bp, Oryza sativa
  Clone ID: TFbOSC17335j.C1.o1.fg
atgttggcaacagcctttcaaaaatcacagaatgggaacagcccagcaggggaaacaaacgttcaagcccttacagtcaagcaccagtgcaagttatcagaatttctcaaaacggggcttccaacctttgccattgccgtcgatcctatggaagccagtgattggttgcgcacaatcgagaagaagctagggttgattcagtgcaccgaccaggagcgggttggcttcgcaactcatcagttggttggaccggcttcagagtggtgggatagctacgaagcatcacggccagaaggacataccatcacctggaacgagttttcatctgtattcaagagatcacatgttcccgcaggaatgatcacactaagaaaacgagagtttcgctacctgaagcaaggagatttgaccgtcacagagtacctgcacgagttctatcgtttggctcactatgcaccagaagatgtggaaacggatgaagacaaacaagagaagtttctccaggggttaaaagatgagcttgcagtgcaactactcctagaggattatgaagattttgagaaacttgtggacaaagccatgcaactcgaaagtgagcataatcggatgacgaactgcaagagaaggattgtcaacatcccagtaattccatgtggtaaccaaagacagcgcactgagccacttcagatcaccggatcttctgttgtgcatcaagagttcctgccccaagaagacggacgcaatacagacaacaaccctagcaatactaatggtgatgataccaccaacaaccatggttcttgccccattagtgaccactcgaatcaagcgtgcaattttgacactgagaaagactccaattgtgatagcaactacggtaccactgatgccaatgttagcaaggatttccaaccaccaattccaactcctagtcagaacgatcgttcccagacggacaactcagcaaagaagacgttgatttgttacaactgcaaagaaccaggtcatttctctagagattgtccacagccgaagcgtaacctgcgccatcactccggccattatgcaagaagaagacaggtcactcgccttgtggtcactggagcaaacgccgtacctgtgaggcctcatgttaattctaacccatag

SEQ ID NO: 15525 - DNA, 1650 bp, Oryza sativa
  Clone ID: TFbOSC1738j.C1.o3.fg
atggataacactggtaacaaaggctatgggaatgatggatccgatgactcaagaacccaagccaatgggaatgagaaaagcatcaacgaaacctcaccagagctaatccaaattgtggttaaccaaaccaacatgttggcaaccgcctttcaactattacagaatcggaacaacccagcaggggcaaccaacgttcaagtacctacagtccagcaacagtgcaagttatcagaatttctcaaaacggggcctccaacctttgccatggccgtcgatcctatggaagccagtgattggttgcgcacagtcgagaagaagctagggttgattcagtgcaccgaccaggagcgggttggcttcgcaactcatcagttggttggaccggcttcagagtggtgggatagctacgaagcatcacggccagaaggacataccatcacctggaacgagttttcatctgtattcaagagatcacatgttcccgcaggaatgatcacactaagaaaacgagagttccgctacctgaagcaaggagatttgaccgtcacagagtacctgcacgagttctatcgtttggctcaatatgcaccagaagatgtggaaacggatgaagacaaacaagagaagtttctccaggggttaaaagatgagcttgcagtgcaactacttctagaggattatgaagattttgagaaacttgtggacaaagccatgcaactcgaaagtgagcataatcggatgacgaactgcaagagaaggatggttaacaacccagtatttccaggtggtaaccaaagacagcgcactgagccacttcagatcaccggatcttctgttgtgtatcaagagttcctgccccaagaagatgaacgcaatgcaggcaacaacaatagcaatactaatgctgatgataccaccaacaaccatggttcttgccccattcatgaccacttagatcaagcgtgcaatgtcaacatcattcaccaagatatcgacgatagtatcaatgaaggcacccagaatgacaaccctagcaattttgactctgggaaggactccaatggtgatagcaataatggtaccactgatgccaatgttagcaaggattcccaaccaccaattccaactccaagtcaaaatgatcgtccccagatggacagctcagtaaagaagacgttgatttgttacaactgcaaagaaccaggtcatttctctagagattgtccacagccgaagcgtaacctgcgccatcactccggccattatgcaagaagaagacaagtcactcgccttgtggtcactggagcaaacgccgtacctgcaaggagtgaaatcttcaactcggtatcagatgctacacgaagtgaaaagtgcaagcaccggttaccagttgataacttgtccgaggttgactccgaagatatgaatcatgagaagttctggaacggaagcatcactgaactaccgcaacttagtctgagtcagccaaaaggtgcaccctggtccaagtcaggtgaagagaagattccatccgcaacaggaggtcaagccaagcagttccgagtggtaaagttttgctggaagttcgtcaagacgcaacggaagaagtcagacaagaagagaagaccgcccaacctatcttcttgctag

SEQ ID NO: 15526 - DNA, 862 bp, Oryza sativa
  unsure (1)..(862): unsure at all n locations
  Clone ID: TFbOSC18196j.C1.o1.gm
gngatcacatgttccctcaggaatgatcacactaagaaaacgagcgtttcgctacctgaagcaaggggatttgaccgtcacagagtacctgcacgagttctatcgtttggctcgctatgcaccagaagatgtggaaacggatgaagaaaaacaagagaagtttctccaggggttaaaagatgagcttgcagtgcaactactcctagaggattatgaaaattttgagaaacttgtggacaaagccatgcaacttgaaagtgagcataatcggatgacgaactgcaagagaaggattgtcaacatcctagtatttccaggtggtaaccaaagacagcgcactgagccacttccgatcatcggatcttctgttgggtatcacgagttcctgccccaagaagatgaacgcaatgtagacaacaacaacatcattcaccaagatatcgacgatagtatcaatgaaggcacccagaatggcaaccctagcaattttgactctgagaaagactccaagggtgatagcaataatggtaccactgatgccgatgttagcaaggatttccaaccaccaattccaactcctagtcaggacgatcgttcccaggcggacaactcagcaaagaagacgttgatttgttacaactgcaaagaaccaggtcatttctcgagagattgtccacagccgaagcgtaacctgcgtcatcactccggccattatgcaagaagaagacaggtcactcgccttgtggtcactggagcaaacgccgtacctgtttcactgaaaggcagcaagccaaaggacctcatcgtcaccagaagcatccacaactctcggagtgaagagtacctggtggacaaagtttaa

SEQ ID NO: 15527 - DNA, 1350 bp, Oryza sativa
  Clone ID: TFbOSC18372j.C1.o3.fg
atggataacactggtaacaaaggctatgggaatgatggatccgatgactcaagaacccaagccaatgggaatgagaaaagcatcaacgaaacctcaccagagctaatccaaattgtggttaaccaaaccaacatgttggcaacagcctttcaactattacagaattggaacaacccagcaggggcaaccaacgttcaagtacctacagtccagcaacagtgcaagttatcagaatttctcaaaactgagcctccaacctttgccattgccgtcgatcctatggaagccagtgattggttgcgcacagtcgagaagaagctagggttgattcagtgcaccgaccaggagcgggttggcttcgcaactcatcagttggttggacaggcttcagagtggtgggatagctacgaagcatcacggccagaaggacataccatcacctggaacgagttttcatctgtattcaagagatcacatgttcccgcaggaatgatcacactaggaaaacgagagtttcgctacctgaagcaaggagatttgaccgtcacagagtacctgcacgagttctatcgtttggctcactatgcaccagaagatgtggaaacggatgaagacaaacaagagaagtttctccaggggttaaaagatgagcttgcagtgcaactactcctagaggattatgaagattttgagaaacttgtggacaaagccatgcaacttgaaaatgagcataatcggatgacgaactgcaagagaaggattgtcaacatcccagtatttctaggtggtaaccaaagacagcgcactgagccacttcagatcaccggatcttctgttgtgcatcaagagttcctgccccaagaagatggacgcaatgcagacaccaacactagcaatactaatgatgatgataccaccaacaaccatggttcttgccccattagtgaccactcgaataaagcgtgcaatgtcagtagcattcaccaagatgtcaacgatagtatcaatgttggaacccagaatgacaaccttagcaatgttgacactgagaaagactccaatggtgatagcaactatggtaccactgatgccaatgttagcaaggatttccaatcaccaattccaactccaagccaaaatgatcgtccccagatggacagctcagtaaagaagacgttgatttgttacaactgcaaagaaccaggtcatttctccagagattgtccacagccgaagcgtaacctgcgccatcactccggccattatgcaagaagaagacaagtcactcgccttgtggtcactggagcaaacgccgtacctgtgaggcctcatgttaatcctaacccatag

SEQ ID NO: 15528 - DNA, 2295 bp, Oryza sativa
  Clone ID: TFbOSC18547j.C1.o2.gm
atggtgcccccaatcgccgggaacggccgcgccaagtccggccgccttcctttgccgccggccgccattcccgtcgccgttcccgctcctcccgtggccggctctctcccccatcctataaaatgggatcctcatccttcgttctatcgttttagccccttcccgagcctccccgtggtcgtatcacctctccccgccttctccttctccctctccgacgccggccggcctccagccacctctccctcctcaccggagcatcgtccggccgtgccgtcgcctccctcggctctgcaacaccgtccccttcaccggccttaccgtctcctcgccggaaactcgccggaacggtgcccccgccggcaaccagtggcattggtgccactgtactccctccagccggctgctgttcatcgccggtgcgccgatcgacgccgccgtctcctccttcgacaccgcggcatcgccttcttccccggcatcacctcctcctcgcccgaatttcgccggaacgccgtcgcccgcgccggcctcaccttcctcctcgtcgacatctcctccggctgccccggtcgccgcgccagagcgtcggccgacgtcgccgtctcctccctcggcgacgccgcatcgccctccaccccggcctgccctcggtttcgccggaacgtcgccgcgaacctctccgtccgcctcgccggagttgttcggccgcccgtccctcctcgccgtgtaccggtcggccacctccaccaccatcttcggcatcgcagtcgcgacgtcgtcctcggcctcgcctccccttcgaccgaaccccgccgcggcgtggtcctcgtcgtcctcgtccccgtgcagccgctgccggctgtcctcgtcgcctcctcgccggtcccggtcgtcgtcgtcgtcgtcgtcctctcgtcgttcccggtcgtcgtggcccccgtcctcgtgttcgtcctcggctccgcgtcgtcaagcctcgtgccggccgcagctcgccttcgcccaaggatcgccgccgaagccgtcccctcgccgttcgtctccgttgtgcccctttcgtcgttccggaggttcccgaagcgtggttcgtggtcgtcgccgaagaattggaacaacccagcaggggcaaccaacgttcaagtgcctacagtccagcaacagtgcaagttatcagaatttctcaaaactgagcctccaacctttgccattgccgtcgatcctatggaagccagtgagtggttgcgcaccatcgagaagaagctagggttgattcagtgcaccgaccaggagcgggttggcttcgcaactcatcagctggttggaccggcttcagagtggtgggataactacgaagcatcacagccagaaggacataccaccacctggaacgagttttcatctgtattcaggagatcacatgttccctcgggaatgatcacactaagaaaacgagagtttcgctacctgaagcaaggagatttgaccgtcgcagagtacctgcacgggttctatcgtttggctcactatgcaccagaagatgtggaaacgggcgaagacaaacaagagaagtttctccaggggttaaaagatgagctcgcagtgcaactacttctagaggattatgaagattttgagaaacttgtggacaaagccatgcaactcgaaagtgagcataatcggatgacgaattgcaagagaaggatggttaacaacccagtatttccaggtggtaaccaaagacagcgcactgagccacttcagatcaccggatcttctgttgtgtatccagagttcctgccccaagaagatgaacgcaatgcagacaacaacaatagcaatactaatgctgatgataccaccaacaaccatggttcttgccccattcatgaccacttagatcaagcgtacaatgtcaacatcattcaccaagatatcgacgatagtatcaatgaaggcacccagaatgacaaccttagcaatttcgacactgagaaagactccaatggtgatagcaataatggcaccactgatgccgatgttagcaaggatttccaaccaccaattccaactcctaatcagaacgatcgttcccagacggacaactcagcaaagaagacgttgatttgttacaactgcaaagaaccaggtcatttctctagagattgtccacagccgaagcgtaacctgcgccatcactccggccattatgcaagaagaagacaggtcactcgtcttgtggtcactggagcaaacgccgtacctgtgaggcctcatattaattctaacccatag

SEQ ID NO: 15529 - DNA, 2409 bp, Oryza sativa
  Clone ID: TFbOSC23013j.C1.o2.np
atggataacactggtaacaaaggctatgggaatgatggatccgatgactcaaaaacccaagccaatgggaatgagaaaagcatcaacgaaacctcaccagagctaatccaaattgtggttaaccaaaccaacatgttggcaacagcctttcaactattacagaatcggaacaacccagcaggggcaaccaatgttcaagtacctacagtccagcaacagtgcaagttatcagaatttctcaaaacggggcctccaacctttgccatggccgtcgatcctatggaagccagtgattggttgcgcacagtcgagaagaagctagggttgattcagtgcaccgaccaggagcgggttggcttcgcaactcatcagttggttggaccggcttcagagtggtgggatagctacgaagcatcacggccagaaggacataccatcacctggaacgagttttcatctgtattcaagagatcacatgttcccgcaggaatgatcacactaagaaaacgagagtttcgctacctgaagcaaggagatttgaccgtcgcagagtacctgcacgagttctatcgtttggctcactatgcaccagaagatgtggaaacggacgaagacaaacaagagaagtttctccaggggttaaaagatgagctcgcagtgcaactacttctagaggattatgaagactttgagaaacttgtggacaaagccatgcaactcgaaagtgagcataatcggatgacgaattgcaagagaaggatggttaacaacccagtatttccaggtggtaaccaaagacagcgcactgagccacttcagatcaccggatcttctgttgtgtatccagagttcctgcctcaagaagatggacgcaatgcagacaacaacactagcaatactaataatgatgataccaccaacaaccatggttcttgccccattagtgaccactcgaataaagcgtgcaatgtcggtagcattcgccaagatgtcaacgatagtatcaatgttggaacccagaatgacaaccttagcaatttttgacactgagaaagactccaatggtgatagcaacgatggtaccgctgatgccaatgttagcaagggtttccaaccaccaattccaactccaagtcacaatgatcatccccagatggacagctcagcaaagaagacgttgatttgttacaactgcaaagaaccaggtcatttctctagagattgtccacagccgaagcgtaacctgcgccatcactccggccattatgcaagaagaagacaggtcactcgccttgtggtcactggagcaaacgccgtacctgtttcactgaaaggcagcaagccaaaggacctcatcgtcaccagaagcatccacaactctcggagtgaagagtacttggttgacaaagttgactccaaagatatgaactatgcaaagttctggaactgaagccccatcttcaagtgccgcaacccagtcgaagtcagctaaaggttcaaccagggacaagtcagctgccccctctccctcggtcagccctccgtttcgcggggaaagcaccggagacgcgtcctcgccggcgtccagtggcgtcgccaccacttctccgcctccggccgcctctgccacgtccccggagcgccggccgacgccgccaccaccttcctcggctccacgacgccgctctcatccccggcatcacctcctcctcgcccgaacttcgccggaacaccgtcgcccgcgccggcttctccttcctcctcggcggcagcaccggtcggccacacctccaccacctccggcatcgcagcggcaaggtcgtcctcggcatcatttcccctccatccaaacccctccgcggtccatcatcgtcgtctccgatcgttctcgtcgtcgacgtcccgtcggtcgcccggctcgtcgtctcgcggcgccgcctccgtcatcgtcatcgtagcggcgtgttccacgtcatcctcgccgccgtgcagccgctgccggctgccctcgtagcctcctcgccggccccggtcgtcgtcgtcctcgtcctctcgtcgttctcggtcgtcgtggcgttcgtccctccgtcaagccgttctcgttcgtcgtcctcgcttcgtcaaggtcgctgcagcccccgtcatcgtcttcgtcctcgcctccgcgtcgtcaagcctcgcgccggccgcgtctcgccttcgtccaaggatcgccgccgaagccgtcccctcgccgttcgtctccgttgcgcccgtctgtctccgccgcgcccgttcgtcgttgtcgttcccacgcctcgtcgcgtggtggtaaggttccctctccctcgctgccctgtcctcgtcctttcggtgtcgcccgtgcccgttgtgcggttgtcggccccggtacccgtgtatcggcgtcgg

SEQ ID NO: 15530 - DNA, 1350 bp, Oryza sativa
  Clone ID: TFbOSC26820j.C1.o1.fg
atggataatactggtaacaaaggctatgggaatgatggatccgatgactcaagaacccaagccaatgggaatgagaaaagcatcaacgaaacctcaccagagctaatccaaattgtggttaaccaaaccaacatgttggcaacagcctttcaactattacagaatcggaacaacccagcaggggcaaccaacgttcaagtacctacagtccagcaacagtgcaagttatcggaatttctcaaaacggggcctccaacctttgccattgccgtcgatcctatggaagccagtgattggttgcgcacaatcgagaagaagctagggttgattcagtgcaccgaccaggagcgggttggcttcgcagctcatcagttggttggaccggcttcagagtggtggtatagctacgaagcatcacggccagaaggacataccatcacctggaacgagttttcatctgtattcaagagatcacatgttcccgcaggaatggtcacactaagaaaacaagagtttcgctacctgaagcaaggagatttgaccgtcacagagtacctgcatgaattctatcgtttggctcactatgcaccagaagatgtggaaacggatgaagacaaacaagagaagtttctccaggggttaaaagatgagcttgcagtgcaactacttctagaggattatgaagattttgagaaccttgtggacaaaaccatgaaactcgaaagtgagcataatcgaagaccgaactgcaaagaaagaattgtcaacatccagtattttccaggtggtaaccaaagacagcgcactgagccacttcagatcaccggatcttctgttgcgcatcaagagtttccgccccaagaagatggacgcaatgcagacaacaacactagcaatactaatgatgatgataccaccaacaaccatggttcttgccccattagtgaccactcgaataaagcgtgcaatgtcagtagcattcaccaagatgtcaacgatagtatcaatgttggaaaccagaatgacaaccttagcaattttgactctgagaaagactccaatggtgatagcaactatggtaccactgatgccaatgttagcaaggatttccaaccaccaattccaactccaagtcacaatgatcgtccccagatggacagctcagtaaagaagacgttgatttgttacaactgcaaagaaccaggtcatttctctagagattgtccacagccgaagcgtaacctgcgccatcactccggccattatgcaagaagaagacgagtcactcgccttgtggtcactggagcaaacgccgtacctgtgaggcctcatgttaattctaacccatag

SEQ ID NO: 15531 - DNA, 2529 bp, Oryza sativa
  Clone ID: TFbOSC400150j.C1.o6.gm
atggtgcccccaatcgccgggaacggccgcgccaagtccggccgccttcctttgccgccggccgccattcccgtcgccgttcccgctcctcccgtggccggctctctcccccatcctataaaatgggatcctcatccttcgttctatcgttttagccccttcccgagcctccccgtggtcgtatcacctctccccgccttctccttctccctctccgacgccggccggcctccagccacctctccctcctcaccggagcatcgtccggccgtgccgtcgcctccctcggctctgcaacaccgtccccttcaccggccttaccgtctcctcgccggaaactcgccggaacggtgcccccgccggcaaccagtggcattggtgccactgtactccctccagccggctgctgttcatcgccggtgcgccgatcgacgccgccgtctcctccttcgacaccgcggcatcgccttcttccccggcatcacctcctcctcgcccgaatttcgccggaacgccgtcgcccgcgccggcctcaccttcctcctcgtcgacatctcctccggctgccccggtcgccgcgccagagcgtcggccgacgtcgccgtctcctccctcggcgacgccgcatcgccctccaccccggcctgccctcggtttcgccggaacgtcgccgcgaacctctccgtccgcctcgccggagttgttcggccgcccgtccctcctcgccgtgtaccggtcggccacctccaccaccatcttcggcatcgcagtcgcgacgtcgtcctcggcctcgcctccccttcgaccgaaccccgccgcggcgtggtcctcgtcgtcctcgtccccgtgcagccgctgccggctgtcctcgtcgcctcctcgccggtcccggtcgtcgtcgtcgtcgtcgtcctctcgtcgttcccggtcgtcgtggcccccgtcctcgtgttcgtcctcggctccgcgtcgtcaagcctcgtgccggccgcagctcgccttcgcccaaggatcgccgccgaagccgtcccctcgccgttcgtctccgttgtgcccgtctgtctccgccgcgcccgttcgtcgttgtcgttcccacgcctcgtcgcgtggtgggcaaatgaaggctacacgagctgcggcccggtagtcgagatgtcatacggcggagggttggtgcccaatgctaggggctcagttctgcctgcctgtcccgggtatcccggccgtagtgaagccagatgtgaagcaggagtgaagatcttcgagaacccgtcgcagaacctaagccaccctctaaattggaacaacccagcaggggcaaccaacgttcaagtgcctacagtccagcaacagtgcaagttatcagaatttctcaaaactgagcctccaacctttgccattgccgtcgatcctatggaagccagtgagtggttgcgcaccatcgagaagaagctagggttgattcagtgcaccgaccaggagcgggttggcttcgcaactcatcagctggttggaccggcttcagagtggtgggataactacgaagcatcacagccagaaggacataccaccacctggaacgagttttcatctgtattcaggagatcacatgttccctcgggaatgatcacactaagaaaacgagagtttcgctacctgaagcaaggagatttgaccgtcgcagagtacctgcacgggttctatcgtttggctcactatgcaccagaagatgtggaaacgggcgaagacaaacaagagaagtttctccaggggttaaaagatgagctcgcagtgcaactacttctagaggattatgaagattttgagaaacttgtggacaaagccatgcaactcgaaagtgagcataatcggatgacgaattgcaagagaaggatggttaacaacccagtatttccaggtggtaaccaaagacagcgcactgagccacttcagatcaccggatcttctgttgtgtatccagagttcctgccccaagaagatgaacgcaatgcagacaacaacaatagcaatactaatgctgatgataccaccaacaaccatggttcttgccccattcatgaccacttagatcaagcgtacaatgtcaacatcattcaccaagatatcgacgatagtatcaatgaaggcacccagaatgacaaccttagcaatttcgacactgagaaagactccaatggtgatagcaataatggcaccactgatgccgatgttagcaaggatttccaaccaccaattccaactcctaatcagaacgatcgttcccagacggacaactcagcaaagaagacgttgatttgttacaactgcaaagaaccaggtcatttctctagagattgtccacagccgaagcgtaacctgcgccatcactccggccattatgcaagaagaagacagctttcggcaaaacacttcaaggtttcactgaaaggcagcaagccaaaggacctcatcgtcaccagaagcatccacaactctcggagtgaagagtacctggtggacaaagtttaa

SEQ ID NO: 15532 - DNA, 2434 bp, Oryza sativa
  Clone ID: TFbOSC400404j.C1.o16.np
atggataacactggtaacaaaggctatgggaatgatggatccgatgactcaagaacccaagccaatgggaatgagaaaagcatcaacgaaacctcaccagagctaatccaaattgtggttaaccaaaccaacatgttggcaacagcctttcaactattacagaattggaacaacccagcagaggcaaccaacgttcaagtacctacagtccagcaacagtgcaagttatcagaatttctcaaaactgagcctccaacctttgccattgccgtcgatcctatggaagccagtgattggttgcgcacaatcgagaagaagctagggttgattcagtgcaccgaccaggagcgggttggcttcgcaactcatcagctggttggaccggcttcagagtggtgggatagctacgaagcatcacggccagaaggacataccatcacctggaacgagttttcatctgtattcaggagatcacatgttcccgcaggaatgatcacactaagaaaacgagagtttcgctacttgaagcaaggagatttgaccgtcacagagtacctgcacgagttctatcgtttggctcactatgcaccagaagatgtggaaacggatgaagacaaacaagagaagtttctccaggggttaaaagatgagcttgcggtgcaactacttctagaggattatggaaattttgagaaactcgtggacaaagccatgcaacttgaaagtgagcataatcggatgacgaactgcaagagaaggattgtcaacatcccagtatttccatgtggtaaccaaagacagcgcactgagccacttcagatcaccggaccttctgttgtgcatcaagagttcccgccccaagaagatggacgcaatgcagacaacaacactagcaatactaatgatgatgataccaccaacaaccatggttcttgccccattagtgaccactcgaacaaagcgtgcaatgtcagtagcattcaccaagatgtcaacgatagtatcaatgttggaacccagaatgacaaccttagcaatgttgacactgagaaagactccaatggtgatagcaactatggtaccactgatgccaatgttagcaaggatttccaaccaccaattccaactccaagtcaaaatgatcgtccccagatggacagctcagtacagaagacgttgatttgttacaactgcaaagaaccaggtcatttctctagagattgtccacagccgaagcgtaacctgtgccatcactccggccattatgcaagaagaagacaagtcactcgccttgtggtcactggagcaaacgccgtacctgtttctctgaaaggcagcaggctcaagtaccacatcgtcaccaaaagcatccacaactctcggagtgaagagtacttagttgacaaagttgacgccaaagatatgaattatgagaagttctggaactgaagtcccatcttcaagtgccacaacccagtcgaagtcagctaaaaggtgcaccctggttcaagtcagccacctcctctccctcggtcagccctccgtttcgcggggaaagcaccggagacgcgttctcgccggcaaaacagtggcgttgccgccactgttccacctccggccgccactgtcgcgtttcccgtgcgccggccgacgtcgccaccacctccctcggctccgcgacgccgccctccaccccggctgctcctcggtttcgccggaacaccgtcgccgcgccggcctctccatcctcttcgtcgccggcgtcctttcggccacccattcctcctcgtcggctcgtcgccccgctgcaccaccaccttctccaacatcgcagcagcgcgttccacgccgtcccctcctccgctcagccgctgctgcctgccatcatcgtttcctcgtcaccgttcgtcctcgccgatcgacgtcccgtcggtcgcctggctcatcgtctcgcggcgccgcctccgtcgtcggcatcgcagcggcgtggtccgcgccatcctcgcctccgtgcagccgctgccggcagccctcatcgcctcctcgccggccccggtcgtcgccgtcgtcgtcctctcgtcgttcccggtcgtcgtggcgttcgtccctccgtcgagccgttctcgtccgtcgtccgcgttcgtcaagcgaaccgctgcagccccgtcctcgtcttcgtcctcggctccgcgtcgtcaagcctcgtgccggccgcgtctcgccttcgtccaaggatcgccgccgaagccgtcccctcgccgttcgtctccgttgtgcccgtctgtctccgccgcgcccgttcgtcgttgtcgttcccacgcctcgtcgcgtggtggtaaggttccctctccctcgctgccccgtcctcgtcctttcggtgtcccccgtacccgttgtgcggttgtcgaccccggtacccatgtaccggtgtcgg

SEQ ID NO: 15533 - DNA, 2380 bp, Oryza sativa
  Clone ID: TFbOSC400628j.C1.o5.np
atggataacactggtaacaaaggctatgggaatgatggatccgatgactcaagaacccaagccagtgggaatgagaaaagcatcaacaaaacctcaccagagctaatccaaattgtggttaaccaaaccaacatgttggcaacagcctttcaactattacagaattggaacaacccagcagggacaaccaacgttcaagtacctacagtccagcaacagtgcaagttatcagaatttctcaaaactgagcctccaacctttgccattgccgtcgatcctatggaagccagtgattggttgcgcacaatcgagaagaagctagggttgattcagtgcaccgaccaggagcgggttggcttcgcaactcctcagctggttggaccggcttcagagtggtgggatagctacgaagcatcacggccagaaggacataccatcacctggaacgagttttcatctgtattcaggagatcacatgttcccgcaggaatgatcacattaagaaaatgagagtttcgctatctgaagcaaggagatttgaccgtcacaaagtacctgcacgagttctatcgtttggctcactatgcaccagaagatgtggaaacagatgaagacaaacaagagaagtttctccaggggttaaaagatgagcttgcagtgcaactccttctagaggattactaagattttgagaaacttgtggacaaagccatgcaactcgaaagtgagcataatcggatgacgaactgcaagaggaggattgtcaacatcccagtatttccatgtggtaaccaaagacagcgcactgagccacttcagatcaccggatcttctgttgtgcatcaagagttcctgccccaagaagatggacgcaatgcagacaacaacactagcaatactaatgatgatgataccaccaacaaccatggttcttgcctcattagcgaccactcgaataaagcgtgcaatgtcagtagcattcaccaagatgtcaacgatagtatcaatgttggaatccagaatgacaaccttagcaattttgacactgagaaagactccaatggtgatagcaactatggtaccactgatgccaatgttagcaaggatttccaaccaccaattccaactccaagtcaaaatgatcgtccccagatggacagctcaacaaagaagacgttgatttgttacaactgcaaagaaccaggtcatttctctagagattgtccacagccgaagcgtaacctacgccatcactccggccattatgcaagaagaagacaagtcactcgccttgtggtcactggagcaaacgccatacctgtttctctgaaaggcagcaagccaaaggacctcatcgtccccagaagcgtccgcaatccacattaaagaataccacctgttagagataagccgaaaggactcctcccgcaagaaatcgatccgggaaatcaaaaactcggttttggagataaactcgaaaacgagttcgattcggataagatactcaacgattagctccgatttttgggggtccgcaaacttcgccggcgtcattgatggagccgagatcgcccgcgccggcctctccttcctcctcgtcgacgtctcctccggcagccccttccaccgcgcccgtgcatcagccggcgctgccgtcccctccctcggcgtcgccgcatcgccctccaccccggctgctcctcggtttcgccggaacgccgtcgcagcgccggcctctccatcctcttcatcgccagtgtcctttcggccgccccttccacctccccggctcgtcggcttgctgcacctctaccatcttcggcatcgcagccgcgacgtcgtcctcggcctcgcctcccctccgaccgaacaccgccggtgtccgtcgtcgtcttcaccgttcatcctcgccggctcgccgtctcgcggcgccgcctccgtcgtcggcatcgcagcggtgtgttccacgccatcctcgcctccgtgcagccgctgccggctgccctcgtcgtctcctcgctggccccggtcgtcgtcgtcgtcgtcctctcgtcgttcccggtcgttgtggcgttcgtccctccgtcaagccgttctcgtctgccgcccgcgtttcgtcaagtgtgcagcagccccgtcgtcgtcttcgtcctcgcctccgcgtcgtcaagcctcgtgccggccgtgtctcgccttcgtcccaggatcgctgccgaagtcgttccctcgccgtccgccgcgcccgttcgtcgttgtcgttcccacgcctcgtcgcgtggtggtaaggatccgtcctctcgctgccccgtcctcgtccttttggtgtcgccccgtacccgttgtgcggtcgtcgaccccggtacccgtgtaccggtgtcgg

SEQ ID NO: 15534 - DNA, 1863 bp, Oryza sativa
  Clone ID: TFbOSC400689j.C1.o2.gm
atgttggcaacagcatttcaactattacagaattggaacaacccagcaggggcaaccaacgttcaagggttaaaagatgagcttgcagtgcaactactaatagaggattatgaagattttgagaaacttgtggacaaagccatacaactcgaaagtgagcataatcggatgaagaactgcaagagaaggattgtcaacatcccagtatttccatgtggtaaccaaacacagcgcaccgagccacttcagatcaccggatcctccgttgcgcatcaagagttcctaccccaagaagatggacacaatgcagacaacaacattagcaatactaatgctgatgacaccaccaacaaccatggttcttgccccattagtgaccactcggatcaagcgtgcaatgtcaacagcattcaccaagatatcgacgatagtatcaatgaaggcacccagaatgacaaccctagcaattttgactctgagaaagacaccaatggtgatagcaactatggtaccactgatgccaatgttagcaaggatttccaaccaccaattccaactccaagtcagaatgatcgttctcagacgaacagctcagtaaagaagacattgatttgttacaactgcaaagaaccaggtcatttctccagagattgtccacagccgaagcgtaacctgcgtcatcactccggccattatgcaagaagaagacaagtcactcgccttgtggtcactggagcaaacgccatacctgtttctctgaaaggcaacaggctcaagtaccacatcgtcaccagaagcatccacaactctcggagtgaagagtacttagttgacaaaggtgtcgacacaagacatgaagttgataacttgtgtgaggttgacgccgaagatatgaatcatgagaagttctggaacggaagcatcattaaactaccgcaacctagtctgagtcagctaaaaggtgcaccctggttcgagtcaggtgaagagaagattccatctgcaataggagaccaagccaagcagttccaagtggggaagtttgctggacaagccgcctccgggcccaagccgagcggcgccctcccgcccgtgccgcgcacccgcccctaccgccgcgtcagcacgccggccggccgtgccgtcgccttccccttcgtcgcagtggcgttgccgccactgtaccacctccagccgcctgtgccgctttgccggagcatcggctttcgtcgtcgctgcctctcccggcaccggaacgtcgtcctcttccccggccatgccacggcgtcgctcatatttagccggaacaccgccgtgccgcaccggcctctccatccgcctcgccggaatttccccggtcggtccttcctccacccgtgcgccgtcggccgcaccaccaccacctccagcatcgcagcggcaagcggcgtgttccacgccgtcctcgtctccatgcagctgccgccggctgccctcgttgcctcctcgccggtcccggtcatcgtcctcatcgtcgtggcgttcgtccctccgtcaagccgttcgcgttcgtcgtccgcgttccgtcaagtgagccgctgcagccccgtcgtcgtcttcgtcctcggctccgcgtcgtcaagcgttgcgccggcggcgtctcgccttcgtccaaggatcgccgccgaagtcgtcccctcgcctttcgtctccgtcgttcccggccgtctccgccgcgcccacgtcgaagccctgtcgccgacggtcacactgcctgcctgccgccggtcggaccgtcgaagcctcgccggtcagaccgcccgaacaactgcggtcagaccaccactatcccaccggtcagaccgcgcgtacaactgccgttag

SEQ ID NO: 15535 - DNA, 1728 bp, Oryza sativa
  Clone ID: TFbOSC400773j.C1.o64.gm
atggtcacactaagaaaacgagagtttcgctacctgaagcaaggagatttgaccgtcacagagtacctgcacgagttctatcgtttggctcgctatgcaccagaagatgtggaaacggatgaagacaaacaagagaagtttctccaggggttaaaagatgagcttgcagtgcaactactcctagaggattatgaagattttgagaaacttgtggacaaagccgtgcaactcgaaagtgagcataatcggatgacgaactgcaagagaaggattgtcaacatcccagtaattccatgtggtaaccaaagacagcgcactgagccacttcagatcaccggatcttctgttgtgcatcaagagttcctgccccaagaagacggacgcaatgcagacaacaacactagcaatactaatgatgatgataccaccaacaaccatggttcttgccccattcatgaccacttagatcaagcgtgcaatgtcaacatcattcaccaagatatcgacgatagtatcaatgaaggcacccagaatgacaaccctagcaattttgactctgagaaagactccaatggtgatagcaataatggcaccactgatgccaatgttagcaaggatttccaaccaccaattccaactcctagtcagaacgatcgttcccagacggacaactcagcaaagaagacgttgatttgttacaactgcaaagaaccaggtcatttctccagagattgtccacagccgaagcgccgagccaagggcaatcaacatccggagggcgataccaagcagaagaccgtcatccgcttcaaccagcaatcagaaggaagcttctcctgtgaagagaagattccatccgcaacaggaggtcaagccaagcagttccgaaaggtaaagatttgctggaagtttgtcaagacgcaacggaagaagcgggcccgcccgccgctctcgctgacgggtggggcccacctgtcatcgccttcctcccgccgcgcccgccgccgcgcccgtgccctagcgccgccgccgccgcggattgcgccgcatcccgccgtccccgcgcgcattaaagagaggggaattactccccgcgtttccctctcccgattccccctcttttccctctctctctccctcggattcgtccggattcatcccgcgaagttcgccggcgtcttcaatggcgcccgagatctccgcgcgcggtttcctctctccccggccgcgctctccccctcccgttgctatatattcgatccccgtgcttcgctcttccgtttccgccgctcgccgctcgctctcgccgtcggattcgtgctcgcgccgtgctcctctctctccgccgtcgccgtcgaccttcggttcgccgccgacgtcgctccggtcctccgcccgactcggcgccacccccatcggcttcgccgagtggttgccgaccccgtccgccgctccgcttcgcccgccgactgccggagcaccgtcgccctcggcatcccgaaccgcgccgtcgccttcctccgctccggttcgccgccgccgtcgctccggtcttcctcccggctcggcgccacctccctcggcatcgccgcatcgccgtcgacctcgtccgcgcctccgtttcgctcgccgaccgtcggagcgccgccgtcatcgtcatcccgagccgcgccgccgtctttctccgctccgtccgccgtttccgccgccttcgctgcctcggggtga

SEQ ID NO: 15536 - DNA, 1506 bp, Oryza sativa
  Clone ID: TFbOSC400946j.C1.o3.fg
atgtcatggcatcgggttggtgtcctgctgctggtggctcagtcctgcctacctgtcccgggggttccggccgtaggtggggttgggtcggtactcttgtttatggctaggatgggttgggaactatgtcatgtcttccgtccgtataccgtggtgatggataacactggtaacaaaggctatgggaatgatggatccgatgactcaagaacccaagccaatgggaatgagaaaagcatcaacaaaacctcaccagagctaatccaaattgtggttaaccaaaccaacatgttggcaacagcctttcaactattacagaattggaacaacccagcaggggcaaccaacgttcaagtacctacagtccagcaacagtgcaagttatcagaatttctcaaaactgagcctccaacctttgccattgccgtcgatcctatggaagccagtgattggttgcgcacagtcgagaagaagctagggttgattcagtgcaccgaccaggagcgggttggcttcgcaacacatcagttggttggaccggcttcagagtggtgggatagctacgaagcatcacggccagaaggacataccatcacctggaacgagttttcatctgtattcaagagatcacatgttcccgcaggaatgatcacactaagaaaacgagagtttcgctaccggaagcaaggagatttgaccgtcacagagtacctgcacgagttctatcgtttggctcactatgcaccagaagatgtggaaacggatgaagacaaacaagagaagtttctccaagggttaaaagatgagcttgcagtgcaactactcctagaggattatgaagattttgagaaacttgtggacaaagccatgcaactcgaaagtgagcataatcggatgacgaactacaagagaaggattgtcaacatcccagtatttccatgtggtaaccaaagacagcgcactgagccacttcagatcaccggatcttctgttgcgcatcaagagttactaccccaagaagatggacacaacgcagacaacaacattagcaatactaatgctgatgataccaccaacaaccatggttcttgccccattcatgaccacttagatcaagcgtgcaatgtcaacagcattcaccaagatatcgacgatagtatcaatgaaggcacccagaatgacaaccctagcaattttgactctgagaaagactccaatggtgatagcaaatatggtaccactgatgccaatgttagcaaggatttccaaccaccaattccaactccaagtcagaatgatcgttcccagacggacaactcagtaaagaagacattgatttgttacaactgcaaagaaccaggtcatttctccagagattgtccacagccgaagcgtaacctgcgtcatcactccggccattatgcaagaagaagacaagtcactcgccttgtggtcactggagcaaacgccatacctgtgaggcctcgtgttaatcataacccatag

SEQ ID NO: 15537 - DNA, 1948 bp, Oryza sativa
  Clone ID: TFbOSC401006j.C1.o29.np
atggataacactggtaacaaaggctatgggaatgatggatccgatgactcaagaacccaagccaatgggaatgagaaaagcatcaacgaaaccttaccatagctaatccaaattgtggttaaccaaaccaacatgttggcaacagcatttcaactattacagaatcggaacaacccagcatgggcaaccaacgttcaagtacctatagtccagcaacagtgcaagttatcagaatttctcaaaactgggcctccaacctttgccattgccgtcgatcctatggaagccaatgattggttgcgcacagtcgagaagaatctggggttgattcagtgcacagaccaggagcgggttgtcttcgcaactcatcagttggttgggctagcttcagaatggtgggatagctacgaagtatcacggccagaaggacataccatcacttgggacgagtttttagctgtattcaagagatcacatgttcccgcaggaatgatcacactaagaaaatgagagttccgctacctaaagcaagaatatttgaccgtcatagagtacctgcacgagttccatcgtttggctcactatgcaccagaagatgtggaaacggatgaagataaacaagagaagtttctccaggggttaaaagatgagcttgcagtgcaactactcctagaggattatgaagattttgagaaacttctggacaaagccatacaactcgaaagtgagcataatcagatgaagaactgcaagagaaggattgtcaacatcccagtaattccatgtggtaaccaaagacagcgaactgagccacttcagatcaccggatcttctgttgcgcatcaagagttcctgccccaagaagatggatacaatgcagacaacaacattagcaatactaatgatgatgataccaccaccaaccatggttcttgccccattagtgaccactcgaatcaagcgtgcaatgtcaacaacattcaccaagatgtcgacgatagtatcaatgaaggcacccagaatgacaaccctagcaattgtgactctgagaaagaatccaatggtgatagcaactatggtaccactgatgccaatgttagcaaggatttccaaccaccaattccaactccaagtcagaatgatcgttcccagacggacagctcagtaaagaagaagttgatttgttacaactgcaaagaaccaggtcatttctctagagattgtccacaaccgaagcgtaacctgcgccatcactccgggcattatgcaagaagaagacaagtcactcgccttgtggtcactggagcaaacgccatacctgtttctctgaaaggcagcaagcccaaggaccacattgccaccagaagcatccacaactctcagagtgaagagtacttggttgagaaagttgacacccaagatatgaactatgagaagttctcgaactgaagccccatcttcaagtgccgcaacccagtcgaagtcagctagaggtgcaaccagggataagtcaagtgcatcctcttccccgacgtcgcctctgtttcgtggggaaaccatcggagacgcgtcctcgccggtaaacagtggcgttgctgccactgcaccacctccggcagccccttccgccgtgcccgagcaccgaccgacgtcgctgtctcctccgtcgacgtcgcagcgtcgtcctctcctccggctgtgtcacggggtcgataatatttacgttattacaaaggcacttaaggcctgacaatcaaaaataaacagcagcggactagcgggcctatggctccatcttcacaggcgctcaactggggtataagccaggactccacctaagacctcttctcaaaagcttctcttactggaggggggagaaaaaaccccccacttaattttggaatccccggtttgaatgaggcggatttggaggagggagcgagctagg

SEQ ID NO: 15538 - DNA, 1350 bp, Oryza sativa
  Clone ID: TFbOSC401130j.C1.o3.fg
atggataatactggtaacaaaggctatgggaatgatggatccgatgactcaagaacccaagccaatgggaatgagagaagcatcaacgaaacctcaccagagctaatccaaattgtggttaaccaaaccaacatgttggcaacagcctttcaactattacagaattggaacaacccagcaggggcaaccaacgttcaagtacctacagtccagcaacagtgcaagttatcagaatttctcaaaacggggcctccaacctttgccatggccgtcgatcctatggaagccagtgattggttgcgcacagtcgagaagaagctagggttgattcagtgcaccgaccaggagcgggttggcttcgcaactcatcagttggttggaccagcttcagagtggtgggatagctacgaagcatcacggccagaaggacataccatcacctggaacgagttttcctctgtattcaggagatcacatgttcccgcaggaatgatcacactaagaaaacgagagtttcgctacctgaagcaaggagatttgaccgtcacagagtacctgcacgagttctatcgtttggctcactatgcaccagaagatgtggaaacggatgaagacaaacaagagaagtttctccaggggttaaaagatgagcttgcagtgcaactacttctagaggattatgaagattttgagaaacttgtggacaaagccatgcaactcgaaagtgagcataatcggatgacgaactgcaagagaaggattgtcaacatcccagtaattccaggtggtaaccaaagacagcgcactgagccacttcagatcaccggatcttctgttgtgtatcaagagttcctgccccaagaagatgaacgcaatgcagacaacaacactagcaatactaatgctgatgataccaccaacaaccatggttcttgccccattagcgaccactcgaacaaagcgtgcaatgtcagtagcattcaccaagatgtcaacgatagtatcaatgttggaacccagaatgacaaccttagcaattttgactctgagaaagactccaatggtgatagcaataatggcaccactgatgccaatgttagcaaggatttccaaccaccaattccaactcctagtcagaacgatcgttcccagacggacaactcagcaaagaagacgttgatttgttacaactgcaaagaaccaggtcatttctccagagattgtccacagccgaagcgtaacctgcgtcatcactccggccattatgcaagaagaagacaagtcactcgccttgtggtcactggagcaaacgccgtacctgtgaggcctcatgttaattctaacccatag

SEQ ID NO: 15539 - DNA, 1046 bp, Oryza sativa
  Clone ID: TFbOSC401498j.C1.o2.np
atggatgaagtcgggcgtcgatggacattctccagggcaaatgaaggctacacgagctgcggctcggtagtcgagatgtcatacggcggagggttggtgcccaatgctaggggctcagttctgcctgcctgtcccgggtatcccggccgtaggtaggattgggtcggtactcttgtctaaggctaggatgggttggaaactatgtcacatctttacgacgggttccaaggccatggaatgcggagtaaagatgtgtcttgtgggttggcctgggttggcttgggacgagttgggacccaggtcgggttgccagttcggtccaattcatcgtaggccttgggttaaggcagtactagatggtcagctttgcgaagaagaagatgtcgtcagttgtttgccgaagctccggaagactgcaggatccgctagcgaagcgaaggaagcagtgaagccagctgtgaagcaggaaaaaagagttagttcctttaaggtcctgtccctagctctggtctattctttccttgtatgcttcctctctcaacccctaccttgtgacagatggataacactggtaacaaaggctatgggaatgatggatccgatgactcaagaacccaagccaatgggaatgagaaaagcatcaacgaaacctcaccagagctaatccaagttgtggttaaccaaaccaacatgttggcaacagcctttcaactcttacagaatcggaacaacccagcaggggcaaccaacgttcaagtacctacagtccagcaacataccgctgatgccaatgttagcaagggtttccaaccaccaattccaactccaagtcacaatgatcatccccagatggacagctcagcaaagaagacgttgatttgttacaactgcaaagaaccaggtcatttctccagagattgtccacagccgaagcgtaacctgcgccatcactccggccattatgcaagaagaagacaggtcactcgccttgtggtcactggagcaaacgccccctcgcccgacatctcccggaaaccggagctccc

SEQ ID NO: 15540 - DNA, 1143 bp, Oryza sativa
  Clone ID: TFbOSC401523j.C1.o3.gm
atggatgaagtcgggcgtcgatggacattctccagggcaaatgaaggctacacgagctgcggcccggtagtcgagatgtcatacggcggagggttggtgcccaatgctaggggctcagttctgcctgcctgtcccgggtatcccggccgtagtgaagccagctgtgaagcaggagtgaagatcttggagaacccgtcgcagaacctaagccaccctctaaatcggaacaacccagcaggggcaaccaacgttcaagtacctacagtccagcaacagtgcaagagatcacatgttccctcaggaatgatcacactaagaaaacgagcgtttcgctacctgaagcaaggggatttgaccgtcacagagtacctgcacgagttctatcgtttggctcgctatgcaccagaagatgtggaaacggatgaagaaaaacaagagaagtttctccaggggttaaaagatgagcttgcagtgcaactactcctagaggattatgaaaattttgagaaacttgtggacaaagccatgcaacttgaaagtgagcataatcggatgacgaactgcaagagaaggattgtcaacatcccagtatttccaggtggtaaccaaagacagcgcactgagccacttccgatcatcggatcttctgttgggtatcacgagttcctgccccaagaagatgaacgcaatgtagacaacaacaacatcattcaccaagatatcgacgatagtatcaatgaaggcacccagaatggcaaccctagcaattttgactctgagaaagactccaagggtgatagcaataatggtaccactgatgccgatgttagcaaggatttccaaccaccaattccaactcctagtcaggacgatcgttcccaggcggacaactcagcaaagaagacgttgatttgttacaactgcaaagaaccaggtcatttctcgagagattgtccacagccgaagcgtaacctgcgtcatcactccggccattatgcaagaagaagacaggtcactcgccttgtggtcactggagcaaacgccgtacctgtttcactgaaaggcagcaagccaaaggacctcatcgtcaccagaagcatccacaactctcggagtgaagagtacctggtggacaaagtttaa

SEQ ID NO: 15541 - DNA, 1350 bp, Oryza sativa
  Clone ID: TFbOSC411286j.C1.o2.fg
atggataacactggtaacaaaggctatgggaatgatggatccgatgactcaagaacccaagccaatgggaatgagaaaagcatcaacgaaacctcaccagagctaatccaaattgtggttaaccaaaccaacatgttggcaacagcctttcaactattacagaatcggaacaacccagcaggggcaaccaacgttcaagtacctacagtccagcaacagtgcaagttatcagaatttctcaaaacggggcctccaacctttgccatggccgtcgatcctatggaagccagtgattggttgcgcacagtcgagaagaagctagggttgattcagtgcaccgaccaggagcgggttggcttcgcaactcatcagttggttggaccggcttcagagtggtgggatagctacgaagcatcacggccagaaggacataccatcacctggaacgagttttcatctgaattcaggagatcacatgttcccgcaggaatgatcacactaagaaaacgagagtttcgctacctgaagcaaggagatttgaccgtcacagagtacctgcatgagttctatcgtttggctcactatgcaccagaagatgtggaaacggatgaagacaaacaagagaagtttctccaggggttaaaagatgagcttgcagtgcaactacttctagaggattatgaagattttgagaaacttgtggacaaagccatgcaactcgaaagtgagcataatcggatgacgaactgcaagagaaggattgtcaacatcccagtatttccaggtggtaaccaaagacagcgcactgagccacttcagatcaccggatcttctgttgtgcatcaagagttcctgccccaagaagatgaacacaatgcagacaacaacactagcaatactaatgatgatgataccaccaacaaccatggttcttgccccattagtgaccactcgaataaagcgtgcaatgtcagtagcattcaccaagatgtcaacgatagtatcaatgttggaacccagaatgacaaccttagcaatttcgacactgagaaagactccaatggtgatagcaactatggtaccactgatgccaatgttagcaaggattcccaaccaccaattccaactccaagtcaaaatgatcgtccccagatggacagctcagtaaagaagacgttgatttgttacaactgcaaagaaccaggtcatttctctagagattgtccacagccgaagcgtaacctgcgccatcactccggccattatgcaagaagaagacaagtcactcgccttgtggtcactggagcaaacgctgtacctgtgaggcctcatgttaattctaacccatag

SEQ ID NO: 15542 - DNA, 1206 bp, Oryza sativa
  Clone ID: TFbOSC414125j.C1.o2.fg
atgcaactcgaaagtgagcataatcggatgacgaactgcaagagaaggattgtcaacatcccagtaattccaggtggtaaccaaagacagcgcactgagccacttcagatcaccggaccttctgttgtgcatcaagagtccccgccccaagaagatggacgcaatgcagacaacaacactagcaatactaatgatgatgataccaccaacaaccatggttcttgccccattagtgaccactcgaacaaagcgtgcaatgtcagtagcattcaccaagatgtcaacgatagtatcaatgttggaacccagaatgacaaccttagcaattttgacactgagaaagactccaatggtgatagcaactatggtaccactgatgccaatgttagcaaggatttccaaccaccaattccaactccaagtcacaatgatcatccccagatggacagctcagcaaagaagacgttgatttgttacaactgcaaagaaccaggtcatttctctagagattgtccacagccgaagcgtaacctgcgccatccctccggccattatgcaagaagaagacaggtcactcgccttgtggtcactggagcaaacgccgtacccgcagcaagccaaaggacctcatcatccccagaagcgtccgcaatccacattaaagaataccacctgttagagataagccgaaagatgattgataaaaagagattggcaaagatgttctctagcataaaagaagtaggccgaaaggtgattgataaacagaaacatgctctgcatcgctcaaggaagacccctgattgtaattgccccgcaacagtcaccttgtcattaagtaagcaagatgacctaggtaaaagtgtttctatgaaggcaaggagtgaaatcttcaactcggtatcagatgctacacgaagtgaaaagtgcaagcaccggttaccagttgataacttgtctgaggttgactccgaagatatgaatcatgagaagttctggaacggaagcatcactgaactaccgcaacctagtctgagtcagccaaaaggtgcaccctggtccaagtcaggtgaagagaagattccatccgcaacaggaggtcaagccaagcagttccgagtggtaaagttttgctggaagttcgtcaagacgcaacggaagaagtcagacaagaagagaagaccgcccaacctaccttcttgctag

SEQ ID NO: 15543 - DNA, 1917 bp, Oryza sativa
  Clone ID: TFbOSC414146j.C1.o1.fg
atggataacactggtaacaaaggctatgggaatgatggatccgatgactcaagaacccaagccaatgggaatgagaaaagcatcaacaaaacctcaccagagctaatccaaaaagtggttaaccaaaccaacatgttgacaacagcttttcaactattacagaattggaacaacccagcaggggcaaccaacgttcaagtacctacagtccagcaacagttcaagttatcagaatttctcaaaactgagcctccaacctttgccattgccgtcgatcctatggaagccagtgattggttgcgcacagtcgagaagaagctagggttgattcagtgcaccgaccaggagcgggttggcttcgcaactcatcagttggttggaccggcttcagagtggtgggatagctacgaagcatcacggccagaaggacataccatcacctggaacgagttttcatctgtattcaagagatcacatgttcccgcaggaatgatcacactaagaaaacgagagtttcgctacctgaagcaaggagatttgaccgtcacagagtacctgcacgagttctatcgtttggctcgctatgcaccagaagatgtggaaacggatgaagacaaacaagagaagtttctccaggggttaaaagatgagcttgtagtgcaactacttctagaggattatgaagattttgagaaacttgtggacaaagccatgcaactcgaaagtgagcataatcggatgacgaactgcaagagaaggattgtcaacatcccagtaattccaggtggtaaccaaagacagcgcactgagccacttcagatcaccggaccttctgttgtgcatcaagagtccccgccccaagaagatggacgcaatgcagacaacaacactagcaatactaatgatgatgataccaccaacaaccatggttcttgccccattagtgaccactcgaacaaagcgtgcaatgtcagtagcattcaccaagatgtcaacgatagtatcaatgttggaacccagaatgacaaccttagcaattttgacactgagaaagactccaatggtgatagcaactatggtaccactgatgccaatgttagcaaggatttccaaccaccaattccaactccaagtcacaatgatcatccccagatggacagctcagcaaagaagacgttgatttgttacaactgcaaagaaccaggtcatttctctagagattgtccacagccgaagcgtaacctgcgccatccctccggccattatgcaagaagaagacaggtcactcgccttgtggtcactggagcaaacgccgtacccgcagcaagccaaaggacctcatcatccccagaagcgtccgcaatccacattaaagaataccacctgttagagataagccgaaagatgattgataaaaagagattggcaaagatgttctctagcataaaagaagtaggccgaaaggtgattgataaacagaaacatgctctgcatcgctcaaggaagacccctgattgtaattgccccgcaacagtcaccttgtcattaagtaagcaagatgacctaggtaaaagtgtttctatgaaggcaaggagtgaaatcttcaactcggtatcagatgctacacgaagtgaaaagtgcaagcaccggttaccagttgataacttgtctgaggttgactccgaagatatgaatcatgagaagttctggaacggaagcatcactgaactaccgcaacctagtctgagtcagccaaaaggtgcaccctggtccaagtcaggtgaagagaagattccatccgcaacaggaggtcaagccaagcagttccgagtggtaaagttttgctggaagttcgtcaagacgcaacggaagaagtcagacaagaagagaagaccgcccaacctaccttcttgctag

SEQ ID NO: 15544 - DNA, 2115 bp, Oryza sativa
  Clone ID: TFbOSC415189j.C1.o2.gm
atggataatactggtaacaaaggctatgggaatgatggatccgatgactcaagaacccaagccaatgggaatgagagaagcaccaacgaaacctcaccagagctaatccaagttgtggttaaccaaaccaacatgttggcaacagcctttcaactattacagaattggagcagcccagcaggggcaaccaacgttcaagtgcctacagtccagcaacagtgcaagttatcagaatttctcaaaactgagcctccaacctttgccattgccgtcgatcctatggaagccagtgattggttgcgcacaatcgagaagaagctagggttgattcagtgcaccgaccaggagcgggttggcttcgcaactcatcagctggttggaccggcttcagagtggtggggaagctacgaagcatcacggccagaaggacataccatcacctggaacgagttttcatctgtattcaagagatcacatgttcccgcaggaatgatcacactaagaaaacgagagttccgctacctgaagcaaggagatttgaccgtcacagagtacctgcacgagttctatcgtttggctcactatgcaccagaagatgtggaaacggatgaagacaaacaagagaagtttctccaggggttaaaagatgagcttgcagtgcaactactcctagaggattatgaagattttgagaaacttgtggacaaagccatgcaactcgaaagtgagcataatcggatgacgaactgcaagagaaggattgtcaacatcccagtaattccatgtggtaaccaaagacagcgcactgagccacttcagatcaccggatcttctgttgtgcatcaagagttcctgccccaagaagacggacgcaatgcagacaacaacagtagcaatactaacgatgatgataccaccaacaaccatggttcttgccccattagtgaccactcgaataaagcgtgcaatgtcagtagcattcaccaagatgtcaacgatagtatcaatgttggaacccagaatgacaaccttagcaattttgacactgagaaagactccaatggtgatagcaactatggtaccactgatgccaatgttagcaaggatttccaaccaccaattccaactccaagtcaaaatgatcgtccccagatgggcagctcagtaaagaagacgttgatttgttacaactgcaaagaaccaggtcatttctctagagattgtccacagccgaagcgtaacctgcgccatcactccggccattatgcaagaagaagacaagtcactcgccttgtggtcactggagcaaacgccgtacctgcgggcccgcccgccactctcgctgacgggtgggacccacctgtcatcgccttcctcccgccgcgcccgccgcccgcccgtgccctagcgccgccgccgccgctgaatccgccgcatcccgccttccccgcgcgccttaatgaggggggaatcactccccgtgattccctctcccgtttccccctcttttccctctctctctccctcggattcgtccggattcatcccgcgaagttcgccggcgtcttcaatggcgcccgagatctccgcgcgcggtttcctctctccccggccgcgctctccccctcccgttgctatatattcgatccccgtgcttcgctcttccgtttccgccgctcgccgctcgctctcgccgtcggtttcgtgcccgcgccgtgctcctctctctccgccgtcgccgccgaccttcggttcgccgccgacgtcgctccggtcctccgcccgactcggcgccacctccttcggcttcgccgagtggttgccgaccccgtccgccgctccgcttcgcccgccgactgccggagcaccgtcgccctcggcatcccgaaccgcgccgtcgccttcctccgctccggttcgccgccgccgtcgctccggtcttcctcccggctcggcgccacctccctcggcatcgccgcatcgccgtcgacctcgtccgcgccttcgtttcgctcgccgaccgtcggagcgccgccgtcatcgtcatcccgagccgtgccgccgccttcttccgctccggccgccgttctcgtcgtcgtcgttgtcccggggtga

SEQ ID NO: 15545 - DNA, 1505 bp, Oryza sativa
  Clone ID: TFbOSC417492j.C1.o2.np
cataccggcggaggggttggtgcccaaatgctaaggggctcagttctgccctgcctgtcccgggtatcccggccgtaggtaggattgggtcggtactcttgtctaaggctaggatgggttggaaactatgtcacatctttacgacgggttccaaggccatggataacactggtaacaaaggctatgggaatgatggatccgatgactcaagaacccaagccaatgggaatgagaaaagcatcaacgaaacctcaccagagctaatccaagttgtggttaaccaaaccaacatgttggcaacagcctttcaactcttacagaatcggaacaacccagcaggggcaaccaacgttcaagtacctacagtccagcaacagtgcaagttatcagaatttctcaaaacggggcctccaacctttgccatggccgtcgatcctatggaagccagtgattggttgcgcacagtcgagaagaagctagggttgattcagtgcaccgaccaggagcgggttggcttcgcaactcatcagttggttggaccggcttcagagtggtgggatagctacgaagcatcacggccagaaggacataccatcacctggaacgagttttcatctgtattcaagagatcacatgttcccgcaggaatgatcacactaagaaaacgagagtttcgctacctgaagcaaggagatttgaccgtcacagagtacctgcatgagttctatcgtttggctcactatgcaccagaagatgtggaaacggatgaagacaaacaagagaagtttctccaggggttaaaagatgagcttgcagtgcaactacttctagaggattatgaagattttgagaaacttgtggacaaagccatgcaactcgaaagtgagcataatcggatgacgaactgcaagagaaggattgtcaacatcccagtatttccaggtggtaaccaaagacagcgcactgagccacttcagatcaccggatctcctgttgtgcatcaagagttcctgccccaagaagatgaatgcaatgcagacaacaacactagcaatactaataatgatgataccaccaacaaccatggttcttgccccattagtgaccactcgaataaagcgtgcaatgtcggtagcattcgccaagatgtcaacgatagtatcaatgttggaacccagaatgacaaccttagcaattttgacactgagaaagactccaatggtgatagcaacgatggtaccgctgatgccaatgttagcaagggtttccaaccaccaattccaactccaagtcacaatgatcatccccagatggacagctcagcaaagaagacgttgatttgttacaactgcaaagaaccaggtcatttctccagagattgtccacagccgaagcgtaacctgcgccatcactccggccattatgcaagaagaagacaggtcactcgccttgtggtcactggagcaaacgccgtacctgtgaggcctcatgttaattctaaccca

SEQ ID NO: 15546 - DNA, 1676 bp, Oryza sativa
  unsure (1)..(1676): unsure at all n locations
  Clone ID: TFbOSC422569j.C1.o2.np
atggataacactggtaacaaaggctatgggaatgatggatccgatgactcaagaacccaagccaatgggaatgagaaaagcatcaacgaaacctcacccgagctaatccaaattgtggttaaccaaaccaacatgttggcaacagcctttcaactattacagaatcggaacaacccagcaggggcaaccaacgttcaagtacctacagtccagcaacaatgcaagttatcagaatttctcaaaacggggcctccaacctttgccatggccgtcgatcctatggaagctagtgattggttgcgcacagtcgagaagaagctagggttgattcagtgcaccgaccaggagcgggttggcttcgcaactcatcagttggttgaaccggcttcagagtggtgggatagctacgaagcatcacggccagaaggacataccatcacctggaacgagttttcatctgtattcaagagatcacatgttcccgcaggaatgatcacactaagaaaacgagagttccgctacctgaagcaaggagatttgaccgtcacagagtacctgcacgagttctatcgtttggctcactatgcaccagaagatgtggaaacggatgaagacaaacaagagaagtttctccaggggttaaaagatgagcttgcagtgcaactacttctagaggattatgaagattttgagaaacttgtggacaaagccatgcaactcgaaagtgagcataatcggatgacgaactgcaagagaaggattgtcaacatcccagtatttccaggtggtaaccaaagacagcgcactgagccacttcagatcaccggatcttctgttgcgcatcaagagtttccgccccaagaagatggacgcaatgcagacaacaacactagcaatactaatgatgatgataccaccaacaaccatggttcttgccccattagtgaccactcgaataaagcgtgccatgtcagtagcattcaccaagatgtcaacgatagtatcaatgatggcacccaaaatgacaaccctagtaattgggactctgggaaggactccaatggtgatagcaataatggtaccactgatgccaatgttagcaaggattcccaaccaccaattccaactccaagtcaaaatgatcgtccccagatggacagctcagtaaagaagacgttgatttgttacaactgcaaagaaccaggtcatttctctagagattgtccacagccgaagcgtaacctgcgccatcactccggccattatgcaagaagaagacaggtcactcgccttgtggtcactggagcaaacgccgtacctgtttcactgaaaggcagcaagccaaaggacctcatcgtcaccagaagcatccacaactctcggagtgaagagtacctggtggacaaagttgacgccaaagatatgaattatgagaagttctggaactgaagtcccatcttcaagtgccacaatccagtcgaagtcagctagaggtgcaaccagggaaaagtcaggtgaagagaagattccatctgcaaccccagcccgaagtccttccctcctccctctctttctctccctctccttctctccctcctcttgggcctcctcccctcggcccagctccctttcccccccctctttttncccgnctgcctccttttctcccccctctt

SEQ ID NO: 15547 - DNA, 1506 bp, Oryza sativa
  Clone ID: TFbOSC6122j.C1.o1.fg
atgtcatggcagagggttggtgccctgctgctagggggctcagtcctgcctgcctgtcccgggtgtcccggccgtaggaggattgggtcggtactcttgtttatggctaggatgggttgggaactatgtcacgtcttccgtccgtataccgtggtgatggataatactggtaacaaaggctatgggaatgatggatccgatgactcaagaacccaagccaatgggaatgagagaagcatcaacgaaacctcaccagagctaatccaagttgtggttaaccaaaccaacatgttggcaacagcctttcaactattacagaattggaacaacccagcaggggcaaccaacgttcaagtgcctacagtccagcaacagtgcaagttatcagaatttctcaaaactgagcctccaacctttgccattgccgtcgatcctatggaagccagtgattggttgcgcacaatcgagaagaagctagggttgattcagtgcaccgaccaggagcgggttggcttcgcaactcatcagctggttggaccggcttcagagtggtgggatagctacgaagcatcacggccagaaggacataccatcacctggaacgagttttcatctgtattcaagagatcacatgttcccgcaggaatgatcacactaagaaaacgagagtttcgctacctgaagcaaggagatttgaccgtcacagagtacctgcatgagttctatcgtttggctcactatgcaccagaagatgtggaaaatgatgaagaccaacaagagaagtttctccaggggttaaaagatgagctcgcagtgcaactactcctagaggattatgaagattttgagaaacttgtggacaaagccatgcaacttgaaagtgagcataatcggatgacgaactgcaagagaaggattgtcaacatcccagtaattccaggtggtaaccaaagacagcgcactgagccacttcagatcaccggatcttctgttgtgcatcaagagttcctgccccaagaagatgaacgcaatgcagacaacaacactagcaatactaatgatgatgataccaccaacaaccatggttcttgccccattagtgaccactcgaacaaagcgtgcaatgtcagtagcattcaccaagatgtcaacgatagtatcaatgttggaacccagaatgacaaccttagcaattttgacgctgagaaagactccaatggtgatagcaactatggtaccactgatgccaatgttagcaaggatttccaaccaccaattccaactccaagtcacaatgatcatccccagatggacagctcagcaaagaagacgttgatttgttacaactgcaaagaaccaggtcatttctctagagattgtccacagccgaagcgtaacctgcgccatcactccggccattatgcaagaagaagacaggtcactcgccttgtggtcactggagcaaacgccgtacccgtgaggccttgtgttaatcagaatccatag

SEQ ID NO: 15548 - DNA, 1503 bp, Oryza sativa
  Clone ID: TFbOSC6489j.C1.o1.np
gtcatatggcagagggttggtgccctgctgctaggggctcagttctgcctgcctgtcccgggtattccggccgtaggcgggattgggtcggtactcttgtctatggctaggatgggtcggaaactatgtcacgtcttccgtccgtataccgtggtgatggataatactagtaacaaaggctatgggaatgatggatccgatgactcaagaacccaagccaatgggaatgagagaagcaccaacgaaacctcaccagagctaatccaagttgtggttaaccaaaccaacatgttggcaacagcctttcaactattacagaattggaaccacccagcaggggcaaccaacgttcaagtgcctacagtccagcaacagtgcaagttatcagaatttctcaaaactgagcctccaacctttgccattgccgtcgatcctatggaagccagtgattggttgcgcacagtcgagaagaagctagggttgattcagtgcaccgaccaggagcgggttggcttcgcaactcatcagttggttggaccggcttcagagtggtgggatagctacgaagcatcacggccagaaggacataccatcacctggaacgagttttcatctgtattcaagagatcacatgttcccgcaggaatggtcacactaagaaaacgagagtttcgctacctgaagcaaggagatttgaccgtcacagagtacctgcacgagttctatcgtttggctcactatgcaccagaagatgtggaaacggatgaagacaaacaagagaagtttctccaggggttaaaagatgagcttgcagtgcaactacttctagaggattatgaagattttgagaaacttgtggacaaagccatgcaactcgaaagtgagcataatcggatgacgaactgcaagagaaggattgtcaacatcccagtatttccaggtggtaaccaaagacagcgcactgagccacttcagatcaccggatcttctgttgcgcatcaagagtttccgccccaagaagatggacgcaatgcagacaacaacactagcaatactaatgatgatgataccaccaacaaccatggttcttgccccattagtgaccactcgaataaggcgtgcaatgtcagtagcattcaccaagatgtcaacgatagtatcaatgttggaacccagaatgacaaccttagcaatttcgacactgagaaagactccaatggtgatagcaactatggtaccactgatgccaatgttagcaaggatttccaaccaccaattccaactccaagtcacaatgatcatccccagatggacagctcagcaaagaagacgttgatttgttacaactgcaaagaaccaggtcatttctctagagattgtccacagccgaagcgtaacctgcgccatcactccggccattatgcaagaagaagacaagtcactcgccttgtggtcactggagcaaacgccgtacctgtgaggcctcatgttaattctaaccca

SEQ ID NO: 15549 - DNA, 2376 bp, Oryza sativa
  Clone ID: TFbOSC900179j.C1.o6.gm
atggagagctcaccggcgtgcgatggaaacggcgcttcggcgacgtttggcggcaagcgagcggcggccgaggtagctctagctgcggcggcggttgcgcggcgcggcggcgagcctagcagcgacggcgtgcggccgaaggtcggcagcgggcggcggaggcaagaaaaaggggaaacttcagggcgtgacaagaagccttccatgagcccaccaccctcttgcctcaccttcctcggctccggcctactccgactcagctccctcttcctcaccgcgcgccatctccttgccgccaacagctacgccagtcacctcgtctgcgtcgatgatccttgcaccgaccaggagcgggttggcttcgcaactcatcagctggttggaccggcttcagagtggtgggatagctacgaagcatcacggccagaaggacataccatcacctggaacgagttttcatctgtattccggagatcacatgttcccgccggaatgatcacactaagaaaacgagagtttcgctacctgaagcaaggagatttgaccgtcacagagtacctgcatgagttctatcgttcggctcactatgcaccagaagatgtggaaacggatgaagacaaacaagagaagttcctccaggggttaaaagatgagctcgcagtgcaactacttttagaggattatgaagattttgagaaacttgtggacaaagccatgcaactcgaaagtgagcatagtcggatgacgaactgcaagagaaggatggttaacaacccagtatttccaggtggcaaccaaagacagcgcactgagccacttcagatcaccggatcttctgttgtgtatcaagagttcctgccccaaggagatgaacgcaacgcagacaaccacaatagcaatactaatgctgatgataccaccaacaaccatggttctggccccattagtgaccactcgaataaagcgtgcaatgtcagtagcattcaccaagatgtcaacgatagtatcaatgttggaacccagaatgacaaccttagcaattttgactctgagaaagactccaatggtgatagcaactatggtaccactgatgccaatgttagcaaggatttccaaccgccaattccaactccacgtcacaatgatcatccccagatggacagctcagcaaagaagacgttgatttgttacaactgcaaagaaccaggtcatttctctagagattgtccacagccgaagcgtaacctgcgccatcactccggccattatgcaagaagaagacagcatcgccgccacctcctccacgccggcctgccctccgtttcgcgaggagacccccggaactacgttcccgccgtcgccctcccctttccctcgcgccggccacctccagccgccttcctctcctcgcccgaacgccgcccggccgcgccgtcttctccctcggcctcgcagctgccccctctccctcggtcagccctccgtttcgcggggaaatcaccggagacgcgccctcgccggcgtccagtggcgtcgccaccacttctccgcctccggccgcctctgccacgtccccggagcgccggccgacgtcgccaccaccttcctcggctccacgacgccgctctcatccccggcatcacctccgcctcgcccgaacttcgccggaacaccgtcgcccgcgccggtttctccttcctcctcggcggcatctcctccggctgccccggtcgccgcgccagagcgtcggccgacgtcgccgtctcctccctcggcgtcgccgcatcgccctccaccccggcctgccctcggtttcgccggaacgtcgccgcgaacctctccgtccgcctcaccggagttgttcggccgcccgtccctcctcgccgtgcatcggtcggccacctccaccaccatcttcggcatcgcagcggcaaggtcgtcctcggcatcgtttcccctccatccaaacccctccgcggtccatcatcgtcgtctccgatcgttctcgtcgtcgacgtcccgttcatcctcgctcggctcgtcgtctcgcggcgccgcctccgtcatcgtcatcgctgcggcgtgttccgcgtcgtccccgtctctgtgcagccactgccggctgccctcgtcgccccctcgccggtcccggtcgtcgtcgtcgtcgtcgtcctctcgtcgttcccggtcgctgcagcccccgtcatcgtcttcgtcctcgcctccgcgtcgtcaagcctcgtgccggccgcgtctcgccttcgtccaaggatcgccgccgaagccgtcccctcgccgttcgtctccgttgtgcccgtctgtctccgccgcgcccgttcgtcgttgtcgttcccgcgcctcgtcgcgtggtggtaa

SEQ ID NO: 15550 - DNA, 1518 bp, Oryza sativa
  Clone ID: TFbOSC900319j.C1.o14.fg
atggataatactggtaacaaaggctatgggaatgatggatccgatgactcaagaacccaagccaatgggaatgagaaaagcatcaacgaaacctcaccagagctaatccaaattgtggttaaccaaaccaacatgttggcaacagcctttcaactattacagaatcggaacaacccagcaggggcaaccaacgttcaagtacctacagtccagcaacagtgcaagttatccgaatttctcaaaacggggcctccaacctttgccattgccgtcgatcctatggaagccagtgattggttgcgcacaatcgagaagaagctagggttgattcagtgcaccgaccaggagcgggttggcttcgcagctcatcagttggttggaccggcttcagagtggtggtatagctacgaagcatcacggccagaaggacataccatcacctggaacgagttttcatctgtattcaagagatcacatgttcccgcaggaatggtcacactaagaaaacaagagtttcgctacctgaagcaaggagatttgaccgtcacagagtacctgcatgaattctatcgtttggctcactatgcaccagaagatgtggaaacggatgaagacaaacaagagaagtttctccaggggttaaaagatgagcttgcagtgcaactacttctagaggattatgaagattttgagaaacttgtggacaaaaccatgaaactcgaaagtgagcataatcggaggacgaactgcaagagaaggattgtcaacatcccagtatttccaggtggtaaccaaagacagcgcactgagccacttcagatcaccggatcttctgttgcgcatcaagagtttccgccccaagaagatggacgcaatgcagacaacaacactagcaatactaatgatgatgataccaccaacaaccatggttcttgccccattagtgaccactcgaataaagcgtgcaatgtcagtagcattcaccaagatgtcaacgatagtatcaatgttggaaaccagaatgacaaccttagcaattttgactctgagaaagactccaatggtgatagcaactatggtaccactgatgccaatgttagcaaggatttccaaccaccaattccaactccaagtcacaatgatcgtccccagatggacagctcagtaaagaagacgttgatttgttacaactgcaaagaaccaggtcatttctctagagattgtccacagccgaagcgtaacctgcgccatcactccggccattatgcaagaagaagacgagtcactcgccttgtggtcactggagcaaacgccgtacctgtttcactgaaaggcagcaagccaaaggacctcatcgtcaccagaagcatccacaactctcggagtgaagagtacttggttgacaaagtttacgaggtgattgatagaagataccagcaaaggtgtttattatcgaaccaagaagtaggtcgaaaggtgattgataagagaaatctaaaaagaatacgtcagggctga

SEQ ID NO: 15551 - DNA, 1266 bp, Oryza sativa
  Clone ID: TFbOSC900373j.C1.o9.fg
atggataatcctggtaaccaaggctatgggaatgatggatccgatgactcaagaacccaagccaatgggaatgagagaagcatcaacgcaacctcaccagagctaatccaagttgtggttaaccaaaccaacatgttggcaacagcctttcaactattacagaattggaacaacccagcaggggcaaccaacgttcaagtgcctacagtccagcaacagtgcaagttatcagaatttctcaaaactgagcctccaacctttgccattgccgtcgatcctatggaagccagtgagtggttgcgcaccatcgagaagaagctagggttgattcagtgcaccgaccaggagcgggttggcttcgcaactcatcagctggttggaccggcttcagagtggtgggatagctacgaagcatcacggccagaaggacataccatcacctggaacgagttttcatctgtattcaggagatcacatgttcccgcaggaatgatcacactaagaaaacgagagtttcgctacctgaagcaaggggatttgaccgtcacagagtacctgcacgagttctatcgtttggctcgccatgcaccagaagatgtggaaacggatgaagaaaaacaagagaagtttctccaggggttaaaagatgagcttgcagtgcaactactcctagaggattatgaaaattttgagaaacttgtggacaaagccatgcaacttgaaagtgagcataatcggatgacgaactgcaagagaaggattgtcaacatcccagtatttccaggtggtaaccaaagacagcgcactgagccacttcagatcatcggatcttctgttgggtatcacgagttcctgccccaagaagatgaacgcaatgtagacaacaacaacatcattcaccaagatatcgacgatagtatcaatgaaggcacccagaatggcaaccctagcaattttgactctgagaaagactccaagggtgatagcaataatggtaccactgatgccaatgttagcaaggatttccaaccaccaattccaactcctagtcaggacgatcgttcccaggcggacaactcagcaaagaagacgttgatttgttacaactgcaaagaaccaggtcatttctcgagagattgtccacagccgaagcgtaacctgcgtcatcactccggccattatgcaagaagaagacaagtcactcgccttgtggtcactggagcaaacgtcatacctgtgaggcctcgtgttaatcataacccatag

SEQ ID NO: 15552 - DNA, 3836 bp, Oryza sativa
  Clone ID: TFbOSC14917j.C1.o1.np
atggctggttttaccgatgcactgaggctggataaatttaccggtgtgcactttaagagatggcagatcagggtcactctgtggctaacagctatgaaatgcttctgggtgagtactggcaagcctataggcgttcttaatgctgatcagcagaaagaaatcgatgaggccactactctctttgtgggatgcattcttagtgtgcttagcgatcgtctggtcgaggtgtatatgcatatgaccgacgctaaggagttgtgggatgcactgaatactaaattcggtgctactgatgctagcaatgatctgtatatcatggagcagtttcatgactacaagatggctgacaaccgttctgtagtcgaataggctcatgagatacaaaccatggctaaggaactcgaactccttaagtgtgtcttatctaacaaatttgtggccgggtgcattatcgcgatactacctccatcttggagaggtttcggtactgcactcaaacacaagagacaggaatactccgttgaggggttgatagcgtctcttgatgttgaggagaaagctcgggaaaaagataccgcgtctaagggcgatggtgggcagtctactaccaatgttgtgcacaaggcccagaacaaaagcaagggaaaacacaaaactcagcagaccaccaacttcaagaagaagaagaacaacaacaatcctaatcaggatgagaagacttgctttgtgtgtggtcaacctagccatctagccaggaagtgtccacaacgcaaggggatgaaggcacctgcagggcagacctctaagtctgctaatgtgaccattggcaacactagagatggaagcgggtagtaatttacctactgttttttcagttaatcagtctactaattggtgggttgatacaggggccaatgtacatgtttgtgctgacatctcattgttttcttcttatcaggccgcacggggttccaccgtcctaatggggaatgggtcacatgcttctgttcatggtgttggcacggtagatctgaagtttactttgggaaagatcgtgcagctgaagaacgtgcagcatgtcccttctatcgataggaatctcgttagtggctcccgtctgactagagacggatttaagttggtcttttgagtctaataaagtagttgtgtctaaacatggatattttattggtaaaggttatgagtgcggaggcctgttccgcttttccctttctgatttctgcaataagtctgtgaactatatttgtggcagtgtggatgatgaggctaatgtttggcactcacgtttatgtcatattaattttggtttgatgtctcggctttccagcatgtgtttaattcctaagttttccattgtcaaaggttctaaatgccatagttgtatgcaaacgaagcaatctcgcaagcctcacaaggctgccgaggagagaaacttggcaccactagaacttctacattcagatctttgtgaaatgaatggggtgttgacgaagggtggaaaacgatatttcatgacgttgattgatgatgctactagattttgctatgtgtacttgttgaaaacgaaagacgaggctctagactattttaaaatttataaggcagaagttgaaaatcaacttgacagaaagataaaaaggcttaggtctgatcgtggtggagagtttttctcaaacgagtttgacttattttgtgaggaacatggcatcatacatgagaggatgcctccttattctcctgagtctaatgggattgctgaaaggaagaaccgcactctgactgacttggtgaacgcattgttgaactcgaatcatgtgttaaacagagttcctaacagaaataaggacaaaacaccatatgagatatggattgggagaaaaccatcactttcttatttgcgcacatgggggtgtttggcgaaagtcaatgtaccaataacgaaaaagcgcaaacttggacctaagactgtggactgtatctttctgggatatgctcatcacagcattgcctatagatttttaatatttaaatctgaggtacctgacatgcatgttggtacaattatggagtctcgtgatgctaccttctttgagagctttttcccaatgaaggatacacatagtagttcgagccaaccctctgaaataattcccagttcaatcacaccaccagaacaaactgaacatacacatgaacatgtcattgaggaggatgtcagtgaagctcctcgaaggagtaagagacaaaggacggctaagtcctttggtgatgatttcactgtgtacctcgtggatgacactcttaagtcaatttcagaagcatatgcatctcctgatgcagactactggaaggaggctttccgtagtgaaatggattctattatcgctaacgggacttgggaggtgatagagtgaccctatgggtgtaaacctgtggggtgcaagtgggtgttcaagaagaagcttaggcctgacggtactattgaaaagtacaaggcttggcttgttgctaagggctacactcagaaagaaggcgaatatttctttgacacttactcacctgttgctagactgaccacaatttgtgtgctactttccctagcagcctcacatggtcttttcgttcaccaaatgaacgttaagacagcttttcttaatggagagctggatgaggagatctatatggatcagcctgataggtttgtagttgaaggtcaagaaggcaaagtgtgcaaattgttaaagtctttgtatggcctgaaacaagctcctaagcaatggcatgagaaatttgacaaaacattgacatctccaggctttgctgtcaatgaggcagataaatgtgtgtattatcgccatggtgggggtgagggagttattctgtgcttgtttgttgatgacatactgatatttgggacaaaccttgaggtgataaatgaggttaaatcattcttgtctcaaaattttgatataaaggatttgggagtagctgatgttatcttaaacattaagctaattagaggtgagaatgggattacactcttgcagtcccattatgtggagaagatcttgaatcgctctggctacattgatagtaagccttctccaacacctggctagaacaagagaattgctaggaatcaactggaatactccgaaatcattggctcactgatgtacctggctagtgcaactaggcctgatatctcctttgctgtgagcaagttgagccgatttacctctaatccaggagatgatcactggcgtgtacttgagcgagtaatgcgctatctgaaaggtactatggaattggggcttcactattctgggtatcctgcggtactggagggatatagtgattataactggatctctgatgtggatgagatcaaagccactagtggatatgttttcacactaggtggtggtgctgtttcgtggagatcttgcaaacagaccattttgatgaggtcaaccatggaagcagagttgacggcactggatactgctactgttgaggcagaatggctgcgtgatctattaatggatctgcctattgttgaaaaaccggtgccggctatccttatgaactgtgacaatcaaacggtaatcgtcaaagtgaatagttctaagaataatatgaaatcatctagacatgtgaaaagacgattgaagtctgtcaggaaattgagaaactccggagttataacgttggattacatccaaacagctagaaacctagcagatcccttcacgaagggactatcacgaaatgtgatagacaatgcatcgaaggagatgggcttgagacccatg

SEQ ID NO: 15553 - DNA, 1458 bp, Oryza sativa
  Clone ID: TFbOSC900099j.C1.o19.fg
atgaagcaacagatgattgacaatagtgccaaaatcgtatccccagatactgtgaccacatcaacacgctattgtcacaagtttgcagagttcatgaaaacaaggccacccacttttgcaggatcagccacatcttggtatactgaccaatggcttggcaccattgaaaacaaattagatatggtgcaatgcgatgagaagaacaaagtattctatgctgctcatcagttacaaggagctgcattggaatgttggaaaggttattgtgcaaccgataaagacccacaagccatcagttgggctgagttttcttctattttgcactatatggatgtttctccagggtttattaaaacaaaggaccacacaaaggatggtgtttgcacactctgcagccaaggctatcgctatgagctgatgtggtgcccacggaacaagccaagaaactgtgcatgtgctcgttgtggggagattggacacagcgccagcgagcacgaaatcagctgctctagctgtgaacaaagccatctactcggagagtgccccatgagcaagctcacttgttacctttgtgaaggtgatgatcatgtcccaattaaatgccccttgagttcaatactcactactgtgactcaacatcaacgagaagcttaccaagaagttatacaacaggtaataggagaaacaaataagataatagtaactccagttaagaagttcagagaagtagatgatagtagccttcaataccaatgtaaaaggggcagtgaatcagcatccaaagttgcatgctctgcttgtggtgagcaaggtgaagcagcctcctataaagccaagtgtatgtcaaagacacgaaaggcttcatcgaaaacgaaaaatgtcgtatgtttcagctgcaatgagatgggccattttgctaatcgatgtccacttagacatcagacacctgctcaagacaaaaccattccaaaagctattctgaccaagagaacaacaccaacaacaggtggtgaagtgctctggtggcgtggtcgcggtggattcttgccggcgtcggcggtgaacggcggccgatctcgcaatgcaagcaaaagagaaaacgtagctgagtcttttgcgcatctaatggtggtggtttcatggactgaggtggccgggatcgatggtgacggtggcacaagcggcggcgaacctcgcttgggcgacgacgacgatgcgtggagcgacccggcggcggtggaaaacggtggtgcgacggcgacagcctcctccagcctccggtctgccaagaaaggatgcttcatgaatgaggacttgcgccgaaactcacccgggagcgaggaatcgacaaagaagtggtttggcctgagatccaccggatggacgggaacagagaaggaagccggcgacggcgctctggagcagaagacggcgacgcgcacggcacaaggtggttga

SEQ ID NO: 15554 - DNA, 1101 bp, Oryza sativa
  Clone ID: TFbOSC900327j.C1.o7.fg
atgaagcaacagatgattgacaatagtgccaaaatcgtatccccagatactgtgaccacatcaacacgctattgtcacaagtttgcagagttcatgaaaacaaggccacccacttttgcaggatcagccacatcttggtatactgaccaatggcttggcaccattgaaaacaaattagatatggtgcaatgcgatgagaagaacaaagtattctatgctgctcatcagttacaaggagctgcattggaatgttggaaaggttattgtgcaaccgataaagacccacaagccatcagttgggctgagttttcttctattttgcactatatggatgtttctccagggtttattaaaacaaaggaccacacaaaggatggtgtttgcacactctgcagccaaggctatcgctatgagctgatgtggtgcccacggaacaagccaagaaactgtgcatgtgctcgttgtggggagattggacacagcgccagcgagcacgaaatcagctgctctagctgtgaacaaagccatctactcggagagtgccccatgagcaagctcacttgttacctttgtgaaggtgatgatcatgtcccaattaaatgccccttgagttcaatactcactactgtgactcaacatcaacgagaagcttaccaagaagttatacaacaggtaataggagaaacaaataagataatagtaactccagttaagaagttcagagaagtagatgatagtagccttcaataccaatgtaaaaggggcagtgaatcagcatccaaagttgcatgctctgcttgtggtgagcaaggtgaagcagcctcctataaagccaagtgtatgtcaaagacacgaaaggcttcatcgaaaacgaaaaatgtcgtatgtttcagctgcaatgagatgggccattttgctaatcgatgtccacttagacatcagacacctgctcaagacaaaaccattccaaaagctattctgaccaagagaacaacaccaacaacaggtggtgaagttgaacttatcaggaatggaagaggtcggtgcttgcttgtcttcgtcatcggattctaccatctgggcatcctcatcgtcgcctag

SEQ ID NO: 15555 - DNA, 3408 bp, Oryza sativa
  Clone ID: TFbOSC14678j.C1.o1.fg
atgccgcgtcgtcgctcgtcgtcaccgatcgtgcgcactcctcatgactccggcggccgcgccacgggcagcggcgggggtgaccgcgggctggtgatccaccgcgtggtgaaagaaggaggcggctcggtgaactacccgctgctgaccaagaccaactacaacgactgggcgctactgatgaagatcaagctgcaggctcactgcctgtgggcggcgatcgagcccgacggcgtggacgtccctctgcatgaggaccggatggctcttgacgctatctgcagtgccgtgccgccggagatgattggcaccctggcgaccaaagcgtcggcccgggaagcctgggaatgcatcaagacaatgcgagtcggcaacgaccggattcgcaaggcgagtgcacagaaagtgcgcgctgagtatgaatcgcttgcgttccgcggtgacgagaccgtggaagatttcgctctatggctcacaaccatcgtcaaccagcttgcaaccctcggtgatcctgaacctgctgataaagtcatcgaaaagtaccttcgggtagctcgtcccaggttcaatcaactcatcttgtctattgaaactcttctcgatatctctactctgtccatggaggaagttactggcagactgaaagccgctgaggattctgggcaatcctcgtcgcacaccgccggtgggaagctgtacctaactgaggaggagtgggctgaacgtcagaagaagaaggatcaagaggcaaagcggggtgactcgggcggctctggcggccgcggcaagcgccgtggcgggagagggcgcactggtggcggcgggactgcgagccccgagagcacgaactctggttcggcgcgcaagggagacaaatgccgaaattgcggcaaacttgggcactgggcgaaggactgtaggagcaagtccaagcgcgaagaacaggctcacgtcgcccaggaggatgaagaagagcacaccttgatgttgctcaccggcggccgcgttgacacggtcgacgcggcggcgccggagggcgacacgcccacaccgccccaccaagccgtggtggaactcgtggagatgaaagtatttccagcgctcgacgacgtggctgaccatgatcccgggcgctggattatggattccggcgcgtcaaaccatatgacgggcagcaggatggcgttcgccgacctcgacacgaacatcaccgggaacgtgcgactcagcgatggatccgtggtccggatcgcaggacggggcacaattctctttgcctgcaagaatggtgagcaccgcactctgtcgaacacctattatcttccccgtcttgctgccaatattatcagcattgggcaattggatgagaccggcttcaaagtgctggcggaggatggcatcatgcgggtctgggatgagcagcggcgtctgcttgcccggatccctcgcaccccagggcgactgtacatgcttgacatcaacctggcgcgcctggtctgtttggcggcacacgccgacgaagacgcgtggcgctggcatgctcgcctcgggcacataaacttcagggcgctctgcaagatgggcaaggaggagctggtacgtggtctaccatgtttgtcgcaggttgatcaggtctgtgaggcctgtctcgccgggaaacaccggaggtcgccgttcccgcggcaggcactttgccggtctgacgagccgctggcgctgctacatggagatctctgtggaccgatcacgccggcgacacccagtggcaaccgctatttccttctactcgtcgacgactacagctggtacatgtgggtcgccctcctctccaccaaagatgcggcgccggctgccatcaagcgtattcaggcggcggcagaaaggaagagtggacgcaagctccgcgcgttgcggacggatcgcgggggagaattcacgtctacacagttcgccgagtactgcgccgagctgggaatgcggcgcgagctcacggcgccctactctccgcaacagaacggcgttgtcgagcggcgaaaccaatccgtggtgggcacggcgcggagtatgctcaaggcgaaggggctaccaggtatgttttggggagaggcgataaataccgccgggtatctgctcaacaggtcgtcgtccaagggtatcggcggcaagaccccgtacgcgctgtggaatggcgttccgccggccgtgcaccatctgcgcacgtttgggtgtgtggcacacgtgaagacgaccaccccgaacctgaagaaactggatgacaggagttgtccaatgatctttgtcggctacgagccggggtccaaggcgtatcgcgcctatgatccggctactcggcgtgttcacatctcccgtgacatcgtcttcgacgaagcggcccagtgggactgggatgctgaggcggccgctgatctcgacaccgacttcgtcgttgagtacaccacggtgtaccatcctggctcgctgtcaggaacacgccaagatgctggggagccgcctgctcgatcttcatcatcgccgcgaacgccatcagactcaccgacagccggccgaacaccttcggtgcatggcgatgcgccggcggttgattttgtgtcgccaccaactggagcagctgctaatcttgatgcagaccacgacgacgcaccactccgtttccgcacgatggacaatgtgctggggccggccatgctgccaggtctcgctaatcgtgaggtccaggaagagctgatgatggtgagcggagaagaaccggcaacgttcgctcaagctgaacgcgacgaggattggcgtcgggcaatgctcgatgaaatctcttcgatagaggagaacaagacctggaggctcgtcgatctgccttcgggacatcggccaattgggctgaaatgggtgtataaactgaagaaagatgctcagggcgtcgtcgtcaaacacaaggcgagattggtggcaaagggctacgtgcagagggctggaattgactttgatgaggaaggttggatggtgcatcatatggacgttaaatcagcgttcctcaatggggaactgattgaggaggtgtatgttgttcagccaccggggtttgagatcgatggacaggagaacaaggtttacaggcttgataaggcgttgtatggtcttcgccaagcacccagagcttggaacaccaagctagactgcacactgaagaaacttggcttcaagcaaagcccgttggagcatgggctgtacgcgcgcggcgatggcagtgggcgactgctcgtcggtgtgtatgtggatgatctggtaattgtcgggggtgacagtggcatgatcaagggattcaaagagcagatgaaggctgaatttaagatgagtgatcttggtcctttgagtttttatcttgggatcgag

SEQ ID NO: 15556 - DNA, 4341 bp, Oryza sativa
  Clone ID: TFbOSC14686j.C1.o3.fg
atgccgcgtcgtcgctcgtcgtcaccgatcgtgcgcactcctcatgactccggcggccgcgccacgggcagcggcgggggtgaccgcgggctggtgatccaccgcgtggtgaaagaaggaggcggctcggtgaactacccgctgctgaccaagaccaactacaacgactgggcgctactgatgaagatcaagctgcaggctcactgcctgtgggcggcgatcgagcccgacggcgtggacgtccctctgcatgaggaccggatggctcttgacgctatctgcagtgccgtgccgccggagatgattggcaccctggcgaccaaagcgtcggcccgggaagcctgggaatgcatcaagacaatgcgagtcggcaacgaccggattcgcaaggcgagtgcacagaaagtgcgcgctgagtatgaatcgcttgcgttccgcggtgacgagaccgtggaagatttcgctctatggctcacaaccatcgtcaaccagcttgcaaccctcggtgatcctgaacctgctgataaagtcatcgaaaagtaccttcgggtagctcgtcccaggttcaatcaactcatcttgtctattgaaactcttctcgatatctctactctgtccatggaggaagttactggcagactgaaagccgctgaggattctgggcaatcctcgtcgcacaccgccggtgggaagctgtacctaactgaggaggagtgggctgaacgtcagaagaagaaggatcaagaggcaaagcggggtgactcgggcggctctggcggccgcggcaagcgccgtggcgggagagggcgcactggtggcggcgggactgcgagccccgagagcacgaactctggttcggcgcgcaagggagacaaatgccgaaattgcggcaaacttgggcactgggcgaaggactgtaggagcaagtccaagcgcgaagaacaggctcacgtcgcccaggaggatgaagaagagcacaccttgatgttgctcaccggcggccgcgttgacacggtcgacgcggcggcgccggagggcgacacgcccacaccgccccaccaagccgtggtggaactcgtggagatgaaagtatttgcagcgctcgacgacgtggctgaccatgatcccgggcgctggattatggattccggcgcgtcaaaccatatgacgggcagcaggatggcgttcgccgacctcgacacgaacatcaccgggaacgtgcgactcagcgatggatccgtggtccggatcgcaggacggggcacaattctctttgcctgcaagaatggtgagcaccgcactctgtcgaacacctattatcttccccgtcttgctgccaatattatcagcattgggcaattggatgagaccggcttcaaagtgctggcggaggatggcatcatgcgggtctgggatgagcagcggcgtctgcttgcccggatccctcgcaccccagggcgactgtacatgcttgacatcaacctggcgcgcctggtctgtttggcggcacacgccgacgaagacgcgtggcgctggcatgctcgcctcgggcacataaacttcagggcgctctgcaagatgggcaaggaggagctggtacgtggtctaccatgtttgtcgcaggttgatcaggtctgtgaggcctgtctcgccgggaaacaccggaggtcgccgttcccgcggcaggcactttgccggtctgacgagccgctggcgctgctacatggagatctctgtggaccgatcacgccggcgacacccagtggcaaccgctatttccttctactcgtcgacgactacagctggtacatgtgggtcgccctcctctccaccaaagatgcggcgccggctgccatcaagcgtattcaggcggcggcagaaaggaagagtggacgcaagctccgcgcgttgcggacggatcgcgggggagaattcacgtctacacagttcgccgagtactgcgccgagctgggaatgcggcgcgagctcacggcgccctactctccgcaacagaacggcgttgtcgagcggcgaaaccaatccgtggtgggcacggcgcggagtatgctcaaggcgaaggggctaccaggtatgttttggggagaggcgataaataccgccgtgtatctgctcaacaggtcgtcgtccaagggtatcggcggcaagaccccgtacgcgctgtggaatggcgttccgccggccgtgcaccatctgcgcacgtttgggtgtgtggcacacgtgaagacgaccaccccgaacctgaagaaactggatgacaggagttgtccaatgatctttgtcggctacgagccggggtccaaggcgtatcgcgcctatgatccggctactcggcgtgttcacatctcccgtgacatcgtcttcgacgaagcggcccagtgggactgggatgctgaggcggccgctgatctcgacaccgacttcgtcgttgagtacaccacggtgtaccatcctggctcgctgtcaggaacacgccaagatgctggggagccgcctgctcgatcttcatcatcgccgcgaacgccatcagactcaccgacagccggccgaacaccttcggtgcatggcgatgcgccggcggttgattttgtgtcgccaccaactggagcagctgctaatcttgatgcagaccacgacgacgcaccactccgtttccgcacgatggacaatgtgctggggccggccatgctgccaggtctcgctaatcgtgaggtccaggaagagctgatgatggtgagcggagaagaaccggcaacgttcgctcaagctgaacgcgacgaggattggcgtcgggcaatgctcgatgaaatctcttcgatagaggagaacaagacctggaggctcgtcgatctgccttcgggacatcggccaattgggctgaaatgggtgtataaactgaagaaagatgctcagggcgtcgtcgtcaaacacaaggcgagattggtggcaaagggctacgtgcagagggctggaattgactttgatgaggtattcgctcctgttgctcgtcttgattctattcgtttgttgctcgctctcgctgcgcaggaaggttggatggtgcatcatatggacgttaaatcagcgttcctcaatggggaactgattgaggaggtgtatgttgttcagccaccggggtttgagatcgatggacaggagaacaaggtttacaggcttgataaggcgttgtatggtcttcgccaagcacccagagcttggaacaccaagctagactgcacactgaagaaacttggcttcaagcaaagcccgttggagcatgggctgtacgcgcgcggcgatggcagtgggcgactgctcgtcggtgtgtatgtggatgatctggtaattgtcgggggtgacagtggcatgatcaagggattcaaagagcagatgaaggctgaatttaagatgagtgatcttggtcctttgagtttttatcttgggatcgaggtacatcaagaagctggaatcatcactttaaagcaagcagcgtatgcgtcgcgtattgtggagaaggctgggctcaccggctgcaacccctgtgcaacaccgatggaaccatgtctaaagctgagcaaggaaagtgcaggatcgctagttgatgcgacagaatacagaagtctagtgggaagcttgcgctatctggtgaacacccgaccagaccttgcatattcggttggttatgtcagtcgtttcatggagaaacccacggacgaacacttggcggcagtgaagcgcatcataaggtatgttgctggtaccattcatcttgggtgccgctatgtgaaggaaggtgaaggaggactgcagggttacagtgacagtgatatggctggagacattgacactcgcaagagcaccacaggagtaattttctttctcggcaaaaatcctgttagctggcagtctcaaaaacagagagttgtagcactctcctcctgtgaatctgagtatattgcagctgcaacagctgcatgccagggcatttggcttgcccggctcctcggtgacctcaggaatgcagcaactgaagtcgtcgatctcagggtggacaaccaatccgctctggccctgatgaagaaccctgtttttcacgatcgaagtaagcacattcaaacaaaatttcatttcattcgtgaagccgtggagaatggggaaatcacaccgagttacatcggcatagaagggcaacttgcagatatcctgacgaagccgctttctcgaatcaagtttcaggagctgcgggaacaaattggcttagccacagtacgcatgcgttgtgtcgtctggtttcctgctagcgatcgctggggaaattcctaa

SEQ ID NO: 15557 - DNA, 4536 bp, Oryza sativa
  Clone ID: TFbOSC400016j.C1.o3.fg
atgccgcgtcgtcgctcgtcgtcaccgatcgtgcgcactcctcatgactccggcggccgcgccacgggcagcggcgggggtgaccgcgggctggtgatccaccgcgtggtgaaagaaggaggcggctcggtgaactacccgctgctgaccaagaccaactacaacgactgggcgctactgatgaagatcaagctgcaggctcgctgcctgtgggcggcgatcaagcccgacggcgtggacgtccctctgcatgaggaccggatggctcttgacgctatctgcagtgccgtgccgccggagatgattggcaccctggcgaccaaagcgtcggcccgggaagcctgggaatgcatcaagacaatgcgagtcggcaacgaccggattcgcaaggcgagtgcacagaaagtgcgcgctgagtatgaatcgcttgcgttccgcggtgacgagaccgtggaagatttcgctctacggctcacaaccatcgtcaaccagcttgcaaccctcggtgatcctgaacctgctgataaagtcgtcgaaaagtaccttcgggtagctcgtcccaggttcaatcaactcatcttgtctattgaaactcttctcgatatctctactctgtccatggaggaagttactggcagactgaaagccgctgaggattctgggcaatcctcgtcgcacaccgccggtgggaagctgtacctaactgaggaggagtgggctgaacgtcagaagaagaaggatcaagaggcaaagcggggtgactcgggcggctctggcggccgcggcaagcgccgtggcgggagagggcgcactggtggcggcgggactgcgagccccgagagcacgaactctggttcggcgcgcaagggagacaaatgccgaaattgcggcaaacttgggcactgggcgaaggactgcaggagcaagtccaagcgcgaagaacaggctcacgtcgcccaggaggatgaagaagagcacaccttgatgttgctcaccggcggccgcgttgacacggtcgacgcggcggcgccggagggcgacacgcccacaccgccccaccaagccgtggtggaactcgtggagatgaaagtatttgcagcgctcgacgacgcggctgaccatgatcccgggcgctggattatggattccggcgcgtcaaaccatatgacgggcagcaggatggcgttcgccgacctcgacacgaacatcaccgggaacgtgcgactcggcgatggatccgtggtccggatcgcaggacggggcacaattctctttgcctgcaagaatggtgagcaccgcactctgtcgaacacctattatcttccccgtcttgctgccaatattatcagcattgggcaattggatgagaccggcttcaaagtgctggcggaggatggcatcatgcgggtctgggatgagcagcggcgtctgcttgcccggatccctcgcaccccagggcgactgtacatgcttgacatcaacctggcgcgccctgtctgtttggcggcacacgccgacgaagacgcgtggcgctggcatgctcgcctcgggcacataaacttcagggcgctctgcaagatgggcaaggaggagctggtacgtggtctaccatgtttgtcgcaggttgatcaggtctgtgaggcctgtctcgccgggaaacaccggaggtcgccgttcccgcggcaggcactttgccggtctgacgagccgctggcgctgctacatggagatctctgtggaccgatcacgccggcgacacccagtggcaaccgctatttccttctactcgtcgacgactacagccggtacatgtgggtcgccctcctctccaccaaagatgcggcgccggctgccatcaagcgtattcaggcggcggcagaaaggaagagtggacgcaagctccgcgcgttgcggacggatcgcgggggagaattcacgtctacacagttcgccgagtactgcgccgagctgggaatgcggcgcgagctcatggcgccctactctccgcaacagaacggcgttgtcgagcggcgaaaccaatccgtggtgggcacggcgcggagtatgctcaaggcgaaggggctgccaggaacacgccaagatgctggggagccgcctgctcgatcttcatcatcgccgcgaacgccatcagactcaccgacagccggccgaacaccttcggtgcatggcgatgcgccggcggttgaatttgtgtcgccaccaactggagcagctgctaatcttgatgcagaccacgatgacgcaccactccgtttccgcacgatggacaatgtgctggggccggccatgctgccaggtctcgctaatcgtgaggtccaggaagagctgatgatggtgagcggagaagaaccggcaacgttcgctcaagctgaacgcgacgaggattggcgtcgggcaatgctcgatgaaatctcttcgatagaggagaacaagacctggaggctcgtcgatctgccttcgggacatcggccaattgggctgaaatgggtgtataaactgaagaaagatgctcagggcgtcgtcgtcaaacacaaggcgagattggtggcaaagggctacgtgcagagggctggaattgactttgatgaggtattcgctcctgttgctcgtcttgattctgttcgtttgttgctcgctctcgctgcgcaggaaggttggatggtgcatcatatggacgttaaattagcgttcctcaatggggaactgattgaggaggtgtatgttgttcagccaccggggtttgagatcgatggacaggagaacaaggtttacaggcttgataaggcgctgtatggtcttcgccaagcacccagagcttggaacaccaagctagactgcacactaaagaaacttggcttcaagcagagcccgttggagcatgggctgtacgcgcgcggcgatggcagtgggcgactgctcgtcggtgtgtatgtggatgatctggtaattgtcgggggtgacagtggcatgatcaagggattcaaagagcagatgaaggctgaatttaagatgagtgatcttggtcctttgagtttttatcttgggatcgaggtacatcaagaagctggaatcatcactttaaagcaagcagcgtatgcgtcgcgtattgtggagaaggctgggctcaccggctgcaacccctgtgcaacaccgatggaaccacgtctaaagctgagcaaggaaagtgcaggatcgctagttgatgcgacagaatacagaagtctagtgggaagcttgcgctatctggtgaacacccgaccagaccttgcatattcggttggttatgtcagtcgtttcatggagaaacccacggacgaacacttggcggcagtgaagcgcatcataaggtatgttgctggtaccattcatcttgggtgccgctatgtgaaggaaggtgaaggaggactgcagggttacagtgacagtgatatggttggagacattgacactcgcaagagcaccacaggagtaattttctttctcggcaaaaatcctgttagctgccagtctcaaaaacagagagttgtagcactctcctcctgtgaatctgagtatattgcagctgcaacagctgcatgccagggcatttggcttgcccggctcctcggtgacctcaggaatgcagcaactgaagtcgtcgatctcagggtggacaaccaatccgctctggccctgatgaagaaccctatttttcacgatcgaagtaagcacattcaaacaaaatttcatttcattcgtgaagccgtggagaatggggaaatcacaccgagttacatcggcacagaagggcaacttgcagatatcctgacgaagccgctttctcgaatcaagtttcaggagctgcgggaacaaattggtttagccacaattgctcagtctcaagcgcccgatggggaaaaaggaaaaagtacatcaaaggtccctcaacttgacatcaaagatacaaaatcatcctccaaccgcaaaaccaggtacgggacgtcccttaactgtcaaaaccgggggatggacttgttggacactcttgtagttaggtttcatatgaagggggtattcattttagatgggactaagaagaaatattgtggtggatctgaggccctgtcttatatagatagagacaaagtatcattgcccgagttatttggacacctacgtgatcattgtagtgtgatgtctaggactttgttgcactggttgtttcctggtagagatttgcaaacaggtcttcgtgctctttcgaatgacaaggcttgcaaattgatgtgtgattgtactggagaattggatgtggcatatatctatgttgaagaaccagaaattgttgatttatgtgatgggtcagctgataacagtaattatgaggcagacatggaattaaaagtggacagtgaagaggagtatgtaaacatggatgttgaagttgatgttggtgaggctactggtagtgggtgcaagggtaaagcggttgaagaacatggtgaggctagtggtagtggatctagggcagaatag

SEQ ID NO: 15558 - DNA, 4245 bp, Oryza sativa
  Clone ID: TFbOSC400252j.C1.o3.np
atgccacaacaagcacttggagcacgctcttcaacgggctgctcgccggcgccgccgggggcaggatccggtacatgggcgccgtcgcccggagccgctgcgaacgtcaacgtcaacggaggcagttctgcctcacaatctagcggagggccattctcggggtatatctttctcctgctgttaactcattcgttcatacctctgttagtcatgttagtcgcaattctattgcgttcttggtatgtgcatgatgcttattataccttaagcatgctcctggttatgctacatttcatcactagatcaccccacattgttcatgccatgattattatcttaacattttggattaaaatatgccgatatatgactatatttccaacaatccaaaaacctgatgggtcattttcggtagttggctttgctgctacactgaaaccacatgcatttgatggttctaactataagaggtggaaagcacgtgcactattgtggttgacagcgatgcaatgcttctatgtttcatggggcaaacgaagtgaaccacctctctctcctaaggaagatgttaagtttgaagcttcaaattgcctgttccgtggagcattgatcagtgtactcgctgacaacatagtggacgtgtacattcacatgccttccgggaaggacatgtgggatgcacttgaggccaagttcggagtttccgacgccggcagtgagctatatgtcatggagcagttctatgactacaagatggttgatgaccgttctgtagtagaacaagctcatgagattcagatgctggctaaggaacttgagaacaacaactgtgagttgccagacaagtttgtggcgggtggcattattgccaagttgccaccttcttggtcagactttgccacttctctaaagcacaaacaagagtttagtgtttctgatctcattggctctttgggtgttgaggagaaggcgagggcaaaggacaaccggggcaaaaaggttgagggaggttctagtgccaatatggtacagaagaagaaccctcatgcatcccacaacaacaagaaagtcaagcttgatggcaaacccaaggctacaaccaattttaagaagaaaggcaagggaaaggcaaaggaagactgctttgtgtgtggcaagtctgggcattgggccaaggactgtcctgagcgcaaagaaaggaagtctgccaacatggttattagcgagggcggagaaacatcggggtaaggtaaaatattacctacagttctctctgtttttcactcacctgattggtgggttgatactggtgctaatattcatgtatgtgatgacgggagaggttcctccttgttgatgggaaacgggtcgcttgcggctgttcatggtgttggtacggtcgatctgaagtttacttcgggaaagaccgtgcaactgaagaacgtgcagcatgtcgcttcaacaaagaagaatcttgttagcggctctctattgtgtagagaaggttttagagttgttttttgaatcctataaatgtgtcgtatctaaatatggaacttttattggaaaaggttatgacagcagaggcttgttccacttttctttggatgatatgtgtaataatcataatgttgtgaaccatattagcgagaatgatgagtctaatgtgtggcattcgcgactctgtcatgtgaatttcggttgtacgacgcgcttagctaacatgagtttaattccaaaattcactttggtcaaagtttctaagtgccatacttgtgttcaatcgaaacaacctcgcaagcctcacaaggcatttgaggcgaggaatttggcacttctagaacttgttcattccgatttgtgcgaaatgaacggcgtgttgactaaagggggaaagaaatatttcatgacactgatagatgattgcactagattttgttatgtgtatctattgaaaacaaaggatgaagcattgcattactttaagacctataaagctgaagtagaaaaccaacttgaaaggaaatcaaacggttgaggtctgatagaggtggggagtatttttccaatgagtttgcatccttttgcgaagagtttggaattatccatgagaggacgcctccctatccaccccaatcaaatggggtggccgaaagaaagaactgtactctaactgagatggtgaatgccatgttagacactgcggagctttccaaggaatggtggggtgaggcagttttgactgcgtgttatatcctgaataaaattccaatgaagtataaggaagtgacaccattcgaggaatgggaaaggaaaaaattaaatctctcatacctacgaacatggggctgtttggccaaggtaagtgtacctatagccaaaaagcgaaaacttagaccaaatactgttgattgtatgttccttggttatgctatttacagtgtgggttatagattcttaatagtaaactctggagtacctgacatgcgtgttggtacaattattgagtccagagatgctatattctttgataatgaatttcccatgaaacatacacctagcacttctagtcaagaaactgtcataccccatgagcactttgcaccgatagaacacaatgatcaaacgcctgagggaaatcctgaggacaacattgtagatactcttaagagtaagagacaaagggttgcaaaatcctttggagatgactatattgtatacctcgtggataacaccccaagaaccatagaagaggcatatttatctcctgacgctgactactggaaggaagcagtacgcagtgagatggactcgattatgtctaatgatacttgggaagtcgttgagtatccatatgggtgcaagcctgtaggatgtaaatgggttttcaagaaaaagcttaggcctgatggtacaattgaaaagtacaaggtaaggcttgtggccaaggattatacccaaaaggaaggcgaggattttttcgacacatactcactagttgctcgcttgaccacgattcgattactacttgctctggcagcctctcatggtcttctcgtccatcaaatggacgttaagacagctttcctaaacggagagctggaggaggagatctatatggatcaaccagacgggtatgtactagaaggtcaggagggaatggtgtgtaaactgttcaaatccttgtatggccttaagcaagcacctaaacaatggcatgagaagtttgacactacacttacatctgcaggctttgttgataacgaagctgacaaatgtgtgtactatcgtcatggtgggggagaaggagtgatcttgtgcttatatgtcgatgacatattgatcttttggaccagcctcaatgtgattgaggaggtcaaggactatctgtccaagagttttgaaatgaaggatttgggagaggctgatgttattcttaacattaagctaccaagaggatatgagggtgggattacacttgtgcaatcccactatgtggacaaggttttgactcctactccttatgatcccagcgtgctattaaggaaaaaccgaagaatagcaagggatcaactgagatactctcaaatcattggttcattgatgtacttggctagtgcaacgaggcctaacatctcatttgctgtaagcaagctgagccggtttgtctcaaatccgggagatgatcattggcaggctctggaaagagtaatgcgctatttaaagggcactatgagctatggaattcactataccgggtacccaaaagtactagaagggtatagtgactcaaactggatatctgatgctgatgagataaaagccacaagtggatatgtgttcacacttggaggtggcgctgtttcctagaagtcttacaagcagaccatcttaacgaggtcaacaatggaagcagaactcacagcactagatactgcgacagttgaggccgagtggcttcgtgaactcctgatggatttgccggtggttgaaaaaccagtgtcagctatcctaatgaactgtgataatcaaatagtgattattacagtgaacagttcaaaggacaacatgaagtcatctaggcatatcaagagaagactgaaatctgtcagaaagtagaaaaactccggagtgatagcattggactatgtccaaacggctaataatctggcagatcagtttaccaaggggctaccacgtaatgtgatagacagtgcatcgaggaaaatgggcttgatacccacc

SEQ ID NO: 15559 - DNA, 4500 bp, Oryza sativa
  Clone ID: TFbOSC401205j.C1.o5.fg
atgagggtatccgagtttagctcgttgcccgcgtcttgtgctgggagctcggatcacgtcgtgtggttgtggggatggacgcagctagagcatggcgtgagaagtggtcttggtggtttagccacacgatcgctggggaaattcctaacaattggtatcagagcacggtttaggaagtggactcgtgaccgcgcattggaaggcgtcttcttgccgcgtcgtcgctcgtcgtcaccgatcgtgcacactcctcatgactccggcggccgcgccacgggcagcggcgggggtgaccgcgggctggtgatccaccgcgtggtgaaagaaggaggcggctcggtgaactacccgctgctgaccaagaccaactacaacgactgggcgctactgatgaagatcaagctgcaggctcgctgcctgtgggcggcgatcgagcccgacggcgtggacgtccctctgcatgaggaccggatggctcttgacgctatctgcagtgccgtgccgccggagatgattggcaccctggcgaccaaagcgtcggcccgggaagcctgggaatgcatcaagacaatgcgagtcggcaacgaccggattcgcaaggcgagtgcacagaaagtgcgcgctgagtatgaatcgcttgcgttccgcggtgatgagaccgtggaagatttcgctctacggctcacaaccatcgtcaaccagcttgcaaccctcggtgatcctgaacctgctgataaagtcgtcgaaaagtaccttcgggtagctcgtcccaggttcaatcaactcatcttgtctattgaaactcttctcgatatctctactctgtccatggaggaagttactggcagactgaaagccgctgaggattctgggcaatcctcgtcgcacaccgccggtgggaagctgtacctaactgaggaggagtgggctgaacgtcagaagaagaaggatcaagaggcaaagcggggtgactcgggcggctctggcggccgcggcaagcgccgtggcgggagagggcgcactggtggcggcgggactgcgagccccgagagcacgaactctggttcggcgcgcaagggagacaaatgccgaaattgcggcaaacttgggcactgggcgaaggactgcaggagcaagtccaagcgcgaagaacaggctcacgtcgcccaggaggatgaagaagagcacaccttgatgttgctcaccggcggttgcgttgacacggtcgacgcggcggcgccggagggcgacacgcccacaccgccccaccaagccgtggtggaactcgtggagatgaaagtatttgcagcgctcgacgacgcggctgaccatgatcccgggcgctggattatggattccggcgcgtcaaaccatatgacgggcagcaggatggcgttcgccgacctcgacacgaacatcacttggaacgtgcgactcggcgatggatccgtggtccggatcgcaggacggggcacaattctctttgcctgcaagaatggtgagcaccgcactctgtcgaacacctattttcttccccgtcttgctgccaatattatcagcattgggcaattggatgagaccggcttcaaagtgctggcggaggatggcatcatgcgggtctgggatgagcagcggcgtctgcttgcccggatccctcgcaccccagggcgactgtacatgcttgacatcaacctggcgcgcccggtctgtttggcggcacacgccgacgaagacgcgtggcgctggcatgctcgcctcgggcacataaacttcagggcgctctgcaagatgggcaaggaggagctggtacgtggtctaccatgtttgtcgcaggttgatcaggtctgtgaggcctgtctcgccgggaaacaccggaggtcgccgttcccgcggcaggcactttgccggtctgacgagccgctggcactgctgcatggagatctctgtggaccgatcacgccggcgacacccagtggcaaccgctatttccttctactcgtcgacgactacagccggtacatgtgggtcgccctcctctccaccaaagatgcggcgccggctgccatcaagcgtattcaggcggcggcagaaaggaagagtggacgcaagctccgcgcgttgcggacggatcgcgggggagaattcacgtctacacagttcgccgagtactgcgccgagctgggaatgcggcgcgagctcacggcgccctactctccgcaacagaacggcgttgtcgagcggcgaaaccaatccgtggtgggcacggcgcggagtatgctcaaggcgaaggggctgccaggtatgttttggggagaggcgataaataccgccgtgtatctgctcaacaggtcgtcgtccaagggtatcggcggcaagaccccgtacgcgctgtggaacggcgttccgccggccgtgcaccatctgcgcacgtttgggtgtgtggcacacgtgaagacgaccaccccgaacctgaagaaactggatgacaggagtcgtccaatgatctttgtcggctacgagccggggtccaaggcgtatcgcggctatgatccggctactcggcgtgttcacatctcccgtgacatcgtcttcgatgaagcggcccagtgggactgggatgctgaggcggccgctgatctcgacaccgacttcgtcgttgagtacaccacggtgtaccatcctggctcgctgtcaggaacacgccaagacgctggggagccgcctgctcgatcttcatcatcgccgcgaacgccatcagactcaccgacagccggccgaacaccttcggtgcatggcgatgcgccggcggttgaatttgtgtcgccaccaactggagcagctgctaatcttgatgcagaccacgacgacgcaccactccgtttccgcacgatggacaatgtgctggggctggccatgctgccaggtctcgctaatcgtgaggtccaggaagagctgatgatggtgagcggagaagaaccggcaacgttcgctcaagctgaacgcgacgaggattggcgtcgggcaatgctcgatgaaatctcttcgatagaggagaacaagacctggaggctcgtcgatctgccttcgggacatcggccaattgggctgaaatgggtgtataaactgaagaaagatgctcagggcgtcgtcgtcaaacacaaggcgagattggtggcaaagggctacgtgcagagggctggaattgactttgatgaggtattcgctcctgttgctcgtcttgattctgttcgtttgttgctcgctctcgctgcgcaggaaggttggatggtgcatcatatggacgttaaatcagcgttcctcaatggggaactgattgaggaggtgtatgttgttcagccaccggggtttgagatcgatggacaggagaacaaggtttacaggcttgataaggcgctgtatggacttcgccaagcacccagagcttggaacaccaagctagactgcacactgaagaaacttggcttcaagcagagcccgttggagcatgggctgtacgcgcgcggcgatggcagtgggcgactgctcgtcggtgtgtatgtggatgatctggtaattgtcgggggtgacagtggcatgatcaagggattcaaagagcagatgaaggctgaatttaagatgagtgatcttggtcctttgagtttttatcttgggatcgaggtacatcaagaagctggaatcatcactttaaagcaagcagcgtatgcgtcgcgtattgtggagaaggctgggctcaccggctgcaacccctgtgcaacaccgatggaaccacgtctaaagctgagcaaggaaagtgcaggatcgctagttgatgcgacagaatacagaagtctagtgggaagcttgcgctatctggtgaacacccgaccagaccttgcatattcggttggttatgtcagtcgtttcatggagaaacccacggacgaacacttggcggcagtgaagcgcatcataaggtatgttgctggtaccattcatcttgggtgccgctatgtgaaggaaggtgaaggaggactgcagggttacagtgacagtgatatggctggagacattgacactcgcaagagcaccacaggagtaattttctttctcggcaaaaatcctgttagctggcagtctcaaaaacagagagttgtagcactctcctcctgtgaatctgagtatattgcagctgcaacagctgcatgccagggcatttggcttgcccggctcctcggtgacctcaggaatgcagcaactgaagtcgtcgatctcagggtggacaaccaatccgctctggccctgatgaagaaccctgtttttcacgatcgaagtaagcacattcaaacaaaattacatttcattcgtgaagccgtggagaatggggaaatcacaccgagttacatcggcacagaagggcaacttgcagatatcctgacgaagccgctttctcgaatcaagtttcaggagctgtgggaacaaattggtatgtttcctgtataa

SEQ ID NO: 15560 - DNA, 4341 bp, Oryza sativa
  unsure (1)..(4341): unsure at all n locations
  Clone ID: TFbOSC401652j.C1.o3.fg
atgccgcgtcgtcgctcgtcgtcaccgatcgtgcgcactcctcatgactccggcggccgcgccacgggcagcggcgggggtgaccgcgggctggtgatccaccgcgtggtgaaagaaggaggcggctcggtgaactacccgctgctgaccaagaccaactacaacgactgggcgctactgatgaagatcaagctgcaggctcactgcctgtgggcggcgatcgagcccgacggcgtggacgtccctctgcatgaggaccggatggctcttgacgctatctgcagtgccgtgccgccggagatgattggcaccctggcgaccaaagcgtcggcccgggaagcctgggaatgcatcaagacaatgcgagtcggcaacgaccggattcgcaaggcgagtgcacagaaagtgcgcgctgagtatgaatcgcttgcgttccgcggtgacgagaccgtggaagatttcgctctatggctcacaaccatcgtcaaccagcttgcaaccctcggtgatcctgaacctgctgataaagtcatcgaaaagtaccttcgggtagctcgtcccaggttcaatcaactcatcttgtctattgaaactcttctcgatatctctactctgtccatggaggaagttactggcagactgaaagccgctgaggattctgggcaatcctcgtcgcacaccgccggtgggaagctgtacctaactgaggaggagtgggctgaacgtcagaagaagaaggatcaagaggcaaagcggggtgactcgggcggctctggcggccgcggcaagcgccgtggcgggagagggcgcactggtggcggcgggactgcgagccccgagagcacgaactctggttcggcgcgcaagggagacaaatgccgaaattgcggcaaacttgggcactgggcgaaggactgtaggagcaagtccaagcgcgaagaacaggctcacgtcgcccaggaggatgaagaagagcacaccttgatgttgctcaccggcggccgcgttgacacggtctacgcggcggcgccggagggcgacacgcccacaccgccccaccaagccgtggtggaactcgtggagatgaaagtatttgcagcgctcgacgacgtggctgaccatgatcccgggcgctggattatggattccggcgcgtcaaaccatatgacgggcagcaggatggcgttcgccgacctcgacacgaacatcaccgggaacgtgcgactcagcgatggatccgtggtccggatcgcaggacggggcacaattctctttgcctgcaagaatggtgagcaccgcactctgtcgaacacctattatcttccccgtcttgctgccaatattatcagcattgggcaattggatgagaccggcttcaaagtgctggcggaggatggcatcatgcgggtctgggatgagcagcggcgtctgcttgcccggatccctcgcaccccagggcgactgtacatgcttgacatcaacctggcgcgcctggtctgtttggcggcacacgccgacgaagacgcgtggcgctggcatgctcgcctcgggcacataaacttcagggcgctctgcaagatgggcaaggaggagctggtacgtggtctaccatgtttgtcgcaggttgatcaggtctgtgaggcctgtctcgccgggaaacaccggaggtcgccgttcccgcggcaggcactttgccggtctgacgagccgctggcgctgctacatggagatctctgtggaccgatcacgccggcgacacccagtggcaaccgctatttccttctactcgtcgacgactacagctggtacatgtgggtcgccctcctctccaccaaagatgcggcgccggctgccatcaagcgtattcaggcggcggcagaaaggaagagtggacgcaagctccgcgcgttgcggacggatcgcgggggagaattcacgtctacacagttcgccgagtactgcgccgagctgggaatgcggcgcgagctcacggcgccctactctccgcaacagaacggcgttgtcgagcggcgaaaccaatccgtggtgggcacggcgcggagtatgctcaaggcgaaggggctaccaggtatgttttggggagaggcgataaataccgccgtgtatctgctcaacaggtcgtcgtccaagggtatcggcggcaagaccccgtacgcgctgtggaatggcgttccgccggccgtgcaccatctgcgcacgtttgggtgtgtggcacacgtgaagacgaccaccccgaacctgaagaaactggatgacaggagttgtccaatgatctttgtcggctacgagccggggtccaaggcgtatcgcgcctatgatccggctactcggcgtgttcacatctcccgtgacatcgtcttcgacgaagcggcccagtgggactgggatgctgaggcggccgctgatctcgacaccgacttcgtcgttgagtacaccacggtgtaccatcctggctcgctgtcaggaacacgccaagatgctggggagccgcctgctcgatcttcatcatcgccgcgaacgccatcagactcaccgacagccggccgaacaccttcggtgcatggcgatgcgccggcggttgattttgtgtcgccaccaactggagcagctgctaatcttgatgcagaccacgacgacgcaccactccgtttccgcacgatggacaatgtgctggggccggccatgctgccaggtctcgctaatcgtgaggtccaggaagagctgatgatggtgagcggagaagaaccggcaacgttcgctcaagctgaacgcgacgaggattggcgtcgggcaatgctcgatgaaatctcttcgatagaggagaacaagacctggaggctcgtcgatctgccttcgggacatcggccaattgggctgaaatgggtgtataaactgaagaaagatgctcagggcgtcgtcgtcaaacacaaggcgagattggtggcaaagggctacgtgcagagggctggaattgactttgatgaggtattcgctcctgttgctcgtcttgattctattcgtttgttgctcgctctcgctgcgcaagaaggttggatggtgcatcatatggacgttaaatcagcgttcctcaatggggaactgattgagaaggtgtatgttgttcagccaccggggtttgagatcgatggacaggagaacaaggtttacaggcttgataaggcgttgtatggtcttcgccaagcacccagagcttggaacaccaagctagactgcacactgaagaaacttggcttcaagcaaagcccgttggagcatgggctgtacgcgcgcgncgatggcagtgggcgactgctcgtcggtgtgtatgtggatgatctggtaattgtcgggggtgacagtggcatgatcaagggattcaaagagcagatgaaggctgaatttaagatgagtgatcttggtcctttgagtttttatcttgggatcgaggtacatcaagaagctggaatcatcactttaaagcaagcagcgtatgcgtcgcgtattgtggagaaggctgggctcaccggctgcaacccctgtgcaacaccgatggaaccatgtctaaagctgagcaaggaaagtgcaggatcgctagttgatgcgacagaatacagaagtctagtgggaagcttgcgctatctggtgaacacccgaccagaccttgcatattcggttggttatgtcagtcgtttcatggagaaacccacggacgaacacttggcggcagtgaagcgcatcataaggtatgttgctggtaccattcatcttgggtgccgctatgtgaaggaaggtgaaggaggactgcagggttacagtgacagtgatatggctggagacattgacactcgcaagagcaccacaggagtaattttctttctcggcaaaaatcctgttagctggcagtctcaaaaacagagagttgtagcactctcctcctgtgaatctgagtatattgcagctgcaacagctgcatgccagggcatttggcttgcccggctcctcggtgacctcaggaatgcagcaactgaagtcgtcgatctcagggtggacaaccaatccgctctggccctgatgaagaaccctgtttttcacgatcgaagtaagcacattcaaacaaaatttcatttcattcgtgaagccgtggagaatggggaaatcacaccgagttacatcggcatagaagggcaacttgcagatatcctgacgaagccgctttctcgaatcaagtttcaggagctgcgggaacaaattggcttagccacagtacgcatgcgttgtgtcgtctggtttcctgctagcgatcgctggggaaattcctaa

SEQ ID NO: 15561 - DNA, 4570 bp, Oryza sativa
  Clone ID: TFbOSC401885j.C1.o1.fg
ggaaaagaacttctgggcgcgacaccacggcactccggagcacgctccaagcgccgccgcagccgacatcgtcgtcgttccgaccaccgtagaccaaaccaagccgagccgtcgcgccaacgtcttctctgttagcagtaatcttgtgtgccacggtttagccacacgatcgctggggaaattcctaacaattggtatcagagcacggtttaggaagtggactcgtgaccgcgcattggaaggcgtcttcatgccgcgtcgtcgctcgtcgtcaccgatcgtgcgcactcctcatgactccggcggccgcgccacgggcagcggcgggggtgaccgcgggctggtgatccaccgcgtggtgaaagaaggaggcggctcggtgaactacccgctgctgaccaagaccaactacaacgactgggcgctactgatgaagatcaagctgcaggctcgctgcctgtgggcggcgatcgagcccgacggcgtggacgtccctctgcatgaggaccggatggctcttgacgctatctgcagtgccgtgccgccggagatgattggcaccctggcgaccaaagcgtcggcccgggaagcctgggaatgcatcaagacaatgcgagtcggcaacgaccggattcgcaaggcgagtgcacagaaagtgcgcgctgagtatgaatcgcttgcgttccgcggtgacgagaccgtggaagatttcgctctacggctcacaaccatcgtcaaccagcttgcaaccctcggtgatcctgaacctgctgataaagtcgtcgaaaagtaccttcgggtagctcgtcccaggttcaatcaactcatcttgtctattgaaactcttctcgatatctctactctgtccatggaggaagttactggcagactgaaagccgctgaggattctgggcaatcctcgtcgcacaccgccggtgggaagctgtacctaactgaggaggagtgggctgaacgtcagaagaagaaggatcaagaggcaaagcggggtgactcgggcggctctggcggccgcggcaagcgccgtggcgggagagggcgcactggtggcggcgggattgcgagccccgagagcacgaactctggttcggcgcgcaagggagacaaatgccgaaattgcggcaaacttgggcactgggcgaaggactgcaggagcaagtccaagcgcgaagaacaggctcacgtcgcccaggaggatgaagaagagcacaccttgatgttgctcaccggcggctgcgttgacacggtcgacgcggcggcgccggagggcgacacgcccacaccgccccaccaagccgtggtggaactcgtggagatgaaagtatttgcagcgctcgacgacgcggctgaccatgatcccgggcgctggattatggattccggcgcgtcaaaccatatgacgggcagcaggatggcgttcgccgacctcgacacgaacatcaccgggaacgtgcgactcggcgatggatccgtggtccggatcgcaggacggggcacaattctctttgcctgcaagaatggtgagcaccgcactctgtcgaacacctattatcttccccgtcttgctgccaatattatcagcattgggcaattggatgagaccggcttcaaagtgctggcggaggatggcatcatgcgggtctgggatgagcagcggcgtctgcttgcccggatccctcgcaccccagggcgactgtacatgcttgacatcaacctggcgcgcccggtctgtttggcggcacacgccgacgaagacgcgtggcgctggcatgctcgcctcgggcacataaacttcagggcgctctgcaagatgggcaaggaggagctggtacgtggtctaccatgtttgtcgcaggttgatcaggtctgtgaggcctgtctcgccgggaaacaccggaggtcgccgttcccgcggcaggcactttgccggtctgacgtgccgctggcgctgctacatggagatctctgtggaccgatcacgccggcgacacccagtggcaaccgctatttccttctactcgtcgacgactacagccggtacatgtgggtcgccctcctctccaccaaagatgcggcgccggctgccatcaagcgtactcaggcggcggcagaaaggaagagtggacgcaagctccgcgcgttgcggacggatcgcgggggagaattcacgtctacacagttcgccgagtactgcgccgagctgggaatgcggcgcgagctcacggcgccctactctccgcaacagaacggcgttgtcgagcggcgaaaccaatccgtggtgggcacggcgcggagtatgctcaaggcgaaggggctgccaggtatgttttggggagaggcgataaatactgccgtgtatctgctcaacaggtcgtcgtccaagggtatcggcggcaagaccccgtacgcgctgtggaacggcgttccgccggccgtgcaccatctgcgcacgtttgggtgtgtggcacacgtgaagacgaccaccccgaacctgaagaaactggatgacaggagtcgtccaatgatctttgtcggctacgagccggggtccaaggcgtatcgcgcctatgatccggctactcggcgtgttcacatctcccgtgacatcgtcttcgacgaagcggcccagtgggactgggatgctgaggcggccgctgatctcgacaccgacttcgtcgttgagtacaccacggtgtaccatcctggctcgctgtcaggaacacgccaagacgcttgggagccgcctgctcgatcttcatcatcgccgcgaacgccatcagactcaccgacagccggccgaacaccttcggtgcatggcgatgcgccggcagttgaatttgtgtcgccaccaactggagcagctgctaatcttgatgcagaccacgacgacgcaccactccgtttccgcacgatggacaatgtgctggggccggccatgctgccaggtctcgctaatcgtgaggtccaggaagagctgatgatggtgagcggagaagaaccggcaacgttcgctcaagctgaacgcgacgaggattggcgtcgggcaatgctcgatgaaatctcttcgatagaggagaacaagacctggaggctcgtcgatctgccttcgggacatcggccaattgggctgaaatgggtgtataaactgaagaaagatgctcagggcgtcgtcgtcaaacacaaggcgagattggtggcaaagggctacgtgcagagggctggaattgactttgatgaggtattcgctcctgttgctcgtcttgattctgttcgtttgttgctcgctctcgctgcgcaggaaggttggatggtgcatcatatggacgttaaatcagcgttcctcaatggggaactgattgaggaggtgtatgttgttcagccaccggggtttgagatcgatggacaggagaacaaggtttacaggcttgataaggcgctgtatggtcttcgccaagcacccagagcttggaacaccaagctagactgcacactgaagaaacttggcttcaagcagagcccgttggagcatgggctgtacgcgcgtggcgatggcagtgggcgactgctcgtcggtgtgtatgtggatgatctggtaattgtcgggggtgacagtggcatgatcaagggattcaaagagcagatgaaggctgaatttaagatgagtgatcttggtcctttgagtttttatcttgggatcgaggtacatcaagaagctggaatcatcactttaaagcaagcagcgtatgcgtcgcgtattgtggagaaggctgggctcaccggctgcaacccctgtgcaacaccgatggaaccacgtctaaagctgagcaaggaaagtgcaggatcgctagttgatgcgacagaatacagaagtctagtgggaagcttgcactatctggtgaacacccgaccagaccttgcatattcggttggttatgtcagtcgtttcatggagaaacccacggacgaacacttggcggcagtgaagcgcatcataaggtatgttgctggtaccattcatcttgggtgccgctatgtgaaggaaggtgaaggaggactgcagggttacagtgacagtgatatggctggagacattgacactcgcaagagcaccacaggagtaattttctttctcggcaaaaatcctgttagctggcagtctcaaaaacagagagttgtagcactctcctcctgtgaatctgagtatattgcagctgcaacagctgcatgccagggcatttggcttgcccggctcctcggtgacctcaggaatgcagcaactgaagtcgtcgatctcagggtggacaaccaatccgctctggccctgatgaagaaccctgtttttcacgatcgaagtaagcacattcaaacaaaatttcatttcattcgtgaagccgtggagaatggggaaatcacaccgagttacatcggcacagaagggcaacttgcagatatcctgacgaagccgctttctcgaatcaagtttcaggagctgcgggaacaaattggtttagccacagtacgcgtgcgttgtgttcgtctggtttcctgctag

SEQ ID NO: 15562 - DNA, 1248 bp, Oryza sativa
  Clone ID: TFbOSC401980j.C1.o15.fg
atgtcaggtacaagttccgacgaaccaacactggagaatctagcgcataaactgaagggtatggaaaattggtatgaagagttgatgcgtaatagtaaatcatacaaggaaagcacagataaacatttaaaaaccttaagtgaaagcctggtgaaagtagtggatcaaattgagaaaatgaatcaatcacataaacaattaactgaaaacattcagaatatgattattgaacatgaaaatattgtgcgacgcattggtttacttgaggctgcaggtgaagaaggtgcaggtgccactgctcatcgacaccaaagatatgacgatgaagacgaagagcaatctgttgctgatgatgtggaggaagacgagagtgttggaaatagaagacaacgtcgagttagggacaaagatgatcctttatctaaggtaaaatttactatgccttcttttgatgaaacatactatcaagagatgatgattgctttgtcacgatgtgatttgcaagaaactgaggatgctagaatttctaggttctatggaagtcttaatagagagattcgggatattcttgaatataaagaatacaataccatgaatagattattccattttgcatgcaaagctgaaagagaagtgcagggacgcaacaagcatagaagttcttttgcaggtgctacttccacacgacagtcaacaccacgtcaagctactactgccgttcgttcacctacttctacgccatccaatgctcaagaaaaaagcaaaaacgcttcagttcagactccagccaagagtgcaacttcagtagcttccactggacgtacccgtgatattacatgtcataagtgccatggcattggacacattgcacgtgactgtccaaatcggcgagctctatttgtgaatgatgatggtgagtatacttctactagtgattgtgatgatgaatatgctttagctgccactgaccacgcaggaggacaagataatgatgacatcgaggaagtccatttgcatccagagtcgctagatcagtatcctagcctaattgtcaagctagcacttagtgctaaagagaagtgtgaagagcaaaaccaatgtcacaatttgttccaaagcaaagttcttgtgaaagaccataccgtcaaaatgattattgatagcgggagttgcaacaatttagcaagtgaagagatggtcaagaagcttggcttgactacccatccacctccacgaattagcacttaa

SEQ ID NO: 15563 - DNA, 1248 bp, Oryza sativa
  Clone ID: TFbOSC900308j.C1.o9.fg
atgtcaggtacaagttccgacgaaccaacactggagaatctagcgcataaactgaagggtatggaaaattggtatgaagagttgatgcgtaatagtaaatcatacaaggaaagcacagataaacatttaaaaaccttaagtgaaagcctggtgaaagtagtggatcaaattgagaaaatgaatcaatcacataaacaattaactgaaaacattcagaatatgattattgaacatgaaaatattgtgcgacgcattggtttacttgaggctgcaggtgaagaaggtgcaggtgccactgctcatcgacaccaaatatatgacgatgaagacgaagagcaatctgttgctgatgatgtggaggaagacgagagtgttggaaatagaagacaacgtcgagttagggacaaagatgatcctttatctaaggtaaaatttactatgccttcttttgatgaaacatactatcaagagatgatgattgctttgtcacgatgtgatttgcaagaaactgaggatgctagaatttctaggttctatggaagtcttaatagagagattcgggatattcttgaatataaagaatacaataccatgaatagattattccattttgcatgcaaagctgaaagagaagtgcagggacgcaacaagcatagaagttcttttgcaggtgctacttccacacgacagtcaacaccacgtcaagctactactgccgttcgttcacctacttctacgccatccaatgctcaagaaaaaagcaaaaacgcttcagttcagactccagccaagagtgcaacttcagtagcttccactggacgtacccgtgatattacatgtcataagtgccatggcattggacacattgcacgtgactgtccaaatcggcgagctctatttgtgaatgatgatggtgagtatacttctactagtgattgtgatgatgaatatgctttagctgccactgaccacgcaggaggacaagataatgatgacatcgaggaagtccatttgcatccagagtcgctagatcagtatcctagcctaattgtcaagctagcacttagtgctaaagagaagtgtgaagagcaaaaccaatgtcacaatttgttccaaagcaaagttcttgtgaaagaccataccgtcaaaatgattattgatagcgggagttgcaacaatttagcaagtgaagagatggtcaagaagcttggcttgactacccatccacctccacgaattagcacttaa

SEQ ID NO: 15564 - DNA, 960 bp, Oryza sativa
  Clone ID: TFbOSC10377j.C1.o4.fg
atggcgactgagtgcttagggtttcaagagagggcgactccagtgggagagtcctcgtcggtcctcccccgccggcgatcgccggagaagggtctgcctagaggatacacccacgcggatatcctcacggtagctgcccgtggtccagttagttctggcgcaaaaatttcgggtgaatttgcacacgaattccggcccgagagacctagcaatggcggtgggagcccgatggctacagtgcagcccagagtcgcgagaggcccagcgagttccacgatgatgaattgcggaaaaaaagtgggtgagattaatttggaggatattttccccaaatttcgccccactgagccgcaaaagtggatctggatcaagcgaggtgaggttcgccctcttctagggttcccggcgagagacgacgagatccggcgttttggcgacggagctcgtcggatttggaaggtgcccgagaagaggtgtgatcaccgcaccttcgcccaggttgtgatggagcgtcgtcctcccaatcgcctggattggcaagccaacaagcgacgagcgacagagcaaggcggcggcgattggggtgcacgaggcggaggtgactggggggcgtgcggagctcgcgaggaggaggaactgcatcggcaactccttgctcaaaaccctagggcgaatcaaggtgctcaatggaaacctcaagggctccctggtaccgatggagagaggggggcaagagctcctaagatcaagtgcttcaagtgtggtcgtgagggccatcaccaggcggcgcgccctaacccttccctctgctactcgtgccatagctcaggtcatatttcttcccaatgccccttgatgatgagaaagggtgttaaactttgtggttttggcattccgggacaggggttctatagtttgaatgttgagttgtctgatatgagattgctaaagcccctgtga

SEQ ID NO: 15565 - DNA, 1908 bp, Oryza sativa
  Clone ID: TFbOSC420025j.C1.o1.fg
atggtaacgccggcaccgccggggggctgggacttctcccccggtgatgcaattcgagaggaagttcgtcttcgatttcgttctccggtgcatttctcttcaaagttctgccctacacacttccggttagttgatctcccgagagccaattttcggctaaccaattcttctgtggctttggctttaagagccgccattggtggttctcctgcggatcttaatgaccagcatttgttagaccggagtttctcttttgatgtttgctctaagcaagttggtctatggatttatcgtcttagatctttttcctgtgatgattttgcccttcgtttttatctatggagaaatgggggtcctaattggcaatgggaatttgagtcttggagccgtgattgtgctgaggagtggacattggtctcttctaagaagaggttggtgcacaacagttctaaggttcagaaagggaaatcttatgcccaagctgttcaacaaagagacgtcttggttaaatcagtgtttcaacatttgaaggcccctctccaggagagaagatcggttttcacgagacttcaagggttgaaggttcctatcgccggtgaaactccggcgaccaagacggtggagccaatcatggaggaagatcctatttctgcgcgtaacttgaattcaaatttcatgctttcctgtacgcgttgtttggataagggccatattgcttctgattgctctgagcctgtttggtgccattcttgcctggaggctggtcatatggcccgtttctgtgccactaggcctgctaaggcccatcaacctgtggggaagtttccaaaactgagttctcggaataacttagtttggagagctaaatcttctccggccaaaaagatggcggtttatccccgtatcccttcctctcccaggaacactgttcaatctaatccccaaaacttcccctcgcttgcaatggctaatctcaaccctaacccgcaacgttttcttcgtcaagggcaagtggttcatcaaggtggtaacttgcgtgtgccgcgtgttgatctcaccatcccacagcgtctgccccgacgccatgaggatgcctgcatcgccattgtggagccggccatccctgagcatgaatgggatcatcaccgggcgcttatctcggatcacctttttgaagtacacatgtatgaggttcgtactgcttaccgtcacccttcggcagttggtatgttccagcttcgttcggtcatgcatagagatgcgttagtaaactctccccctgctgcgtatgatgggatgcatactgttgagtttgtgaagcatgaccaagggccgaactggcgtgcttgccactttaatcaagaaggctggtttcttctcttggatttcccactagattttgtcgatcatcaccatataaatctagcagtagcttcttttggacaactttctttctggcttgatagggaccagatgttgggcagagtgtttgtgagagcaaagtatagagatcttgactcggtcccccggaaaatagtgttgcaggatcctttgggtaatggtggtggaggtgaatcatggactatttctatttttgtactagatggggattttgctgacattccacctgaagaggatttacctcctgctggactgcagcctgggcctaatgaggataatgctgatgacccagatgatggaaatatttggcaactgggacatcctggtaatcaggggggagggggtgcttgggatgatctcgtgcaacagcaacaggcggcggaagcagaaatagaggatgcttggggtcaggatcacccaatgggccaggttgaagaaaacccgggacaattgattatcttgcctaatcaaaaggagcaggagcttaatctgtttgaacaggagtaa

SEQ ID NO: 15566 - DNA, 3026 bp, Oryza sativa
  Clone ID: TFbOSC17665j.C1.o1.np
atgtcgaacgaggtgaaccatgtagggaaggctcccatgtttaatggcacaaactactccacttggaaaattaaaatgtctactcacctcaaagctatgagtttccatatttggagtattgtggatgtaggctttactatcaccgacacgcccttgacggagattgatcaccacaacctccaactcaatgcccaagctatgaatgctttgttcaactctttgagccaagaggagttcgatagagtgagcaaccttaagaccgcatatgagatttggaacaagttggcggagatccatgagggcacaagcgagtacaaggatgccaagcttcatttcctaaagatccaatatgagacattctccatgctcaatgtcattgtgaatgatctcaaggggcttggggcaaactacatcgatcttgaggttgcccaaaagatgcttagacctctaccggagaagtatgagacccttgtcaccatgctcatcaactccgacatgtcaaggatgacactcgcaagcctcttggggaagatcaacaccaatgacatgtacaagttgaagaaggaggagatgaaggaagcctcaccttccaagaagtgcattgctctccaagccgaagttgaagacaagggcaagggcaaggtaaatgaagccaatgaggacttggaggaagagattgcccttcttgctagaaggttcaatgatctcttgggaaggagaaaggagagaggaagaggctctaactccaataggagaagaaatagaagacccaagaagactctctccaacttgagctccaagaagaagaagatggccgttgttgccatcaaggaggctccatcactctttgctccactttgtctcatggcaaagggctcctctaaggtaatatctcttagtgatggtgggagtgatgatgattgtgatgatgtttcctatgatgagcttgtgagtatgtttgaggagctctatgcttatagtgagaaggagattgtcaagttcaaggatctaaagaaggatcatgcttctttggaggtcttgtatgaggagctaaagacttctcatgagagactcaccatttctcatgagaagcttaaggaagctcatgacaacctcctttccactacttaacatagagctctcattgatgttggcatatcttgtgatttgcttgatgatagtgctacttgccatattgctcatgttgcatcatctagcatttctacctcttttaatgatcttgtggatatgcctagctctggctctagcccttgtgtttctatttgtgatgcctcacttgttgttgagaacaataagcttaaggagtgtcgtgaggttgggcatttggtgaatgattgccccggtagtaagccccctaagacatgcatgtttgattcccattatatgcttaggaaggcttatgatggtagcattgttgctagatatgtggattcccctatactcggtggtaaaaagaatgccatttgggtgcccaaagctttagtctctaatctccaaagacccaaacaagtttgggtgaactaccgcaccggtgggagcctgtcacaccctgaagttcttttcccaagcctaaattgaatatttaattggcctcaagaaaatatcggtgtaaaagcaagagagaaaccctaaataaattaatgcgaataatagtcggaattggcatgtgggacagagccattggatgcttgatagtggatgcacttaacacatgaccggtgatagggctatgttcaccacatttgaagtaggagggaatgaacaagagaaagtgacttttgaagacaatagcaaaggaaaggtaattgggaggctagcccatgttggcatgaatcaattgagcaaactttcaaaatgtgatctagttgtgggcttgaaagatgtgaagtttgagaaagataagctttgtagtgcttgtcaagccggcaagcaagttgcatgttctcatcctactaaaagtatcatgtccacatctagaccattggagctcttgcatatggatttgtttggcccaacaacctataagagcattggtggaaatagtcattgtcttgtgattgttgatgattattctcgctatacttgggtgttctttttgcatgataagtctattgttgccgagcttttcaaaaagtttgcaaaaaaggcccaaaatgaatttagttgcactcttgtgaaaattagaagtgacaatggttccgagtttaagaataccaatatcgaggactattgtgatgatcttggtattaaacacgaactttccgctacctactcacctcaacaaaatggtgtagtggagaggaaaaatcgtacattgattgagatggcaaggactatgcttgatgaatatggtgtttccgatttcttttgggcggaagccataaataccgcttgccatgcaatcaataggctttatttgcatcgtctcttgaaaaagacttcctatgagctaattgttgggaggaagccaaatgttgcctattttcgagtttttggttgcaagtgttatatttatcgaaagggtgttagactaaccaaatttgaaagtcggtgtgatgaagggtttcttctaggttatgcctcaaatagcaaggcataccgggtctacaacaagaacaaaggtattgtggaagaaaccgccgatgttcaatttgatgagactaatggctcccaagaggggcacgagaatttggatgatgtaggtgatgaaggcttgatgagagctatgaagaacatgtcaattggagatgtcaagcctattgaagtagaagacaagccatccacctccactcaagatgagccatctacttccgctacgccaagtcaagctcaagttgaagtggaggaggagaaggcacaaaatccacctatgccaccaaggatacacaccgttctttccaaggatcacccaattgactaagtgttgggtgacattagtaagggtgttcaaactcgatctcgtgtcgcttcgatttgtgaacattactcgtttgtttcttgtcttg

SEQ ID NO: 15567 - DNA, 648 bp, Oryza sativa
  Clone ID: TFbOSC30726j.C1.o1.fg
atgagggcagaaataccaccaaaaccgatgccacattcaccctatccaaaacctatgtatcagcaatttcgtagacaaggaactacaccacattggtggaagggaaaacggaaaagaaaagcgtcatcactaataacatatgctgaacttgatctcagtaaaatgggaatagaaatcggtgatttgcctgaagaagttgaagagctacaactatggcaacgaaagagagatggctgttgtttttcttgtggacaatttggacattatgcgataggctgtactcaagacaccaatgaagaacaagaaacactgccttcacagatcagcccggaagagcatagagtttcagacccatccaaagaagtttcgaagattaaggcatatagtcgttgcggagagataggacactacggtagtaattgcgttactcaatgcccctactgtgacgaagaccatcaaaatggagaatgccctacaacgaagatcgcgtgcttcctttgcgaaaagacggatcatgtgccacaagactgccaactaagtccgttgctgaccaagacagcggaagtacaaagagtgtcgcttcgcttcgctcatcaactcatgacgtccggaagccacgaagaccctggatttcctacattcgattag

SEQ ID NO: 15568 - DNA, 4715 bp, Oryza sativa
  Clone ID: TFbOSC400850j.C1.o68.np
atggctagccgtccccgccgtgcagctcgtgcaccagcccgctttggttttgaggatggtagagttgagccagaagaaaatcatgagtcggctaatgaacagtcacaccacagcaatagttcgcaccgtactgtttcccgcaacgcagaggttgagcaaccccgccgcagcaaccgctcgcatcgcacagtttcccgtgatgcagagatggaacagtctcaccgctctcaccgcactgccagtcacaattctggagaagaacgcctcccttccccacctcatgtggaaaccaacatgcaacacttaatggcagttcagacacaaatcttgcaaggactaaccacagccatagccagttttcagcataatgcgcatggaaatggccaccctcacatgggcaacaacagatccaagctgacagactttctgaggtctcgtccgccagagttctctcagaccatcgagcccgtcgaggctgacgattggttgaaagatgttgatagaaaactcaacttagtgcagtgtactcctgttgagaagacgctctacgcctctcaccagctaagaggacctgccgcagattggtcggagaattactgcaatgcacaccctgaacccactaacattgcttgggatgagttcgctacggctttccgtgcagctcacgtgcctgaaagcactattgacatgaagaaagaagaattcaacagacttaagcaaggcaacagcagtgtcaatgagtacctaagtcagttcaacaagttggctcggtacgcccctgaggaagtggacacagacaagaagaagatcaggaaattcttgaaaggaatcgcagttggaatgagactccagttgattgctcatgacttccccacctttcaacacatgatcaacaaggcacttctacttgaggatgccagaaaagaggccaccgaagaatacaagaagcgcaagtctaaccatcagggaaattcttcccgaggcgcacctcgccctcgctacggtcaacccatgcaataccatcagtcggtcactcaggctaaccaccagccaggctacgcccctcgtcctcagataaaccgtccggcacctcagccacagaagcatgcccctagtggcaatactgcgcctaacagtgttacctctttcaaatcaccgcagggaccgtcagcagttcagtgtttccggtgcaaccagatgggtcactatgttagacagtgtcctcagaatcctaccaacaccaactcaggacatgctaatggcagcactgccaaaactcctactccagcggcagctcagtctcgtccaagctctcaggcaagtggacaaggttcacgtgcttccaacaacattggtcgaggccgcgtgaatcacatccaagctgaaaccgcccaggatgctccagacgttgtgatgggtatgttctctgtcaactccgtacccgcaatagttctgtttgattcgggagcttcccattctttcatatcgcaagcttttgtgaaaagaaatggttggaaaacccaaaatttgcgtgtaccaatgatagtacattcccctggaaggaatataagggcaactcaaatatgcccggaagttaaccttagaattgaggaagttgacttcctagccaaaccgatagtcctagactcgcaaagcttggacatcatcctagggatggattggttggctaagcacaaaggacagatagattgtgccgaaaagtccatcaccttgcaaggacctggaggaaagcaagtccgctttacccctaacacccctaccgcaagtcagtctatcctaacctgtttacaagtcacctccttggagtcggtgcccatagtctgtgaatatcccgacgtatttccggaagaattaacaagaatgccaccagaccgagagatcgagttcgccatagaactggcaccaggcacagctccaattgcaaaaagaccctaccgaatggcagctaatgagttagcagaagtcaaaagacaaatcgaagagttggagagtaaaggttatgtgcgacctagctcatccccttggggagccccagtgcttctggttaagaaaaaggatggctctgagagaatggtaatcgactatagagccctgaatgaagtaactataaataacaagtacccgttgccacggattgacgatttattcgatcaacttaaaggagcaagagttttctcaaaaattgacttgaggtcaggttaccaccaattgaaaatcaggtctgaagatatcccgaagaccgctttctcaacgcgttatggtctatatgagttcacagttatgtccttcggactcaccaatgctccagcattcttcatgaacttaatgaacaaaatctttatggaatacctggaccagtttgtcgtggtgttcatcgatgacatcctgatatactccaagagcgaggaggaacatgctgaacacctgaggctgataatggaaaagctcagagatcatcaactattcgctaaattctcgaaatgcgaattctggttagaccgagtagcatttcttggacacgtaatctcctccaacggtgtcgaagtagatcccagcaaggttgaagctgtacttgcttggaacccgcccaagaatgtgtcagagattcgcagcttccttggcttagcgggatattatcgaagattcattgaaggattctctaagctagccagacctatgaccgagctgttaaggaaggaaaagaaatttcaatggtctgcagcctgtgaagacagctttcaagaaatgaagaaaaggttgaccactgccccagttcttaccttgccagatatccaaaagatttcgagatcttctgtgacgcatcaagacaaggcttaggatgtgtcctaatgcaagaacgaaaggttgtggcctatgcatccaggcagctcaggcctcatgaagtcaattatcccacccatgatctcgagttggcagccgtggttcatgctcttaagatctggaggcactatttaatcgggaacagatgtgaagtatacaccgatcacaaaagtcttaagtatattttcacacagaccgagttaaatatgagacagagaagatggttggaactaatcaaggattacgatcttggaatccactatcatcctggtaaagccaacgtggtcgctgatgcgctaagtcgcaaggcctattgcaatgtagctcaaatacggcctgaccaagatcatctgtgcagagaattggagaagttaagactgaccgtggtacagtcaggagtccctgccagcttgacagtacagcctaccctagaatcgcaaatccgggaggctcagaaagatgacgaagggataaaagagttaataaaaagaatacaggataagaaagacaccaatttctccatagacgatcaaggcacagtttggtgcggtccacgcatctgtgtaccggccaaaaaggagttaagagatctcatcctaaaggaagctcatgagtccgcttactccattcatccaggaagtacgaagatgtaccaagatatcaaggcatacttctggtgggctggaatgaagcgagatgtcgcagaatacgtagccttgtgtgacatttgccaaagagtcaaggcagagcatcagaggccagctggtctgctgcaacccctaccgattcccgagtggaaatgggaagagatcggaatggatttcatcaccggtttgccaagaacccccagcgggtacgactccatttgggtaatcgtggaccgactcatgaaatcagctcatttcgtgccagtaaaaaccacctttgatggaaagaaactagcagaactctacatgacccatgtcgtatgtagatttggctgtcccaagaaaattgtgtcagaccgaggcactcagttcacctcaaggttctggaagcagttgcatgaagccctcggaactgatctgaattttagtacggcctaccatccgcagaccgatggtcagacagaaagggtaaaccaaatcctagaagacatgctacgagcgtgtgccttggatttcgaaggcacttgggatcgttgtttaccgtacgcggagttctcatacaacaacagttatcaggccagcattcagatgtcgccgaatgaggcaatgttcggaagaaagtgccgcactcccttgtgctggaatgaggtgggcgaagccctggtattcggtcctgacatactcaagtcagcagaagaacaagttaagctaatccgagaacgattaaagacagcgcagaaccgtcagaagaattacgctgacaatcggaggcgtgaccttgagttcgaaaaaggagatcatgtatacctgcgggtatcacccctccgtggtataaagaggtttgggatgtccggcaagttagcaccccgctacatcggcccctacctcataaccgccagacgtggcgaagtggcttatcagcttgagctacctgaaggtctcgcagatgtgcacaacgtgttccacgtatcccagttaaagaaatgtctacgagttccagaagagcaagttcccctgggtaatatcgagctggaaaggaatctgacctacaaggaaagaccgatcaaggttcttgaagaggcagaacgtcagactcgaaggaagaccatcaagttctacaaagtccaatggagcaatcattctgaagatgaggcaacatgggaacgagaagatcttctccgcgccgagtttccggagctgctccct

SEQ ID NO: 15569 - DNA, 3630 bp, Oryza sativa
  Clone ID: TFbOSC415532j.C1.o8.fg
atgtctggagttgccgccgccgctgctggaggagatggcggaggtggtgcgccgccgacaggagccggagctggtgcgccaggaggtgccgtgaacgacaacaacaacggaggcaattctgcctcaccatccagcggagagccattctcggggacattttcggtagttggctttgctgctgcactgaaaccacatgcttttgatggttcaaactataagagatggaaagcacgtgcactattgtggttgacagcgatgcagtgcttctatgtttcacggggcaaacgaagtgaaccacctctttctcctgaggaagaggctaagttcgaggcttcggattgcctgttccgtggagcattgatcagtgtactcgctgacaacatagtggacgtgtacatgcacatgccttctgggaaggacatgtgggatgcacttgaggccaagttcggagtttctgacgccggcagtgagttgtatgtcatggagcagttctatgactataaaatggtcgatgaccgttctgtagtagaacaagctcatgagattcagatgctggctaaggaacttgagaacaacaactgtgaattgccggacaagtttgtggcgggtggcattattgccaaactaccaccttcttggtcggactttgccacttctctaaagcacaagagacaagagttcagtgtttctgatctcattggctctttgggtgttgaggagaaggcgagggcaaaagacgtccggggcaaaaaggttgagggaggttctagtgccaatatggtacagaagaagaaccctcatgcatcccacaacaacaagaaagtcaagcttgatgtcaaacccaaggctgcaaccaattttaagaagaaaggcaagggaaaggcaaagggagactgctttgtgtgtggcaagtctgagcattgggccaaggactgtccagagcgcaaagacaggaagtctgccaacatggtcattagcgagggcggaggaacatcggggtatggtaaaatattacctacagttctctctgtttttcattcacctgattggtgggtggacactggtgctaatattcatgtcgggagaggttcctccttgttgatgggaaatgggtcgcttgcggctgttcatggtgttggtacggtcgatctgaagtttacttcgggaaagaccgtgcagctgaagaacgtgcagcatgtcccttcaataaagaagaatctagttagcggctctctattgtgtagagaaggttttagacttgtgtttgagtccaataaatgtgtcgtatctaaatatgggacttttgttggaaaaggttatgacagcggaggcttgttccgcttttctttgaatgacatgtgtaataatcataatgctgtgaaccatattagcgagaatgatgagtctaatgtgtggcattcacgactctgtcatatgaatttcggttgtatgacgcgcttagctaacatgagtttaattccaaaattcactttggtcaaaggttccaagtgccatacttgcgttcaatcgaaacaacctcgcaagcctcacaaggcatctgaggcgaggaatttggcacctctagaacttgttcattccgatttgtgcgaaatgaacggcgtgttgactaaagggggaaagaaatatttcatgacactgatagatgattgcactagattttgctatgtgtatctattgaaaacaaaggatgaggcattgcattactttaaaatctataaagctgaggtagaaaaccaacttgaaaggaaaatcaaacggttgaggtctgatagaggtggggagtatttttccaatgagtttgcatccttttgcaaagagtttggaattattcatgagaggacgcctccctattcaccccaatcaaatggggtggccgaaagaaagaaccgtactctaactgagatggtgaatgccatgttagacactgcggggctttccaaggaatggtggggtgaggcagttttgactgcgtgtcatgtcctgaataaaattccaatgaagtataaggaagtaacaccattcgaggaatgggaaaggaagaaattaaatctctcatacctacgaacatggggctgtttggccaaggtaaatatacctatagccaaaaagcggaaacttggaccaaatactgttgattgtgtgtcccttggttatgctatccacagtgtgggttatagattcttaatagtaaactctggagtacccgacatgcatgttggtacaattcttgagtccagagatgctacattctttgagaatgaatttcctatgaaacatacacctagcacttctagtaaagaaactgtcatgccccatgagcactttgcaccgatagaacacaatgatcaaacgcctgaggaaaatcctgaggaggacaacattgtagatactcgcaagagtaagagacaaagggttgcaaaatcctttggagatgactacattgtatacctcgtggatgacactccaagaaccatagaagaggcatattcatctcctgacgctgactactggaaggaagcagtacgcagtgaaatggactcgattatgtctaatggtacttgggaagtcgttgagcgtccatatgggtgcaagcccgtaggatgcaaatgggttttcaagaaaaagcttaggcctgatggtacaatcgaaaagtacaaggcaaggcttgtggccaagggttatacccaaaaggaaggcgaggacttcttcgacacatactcaccaattgctcgcttgaccacgattcgagtactacttgctctggcagcctctcatggtcttctcgtccatcagatggacgttaagacagctttcttaaacggagagctggaggaggagatctatatggatcaaccagacgggtatgtactagaatgtcaggagggaatggtgtgtaaactgttgaaatccttgtatggcctcaagcaagcacctaagcaatggcatgagaagtttgacaccacgcttacatctgcaggctttgttgtgaacgaagctgacaaatgtgtatactatcgctatggtgggggagaaggggtgatcttgtgcttatatgtcgatgacatattgatctttgggaccagccttaatgtgattgaggaggtcaaagactatctgtccaagagttttgaaatgaaggatttgggagaggctgatgttattcttaacatcaaactacaaagaggagatgagggtgggattacacttgtgcaatcccactatgtggacaaggttttgagtcgctttggatatagtgactgcaagccagctcctactccttatgatcccagcgtgctattaaggaaaacccgaagaatagcaagggatcaactgagatactctcaaatcattggttcattgatgtacttggctagcacaacgaggcctgacatctcatttgttgtaagcaagctgagccggtttgtctcaaatctgggagatgatcattggcaggctctagaaagagtaatgcgctatctaaagggcactatgagctatggaattcattataccgggtatccaaaagtactagaagggtatagtgactcaaactggatatctgatgctgatgagataaaagccacaagtggatatgtgttcacactttga

SEQ ID NO: 15570 - DNA, 2940 bp, Oryza sativa
  Clone ID: TFbOSC419079j.C1.o8.fg
atgagtcaagttggagatagcttggtctcggaatatagtggagcattgatcagtgtactcgctgacaatataatggacgtgtatatgcacatgccttcagggaaggacatgtgggatacacttgaggccaaatttggagtttccgacgccggtagtgagctgtatgtcatggagcagctctatgactacaagatggtcgatgaccgttctatagtagaacaagctcatgagattcaaatgctggctaaggaacttgagaacaacaactgtgagttgccggacaagtttgtggcgggtggcattattgccaaattgccaccttcttggtcggactttgccacttctctaaagcacaagagacaagagttcagtgtttctgatctcattggctctttgggtgttgaagagaagacgagggcaaaggacaaccggggcaaaaaggttgagggaggttctagtgccaatatggtacagaagaagaatcctcatgcatcccacaacaacaagaaagtcaagcctgatgtcaaacccaaggctacaaccaattttaagaagaaaggcaagggaaaggctaagggagactgctttgtgtgtggcaagtctgagcattgggccaaggactgtcctgagcgcaaagacaggaagtctgccaacatggtcgggagaggttcctccttgttgatgggaaacgggtcacttgcggctgttaatggtgttgttacggtcgatctgaagtttacttcgggaaagaccatgcagctgaagaacgtgcagcatgtcccttcaatagagaagaatctagttagcggctctctactgtgtagagaaggttttagacttgtgtttgaatccaataaatgtgtcatatttaaatctggaacttttattggaaaaggttacgacagcggaggcttattccgcttttctttggatgacatgtgtaataataataatgttgtgaaccatattagcgagaatgatgagtccaatgatgaagcattgcattactttaagacctataaagctgaggtagaaaaccaacttgaaaggaaaatcaaacggttaaggtctgatagaggtggggagtttttttccaatgagtttacatctttttgcgaagagtttggaattattcatgagaggacgcctccctattcaccccaatcaaatggggtagccgaaagaaagaaccgtactctaactgagatggtgaatgccatgttagacactgcgggactttccaaggaatggtggggtgaggcagttttgactacatgtcatgtcctgaataaaattccaatgaagcataaggaagtaacaccattcgaggtatgggaaaggaagaaattaaatctctcatacctaagaacatggggctgtttggccaaggtaaatatacctatagccaaaaagcgtaaacttggaccaaatactgttgattgtgtgtttcttggttatgctattcacagcgtgggttatagattcttaatagtaaactctagagtacccgacatgcgtgttggtacaattattgagtccagagatgctacattctttgagaatgaatttcccatgaaaaatacacctagcacttctagtcaagaaactgtcatacccaatgagcactttgcaccgatagaacacaatgatcaaacgcctgagggaaatcctgaggaggataacattgtagatactcgtaagacctctcatggtcttctcatccatcagatggacgttaagacagctttcctaaacggagagctggagaaggagatctatatggatcaaccagacgggtatgtactagaaggtcaggagggaatggtgtgtaaactgttgaaatccttgtatggccttaagcaagcacctaagcaatggcatgagaagtttgagaccacacttacatctgctggctttgttgtgaacgaaactgacaaatgtgtgtactatcgctatggtgggggagaaggattgatcttgtgcttatatgtcgatgacatattgatctttgggaccagtctcaatgtgattgaggaggtcaagaactttctgtccaagagttttgaaatgaaggatttgggagaggctgatgttattcttaacattaagctactaagaggagatgagggtgggattacacttgtgcaatcccactatgtggacaaggttttgagtcgttttggatatagtgactgcaagccagctcctactccttatgatcccagcgtgctattaaggaaaaaccgaagaatagcaagggatcaactgagatactctcaaatcattggttcattgatgtacttggctagtgcatcgaggcctgacatctcatttgccgtaagcaagctgagccggtttgtctcaaatccgggagatgatcattggcaggctctggaaagagtaatgcgctatctaaagggcactatgagctatggagttcactatatcgggaacccaaaagtactagaagggtacagtgactcaaactggatatctgatgctgatgagataaaagccacaagtggatatgtgttcacacttggaggtggcgttgtttcctggaagtcttgcaagcagaccatcttaacgaggtcaacaatagaagcagaacttacagcactagatactatgacagttgaggccgagtggcttcgtgaactcctgatggatttgccaatggttgaaaaaccagtgccagctatcctaatgaactatgataatcaaacaataattattaaagtgaacagttcaaaggacaacatgaagtcatctagtaatatcaagagaagaccgaaatctgtcagaaagcagaaaaactccggagtgatagcattggactatgcccaaacggctaaaaatctgacagatcagtttaccaaggggctaccatgtaatgtgatagacagtacatcgaggggaatgggcttgatatccacctaa

SEQ ID NO: 15571 - DNA, 2575 bp, Oryza sativa
  Clone ID: TFbOSC900115j.C1.o1.fg
atgtctggagttgccgccgccgctgctggaggagatggcggaggtggtgcgccgccgacaggagccggagctggtgcgccaggaggtgccgtgaacgacaacaacaacggaggcaattctgcctcaccatccagcggagagccattctcggggacattttcggtagttggctttgctgctgcactgaaaccacatgcttttgatggttcaaactataagagatggaaagcacgtgcactattgtggttgacagcgatgcagtgcttctatgtttcacggggcaaacgaagtgaaccacctctttctcctgaggaagaggctaagttcgaggcttcggattgcctgttccgtggagcattgatcagtgtactcgctgacaacatagtggacgtgtacatgcacatgccttctgggaaggacatgtgggatgcacttgaggccaagttcggagtttctgacgccggcagtgagttgtatgtcatggagcagttctatgactataaaatggtcgatgaccgttctgtagtagaacaagctcatgagattcagatgctggctaaggaacttgagaacaacaactgtgaattgccggacaagtttgtggcgggtggcattattgccaaactaccaccttcttggtcggactttgccacttctctaaagcacaagagacaagagttcagtgtttctgatctcattggctctttgggtgttgaggagaaggcgagggcaaaagacgtccggggcaaaaaggttgagggaggttctagtgccaatatggtacagaagaagaaccctcatgcatcccacaacaacaagaaagtcaagcttgatgtcaaacccaaggctgcaaccaattttaagaagaaaggcaagggaaaggcaaagggagactgctttgtgtgtggcaagtctgagcattgggccaaggactgtccagagcgcaaagacaggaagtctgccaacatggtcattagcgagggcggaggaacatcggggtatggtaaaatattacctacagttctctctgtttttcattcacctgattggtgggtggacactggtgctaatattcatgtcgggagaggttcctccttgttgatgggaaatgggtcgcttgcggctgttcatggtgttggtacggtcgatctgaagtttacttcgggaaagaccgtgcagctgaagaacgtgcagcatgtcccttcaataaagaagaatctagttagcggctctctattgtgtagagaaggttttagacttgtgtttgagtccaataaatgtgtcgtatctaaatatgggacttttgttggaaaaggttatgacagcggaggcttgttccgcttttctttgaatgacatgtgtaataatcataatgctgtgaaccatattagcgagaatgatgagtctaatgtgtggcattcacgactctgtcatatgaatttcggttgtatgacgcgcttagctaacatgagtttaattccaaaattcactttggtcaaaggttccaagtgccatacttgcgttcaatcgaaacaacctcgcaagcctcacaaggcatctgaggcgaggaatttggcacctctagaacttgttcattccgatttgtgcgaaatgaacggcgtgttgactaaagggggaaagaaatatttcatgacactgatagatgattgcactagattttgctatgtgtatctattgaaaacaaaggatgaggcattgcattactttaaaatctataaagctgaggtagaaaaccaacttgaaaggaaaatcaaacggttgaggtctgatagaggtggggagtatttttccaatgagtttgcatccttttgcaaagagtttggaattattcatgagaggacgcctccctattcaccccaatcaaatggggtggccgaaagaaagaaccgtactctaactgagatggtgaatgccatgttagacactgcggggctttccaaggaatggtggggtgaggcagttttgactgcgtgtcatgtcctgaataaaattccaatgaagtataaggaagtaacaccattcgaggaatgggaaaggaagaaattaaatctctcatacctacgaacatggggctgtttggccaaggtaaatatacctatagccaaaaagcggaaacttggaccaaatactgttgattgtgtgtcccttggttatgctatccacagtgtgggttatagattcttaatagtaaactctggagtacccgacatgcatgttggtacaattcttgagtccagagatgctacattctttgagaatgaatttcctatgaaacatacacctagcacttctagtaaagaaactgtcatgccccatgagcactttgcaccgatagaacacaatgatcaaacgcctgaggaaaatcctgaggaggacaacattgtagatactcgcaagagtaagagacaaagggttgcaaaatcctttggagatgactacattgtatacctcgtggatgacactccaagaaccatagaagaggcatattcatctcctgacgctgactactggaaggaagcagtacgcagtgaaatggactcgattatgtctaatg

SEQ ID NO: 15572 - DNA, 3687 bp, Oryza sativa
  Clone ID: TFbOSC400060j.C1.o7.fg
atgtctggagttgccgccgccactgctggcggtggtggtacgccgccgacaggagctggatccggagctggtgcgccaggaggtgccgtgaacgacaacaacaacggaggcaattctgcctcaccatccagcggagggccattctcggggtatactcttctcctcctgctactgttgttagcgctattcctgttcccattgttagcgctatcgctatactatgtgcgctatgttcttgttcctgttctacataatgcctctagcatgttatcgtgttactggtatgttcctgttcctgacattcatgatgcgcatagtatgctactggttatgttaagatcaccctacactgcttatgccatgatcattgctttaactttttggattaaaatatgccgattaatgactatatttccaacaatccaaaaacctgataggtcattttcggtagttggctttgctgctgcactgaaaccacatgcttttgatggttcaaactataagagatggaaagcacgtgcactattgtggttgacagcgatgcagtgcttctatgtttcacggggcaaacgaagtgaaccacctctttctcctgaggaagaggctaagttcgaggcttcggattgcctgttccgtggagcattgatcagtgtactcgctgacaacatagtggacgtgtacatgcacatgccttctgggaaggacatgtgggatgcacttgaggccaagttcggagtttctgacgccggcagtgagctgtatgtcatggagcagttctatgactacaagatggtcgatgaccgttctgtagtagaacaagctcatgagattcagatgctggctaaagaacttgagaacaacaactgtgagttgccggacaagtttgtggcgggtggcattattgccaaactaccaccttcttggtcggactttgccacttctctaaagcacaagagacaagagttcagtgttcctgatctcattggctctttgggtgttgaggagaaggcgagggcaaaggacgtgcggggcaaaaaggttgagggaggttctagtgccaatatggtacagaagaagaaccctcatgcatcccacaacaacaagaaagtcaagcctgatgtcaaacccaaggctgcaaccaattttaagaagaaaggcaagggaaaggcaaagggagactgctttgtgtgtggcaagtatgggcattgggccaaggactgtcctgagcgcaaagacaggaagtctgccaacatggtcattagcgagggcggaggaacatcggggtacggtaaaatattacctacagttctctctgtttttcattcacctgattggtgggtggatactggtgctaatattcatgtcgggagaggttcctccttgttgatgggaaacgggtcgcttgcggctgttcatggtgttggtacggtcgatctgaagtttacttcgggaaagaccgtgcagctgaagaacgtgcagcatgtcccttcaataaagaagaatctagttagcggctctctattgtgtagagaaggttttagacttgtgtttgagtccaataaatgtgtcgtttctaaatatgggacttttgttggaaaaggttccaagtgccatacttgtgttcaatcgaaacaacctcgcaaggctcacaaggcgtctgaggcgaggaatttggcacctctagaacttgttcattccgatttgtgcgaaatgaacggcgtgttgactaaagggggaaagaaatatttcatgacactgatagatgattgcactagattttgctatgtgtatctattgaaaacaaaggatgaggcattgcattactttaaaatctataaagctgaggtagaaaaccaacttgaaaggaaaatcaaacggttgaggtctgatagaggtggggagtatttttccaatgagtttgcatccttttgcgaagagtttggaattattcatgagatgatgcctccctattcaccccaatcaaatggggtggccgaaagaaagaaccgtactctaactgagatggtgaatgccatgttagacactgcggggctttccaaggaatggtggggtgaggcagttttgactgcgtgtcatgtcctgaataaaattccaatgaagcataaggaagtaaatgtacctatagccaaaaagcggaaacttggaccaaaaactgttgattgtgtgttttttggttatgctatccacagtgtgggttatagattcttaatagtaaactctggagtacccgacatgcatgctggtacaattcttgagtctagagatgctacattctttgagaatgaatttcctatgaaatatacacctagcacttctagtaaagaaactgtcatgccccatgagcactttgcaccgatagaacacaatgatcaaacgcctgaggaaaatcctgaggaggacaacattgtagatactcgcaagcgtaagagacaaagggttgcaaaatcctttggagatgactacattgtatacctcgtggatgacaccccaagaaccatagaagaggcatattcatctcctgacgctgactactggaaggaagcagtacgcagtgaaatggactcgattatgtctaatggtacttgggaagtcgttgagcgtccatatgggtgcaagcccgtaggatgcaaatgggttttcaagaaaaaacttaggcctgatggtacaatcgaaaagtacaaggcaagacttgtggccaagggttatacccaaaaggaaggcgaggacttcttcgacacatactcaccagttgctcgcttgaccacgattcgagtactacttgctctggcagcctctcatggtcttctcgtccatcagatggacgttaagacagctttcctaaacggagagctggaggaggagatctatatggatcaaccagacaggtatgtactagaaggtcaggagggaatggtgtgtaaactattgaaatccttgtatggcctcaagcaagcaccaaagcaatggcatgagaagtttgacaccacgcttacatctgcaggctttgttgtgaacgaagctgacaaatgtctatactatcgctatggtgggggagaaggggtgatcttgtgcttatatgtcgatgacatactgatctttgggaccagccttaatgtgattgaggaggtcaaagactatctgtccaagagttttgaaaagaaggatttgggagaggctgatgttattcttaacatcaaactacaaaaaggagatgagggtgggattacacttgtgcaatcccactatgtggacaaggttttaagtcgctttggatatagtgactgcaagccagctcctactccttatgatcccagcgtgctattaaggaaaaaccgaagaatagtaagggatcaactgagatactctcaaatcattggttcattgatgtacttggctagcgcaacgaggcctgacatctcatttgctgtaagcaagctgagccggtttgtctcaaatccgggagatgatcattggcaggctctggaaagagtaatgcgctatttaaagggcactacgagctatggaattcactataccgggtatccaaaagtactagaagggtatagtgactcaaactggatatctgatgctgatgagataaaagccacaagtggatatgtgttcacacttggaggtggcgctgtttcctggaagtcttgcaagtag

SEQ ID NO: 15573 - DNA, 780 bp, Oryza sativa
  Clone ID: TFbOSC400775j.C1.o8.fg
atgtcgactgatggaggcgtaaacggtggacatgtcggtggcggtactggaggaggcgagaacgacaacatcaacggaggcaacaacaacaatagcaatatctcattctctggagcattctctagcaaaccgagtgaaccgcctctctctcctaaggaggaggctatgttcgagtctgcggattgcttgttccatggagcattgatcagtgtactagctgacaatatattggacgtttacatgcacatgccttcagcgaaggatatgtgggatgcagttgaggccaagttcggagtttccgatgctggcaagttcggtgttactgatctcattggctctttgggtgttgaggagaaggtgagggcaaaggacaaccccgataaaaagatcaagagaggttctagcgctaacttggtgcaaaagaagaaccctaatgcaccccacaacaataacaagaaagtcaaacgtgatgtcaaactaaaggcaacaaccaattttaagaagaaatgcaagggaaaggcgaagggcaactgctttgtgtgcggtaagtctgggcattgggccaaggattgtcctgatcacaacgacaaaaagtctgcaaacatggtcattagcgagggcgaaggaacatcggggtacggtaaatttttacctacagttctctctattttccactcacctgattggtgggttgatacttttcgacattttaggtcacgactacggtatttgcatggtttggagatcgttggtgccagggtatatgcgagattgaagtaa

SEQ ID NO: 15574 - DNA, 2229 bp, Oryza sativa
  Clone ID: TFbOSC402610j.C1.o17.fg
atgtcgacaaccggcgacaacaacaacactggagacaaggagaaggagcctcccgtcaacaccaacagaggcaataccgcctcaaactccagcggagggccattatcaggtgtactcgctgacaatatagtggatgtgtacatgcacatgccttcggggaaggacatgtgggatgcacttgaggccaagttcggagttttcgacgccggcagcgagctttatgtcatggagcaattctatgactacaagatggtcgatgaccgttctgtagtggaacaggctcatgagattcagatgttggcaaaggaacttgagaacaacaattgtgagttgccggacaagtttgtggcggctggcattattgccaagttgccaccttcttggtcggactttgctacttctctaaaacacaagaggcaagagttcggtgttactgatctcattggctctttgggtgttgaggagaaggcgagggcaaaggacaaccggagtaaaaagatcaagggaggttctagcgccaatttggtgcagaagaagaaccctcacgcatcccacaacaacaacaagaaagtcaaacctgacgtcaaacccaaggctacaaccaattttaagaagaaaggcaagggaaaggcaaaaggagattgctttgtgtgtggcaagtatgggcattgggccaaggattgtcctgagtgcaaggataagaagtctgcaagcatggttattggtgagggcggaggaacattgaggtatggtaaatttttacctacagttctctttgtctgtcactcacctgattggtgggttgatactggtgctaatattcatgtcgggagatgttcctccttgttgatgggaaacggatcgcttgcagctgttcatggtgttggttatgacagcggaggcttgtttcgcttttccttggatgatatgtgtaataaagttgtcaaccatgatgaagcattacattactttaagatctataaggctgaggtagaaaaccaaactggaaaggaaaatcaaacggttgagtatggaattattcatgagaggacgcctccctattcaccccagtcaaacggggtagccgaaagaaagaaccgcactctaactgagatggtgaatgccatgttagacactgcaggactttccaaggaatggtggggtgaggcaatattgactgcgtgtcatgtcctgaatagaattcctactaagcataaggaagtaacacaattcgaggaatgggaaaggaagaaattaaatctctctcacctgcgcacatggggctatttggccaaggtaaatgtacctatagccaaaaagcgtaaacttggaccaaagaccgtagattgtgtgttccttggttatgctatccacagtgtgggatataggttcttaatagtaaattctagagtacccgacatgcgtattggtacaattactgagtctagagatgccacattttttgagaatgaatttcctatgaaaaatgcacctagcacttctagtcaagaacctattttatcccctgagcactttgcgccgatagaatacattgatcaaacacttgaggaaaatcctgtggaggataacattatggatgttaagacagctttcctcaatggagagttggaggaggagatctatatggatcaaccagatggcctcaatgtgattggggaggtcaaggacttcttgtccaaaagctttgaaatgaaggatttgggagtggctgatgttattcttgacattaaactaccgagaggagatgatggtgggattacacttgtgcaatctcactatgtggacaaggtcctgagtcgctttggttacagtgactgcaaggcagctcctactccttatgatcctagtgtgctattaaggaaaaaccgaagaatagcaagggatcaattgagatactcccagattattggttcattgatgtacttagctaatgtaacgaggcctaacatctcatttgctgtgagcaagttgagccggtttgtttcaaatccgggagatgatcattggcatgctcttgaaagagtaatgcgctatctaaaagggacaatgagctttggaattcactacactgggtacccaaaagtactggagggttatagtgattcaaactggatatctgatgctgatgagataaaggccacaagtgggtatgtgttcacacttggaggggctctgtttcctggaagtcttgcgagcagaccatcttaa

SEQ ID NO: 15575 - DNA, 1602 bp, Oryza sativa
  Clone ID: TFbOSC6126j.C1.o2.fg
atggctgacaatgagaaaggcaataaggtcagaagtcaggacattagtaccttaagctcccgagtgaatgaagcaccagacaccagttgtgtgacactggtccaacacctgattaaccagaaccgattgcttatagagatactacagcagcatcagacgccaattctgaacccgagtcaaatacgacctcaagtgcagttggaggcagtccaagcactcacaccacaagtcagcatgccgccagcatcccgaaggacccatggtgacgtgccacatgttgacccaaaagaagcaagtaacatttgctttatgtgtgaggagcaagggcactatgcaagggagcgtcctcagcagaaaagaaaaacaccaatgcgaaccgaagatgaagtccgtaagatgatcattactagcacagaatggcctccaccaggaatgaccagacgtcagagaagaaataccttccgaggtgcaccacagttgacagagcatcttttagctaatggaggtagagtgtctgatagtgaagattcagatcaagtctcctcagatgatgaagatgaaatggaacgtaaggcatgctctcgttgtggagaaatcggtcatgtcgccagctcatgtgccactatatgcgttcattgcgaggaagaccatccacccgacaggtgtccaacgagcaggatcacttgtttcttttgtgaaggaactgatcatgtaccaaaagattgtcaattcagttttctgctgacgaagaagatggctaaccaacccgccagttccaacggagagaagcatcaaggcaacaccaatcctcgccaagattacagtttcagcctaactccagtgccaggacagaggaatcgaaatgagaaaagaaaatgccgagtccgggaagacatctgttgcttcaattgtcaaggaatgggtcatttcgccgacaagtgcccaaaaccgagaaacatagctgccggcacgtcagtccacgcaactccctgcaatcagaagcttgcacctcaacgaattgtcatccatgcatcccgaagcagtcctatagcccgcgttgcaacagctccaattccaatgaatgcactaccacaaggtgtcaatgctcaatttcagccccagccaccagctgacaagacagaggccagtatctgcgttgtacctttggaggttccaatacagcagctgagaaatcaagtacaagatgaagaacccgagttgaagaagggcattactccgaaaactgtccccaaccaaggcaaaatcgacctccacattaccgccaatttacacgaagcagacattccaatcgtattgtggtcactggagcaaacgccgtaccctggtaacttgtctgaggttgactccgaagataggaatcatgagaagttctggaacggaagcatcactgcactaccgcaacctagtctgagtcagccaaaaggtgcaccctggtccaagtcaggtgaagagaagattccatcctcaacaggaggtcaagccaagcagttccgagtggtgaagttttgctggaagtttgtcaagacgcaacggaagaagtcagacaagaagagaagaccgcccaacctatcttcttgctag

SEQ ID NO: 15576 - DNA, 1707 bp, Oryza sativa
  Clone ID: TFbOSC14149j.C1.o1.np
ttctccttcccctaatgctatttgcaaaaggtttctccgttcttccttcttcggattttcaactagtactagatggtcagctttgcgaagaagaagatgtcgtcaattgtttgccgaagctccggaagactgcaaggatccgctagtgaagtggaggaagcagtgaagccagctgtgaagcaggacaaaagacttagatctgttaaggtcctatccttagtttctaatctgtctctcccctttgttttccctctctccctctccaaacctttgcaacagatggctgacaatgagaaaggcaataaggtcagaagtcaggacattggtacctcaagctccgagtgaatgaagcaccagacaccagttgtgtggcagtgtccaacacctgattaaccagaaccaattgcttatagagatactacagcagcattggattgcaattttgaacccgagtcagatgcaacatcaagtgcagttggaggcagtccaagctctctctccacaagtcagcgctccgccaacatcccagaaggcccctcatgccatgccacatgttgacccaaaagaagcaagtatcatctgttttatgtgtgatgagcaagggcactacgcaaggaactgtcctcagcagaaaagaaaagcccaatgcgaaccgaagatgaagtccgtaagatgatcattaccagcacagaatggcctccaccaggaatgacaaaacatcagagaagaaattcctcccaaggtgcacaacagttgacagagcatcttttagctaatggaggtagagtgtctggtagtgaagattcagatcaagtctcctcagatgatgaagatgcgaagtctccccaaggctttaaccagaataaaatagaacttaaggcatgctctcgttgtggagaaatcggtcatgttgccagctcgtgtgcctctacatgcgttcattgtgaggaagaccatccacccgacaggtgtccaacgagcaggatcacttgtttcttttgtgaaggaactgatcatgtaccaaaagattgtcaattcagttttctgctgacgaagaagatggccaaccaacccgccagttccaacggagagaagcatcaaggcaacacaaatccccgccaaggtcaccgtttcagcctaactccagtgccaggacagaggaatcgaaatgagaaaagaaaatgccgagtccgggaagacatctgttgcttcaattgtcaaggaatgggtcatttcgccgacaagtgcccaaaaccgagaaacatagctgccggcacgtcagtccacgcaactccctgcaatcagaagcttgctcctcaacgaattgtcatccatgcatcccgaagcagtcctatagcccgcgttgcaacagctccaattccaatgaatgcactaccacaaggtgtcaatgctcaatttcagccccagccaccagctgacaagacaggggccagtatctgcgttgtacctttggaagttccaatacagcagctgagaaatcaagtacaagatgaagaacccgagtgtaagaaagttattgtttgttacaactgcagtgaagaagggcattactccaaaaactgtccccaaccaaggcaaaatcgacctccacattaccgccaatttacacgaagcagacattccaatcgtattgtggtcactggagcaaacgccgtacccgtaaggcctcgtgttaatcagaaccca

SEQ ID NO: 15577 - DNA, 1938 bp, Oryza sativa
  Clone ID: TFbOSC18542j.C1.o1.fg
atggctgacaatgagaaaggcaataaggtcagaagtcaggacattggtacctcaagctcccgagtgaatgaagcaccagacaccagttgtgtggcagtggtccaacacctgattaaccagaaccaattgcttatagagatactacagcagcatcggatgccaattttgaacccgagtcagatgcaacctcaagtgcagttggaggcagtccaagcactcacaccacaagtcagcgcaccgccaacatcccagaaggcccctcatgccatgccacatgttgacccaaaagaagcaagtatcatctgttttatgtgtgatgagcaagggcactacgcaaggaactgtcctcagcagaaaagaaaagcaccaatgcgaaccgaagatgaagtccgtaagatgatcattaccagcacagaatggcctccaccaggaatgacaaaacatcagagaagaaattccttccgaggtgcacaacagttgacagagcatcttttagctaatggaggtagagtgtctggtagtgaagattcagatcaagtctcctcagatgatgaagatgagaagtctccccaaggttttaaccagaataaaatagaacttaaggcatgctctcgttgtggagaaatcggtcatgttgccagctcgtgtgcctctacatgcgttcattgtaaggaagaccatccacccgacaggtgtccaacgagcaggatcacttgtttcttttgtgaaggaactgatcatgtaccaaaagattgtcaattcagttttctgctgacgaagaagatggccaaccaacccgccagttccaacggagagaagcatcaaggcaatacaaatccccgccaagatcaccgtttcagcctaactccagtgccaggacagaggaatcgaaatgagaaaagaaaatgccgagtccgggaagacatctgttgcttcaattgtcaaggaatgggtcatttcgccgacaagtgcccaaaaccgagaaacatagctgccggcacgtcagtccacgcaactccctgcaatcagaagcttgctcctcaacgaattgtcatccatgcatcccgaagcagtcctatagcccgcgttgcaacaactccaattccaatgagtgcactaacacaaggtgtcaatgctcaatttcagccccagccaccagctgacaagacagaggccagtatctgcgttgtacctttggaagttccaatacagcagctgagaaatcaagtacaagatgaagaacccgagtgtaagaaagttattgtttgttacaactgcagtgaagaagggcattactccaaaaactgtccccaaccaaggcaaaatcgacctccacattaccgccaatttacacgaagcagacattccaatcgtattgtggtcactggagcaaacgccgtacccgccgagccaagggcaatcaacctccggagggcgataccaagcagaagaccgtcatccgcttcaaccagcaatcagaaggaagcttctcctgtgaatgatagcagtatgcagtcctatcacatcatcacagaaccaatcgaggatgcagtcactggaacaatgccagctatatctctccagaatcaaaatgagcagccatgtttgtggttttcagtccgctacttatcatggtgtaatcgaaagtttgcagcaatcatattcatgtctataaacattgataacttgtccgaggttgactccgaagatatgaatcatgagaagttctggaacggaagcatcacagaactaccgcaacctagtctgagtcagccaaaaggtgcaccctggtccaagtcaggtgaagagaagattccatccgcaacaggaggtcaagccaagcagttccgagtggtaaagttttgctggaagttcgtcaagacgcaacggaagaagtcagacaagaagagaagcccgcccaacctatcttcttgctag

SEQ ID NO: 15578 - DNA, 1434 bp, Oryza sativa
  Clone ID: TFbOSC23131j.C1.o4.fg
atggctgacaatgagaaaggcaataaggtcagaagtcaggacattggtacctcaagctcccgagtgaatgaagcaccagacaccagttgtgtggcagtggtccaacacctgattaaccagaaccaattgcttatagagatactacagcagcatcggatgccaattttgaacccgagtcagatgcaacatcaagtgcagttggaggcagtccaagcactcacaccacaagtcagcgcaccgccaacatcccagaaggcccctcatgccatgccacatgttgacccaaaagaagcaagtatcatctgttttatgtgtgatgagcaagggcactacgcaaggaactgtcctcagcagaaaagaaaagcaccaatgcgaaccgaagatgaagtccgtaagatgatcattaccagcacagaatggcctccaccaggaatgacaaaacatcagagaagaaattcctcccgaggtgcacaacagttgacagagcatcttttagctaatggaggtagagtgtctggtagtgaagattcagatcaagtctcctcagatgatgaagatgcgaagtctccccaaggctttaaccagaataaaatagaacttaaggcatgctctcgttgtggagaaatcggtcatgttgccagctcgtgtgcctctacatgcgttcattgtgaggaagaccatccacccgacaggtgtccaacgagcaggatcacttgtttcttttgtgaaggaactgatcatgtaccaaaagattgtcaattcagttttctgctgacgaagaagatggccaaccaacccgccagttccaacggagagaagcatcaaggcaacacaaatccccgccaaggtcaccgtttcagcctaactccagtgccaggacagaggaatcgaaatgagaaaagaaaatgccgagtccgggaagacatctgttgcttcaattgtcaaggaatgggtcatttcgccgacaagtgcccaaaaccgagaaacatagctgccggcacgtcagtccacgcaactccctgcaatcagaagcttgctcctcaacgaattgtcatccatgcatcccgaagcagtcctatagcccgcgttgcaacagctccaattccaatgaatgcactaccacaaggtgtcaatgctcaatttcagccccagccaccagctgacaagacaggggccagtatctgcgttgtacctttggaagttccaatacagcagctgagaaatcaagtacaagatgaagaacccgagtgtaagaaagttattgtttgttacaactgcagtgaagaagggcattactccaaaaactgtccccaaccaaggcaaaatcgacctccacattaccgccaatttacacgaagcagacattccaatcgtattgtggtcactggagcaaacgccgtacccgtaaggcctcgtgttaatcagaacccatag

SEQ ID NO: 15579 - DNA, 451 bp, Oryza sativa
  unsure (1)..(451): unsure at all n locations
  Clone ID: TFbOSC18181j.C1.o1.np
cgcaataacgcccataaaaatctgactttaataanccccgataaacaccctccccttacaaatgagacttaaacgtccttctaatcaagtacaagatgaagaacccgagtgtacaaccattctctgcatcgacagcctcagcaaagaattgtcgtaaatggaagaagttgtgtctcttcccgacctactccaggccgagccaagggcaatcaacctccggagggcgataccaagcagaagaccgtcatccgcttcaaccagcaatcagaaggaagcttctcctgtgaatgatagcattatgcagtcctgtcacatcatcacagaaccaatcaaggatgcagtcactagaacaatgccagctatatctctccagaatcaaaatgagcagccatgtttgtggtttttagttcgctacttatcatggtgtaatcgaaagtttgcagcaatcatg

SEQ ID NO: 15580 - DNA, 2448 bp, Oryza sativa
  Clone ID: TFbOSC414329j.C1.o9.fg
atgtcgaacgaggtgaaacatgtagggaagacacccatgctccatagcactaactactctacttggaaaattaaaatgtctactcacctcaaagctatgagcttccatatttggagttttgtggatgtaggctttgctatcactggcacgcccttgacagagattgatcaccgcaatctccaactcaatgctcaagccatgaatgctttgttcaactctttgagccaagaggagttcgatagagtgagcaaccttgagaccgcatatgagatttggaacaagttggcggagatccatgagggcacaagtgagtacaaggatgccaagcttcatttcctcaagatccaatatgagacattctccatgttgccttatgagagtgtgaatgacatgggcttggggcaacctacaccgatggagatggaggaagcctcaccatccaagaaggagatggaggaagcctcaccatccaagaagtgcattgctctccaagccgaagttgaagacaagggcaagagcaaggtgaatgaagtcaatgatgacttggaggaagagattgcccttcttgctagaaggttcaataatctcttaggaagaagaaaggagagaggaaggggctccaactccaataagagaagaaataaaagacccaacaagactctctctaacttgaggtgctttgagtgtggtgagaagggatactttgcttccaagtgcccttccaaggataatgatggagacaagtcatccaaaaagaagagtggaggttacaagctcatgaagaagctcaagaaggaagggaagaagattgaggccttcatcggggaatggaactcaaatgaggagagctccgcctcatccgggtccgaagaagaaggtggtgatgatgcaagctccaagaagaagaagatggccgttgtagccatcaaggaggctccatcactcttcgctccactttgtctcatggctaagggctcttctaaggtagcatctcttagtgatagtgagagtgacgatgattgtgatgatgtttcctatgatgagcttgtgagtatgtttgagaagctccatgcgtatagtgaaaaggagattgtcaagtttaaggccctagagaaggatcatgcttctttggaggtcttgtatgaggagctaaagacttctcatgagagactcaccatttcttatgagaagattaaggaagctcatgataacctcctttccactactcaacatggagctcacattgatgttggcatatcttgtgacttgcttgatgatagtgcttctagtcatattcctcatgttgcatcatctagcatttctacctcttgtgatgatcttatggatatgcctagctctagctatagctcttgtgtttctatttgtgatgcctcacttgttgttgagaacaatgagcttaaggagcaagtggccaagctcaacaagagtttggagaggtgcttcaagggtaagaacactcttgacaagattttcagtgagcaacggtgcatccttaacaataagggacttggatacattccaaagaagggtaagaaaccttctcaccgtgtcactcgttttgtcaagagcaacggtaagtattgctccaagtgtcatgaggttgggcatttggtgaatgattgccccggtagtaagccttccaagacatgcatgtttgattctcattatatgcttaagaaggctcatgatggtagtattgttgctagatatgtgggttcccctatacttggtggtaaaaagaatgccatttgggtgcccaaagctttggtctctaacctccaaggacccaaacaagtttgggtgaactaccgcatcggtgggagccattgggtgcttaatagtggatgcattcaacacatgaccggtgatagggctatgttcaccatatttgaagtaggaggaaaagaacaagagaaagtgacatttagagacaatagtaaaggaaaggaagagattgcccttcttgctagaaggttcaatgatctcttgggaagaagaaaggagagaggaaggggctccaactccaataagagaagaaataaaagacccaacaagactatctccaacttgaggtgctttgagtgtggtgagaagggacactttgcttccaagtgcccttccaaggatgatgatggagacaagtcatccaagaagaagagtggaggctacaagctcatgaagaaactcaagaaggaagggaagaagattgacactaaaccccaccctttgaggaatattgtttcatcgcacccatattccgttcctctccttctgtgcgttgtttcctccaccgttttccgctcctatcgccatgtccttccctgtttccacccccatcgccatttcatttccacagcaaacccttcaccgctggaaccacaccatgatgaaaccggatgtaaattagaaaatggttatctaatatag

SEQ ID NO: 15581 - DNA, 2469 bp, Oryza sativa
  Clone ID: TFbOSC900209j.C1.o21.gm
atggatctcccacaatttgtcgtcgacatcgatgcactggcaaagctgcagcttgagggcatgctgccaagccagcagaatcccgaggatcccaccaaggaggacgatgagaacgagcacaagaacgctcaagccgctaatgcaattcttagcgccttcagtggaagtgagttcaaccgtgtggacggcattgagagtgccaaagtgatttgggacacgcttaggaatttgcatgaaggcacggatagtgctagcgagtccaaggtggagattctcaaggggcagtttgaacggtttgtgatgttggatggtgagagcccaagcgacatgtatgatcgattgagcaagatcgttaatgagatcaagcgacttggctccaaggacatgaccgatgaggttgtggtcaagaagatggttcaggcaatcactccaaggaactctaccttggtgaccatcattcgtgagcgtccggactacaagactcttacacctcatgacttgcacgggtgtatccttgcccatgacatgctcgagcaagagtccaaggaggtcatccaatatatcaaccaaacctcaaccacaagcatcaagaaggaagacttggcattgaaggcaaaggaagaagaagaagagagttgcaagagtaagagcaaggcggagatcgatgatgaagagatggctctcttcgtcaagaagttcggcaagttcatgaagcaaagtggcttcgccaagggaagttcgtccaagtattcctccaacaagtcaagtggaagacactccgcaagggtgtgctatgtgtgcaaaaagcccgggcacttcattgcggattgcccccacatcaaggattgcccccacctcaaggaagacaagaagaagcttgagaagaaagagaagcacaagcatagcaagcatgatcgctatggccaagctcaccttgggatgatcttcggcttcgactccgagtcaagctcaagtgatgaagaaggagttgccacgttcaccgtcaagccttcatcaccaccgagactcttcaactactcaagtgatgaggatgctcccatttgcctcatggcaaaggagactaaggtaccctctcccctcaagtcatttaatgttgatcttgttagtgatgaggaggatgatgttgaggatgaggttatggatgaggagttgttcaagtccataaccaaggagtctctgccacacttgagtgagttgcttgggagaattgaggatcaatatgcaacccttgagaggcaagaggcattactcattcgtgagaaagagcggtctcatgaactcaagggtagtaaggccctaaaggagtacttaggttatcaaagggacaacttcaaccatgaaggccttggtgcatgtcaagccgggaaacaaattggagcacatcacccggtcaagaacgtaatggctactacaagaccgttggagcttcttcacatggagctcttcgggccaattgcttatctaagcgttggaggtaacaaatatggtcttgttattgttgatgacttttcacgcttcacgtgggtgttcttcttgcatgacaagagtgagacacaagccctcttcaagaagtttgcaagaagagcccaaaacgagtttgacctcaagatcaagaacattcgaagcgactacggcaaggagtttaagaacacgtgcatcgagagtttccttgatgaagaaggcatcaagcatgagttctcgtctccatactcacctcaacaaaacttgaaggaactcatgggcttgcaatacccacggaacaagatgagaggagaatacaatcctttcaactgcacgtcctcgaggaaatactggagggacaactggttttaccttcatgatgccgatacctctccatgccttgtcgtccctgaagagcaacctccgcattcctggtgctggactgctaaacctgttctaacccccacattgaagggtttcattgacaaaatccacaacctccgagaacatggcttgaccgggtacgaagtcgtttgcgacttcacctgttcttggatccgtcctcttcaggcttgtgctcatcctacgtttgagtacacgagggcagaagacacgacgaggataatgcgatttggcctctctcggacagcagtggcgaagtgcgttgtacaggtggtggtcgatccgccatcagccgttgataacatcccaacaacggtttgcgacctcctacaaaccgagaaggatgctgtcgtgaacataaactacgtccagcatgaagtcgggcgtgaccaagaggggactgctgttgaagaagcaaaaagttggccacactcatctggccccgggcaaagcaccagggcccgtgaagatgccgtgtcatcggccaatgatcttgtcgtggcgtttgaagcccaactaaaaaaggagcacgccgacaacgccaggctaagcgaggtggtagccggaaatgatgcgcaacgctga

SEQ ID NO: 15582 - DNA, 1476 bp, Oryza sativa
  Clone ID: TFbOSC900013j.C1.o20.fg
atggtcatgtcgtcagcagacagccatgttcccacgtcgcgcctgcttccggcggaagtggagaccaagagtttagaacctcacccagggcccccggccgaaccggcaaaggggggcctgcgcggtctcccggtgaggagccccaagctccgtcagaaggtgttcgccaggtcacctgaaaaagacgagaagcagtgcccagggagtaaccaagctccatgtcagtctaccgacaagaaggatggtactttgcagcccaactctggagcaaacaggacagtgatatggaagatggataatggcaggaccatgatcatcaccggttcagaatttactcctgaagacgcagcaaggatacccaagcgtcagagaggaagaaataccttccgaggagcgcgtcagctaacccgtcatctcataaagtacggtccgcctagacccgaagatgatgaatcaggagaacggttttctgctgatgacgatgacgacaacgatgatgataatgatgacaatgatgatgcgacccttgacagtttcagggaaagagagttgaagttcaaagcatgtgctagatgtgggatagtcggacacactgctagtttatgcctccccacatgccgctgtggtgaatatacccattactcaaatgcatgccctttaaggaaggtcacatgtttcttgtgtgaaggaacagatcatgtgcctaaggactgtcagttaaacgcggtcatagctaagaccaagaaagaacaagggacaaccgtgcaacccattcgtcaaccaatgacaatcgacaacagcggtcacaatccttctgctcttcctccaactccagctccagtggaagccaaccatggaagaagcaacgtcaccaaggatgttcataagtctctgcttgttcccgtttcagctgccaaagtgcataatcagaagcctgcaccccgagaccaagcaagtcgattctgtcgcaactgtcataagccaggacatcgtttcagtgattgtcctcttccaagagcagcaaaggcagttcgtcgtgattcacaagttaccagcactgcccatgacaccaatcgacacctgaatgtgcaacctccgccccaacggattatcgtcaagggcaccgtcaaaggtcgcattgttccaccggcaatcgtttcaagcctacagcaccaacgccagcagggtaagcaatgtcaggagaacaacagctcgctacagctacaaagaggcggtacgctccctcgtcagcacccgcggcaagtgttgtcagcaacaggtcgtccaactgttgtcagttctagcaatgcacctcgtattgctccaatctggaggcccatcgacaaatcaccgctcggtaaccccacgggcaagaagatcctacccgttacagctgacaagacagttgcccctccaccatcgaagatcaacaagcagagcaacgttcccggtgagacttctggtagtaggaactaa

SEQ ID NO: 15583 - DNA, 1540 bp, Oryza sativa
  Clone ID: TFbOSC416144j.C1.o2.np
ggcatcttaaccaattcagagtttcagatgaatatcaaattttgttttatcaatatgcatatctaaatcaatttcagagctccagataaaaagaaatcaattatttgtattgatgcatgcatctaaatcaattcattcagagtttcaaataaaaaaagaatcattagctgttgccaaattggtatatatgaagaagaaattagggaggtggaggcggaggagggggtcgtctcctcgtccaggtccaagcgggtccggccgaagcgacccaagaaggtgatgactccgatggaggcagtggagaggcggaagctgaagagggaggagcaggaggagaggaggaaggtgaagaaggagaagaggcggattaggaggttgatggagacggaggcggcgggcgaagtgggtgaggcggcggcggaggaggaggaggaggaacatgaggcggaaacggagggtgaggaagaggcggcggcggaggagcaaaaggtgtatgttgggggcatcccatactattcctccgaggatgacataagaagtttctttgaagcatgtggcagcatcacatcagtggattgcatgacatttcccgagagcgggaaattcaggggcattgccattctcacgtttaagactgatgctgccgcacaaagggcattggctcttgatggtgcagatatgggaggattttttttgaaaattcaaccatacaaatctgtccgtgaaaaggaagattttgcaccaaagatgatagagggatacaatagggtttatgttggaaacctggcatgggacataacagaggatgacttgaagaagttcttttctgattgcaaaatctcatccatccgattcggaacagacaaggagacaggtgatttcaaaggctatgtgcatgtggatttttctgagggtacatctgttgctgttgcaatgaagcttgatcagaaggtgattaaggggcggccagtcagaattagatgtgctgtccccaagaaggacaatcagaagctcaatggcaatgcaaatccagattcatcaaataataagatacggatttgttatgaatgtggcacgcctggtcatatctcttcttcttgccctaataagaaggcttctgaagccatttctgatgaaaagaaggctaatgttgactcagtcacagcatcgtcaaagaaaaggcggacatgctatgaatgtggcattcctggccatctctcatcggcttgcccaaacaagaaggccggcgatgctgtttctagtgacaaggggcctgatgatgagacaaagtctgcaccatctatcactcccgaggataataaaataggtgaagaatcaaattcagctccctccaagaagaggcggaaatgctatgaatccacttcagatggaaataaggctagtgatgacacaaaccctgtgcctgcgaagaaaaagaagaggcggacatgttatgaatgtggcatcgctggccatctcgcgtcggaatgcccaaacaaaactacctgatcgaatggttgtgttactgttttggattttt

SEQ ID NO: 15584 - DNA, 5191 bp, Oryza sativa
  Clone ID: TFbOSC400057j.C1.o11.np
attccgacgttccgggagagtccgattttgcaggagaagaatttgaggaattccaaggccagcaaggcaactcctggtttggaatggttaattcctggtttggagattgaactgtacagccggggttggttgttcagtatggttgggcctatgcaagaggatgccgcgatacaagcctgagtatttgttcggtaccgaaggatttgtccaagagttgcgtacgatgtccttcctcataggatttgggattgcccctttgtatgcccagatccctcatgatcgtgatgaagagaagtgccgggtcaaagtcgccttgaacagcaatcgtgaagatattccatcagtaatgttcgaggctggaggaggaagctacattcatgcttgtcaggaggtggcaaggatcgccataggagagctccgtaaaagctacaatgaccggttggccgacaccgagtatcgctaccatcctcgtcaaccctagggaagtgaccgtggcagctaccttgaacctgcggggatcgagaatgatgctaccacaaggcatttggttgagatgctgtgggctaggatgaaacccgcgctgagattgtgatagccgctcaagaccgtgaagaccggaattgcgacaagatttgcaagctagaagacaaggtggatcgtttggagaaggaactagctgcattgaagggagaagcaccaccgcagaaggccagagttcgtcttaccgcaaggaagagagctctattcgtccctcgctaccagttggcaccaaagatggtgctcactcgcagcaatgggaatggccccaaccccaacaacaacaacaatgcagagaatcccatgcttgctcaagtcctggctcaccaggcacagttgatgaatttgatgatgcagcaactccaaaaccagcagaaccaagggaacaatcatgcacctccccaaaacaagctggcagagtttcttcgcgtgaggccacctgttttgtctagcaccactaatcctgttgaagctggcgattggctgcacgccatagagaagaagttggatctgcttcagtgcacagaccaggagaaggtctcttttgcttcacaccagctgcatggccctgcatcggagtggtgggatcacttccgccttaacaggactactgctgaacctatctcttggcttgaattcaccgctgctttccggaagacgcacataccatcgggagtggtgtctctcaagaagaagaaattcaggtcgctcacacagggttcccgcacagtcactgagtatctgcatgagttcaatcgtctggctcgttatgctccggaggatgtgcgcactgatgaagagcgccaggagaagttcttggaaggacttaatgatgagctttcttacccactcatggctggggattatcatgatttccagaagttagtggataaggctattcgtcaggaggacaagtataaccgcatggagcagaagaaacgccggatcgctcacttcaaggcacaacagggaaatagttagaggctgcgacttgctttgggaccccagtccatgccacagggaggttcttcatctgttgctcgtccgcagcgtcagttcttcaacaacaacacgggcaacaacaaccgcaatcaagctccacgccctgttgcagctccatcacagcaacagcctgccaagagggagcaaggcagcaagcccagtgtgtgcttcaactgtggagacccaggacattatgctgacaagtgtccgaagccccgtcgcgcgaaggtcgtccctgctcaaaacaactcctccgcaccagcagccaaggctcgtgtcaaccatgttgctgccgcagaagctcaaggtgctccagatgtgattttgggtatgttccctgttaactcagttcctgcaacagtgcttttcgattctggtgctacgcattcatttttatctatgagttttgcgggaaatcatgggatggaggtagaagagcttagacgtcctttgatggttactactccgagtaaccaagcactctcatcacaacgtagcccctctgtcagaatagagatccaaggtgtaccctttctggccaaccttattctgttagaatccaaagatcttgatgtcatcctagggatggactagttagccagatataaaggtgtgatagattgtgccagtagaaaagtaactctcaccagcaatgatggtcaagttgtaaccgttcatgcattgccctttggacctctacggtcaagcctgaaccaaataactttggaagagattcccatagtgcgggagtacctagatgtgttccctgatgatttacctggtatgccgcctaaaagggatatagaattccgaatagatctagtaccaggaacaactccgatccataaacgaccctatagaatggcagccaatgaattagcagaagtgaaaaggcaagtagatgatttgctttagaaaggatacaacagaccgagttcatctccatggggagttcctgttatctttgtagaaaagaaagaccatactcagcggatgtgtgtggactatcatgcccttaatgatgtgactatcaagaataagtacccgctgccgagaattgatgatttgtttgatcaactcaaaggtgccaccgttttctccaagatagatcttcgatcaggatatcaccagttaaggattaaagaagaagatatacctaagacagcttttaccacccggtatgggttgttcgaatgtacattatgtcttttggacttaccaatgcccccgctttcttcatgaacttgatgaacaaggtgttcatgtaatacctggataagttcgtggtagtctttattgatgacattctcatttattcccgaaccaaagaagagcatgaagaacatcttcgccttgcattagagaagctgcgagaacatcagttgtatgccaagtttagcaaatgtgaattctggttgtctgaagtgaagtttctgggtcacgccatctcagccggaggagttgccgttgatcctagtaatgtggaatccgtaaccaactggaaacaaccgaagatcgtttcagagattcgcagtttcctaggcctcgcatgatattaccggagattcatagagaatttttccaagattgccaagcccatgacacgactgcttcagaaagatgtgaagtacaagtggtcagaagaatgtgagcagagttttcaagagttgaaaagtcgcttaatatcagctcccattttgattttgcctgatccaaagaagggtttccaagtgtactgcgatgcatccaagcttgggttaggctgtgttttgatgcaagatggaaaggtggttgcctatgcatctcgtcaactacgtccgcatgagaagaactaccctactcatgatcttgagttagccgcagtggttcatgcattaaagatttggcaccactatctttttggtactcgaacagaggtgtatacggatcacaaaagtttgaagtatatctttacccagccggatctgaacatgagacagcggagatggttggaattgattaaggattatgacctgggaattcattatcacccgggaaaggctaatgtcgtagcagatgcccttagtaagaaaggctattgtaatgctatggaaggacaacagttgccattggaattgtgcaaggaatttgaaagattgaatctggaaattatcagtagaggctttgttgcagctttggaagcaaagcctactctcattgatcaagttagagaagcccaaatcaatgatcatgatattcatgagatcaaaaagaatatgagaagaggtaaagctatcggtttcttggaagatgagcaaggaactgtatggttgggtgagagaatctgtgtcccccagacaacaaagatttgaaagatgcaattctgaaggaagcccatgatacgttatactccattcaccctggtagtactaagatgtaccaggatctcaaggaaagattttggtgggcaagtatgaagcgcgagatcgcggaatatgtagcagtatgtgatgtttgtcatcgagtcaaggcagaacatcagaaacccgcaggtttgctgtagcctttgaagattcctgaatggaagtgggaggaaatcggtatggatttcatcactggtctacccagaacgtcgtcaggtcatgactctatttgggtgatagtcgacagacttaccaaagtggctcatttcatcccagtaaggatcacctattccggaagtcatttagcagaattgtatatggcaaggattgtttgtttgcatggtgttcctaagaagatcgtgtccgatcgaggtagccagtttacttcaaagttttggaagaaacttcaggaggagatgggttccaagctgaacttcagtactgcctatcatccgcagatagatggacaaaccgaaagggtaaattagatattggaagacatgttgagagcttgtgctttagacttcggtggaagttgggataagaatttgccttacgccgaattctcgtacaacaacagttatcaagctagtctccagatggctccttatgaagcactgtatggtcggaagtgttgcactccgcttttgtgggatcaaacggtagaacgtcaggttttcggaactgatatcctgagggaagcagaggaaaaggtaaaaatcattcaagaaagactgcgggtggctcagtctcgtcataagagctacgccgacaatcgccgcagagatctaagttttgaagaaggagattatgtgtaccttcgtgtcacgccacttcgaggggttcatcgttttcacactaaaggaaaattggcaccgcgtttcgtgggaccttacaagattgtcagtagaagaggagaggtcgcttatcagttggagttacctcaatctttggcaggagtccataatgtgttccacgtgtcgcagttgaaaaagtgtttaagggtacctaccgaagaggctaatcttgaacagatagaagtccaagaggatctgacatatgttgagaaaccaatccgtatcttggagacagatgagagaagaaccaggaatagagttatccgtttttgcaaggtccaatggagtaatcactcagatgaagaatccacttgggaacgagaagatgaattaaagtcagctcattcgcatctgttcgctagttcttccgaatctcgaggacgagattccgtt

SEQ ID NO: 15585 - DNA, 7548 bp, Oryza sativa
  Clone ID: TFbOSC401341j.C1.o12.fg
atggcaggtccagaggataaagatgaggagggtgcatctcattccccacgcaccaaaggcatcatccaatactttacaaggcaagtgaagcagcacacagaaggacttgatacagatttgcaggtgacaaatgagaagattggacaattggagtccacgcagatctccaccaacactaagcttacagggttggagacagcggtcgcccgcattgacactagccttgctgctcttgtgaggcattttgatgctctcaatgctggaggcaatggtgggggtaatgacgatgacattgacggagagtacgtcgaggataatttagaggatgaatatattgctgacactgaacaagatgatcgagatgctcaagatcgtcgacggctacacaacaatcgacgaggtatgggtggtcgccgccgacgcgaggtacgcaacaatgatgatgctttttctaaaattaaatttaagattcctccttttgatggaaaatatgatcatgatgcgtacctctcttgggagattgctgttgaccaaaaatttgcatgccatgagtttcctgagaacactagagttagagctgctacgagtgagttcaccgattttgcttcggtttggtggatagaacatggcaagaaaaatcctaataacatgccacaaacttgggatgctttgaaacgggtcatgcgggctagatttgttccttcttactatgcacgtgacttgctgaatagattgcaacaattgagacagggtgcgaaaagtgtagaggaatattatcaggagttacaaatttgcttgcttcgttgtaaattagaggaaactgaggacgctgccatggctagatttttgggtgggttaaaccgcgagatttatgacatcgtagactataaagattacactaatatgacccgattgtttcatcttgcttgtaaggctgaaagggaagtgcaaggacgacgtgctagtgccaaggctaatttttctgcaggtaaaacttcatcatggcagacacgcaccactcctccggccggccgtactgcttctccatcttccacacccacaaccagtcgagcagcacctcctacatctagtgacaagtcagcgacaaaggccgctcagccagcaccgagtgcttcttcaatggcatccacaggccgaatgagagatgttcagtgccaccgttgcaagggcttttggcatgtgcagcgtgactgccctagcaatgatttcgatgatgatacacttgctttgcttgcggctgaccttgcagataatgagccaccggaagagcacattagggctgcatttgcggatcactatgagagcctcattgtgcagcgtgtccttagcgcacaaatggagaaggcggagcaaaatcagcgacacacgttgttccaaacaaagtgtgtcgtcaaagagcgttgttgtcgcatgatcattgatggaggtagctgcaacaacttggctagcagcgagatggtggagaagcttgcacttagcaccaaaccgcacccacatccatactacatccaatggctgaacaacagtggtaaggcgaaggtaacaaaactggtgcacattaattttgcaattggaaattaccatgatgttgttgaatgtgatgttgtgcccatgcaagtatgtaatattctgctaggtagaccatggcaatttgatagggattctatgcatcatggtaggtccaaccagtactcttttctgtaccatgataagaaaattgtgttgcatcccatgtctcctgaagatattttgcgtgatgatgttgctaaggctgccaaatccaaatgtgagagtgataaaaaagcccaatctgatggcaagaaacctgagacaatcaatttgaaacccaaatgcttacttgctactaaatctgatattaatgagttgattgcatcaccttcagttgcctatgctttggagtactctgatgtgtttcccaaggaagtgccaccggggctgccaccggtgcgcggcattgagcatcaaatcgacttgatcccaggtgcttccctaccgaaccgtgcgccataccgaaccaaccctgaggaaaccaaggagattcagcgtcaagttcatgagttgcttgataaaggagctattaataacattaccattcgatatcgtcatcctattcctaggttagatgatatgcttgatgaattgagtggctctattgtgttctccaaagctgatttgcgtagtggttaccaccagattcgtatgaagttgggtgatgaatggaaaacagcatttaaaacgaagtttgggttgtatgagtggttagtgatgccttttggtttaactaatgcacccagcactttcatgaggttgatgaatgaggttttgcgtcctttcattggaaaatttgtggtggtctactttgatgatatcttgatttacagcaagtctatgggtgaacattttaatcatttacgtgctgtttttaatgctcttcgtgatgcacgtttatttggtaaccttgagaagtgcaccttttgcacagatcgagtttcttttcttggctatgttgtaactccgcaggggattgaggttgatcaagccaaggttgaggcaattcagagttggccgactcctaaaacggtctcacaagtgcggagctttctaggactcgcggggttctatcgccgctttgtgcaggatttcagcaccattgctgcaccattgaatgcgcttacaaagaagggagtgcctttcacttggggcacatcacaagagaacgccttccacatgttgaaagataagttgacccatgcacctctcctccaacttcccgattttaataagacttttgaacttgaatgtgatgctagtgggattggattgggtggtgttttgctacaagaaggaaaacctgttgcatattttagtgaaaagttgagtgggcttgttctgaattattctacttatgataaggaattgtatgctcttgtgcgaactttagaaacatggcagcattatttgtggcccaaggaatttgtcatacattctgatcatgagtctttgaagcatattcgtagtcaagggaaattgaaccgtagacatgctaaatgggttgaatttattgaatcttttccttatgttatcaaacacaagaaagggaaggagaacatcattgctgatgctttgtctaggagatacactttgttgacacaacttgactacaagatttttggcctggaaacaatcaaagaccatatgcgcatgatgctgattttaatgatgtgttgctgcattgaagcgcatggaggcggtttgatgggacattttggtgccaagaagacacatgacatccttgctagtcatttcttttggccacagatgcgaagagatgttggcagggctgttttgaagaaaaatatcaagatgtgggaagaatgcttgcctcatattgaatttgcttataatcgttccttgcattctactacaaaaatgtgcccatttcagattgtgtatggtttgttgcctcgtgctccaattgatttgatgcctttaccatcttctgaaaaactgaattttgatgctaagcaacgtgctgagttgatgttaaaactgcatgagacaactaaagaaaacatagagcgcatgaatgctaagtataagtttgctggtgacaaaggtagaagggaattgaattttgaacctggagatttggtttggttgcatttgcgaaaagaacgatttgctgatttgagaaagtctaaattgatgcctagagctgatggaccatttaaagtgttagcaaagattaatgagaatgcatataagattgatttgcctgcagatttcggggttagtcccacatttaacgttgcagatttgaagccgtatttgggagaagaagatgagcttgagtcgaggacgactcaaatgcaagaaggggaggatgatgaggacatcaacaccatcgatacatccacgtccccccatatacagcatgatggtcctattacccgcgctcgtgcacgtcaactaaattatcaggacgagtgccctcgtggccgggttgacgcgcaccacaagttcgcggcgaccattggagacgggggatcgtcatcgcagcagcaacagcagcaacaacctcgctccgcgccccgacctcaattcgtggtgcgcgtcccacagccgcagcaacagcagagtcaacaagggactcgtgcgccccgtcctcctatgccagccatgcagcctggtcaaggccgcagggacgttcaaggtccgcagtgtctgtgcttcaactgcttcgagcccgggcactttgcggataaatgcccgaagccgaggcgccagcaaggccaagcgcctccccgctccaacaacggtggtaaggatgtcattcggggtcgtgtgaaccacgtgacggccgaggacgtgctgacaactccagacgtcatcattggtacgttcctcattcattccatccctgctaccattttgttcgactctggagcttcccactcgtttatatcggtgccattcgtggggagaaatcagttgggggtagaaaggcttaggaaccctctgctcatcaccacccctggaggggttatgacagcaaagaattatagccctgctgtccctatagaaattcaggggattccttttccctcggatctgattcttctagacaccaagaacttggatgtgatccttgggatgaattggttggctcaattccaaggagtagtggattgtgcaagacgcactgtcactctgtaccgagggccggaacaaccggttgttttctttgcacccccaacctctgtcagtagttcagaacttcatcagataggacagtcagaaatccccatcgtcagagagttcggagacgtgtttccggaagaactacccggtatgccgcccaagcgagagattgagttccggatagatcttgctccaggaaccactcctctgtacaagcgaccctaccatatggcagcaaatgaactggccgaagttaagaaacagttggaagagttgaaagaaaaggggtatatacgtccgagtacttccccctggggtgctcctgtgatttttgtggagaagaaagacaagacgaagaggatgtgcgttgactacagagctctcaatgaagtcaccatcaaaaacaagtaccctcttccccggatcgatgatctgttcgatcagcttaaaggtgccacggtattctccaagattgatcttcgttccggatatcaccagttgcgcatccgtgaaaaagatattccgaagactgcattcaccacgcgatacggactgtatgaattcaccatgatgtcattcgaggaagaccatcagcaccatctccgtctggtgttggggaagttgcgggaacatcaattgtatgccaaacttagcaagtgtgagttctggttgtccgaagtcaaattcttagggcacgtgatatctgctaaaggagttgctgtggaccccgaaacagtgaccgccgtcactgattggaagcaacccaagacagtcactcaaattcgcagtttcttaggtttggcaggatactaccggaggtttatcgagaacttctccaaaatcgctcgacccatgacacagttgttgaagaaagaagagaaatttgtgtggagcccgcaatgcgagaaggcgttccaaactctcaaagaaaagctggtttcctcgccagtgttaatcttgccggatactcgcaaggacttcatggtgtattgtgacgcttcgcgccaaggattggggtgcgtgctcatgcaggacggtcatgtggtggcctatgcctcacgccagctatggcctcatgaaggcaactaccctacccatgatttggagttagccgcggtggttcatgctctaaaaatctggcggcactatctcattgggaatcgctgtgaaatatatactgatcataagagtttgaaatacatcttcacccagtcggatctgaatcttcggcagaggagatggctagaactcatcaaggattatgatgtgggaattcactatcatcctggtaaggccaacgtggtcgccgacgctctaagtcaaaaaagccattgcaacactcttaacgtccgtggcattccacccgaacttaaccaacagatggaagccctgaatctaagcatagtgggtcgtggattcttggctgcgttggaagccaagcccaccttgctcgatcaaatccgcgaggctcagaagaacgacccggacatgcatggactcctcaagaatatgaaacagggtaaagccgctggtttcacagaggatgaacacggaaccctatggaacggaaatcgggtatgcgttccagataacagagaacttaaacaactgattcttcaggaaactcacgaaagtccttattccatccaccctggcagtacgaagatgtacttagacttgaaggagaaatactggtgggttagtatgaagcgggaaattgcagagttcgtggccctttgtgatgtgtgccagcgtgtcaaggcagagcaccaacgactggccggacttctccaacctctccaagtaccagaatggaaatgggatgaaattgggatggatttcatcaccggacttccaaaaacccaaggtggatatgattctatatgggtagttgtggatcgattaaccaaggtagctcgatttattcctgtgaagaccacctatggagggaacaaactagccgagctctacttcgctaggatcgtgagtctccatggcgttcccaagaaaatcgtatctgataggggaagccaattcacctctcacttttggaagaagctccaagaagagctggatttcgggaagacctgggataagagtctcccctatgccgagttctcctacaataacagctaccaagccagtatacaaatggcaccttatgaagcgttgtatgggcgcaaatgccggacaccgctcttgtgggaccaagttggggaaagtcaagtgttcgggactgatatcctgagagaagctgaagcgaaggtcagaaccattcgggataatctaaaggtggcacagtcccggcagaaaagttatgcagataaccgtcgccgtaacctggaattcgcagtggacgattttgtgtaccttcgagtcacgccattgcgaggtgtacacaggtttcagacaaaagggaagctcgcacctcggtttgtgggtcctttcagtatcattacccgacgcggagaagtcgcttaccagttggagctgtccgcctccttgggcaacgtgcatgatgtgttccatgtgtcacaactcaagaaatgtcttcgggtgccgtccgagcagaccgactcagagcaaattgaagttcgcgaagacttgacctacgtggagaggccagtgaaaatcctggacaccatggagcgcaggaccaggaaccgggtaatccgtttttgcaaggtccaatggagcaaccacgccgaggaagaagctacctgggagcgtgaagacgagctgaaggcagcccatcccgatctcttcgccagtttttccgaatctcggggtcgagattccgtttaa

SEQ ID NO: 15586 - DNA, 744 bp, Oryza sativa
  Clone ID: TFbOSC402051j.C1.o15.fg
atgatgtcgtcgccgactccagcgccgctgctccccgtggccccgcttgacggcggcggcgggtacctccggtggaaggagtccgtgctgctccgcctccgcaccctcgacttggcctacgtgctgtccgagcaccagccagaggacgggaggagtgattctgccaagaagaagcgggcgcgcgacgacgagctctgccgcggccacatcctcgccacgctctccgaccgcctcctgccggactacgcgcaccacgccaccgccgcggccgcgtggcgcgccctggcgcgcacctacgacatggacggcaagttgcccaacttgccgctggaccgcttcttcgcatacaggttcgtggacggcgagcccgtcctggagcagctcgcgcacctggaggccatgggcgtcgccggcaagctcgatgaccgtacaatgtacggcctggtgcaccagaagctcccgccggctctggtgaaggccatcgctctcgcgtcgccgccgtacccggaccctccatccatggaccacatctgggacacggctcgacttgaagagaggatgcgtttgtgcggcgaaattcgccgtggcgagcacactcaggacaaggaagacgacgacgaccaaggaggaggagactacccagatgaagatcaccggagcccgaaacggaagaggcgatacgatcgcgggccgtgctacaactgcggcgagccggggcacatcgccagggattgcagaggatga

SEQ ID NO: 15587 - DNA, 1954 bp, Oryza sativa
  Clone ID: TFbOSC900147j.C1.o14.np
atggatgaagtcgggggtcgatggacattctccagggcaaatgaaggctacacgagctgcggcccggtagtcgagatgtcatggcagagggttggtgccctgctgctagggggctcagtcctgcctgcctgtcccgggtgtcccggccgtaggaggattgggtcggtactcttgtttatggctaggatgggttgggaactatgtcacgtcttccgtccgtataccgtggtggtattttgctcaacaactaaaatgtggaatggttggcctgggttggcttgggacgagctgggacccagggtcgggttgccagttcggtctgaatcatcgtaggccttgggttaaggcagtactagatggtcagctttgcgaagaagaagatgtcgtcagttgtttgccgaagctccggaagactgcaggatccgctagcgaagcaaaggaagcagtgaagccagctgtgaagcaggacaaaagacttagatctgttaaggtcctatccttagtttctaatctgtctctcccctttgttttccctctctccctctccaaacctttgcaacagatggctgtcaatgagaaaggcaataaggtcagaagtcaggacattggtaccttaagctcccgggtgaatgaagcaccagacaccagttgtgtgacactggtccaacacctgattaaccagaaccgattgcttatagagatactacagcagcatcagacgccaattctgaacctgagtcaaatacaacctcaagtgcagttggaggcagtccaagcactcacaccacaagtcagcatgccgccagcatcccgaaggacccagggtgacgtgccacatgttgacccaaaagaagcaagtaacatttgctttatgtgtgatgagcaagggcactatgcaagggagcgtcctcagcagaaaagaaaaacaccaatgcgaaccgaagatgaagtccgtaagatgatcattactagcacagaatggcctccaccaggaatgaccagacgtcagagaagaaataccttccgaggtgcaccacagttgacagagcatcttttagctaatggaggtagagtgtctgatagtgaagattcagatcaagtctcctcagatgatgaagatgaaatggaatgtaaggcatgctctcgttgtggagaaatcggtcatgtcgccagctcgtgtgccactatatgcgttcattgcgaggaagaccatccacccgacaggtgtccaacaagcaggatcacttgtttcttttgtgaaggaattgatcatgtaccaaaagattgtcaattcagttttctgctgacgaagaagatggctaaccaacccgccagttccaacggagagaagcatcaaggcaacaccaatcctcgccaagattacagtttcagcctaactccagtgccaggacagaggaatcaaaatgagagaagaaaatgccgagtccgggaagatatctgttgcttcaattgtcaaggaatgggtcatttcgccgacaagtgcccaaaaccgagaaacatagctgccagcacgtcagtccacgcagctccctgcaatcagaagctcgctcctcagcgaattgtcatccatgcatcccaaagcagtcctatggcccgcgttgcaacagctccaactccagcgagtgcattaccacaaggtgtcaatgctcactttcagccccagcaaagaattgtcgtcgatggaagaagttgtgtctctccccgacctactccaggccaagcaaagggcaatcgacctccggagggcgataccaagcagaagaccgttattcgcctcaaccagcaatcagaaggaaacttctcctgtgaatgatagcaatatgcagtcctatcacatcatcacagaaccaatcaaggatgcagtcactagaacagagacctagggtctcatttcagaggaattatgttccaacctcgagttaataaccaacct

SEQ ID NO: 15588 - DNA, 1272 bp, Oryza sativa
  Clone ID: TFbOSC900329j.C1.o15.fg
atggctgtcaatgagaaaggcaataaggtcagaagtcaggacattggtaccttaagctcccgggtgaatgaagcaccagacaccagttgtgtgacactggtccaacacctgattaaccagaaccgattgcttatagagatactacagcagcatcagacgccaattctgaacctgagtcaaatacaacctcaagtgcagttggaggcagtccaagcactcacaccacaagtcagcatgccgccagcatcccgaaggacccagggtgacgtgccacatgttgacccaaaagaagcaagtaacatttgctttatgtgtgatgagcaagggcactatgcaagggagcgtcctcagcagaaaagaaaaacaccaatgcgaaccgaagatgaagtccgtaagatgatcattactagcacagaatggcctccaccaggaatgaccagacgtcagagaagaaataccttccgaggtgcaccacagttgacagagcatcttttagctaatggaggtagagtgtctgatagtgaagattcagatcaagtctcctcagatgatgaagatgaaatggaatgtaaggcatgctctcgttgtggagaaatcggtcatgtcgccagctcgtgtgccactatatgcgttcattgcgaggaagaccatccacccgacaggtgtccaacaagcaggatcacttgtttcttttgtgaaggaattgatcatgtaccaaaagattgtcaattcagttttctgctgacgaagaagatggctaaccaacccgccagttccaacggagagaagcatcaaggcaacaccaatcctcgccaagattacagtttcagcctaactccagtgccaggacagaggaatcaaaatgagagaagaaaatgccgagtccgggaagatatctgttgcttcaattgtcaaggaatgggtcatttcgccgacaagtgcccaaaaccgagaaacatagctgccagcacgtcagtccacgcagctccctgcaatcagaagctcgctcctcagcgaattgtcatccatgcatcccaaagcagtcctatggcccgcgttgcaacagctccaactccagcgagtgcattaccacaaggtgtcaatgctcactttcagccccagcaaagaattgtcgtcgatggaagaagttgtgtctctccccgacctactccaggccaagcaaagggcaatcgacctccggagggcgataccaagcagaagaccgttattcgcctcaaccagcaatcagaaggaaacttctcctgtgaatga

SEQ ID NO: 15589 - DNA, 1806 bp, Oryza sativa
  Clone ID: TFbOSC1509j.C1.o2.fg
atgtcgtggcagagggttggtgccctgctgcttggggctcagtcctgcctgcctgtcccggaggttccggccgtaggcgggattgggtcggtactcttgtctatggctaggatgggttggaaactatgtcacgtcgtccgtctgtataccgtggtgaataagcctaacatacatcataacagcaaaagacttagatctgttaaggtcctatccttagttcctaatctgtctctcccctttgttttccctctctccctctccaaacctttgcaacagatggctgacaatgagaaaggcaataaggtcagaagtcaggacattggtacctcaagctcccgagtgaatgaagcaccagacaccagttgtgtgacactggtccaacacctgattaaccagaaccgattgcttatagagatactacagcagcatcagacgccaattctgaacctgagtcagatacaacctcaagtgcagttggaggcagtccaagcactcacaccacaagtcagcatgccgccagcatcccgaaggacccatggtgacgtgccacatgttgactcaaaagaagcaagtatcatttgttttatgtgtgatgagcaagggcactatgcaagggagtgtcctcagcagaaaagaaaaacaccaatgcgaaccgaagatgaagtccgtaagatgatcattaccagcacagaatggcctccaccaggaatgacaaaacgtcagagaagaaataccttccgaggtgcaccacagttgacagagcatcttttagctaatggaggtagagtgtctgatagtgaagattcagatcaagtctcctcggatgatgaagatgagaagtctccccaaggtttcaaccagaataaaatggaacgtaaggcatgctctcgttgtggagaaatcggtcatgttgccagctcgtgtgccactacatgcgttcattgtgaggaagaccatccacccgacaggtgtccaacgagcaggatcacctgtttcttctgtgaaggaactgatcatgtaccaaaagattgtcaatccagttttctgctgacgaagaagatggccaaccaacccgccagttccaacggagagaagcatcaaggcaacacaaatcctcgccaagattacagtttcagcctaactccagtgccaggacagaggaatcaaaatgagaaaagaaaatgccgagtccgggaagatatctgttgcttcaattgtcaaggaatgggtcatttcaccgacaagtgcccaaaaccgagagacatagctgccagcacgtcagtccacgcaactccctgcaatcagaagcttgctcctcagcgaattgtcatccatgcatcccgaagcagtcctatagcccgcgttgcaacagctccaactccagcgagtgcattaccacaaggtgtcaatgctcaatttcagccccagccaccggttgacaagacagaggccagtatcggcattgtacctttggatgttccagcacagccgccaagaaatcaagtacaagatgaagaacccgagccactaaccattctctgcaccgacggcctcagcaaagaattgtcgtcgatggaagaagttgtgtctctccccgacctactccaggccgagcgaagggcaatcaacctcaggagggtgataccaagcagaagaccgttattcgcctcaaccagcaatcagaaggaagcttctcctgtgaatgatagcaatatgcagtcccatcacatcatcacagaaccaatcaaggatgatgcagtcactagaacaatgccagctatacctctccagaatcagaatgagtag

SEQ ID NO: 15590 - DNA, 862 bp, Oryza sativa
  Clone ID: TFbOSC102138j.C1.o17.gp
agtaaccgacaataatcatctttttcatctcggggaaaccacaaaaaggagagagattttgtcaatctcctcgcccaacacacaaaaccaatccagacatcacgtcttcttaacctgaaccagaggaccagaccaactcatagcagcaaaagcatcatcacacgagcagcagcagcagaagttaaaactaaaccgaaatcccaatagcaaaaaaagaaaaagaggtaaaaacaaaaggcaagcggttcctttatagcaggcaacgcgctctccatgtgacccagatcggcggcaaaactaaagcaataattcgacttaggagtgatgaagatttaggcgagatctaagaggaggggggggggagatggtgttgtgaatccatcacttgtggcagtcgcgggcgatgtgtccagcctcgccgcagttgtagcaggagcggtcgcctccaccgccgaatcgcccgcctccgcctccaccgccgccgttgtagcagtccctcgcgaggtggccggtctcgccgcagttgtagcaggcgccgccgccgccgccgccaccaccaccacctccaccaccaccgctgttgaagcagtccctagccatgtggcccatctcgccgcacttgaagcagccaccaccagcgccgccgccgccgccaccgcctccaccaacgccgacaccgccgccgttgaagcagtccctggccatgtggccagactccccacacttgaagcagcccccaccgggtccaccaccgccggatctcctccccccgccccagctaccgccatagctgcggccgccaccgccagatccgcccccaccgcgcgatccgaagcctcccccgccaccgccgccgccgccg

SEQ ID NO: 15591 - DNA, 1087 bp, Oryza sativa
  Clone ID: TFbOSC19735j.C1.o3.np
ttaaggcatgctctcgttgtgaagaaatcggtcatgttgccagctcgtgtgcctctacatgcgttcattgtgaggaagaccatccacccgataggtgtccaacgagcaggatcacttgtttcttttgtgaaggaactgatcatgtaccaaaagattgtcgattcagttttctgctgacgaagaagatggccaaccaacccgtcagttccaacggagagaagcatcaaggaaacacaaatcctcgccaagattacagtttcagcctaactccagtgccaggacagaggaaacaaaatgagaaaagaaaatgccgagtccgggaagatatctgttgcttcaattgtcaaggaatgggtcatttcgccgacaagtgcccaaaaccgagaaacgtagctgccagcacgtcagtccacgcaaacccccgcaatcagaagcttgctcctcaacgaattgtcatccatgcatcccgaagcagtcctatagcccgcgttgcaacagctccaattccaatgagtgcactaccacaaggtgtcaatgctcaatttcagccccagccaccagctgacaagacagaggccagtatctgcgttgtacctttggaagttccaatacagcagctgagaaatcaagtacaagatgaagaacccgagaagaagggcattactccaaaaactgtccccaaccaaggcaaaatcgacctccacattaccgccaatttacacgaagcagacattccaatcgtattgtggtcactggagcaaacgccgtaccaaagagtgaaatcttccactcggtatcagatgctacacggagtgaaaaatgcaagcaccggttaccaggttgactccaaagatatgaactatgcgaagttctggaactgaagccccatcttcaagtgccgcaacccagtcgaagtcagctaaaggttcaaccctggttcgagtcaggtgaaaagaagattccacctgcaacaggagatcgagccaagcagtccagagtggagaagctttgttaggcaagtttgttatagaaagcggagcggaagaagtcagacaagaagagaagaccgcccaacctatcttcatgc

SEQ ID NO: 15592 - DNA, 2652 bp, Oryza sativa
  Clone ID: TFbOSC401219j.C1.o8.fg
atggacatctctaggacaaatgaaggctacacgagctgcggcccggtagtcgagatgtcatggcacagggctggtgtcctgctgctaggggctcaatcctgcctacctgtcccggaggttccggccgtaggtggggttgggtcggtactcttgtctatggctaggatgggttggaaactatgtcatgtcttccgtccatatgccgtggtgaataagcctaacatacatcataacagcaaaagacttagatctgttaaggtcctatccttagtttctaatctgtctctcccctttgttttccctctctccctctccaaacctttgcaacagatggctgacaatgagaaaggcaataaggtcagaagtcaggacattggtacctcaagctcccgagtgaatgaagcaccagacaccagttgtgtgacactggtccaacacctgattaaccagaaccgattgcttatagagatactacagcagcatcagacgccaattctgaacctgagtcaaatacaacctcaagtgcagttggaggcagtccaagcactcacaccacaagtcagcatgccgccagcatcccgaaggacccatggtgacgtgccacatgttgactcaaaagaagcaagtatcatttgttttatgtgtgatgagcaagggcactatgcaagggagtgtcctcagcagaaaagaaaaacaccaatgcgaaccgaagatgaagtccgtaagatgatcattaccagcatagaatggcctccaccaggaatgacaaaacgtcagagaagaaataccttccgaggtgcaccacagttgacagagcatcttttagctaatggaggtagggtgtctgatagtgaagattcagatcaagtctcctcagatgatgaagatgagaagtctccccaaggtttcaaccagaataaaatggaacgaaaggcatgctctcgttgtggagaaatcggtcatgttgccagctcgtgtgccactacatgcgttcattgtgaggaagaccatccacccgacaggtgcccaacgagcaggatcacttgtttcttttgtgaaggaactgatcatgtaccaaaagattgtcaattcagttttctgctgacgaagaagatggccaaccaacccgccagttccaacggagagaagcatcaaggcaacacaaatcctcgtcaagattacagttttagcctaactccagtgccaggacagaggaatcaaaatgagaaaagaaaatgccgagtccggaaagatatttgttgcttcaattgtcaaggaatgggtcatttcgccgacaagtgcccaaaaccgagaaacatagctgccagcacctcagtccacgcaactccctgcaatcagaagcttgctcctcagcgaattgtcatccatgcatcccgaagcagtcctatagcccccgttgcaacagctccaactccagcgagtgcattaccacaaggtgtcaatgctcaacttcagccccagccaccagttgacaacacagaggccagtatcggcattgtacctttggatgttccagcacagcagccaagaaatcaaaattggaacaacccagcaggggcaaccaacgttcaagtacctacagtccagcaacagtgcaagttatcagaatttctaaaaactgagactccaacctttgccattgccgtcgatcctatggaagccagtgattggttgcgcacagtcgagaagaagctggggttggttcagtgcacagaccaggagcgggttgtcttcgcaactcatcagttgatatcacatgttcccgcaggaatgatcacactgagaaaacgagagttccgctacctgaatcaagaagatttgaccgtcacagagtacctgcacgagttccatcgtttggctcactatgcaccggaagatgtggaaaatgatgaagacaaacaagagaagtttctccaggcgttaaaagatgagatcgcagtgcaactactcctagaggaatatgaagattttgagaaacttgtggacaaagccatacaactcgaaagtgagcataatcggatgaagaactgtaagaggaggattgtcagcatcccagtatcttcatgtggtaaccaaagacagcgcactgagccacttcagatcatcggatcttctgttgcacatcaagagtttccgccccaagaagatggacacaatgcagacaacaacattagcaatactaatgatgatgataccaccaacaaccatgctccatgccccattagtgaccactcaaaccaagcgtgcaatgtcaacatcattcaccaaggtgtcgacgatagtatcgatgatggcacccaaaatgacaaccctagcaattgtgactctgagaaagactccaatggtgatagcaactatggtaccactgatgccaatgttagcaaggatttccaaccaccaattccaactccaagtcagaatgatcgtccccagacggatagctcagcaaagaagacgttgatttgctacaattgcaaagaaccaaggcattactcgagggactgcctgcaaccaaggcaaagtcgacctccacattaccgccaagttacacaaagcagacatcccaatcgtattgtggtcactggagcaaacaccgtacccgtgaggcctcgtgttaatcagaacccatag

SEQ ID NO: 15593 - DNA, 1850 bp, Oryza sativa
  Clone ID: TFbOSC22429j.C1.o2.np
atgttggacttagggggaaaggacggggaaattggaaatgaagatggagcgagcagcaagggaactccatctcccaagggagccactataccttttgattacaggaaacttaccattccctctcacaactttgtctccgtaccttccgggcgtgctcctcaatttgatgggacacattacgccgcttggaagcacaagatgaagttgcatctaatctctttgcatccaagtatttggaaagttgtgtgtacaggtattgacgtacctcatgaggacatggagctcacttcggagaaagaacaactcatccaccgcaatgctcaagcttccaatgcaattctctccgccttgagtccggaggaattcgacaaggttgatggactagaggaggccaaggagatatgagatactttgcaattggctcatgagggatcacccgccgttcgtgaggcaaagattgaattattggaaggaaggctaggaagatttgtgatggatgacaacgagacaccacaagagatgtatgataggatgatgatccttgtcaacaagattaaaggacttgggagtgaggacatgacaaatcactttgttgtcaagagacttctccgtgcttttggtccaagaaatcccactcttgtttcaatgatacacgaaaggaaagacttcaagaggctcaccccaagtgacattcttggaagaattgtgtctcataagatgcaagaagaggaagctcgtgaagtgagacaaatggtgaagaatgccgccatgatcaaaaatcaagaagttgctttgaaggcaaaacaagaagaaatggcttttattgtcaagagattcaagcactttcttcgcaagagtggctatggcaaagggaggaaggttgatgacaagggaaagaggcaatcaaagagagcgtgcttcaattgtggcgaatttggccatttcattgccgattgtcccaagtcaaatgaagctaaggctaagggaggcaagaagaagctggaacgtgctcatgtggcggaggcacacatggcggaagtgtggtactccggagatgaagaagatcccgaagtcaagcccaagcccaagtcaaaagacaaggttgaaggagaaggtggtgttgctactgtcaccttcaagtcatcctcttcaagcaaggagcgtctcttcaacaacttgagtgatgacgacgacgactcctaccactactcttgcttcatggcccaaggccgcaaggtgatgactcaaaagccctctcacacttctcttgatgttgagtctagtgatgaggaaagtgataatgaattagatgatgtgcttaagagctttagcaaacccgctatgcaacacttggctaagttaatgagagctttggatagtacagaacaattactcgtaagacaagaagaattgcttattcttgagaagaaaagaaatcttgccttagaggagagcttagctaaagaaagtgctaaaaataaacaactagctaatgagcttaattttgctaatggttctttagctagccttagagatgtcaatgagactcttcaagagaaatttgcttgtttagacaaaagtcataaagttcaaattgacactctttggaatagtacctctcaaccaaatgtggtttctaattcctctaacccttctactagcaatggttgtgctaggtgttacaatattgatttgaactcttatgctactaatattgtggagatgcaagctcttaagaaagagaatgaaaggttgggcacattggtgaaatatggatgcatgaagacataccattcaaaagatgccctttacaagaccatcaccgctcatcctaacaaggatggacacgg

SEQ ID NO: 15594 - DNA, 5142 bp, Oryza sativa
  Clone ID: TFbOSC401835j.C1.o29.fg
atgtcggacttagggggaaaggacggggaaattggaaatgaagatggagcgagcaacaagggaactccatcacccaagggagccactataccttttgattacaacaaacttaccattccctctcacaacttcgtctccgtgccttccgggcgtgctcctcaatttgatgggacatattacgccgcttggaagcacaagatgaagttgcatctaatctctttgcatccaagtatttggaaaattgtgtgtacaggtattgacgtacctcatgaggacatggagctcacttcggagcaagaacaactcatccaccgcaatgctcaagcttccaatgcaattctctccgccttgagtccggaggagttcaacaaggttgatggactagaggaggccaaggagatatgggatactttgcaattggctcatgagggatcacccgccatttgtgatgccaagattgaactattggaaggaaggctaggaagatttgtgatggatgacaaggagacaccacaagagatgtatgataggatgatgatccttgtcaacaagattaaaggacttgggagtgaggacatgacaaatcactttgttgtcaaaagacttctccgtacttttggtccaagaaatcccactcttgtatcaatgatacgggaaaggaaagacttcaagaggctcaccccaagtgacattcttggaagaattgtgtctcatgagatgcaagaagaggaagctcgtgaagtgagacaaatggtgaagaatgccgccatgatcaagaatcaagaagttgctttgaaggcaaaacaagaagaagagtcaagtggtgaagaaagtcaagatgaagaaatggcttttattgtcaagagattcaagcactttcttcgcaagagtggctatggaaaaggaaggaaggatgatgacaagggaaagaggcaatcaaagagagcgtgcttcaattgtggcgaatttggtcatttcattgccgattgtcccaagtcaaatgaagctaaggctaagggaggcaagaagaagacggagcgtgctcatgtggcggaggcacacatggcggaagtgtggtactctagagatgaagaagatcccgaagtcaagctcaagcccaagtcaaaagacaaggttgaaggagaaggtggtgttgctaccatcgcctttaagtcatcctcttcaagcaaggagcgtctcttcaacaacttgagtgatgacgacgacgactcctaccactactcttgcttcatggcccaaggccgcaaggtgatgactcaaaagccctctcacacttctcttgatgttgattctagtgatgaggaaagtgataatgaattagatgatgtgcttaagagctttagcaaacctgctatgcaacatttggctaagttaatgagagctttggatagtaaagaacaacttctcgaaaggcaagaagaattgcttattcatgagaagaaaagaaaccttgccttagaggagagcttagctaaagaatgtgctaaaaatgaacaactagctaatgagcttaatttggctaatggttctttagctagccttagagatgtcaatgagactcttcaagagaaatttgcttgtttagacaaaagtcataaagatcttgaagttcaatttgacactctttggaatagtacctctcaaccaaatgtggtttctaattcctctaatccttctactagcaatggttgtgctaagtgttacaatattgatttgaactcttatgctactaatattgatgctatgcaagctcttaagaaagagaatgaaaggttgggcacattggtgaaatatggatgcatgaagacataccattcaaaagatgccctttacaagaccatcaccgctcatcctaacaaggatggacacgggcacgggttttcgggtggaagtcctgtgtctaagcgtgtgatggtaaatgggaaagaatgcttgatgtttgtgagagaaggaaaagcaccacaagcaagtgagatcactaatcttgtgagcagccagggacccggaacatccggacaaaccggccaaaacctctgggtgggagtctccatctctcaaaaattcccaccaggaagttccggccggtttgccaggaagttccgggccaatggccgtgcacaagatatgaccggaagttccaggcataatgccaggaggttccgaccagatggtctttactatgattcatatgcatactcctccggtggttcaagttgggttgtggacagtggttgcaccaatcatatgactggagagaggagtatgtttacaagtcttaatgatgagaacggaactcgtgagaatattgtgtttggagatgatggtaaaggaaagttgggttacaattgcttgtttaccgatgaggatgtgaccgtctttagaagggatgactcctccgtagcattcaaaggcaagataaagggtgatctctatcttgtcgatttcgatgtggatagagtgaatccagaagcttgtttgattgctaaatcctccatgagttggctatggcatcgtagactagcccatgttggaatgcggaatttggcaactcttctaaagggggaacaatcctcgggctcattaatgtcacatttgagaaagatcagggtgcgaagcgacaatggaggagaattcaagaacactcaagtgaaggaattccttgacgaagtgggaatcaagcatgagttctccgccccatatgatcctcctcaaaatggcattgttgagaggaagaaccaaactcttattgaagccgcaagatcaatgcttgatgagtacaagacttcggatatcttttgggtggaggccgtgagtaccacatgtcatgccatcaaccgcttgtacctccacaagatcttaaagaaaacttcatatgagctcttgagtggtaagaaacctaatgtttcatattttcgtgtctttgggagcaaatgctttattttgagtaagaggcctcgctcatctaagttctcacctaaggtggatgagggattcttacttggctatgaatcaaatgcacatgcctatcgtgtcttcaacaaaacctccggtattgttgaagtcactagggatgtgacatttgatgaatctaatggctcccaaggagagcaagttgttgtacatgttgtaggtgatgtggattcaagtcaagctataggtactaaggctattggagacatacgaccagtcaagacgcaggatgaccaagaagacagggatcaaccttcgtcatcgacatccaatagccctacattgagtcaagtgtcagtcgacccggaagttccgggaccagatggtcggaacctccgaacctctccaagccaggaagttccgggtccatctgccaggaagttccgggcagaggacagtcaaggcgtgcctacggcacaagtggatggaattgatgctgagggcactgtagagcatcctgatcaggctcaggtcccctcggtgcaccatccaagaatacatcacactgtccaaagagatcatcccgtcgacaacatacttggtgacataagaaaggaggtaactactcgttctcgtgtcgctaacttttgtcaacactatttgtttgtctcttctttggaaccaaccagggttgaagatgcacttggtgatctggattgggtgatggctatgcaagtggagttgaataacttcactcgcaaccaagtatggacattggtggagagacccgaccaaaatgtcatcggcaccaagtggatcttccgcaacaagccagatgaacatggagtggttgtaaggaacaaagcccggttagttgcgcaagggttcacccaaatcgagggtctcgattttggtgaaaccttcacacccgttgctcaccttgagtcaatccgaatccttttagcctatgccgctcaccatgatttcaggttattccaaatggatgtcaagagtgcctttctcaatggacctatctcggagttggtctatgtggagcaaccaccggggttcgaagatccaaggttgccaaaccatgtgtacaagctccacaaggcgctctacgggctcaaacaagcccctagagcttggtatgaatgtctccgagattttcttttgaaaaatggttttgaaattgggaaggcggatactactctcttcactaaaaaatctaagagtgatttattcatttgccaaatttatgtcgatgacataatatttggttctactaatgcctctttttgtgaagaatttagtagtatcatgactaaaaggttcgagatgtctatgatgggcgagttgacctttttcctcgggctacaagtgaagcaagtacaagagggcactttcatctctcaaaccaagtacgtgaaggacattctcaagaagtttgggatggaagatgccatacccatcaagactcctatgcctaccaatggccacctagacctcgacgataatggtaaatgtgtggaccaaaaggtatatcgctccatgataggatccttgctttacttatgtacatctcgtcccgatatcatgcttagtgtttgcatgtgtgctcgctttcaagcggagcctaaagagtgctatttgattgccgtcaagagaattctaagatatttagtccatactcctaatcttggcttgtggtatcctaagggttgtgactttgagcttttgggctattccgattcggattacgccgggtgtaaggttgatagaaaaagcacaaccgggacttgccaatttcttgggcggtcccttgtttcttggtcctccaagaagcaaaattctattgctttatccaccgccgaagtcgaatatgtcgccaccggttcttgttgtgtccaactcctttggatgaaacaaaccctaaaagactttggctacaacttcaccaagatcccactcctatgtgacaatgagagtgccatcaaaatagccaataatcccgttcaacattctcgaaccaaacacatagatattcgccaccactttttgagagatcatgagaccaaaggagacatttgccttacacatgtgagaaccgagagcatattggccgacattttcaccaagcctttagatgagaaaagattttgcgagcttaggagtgagctcaatatcttagattctcgcaacattaggtga

SEQ ID NO: 15595 - DNA, 6150 bp, Oryza sativa
  Clone ID: TFbOSC900009j.C1.o24.fg
atgttggacttagggggaaaggacggggaaattggaaatgaagatggagcgagcagcaagggaactccatctcccaagggagccactataccttttgattacaggaaacttaccattccctctcacaactttgtctccgtaccttccgggcgtgctcctcaatttgatgggacacattacgccgcttggaagcacaagatgaagttgcatctaatctctttgcatccaagtatttggaaagttgtgtgtacaggtattgacgtacctcatgaggacatggagctcacttcggagaaagaacaactcatccaccgcaatgctcaagcttccaatgcaattctctccgccttgagtccggaggaattcgacaagggatcacccgccgttcgtgaggcaaagattgaattattggaaggaaggctaggaagatttgtgatggatgacaacgagacaccacaagagatgtatgataggatgatgatccttgtcaacaagattaaaggacttgggagtgaggacatgacaaatcactttgttgtcaagagacttctccgtgcttttggtccaagaaatcccactcttgtttcaatgatacaggaaaggaaagacttcaagaggctcaccccaagtgacattcttggaagaattgtgtctcataagatgcaagaagaggaagctcgtgaagtgagacaaatggtgaagaatgccgccatgatcaaaaatcaagaagttgctttgaaggcaaaacaagaagaagagtcaagtggtgaagaaagtgaagatgaagaaatggcttttattgtcaagagattcaagcactttcttcgcaagagtggctatggcaaagggaggaaggttgatgacaagggaaagaggcaatcaaagagagcgtgcttcaattgtggcgaatttggccatttcattgccgattgtcccaagtcaaatgaagctaaggctaagggaggcaagaagaagctggaacgtgctcatgtggcggaggcacacatggcggaagtgtggtactccggagatgaagaagatcccgaagtcaagcccaagcccaagtcaaaagacaaggttgaaggagaaggtggtgttgctactgtcaccttcaagtcatcctcttcaagcaaggagcgtctcttcaacaacttgagtgatgacgacgacgactcctaccactactcttgcttcatggcccaaggccgcaaggtgatgactcaaaagccctctcacacttctcttgatgttgagtctagtgatgaggaaagtgataatgaattagatgatgtgcttaagagctttagcaaacccgctatgcaacacttggctaagttaatgagagctttggatagtacagaacaattactcgtaagacaagaagaattgcttattcttgagaagaaaagaaatcttgccttagaggagagcttagctaaagaaagtgctaaaaataaacaactagctaatgagcttaattttgctaatggttctttagctagccttagagatgtcaatgagactcttcaagagaaatttgcttgtttagacaaaagtcataaagttcaaattgacactctttggaatagtacctctcaaccaaatgtggtttctaattcctctaacccttctactagcaatggttgtgctaggtgttacaatattgatttgaactcttatgctactaatattgttgctatgcaagctcttaagaaagagaatgaaaggttgggcacattggtgaaatatggatgcatgaagacataccattcaaaagatgccctttacaagaccatcaccgctcatcctaacaaggatggacacgggctcgggttttcgggtggaagtcctgtgtctaagcgtgtgatggtaaatggaaaagaatgcttgatgtttgtgagagaaggaaaagcaccacaagcaagtgaggtgactaatcttgtgagcagccagggacccggaacatccggacaaaccggccaaaacctccgggtgggagtttctgtctctcaaaaattcccaccaggaagttccggccagtttgccaggaagttccgggccaatggtcgtgcacaagacataaccggaagttccgagcataatgctaggaggttctggccagatggtctttactatgattcatatgtaattttcaaaaattcagagggcaaagtggttgcttattttaatgggaattacaatgatgaatatcgcacttgtgtgtgggtgccaaaggctttggcatactcctccggtggttcaagttgggttgtggacagtggttgcaccaatcatatgactggagagaggagtatgtttacaagtcttgatgaggagaacggaactcgtgagaatattgtgtttggagatgatggtaaaggaaagttgggttacaattgcttgtttaccgatgaggatgtgaccgtctttagaagggatgactcctccgtagcattcaaaggcaagttaaagggtgatctctatcttgtcgatttcgatgtggatagagtgaatccggaagcttgtttgattgctaaatcctccatgggttggctatggcatcgtagactagcccatgttggaatgcggaatttggcaactcttctaaagggggaacacatcctcaggctcactaatgtcacatttgagaaagatcgtgtgtgtagtgcttgccaggccgggaaacaagttgggaatccacatcctatcaagaacatcatgactacaacacgtcctcttgagcttctacatatggatttattcgggcccatggtgtacataagtattggaggtaacaagtatgattttttcattgttgatgatttttcccgcttcacttgggtgtattttctccatgacaagagtgaggctcaagatgtcttcaagcgcttcgccaagcaagcccaaaacctctatgatctcaccatcaagagggtgcgaagcgacaatggaggagaattcaagaacactcaagtggaggaattccttgatgaagtgggaatcaagcatgagttctccgccccatatgatcctcctcaaaatggcattgttgagaggaagaaccgaactcttattgaagccgcaagatcaatgcttgatgagtacaagacttcggatattttttgggcggaggccgtgagtaccgcatgtcatgccatcaaccgcttgtacctccacaagatcttaaagaaaacttcatatgagctcttgagtggtaagaaacctaatgtttcatattttcgtgtctttgggagcaaatgctttattttgagtaagagacctcgctcatctaagttttcacctaaggtggatgagggattcttacttggctatgaatcaaatgcacatgcctatcgtgtcttcaacaaaacctccggtattgttgaagtcactagggatgtgacatttgatgaatctaatggcttccaaggagagcaagttgttgtacatgttgtaagtgacgtggatccaagtcaagctataggtactaaggctattggagacatacgaccagtcgagacgcaggatgaccaagaagacagggatcaaccttcgtcatcgacatccaatagccctaaattgagtcaagtgtcagtcgacccggaagttccgggaccagatggtcggaacctccggacctctccaggccaggaagttccgggtccatctgccaggaagttccgggcagaggacagtcaaggcgtgcctatggcacaagtggatgggattgatgccgagggcactgtagagcatcctgatcaggctcaggtcccctcggtgcaccatccaagaatacatcacactgtccaaagagatcatcccgtcgacaacatacttggtgacataagaaagggggtaactactcgttctcgtgtcgctagcttttgtcaacactattcgtttgtctcttctttggaatcaaccagggttgaagatgcacttggtgatccggattgggtgatggctatgttattccaaatggatgtcaagagtgcctttctcaatggacctatctcggagttggtctttgtggagcaaccaccggggttcgaggatccaaagttgccaaatcatgtgtacaagctccacaaggcgctctacgggctcaaacaagcccctagggcttggtatgaatgtctccgagattttcttttgaaaaatggttttgaaattggaaaggcggatactactctcttcactaaaaaatttaagagtgatttattcatatgccaaatttatgtcgatgacataatatttggttctactaatgcctctttttgtgaagaatttagtagtatcatgactaaaaggttcgagatgtctatgatgggtgagttgaccttcttccttgggctacaagtgaaacaagctcaagagggtactttcatctctcaaaccaagtacgtgaaggacattctcaagaagtttgggatggaagatgccaaacccatcaagacgcccatgcctactaatggccacctagacctcgacgataatggtaaatgtgtggaccaaaaggatgtgtccggtgatgagagtcctcctattcgttttcctcgtggtcgtttgggaaaagagaaagtggttgaaggtggcagtggcagcggcactcgtacctctcccaggtttagaaggcaaaccagcaatcgcccagttcaaattcgagatgttgacagtggtcagggtagtgatgctccttcttcaagaggtcgtgggagaggtggtggtcgctcttctggggctggaagggcttctcatgatttccctgttgggtctcgtgagaatctcgttcggctctacaagactattggttttgacaccactcctatgcaccacattgggagacccaagtccaactaccttcatcagcttgccaagtgccgaaggggccgattgattgatccagagacacagcctgaggagtcacaggatccacgtttcagaaccttaactcagttggattggtacaactcagtgattatggctagagacaatctagtggttgagatgaagtggattgattggacttacatgaggaagaaaaacaatgaagtgttcaatcaagcaatgcaagtttgccacaacaagaatcttggggatattcttgccttggagtatgattggaatgaggaggtcattgcacagttctatgcgacagctttctttggttctacaaggaagggaactccttatgtaaaatggatgactgagggtgttaggcacaagatttccatagcacagtttgctgagatattgggcttggaggatgaggatctcaataggcctaatattcatagtgaagcacccctccccttgatcaagaccaagttcatgtatactaagaatgctcctagaacttgtatgggacctactcatggtttgcatccaaactacaaggtgttgtactccatctttcgttggtctttgcttccaaaggttggagatgccactgctttgccttccaaacatgctcatcttctcagtcgcatgcgctacaatcagcctcctttcagtgtgaagttgatttggtatgagattgccaacaccattcttgagcctaagcgaggttgcatctatgctccattcattatgaagatgattgagtcagtcaccggggtgttctacatcaaagatgggcgccacaatccttttcgtcctcgtgttccaccatcctcttcttcagtggcacctagatccatcccctctacctcggctggtccttcttctagtgctccaccgccatcctcgagctcttctcccatcaagaaggcacttcaggcaatcttctgtatgtgtgctaagactgcaaagaaagtgaagaagatagaaaggcgtcagaaggaagatagaagagaggctgggaaagaagtgtcagatgattctgaagatgaggtctatgtggatccttttgaggcttatgaggcagcccgtaatgttgccggtgaaggtccatccacctatttcaatgaagagtcttcccaatcagatgatgatgatgatgatgatgatgatgaggatgacattgacgcagctgctgagtatgttcctactgatgttgaggaagctgttgacaccgctgcacaatccgatgagtctcatctctccggcgataccgagattgttccctcagatggagatggagatgagtga

SEQ ID NO: 15596 - DNA, 7011 bp, Oryza sativa
  Clone ID: TFbOSC900298j.C1.o14.fg
atgtcggacttagggggaaaggacggggaaattagaaatgaagatggagcgagcagcaagggaactccatctcccaagggagccactataccttttgattacagcaaacttaccattccctctcacaacttcgtctccatgccttctgggcgtgctcctcaatttgatgggacacattacgccgcttggaagcacaagatgaagttgcatctaatctctttgcatccaagtatttggaaagtcgtgtgtacaggtattgacgtacctcatgaggacatggagctcacttcggagcaagaacaactcatccactgcaatgctcaagcttccaatgcaattctctccgccttgagtccggaggaattcaacaaggttgacggactagaggaagccaaggagatatgggatactttgcaattggctcatgagggatcacccgccgttcgtgaggcaaagattgaattattggaaggaaggctaggaagatttgtgatggatgacaaggagacaccacaagagatgtatgacaggatgatgatccttgtcaacaagattaaaggacttgggagaagatttgtgatggatgacaaggagacaccacaagagatgtatgacaggatgatgatccttgtcaacaagattaaaggacttgggagtgaggacatgacaaatcactttgttgtcaagagacttctccgtgcttttggtccaagaaatcccactcttgtttcaatgatacgggaaaggaaagacttcaagagactcaccccaagtgacattcttggaagaattgtgtctcatgagatgcaagaagaggaagctcgtgaagtgagacaaatggtgaagaatgccgccatgatcaaaaatcaagaagttgctttgaaggcaaaacaagaagaagagtcaagtggtgaagaaagtgaagatgaagaaatggcttttattgtcaagagattcaagcactttcttcgcaagagtggctatggcaaagggaggaaggatgatgacaagggaaagaggcaatcaaagagagcgtgcttcaattgtggcgaatttggccatttcattgccgattgtcccaagtcaaatgaagctaaggctaagggaggcaagaagaagccggaacgtgctcatgtggcggaggcacacatggcggaagtgtggtactccggagatgaagaagatcccgaagtcaagcccaagcccaagtcaaaagacaaggttgaaggagaaggtggtgttgctaccgtcgccttcaagtcatcctcttcaagcaaggagcatctcttcaacaacttgagtgatgatgacgacgacgattcctaccactactcttgcttcatggcccaaggccgcaaggtgatgactcaaaagccctctcacacttctcttgatgttgagtctagtgatgaggaaagtgataatgaattagatgatgtgcttaagagctttagcaaacccgctatgcaacatttggctaagttaatgagagctttggatagtaaagaacaattactcgaaaggcaagaagaattgcttattcttgagaagaaaagaaaccttgccttagaggagagcttagctaaagaatgtgctaaaaatgaacaactagctaatgagcttaattttgctaatggttctttagctagccttagagatgccaatgagactcttcaagagaaatttgcttgtttagacaaaagtcataaagatcttgaagttcaatttgacactctttggaatagtacctctcaaccaaatgtggtttctaattcctctaacccttctactagcaatggttgtgctaggtgttacaatattgatttgaactcttatgctactaatattgatgctatgcaagctcttaagaaagagaatgaaaggttggacacattggtgaaatatggatgcatgaagacataccattcaaaagatgccctttacaagactatcaccgctcatcctaacaaggatggacacgggctcaggttttcgggtggaagtcctgtgtctaagcgtgtgatggtaaatggaaaagaatgcttgatgtttgtgagagaaggaaaagcaccacaagcaagtgaggtgactaatcttgtgagcagccagggactcggaacatctggacaaaccggccaaaacctctgggtgggagtttctgtctctcaaaaattcccaccaggaagttccggccagtttgccgggaagttccgggccaatggccgtgcacaagacatgaccggaagttccaggcataatgccaggaggttccggccagatggtctttactatgattcatatgtaatttccaaaaattcagagggcaaagtggttgtttattttaatgggaattacaatgatgaatatcgcacttgtgtgtgggtgccaaaggctttgacatactcctccggtggtttaagttgggttgtggacagtggttgcaccaatcatatgactggagagaggagtatgtttacaagtcttgatgaggagaacggaactcgtgagaatattgtgtttggagatgatggtaaaggaaaggtaatgggtctaggtaaaattgccatctccaataatcaatctctctccaatgttcttcttgtcaattcattaagctacaatttattatccgtttctcaattatgtaagttgggttacaattgcttgtttaccgatgaggatgtgaccgtctttagaagggatgactcctccgtagcattcaaaggcaagttaaagggtgatctctatcttgtcgatttcaatgtggatagagtgaatccggaagcttgtttgattgctaaatcctccatgggttggctatggcatcgtagactagcccatgttggaatgcggaatttggcaactcttctaaagggggaacacatcctcgggctcactaatgtcacatttgagaaagatcgtgtgtgtagtgcttgccaagccgggaaacaagttgggaatccacatcctatcaagaacatcatgactacaacacgccctcttgagcttctacatatggatttattcgggcccgtggcctacataagtattggaggtaacaagtatggttttgtcattgttgatgatttttcccgcttcacttgggtgtattttctccataacaagagtgaggctcaagatgtcttcaagcgcttcgccaagcaagcccaaaacctctatgatctcaccatcaagagggtgcgaagcgacaatggaggagaattcaggaacactcaagtggaggaattccttgatgaagtgggaatcaagcatgagttttccaccccatatgatcctcctcaaaatggcattgttgagaggaagaaccgaactcttattgaagccgcaagatcaatgcttgatgagtacaagacttcggatattttttgggcagaggccgtgagtaccgcatgtcatgccatcaaccgcttgtacctccacaagatcttaaagaaaacttcatatgagctcttgagtggtaagaaacctaatgtttcatattttcgtgtctttgggagcaaatgctttattttgagtaagaggcctcgctcatctaagttctcacctaaggtggatgagggattcttacttggctatgaatcaaatgcacatgcctatcgtgtcttcaacaaaacctccggtagtgttgaagtcactagggatgtgacatttgatgaatctaatggctcccaaggagagcaagttgttgtacatgttgtaggtgatatggatccaagtcaagctataggtactaaggctattggagacatacgaccagtcgagacgcaggatgaccaagaagacagggatcaaccttcgtcatcgacatccaatagccctacattgagtcaagtgtcagtcgacccgaaagttccgggaccagatggtcggaacctccagacctctccaggccaggaagttccgggtccatctgccaagaagttccgggcagaggacagtcaaggcgtgcctacggcacaagtggatgggattgatgccgagggcactgtagagcatcctgatcaggctcaggtcccctcggtgcaccatccaagaatacatcactgtccaaagagatcatcccgtcgacaacatacttgggttgaagatgcacttggtgatccagattgggtgatggctatgcaagaggaattgaataacttcactcgcaatcaagtatggatgttggtggagagacccaaccaaaatgtcatcggcactaagtggatctttcgcaacaagcaagatgaacatggagtggttctaaggaacaaagcccgattgcgcaagggttcacccaagttattccaaatggatgtcaagagtgcctttctcaatggacctatctcggagttggtctttgtggagcaaccaccggggattgaggatccaaagttgccaaaccatgtgtacaagctccacaaggcgctctacgggctcaaacaagcccctagggcttggtatgaatgtctccgagattttcttttgaaaaatggttttgaaattggaaaggcggatactactctcttcactaaaaaatttaagagtgatttattcatatgccaaatttatgtcgatgacataatatttggttctactaatgcctctttttgtgaagaatttagtagtatcatgactaaaaggttcgagatgtctatgatgggtgagttgaccttcttccttgggctacaagtgaaacaagctcaagagggcactttcatctctcaaaccaagtacgtgaaggatattctcaagaagtttgggatggaagatgccaaacccatcaagacgcccatgcctactaatggccacctagacctcgacgataatggtaaatgtgtggaccaaaaggtttatcgcttcatgataggatccttgctttacttatgtgcatctcgtcccgatatcatgcttagtgtatgcatgtgtgctcgctttcaagcagagcctaaagagtgtcatttgattgccgtcaagagaattctaagatatttagtccatactcctaatcttggcttgtggtatcctaagggttgtgactttgagcttttgggctattccgattcggattacgccgggtgtaaggttgatagaaaaagcacaaccgggacttgccaatttcttgggcggtcccttgtttcttggtcctccaagaagcaaaattccattgctttatccaccgccgaagccgaatatgtcgccgccggttcttgttgtgcccaactcctttggatgaaacaaaccctaaaagactttggctacaacttcaccaagatcccactcctatgtgacaatgagagtgccatcaaaatagccaataatcccgttcaacattctcgaaccaaacacatagatattcgccaccactttttgagagatcatgagaccaaaggagacatatgccttacccatgtgagaaccaaaacccaattagccgacattttcaccaagcctttagatgagaaaagattttgcgagcttaggataagcactatgactcgtgagaaaagacagaaagcttctcaggatgtgtccggtgatgagagtcctcctattcgttttcctcgtggtcgtttgggaaaagagaaagtggttgaaggtggcagtggcagtggcactcgtacctctcccaggtttaccaggcaatccagcaatcgcccagttcagattcgtgatgttgacagtggtcaaggtagtgatgctccttcttcaagaggtcgtgggagaggtggtggtcgcacttctggggctggaagggcctctcatgatttccctgttggatttcgtgagaatcccgttcggctctacaagactattggttttgacaccactcctattcatcacattggaagacccaagtccaactaccttcatcagcttgccaagtgcagaagggaccgtttgattgatccagagacacagcctgaggagtcacaagatccacgtttcagaactttaactcagttggattggtacaactcaatgattatggctagagacaatccagtggttgagatgaagtggattgattggacttacatgaggaagaagaacaatgaagtgttcaaccaagcaatgcaagtttgccacaacaagaatcttggagatattcttgccttggagtatgattggactgaggaggtcattgcacagttctatgcgacagcattctttggtactactaggaagggaactccttatgtaaagtggatgactgcgggtgttaggcacaagatttccatagcacagtttgctgagatattgggcttagaggatgaggatctcaataggcctaatattcatagtgaagcacccctccccatgatcaagactaagttcatgtatactaaggatgctcctaggacttgtatgggaactactcatggtttgcatccaaactacaaggttggagatgccactgctttgccttccaaacatgctcatcttctcagtcgcatgcgctacaatcagccacttttcagtgtgatgaagttgatttggtatgagattgccaacaccattcttgagcctaagcgaggttgcatctatgctccattcattatgaagatgattgagacagtcaccggggtgttctacatcaaagatgggcgccacaatccttttcgtccttgtgttccaccttcctcttctccagtggcacctagatccatcccttctacctcagctggtccttcttctagtgccccaccgcaatcctcgagctcttctcccatcaagaaggcacttcaggcaatcttctgtatgtgtgctaagactgcaaagaatgcttatgaggcagcccgcaatgttgccggtgaaggttcatccacctatttcaatgaagagtcttcccaattagatgatgatgatgatgatgatgaggatgacactgacgcagctgctgaggatgctcccactgatgtagacaccgctgcacagtccgatgagtctcatctctccggcgataccgagattgttccctccgatggagatggagatggagatgagtga

SEQ ID NO: 15597 - DNA, 3279 bp, Oryza sativa
  Clone ID: TFbOSC34887j.C1.o12.fg
atgatgcagcagatgcagcagcagcaccagcagatgtaccagaggatgcggcagcaagccgagcagcagcagcagcagtttggtccctctccccctcagtccaaactgccggagtttctacgcgtcagaccacccaccttttctagcaccaccaaccctatggaggcaaatgactggctccatgccatagagaagaagctaaatctcctgcagtgcaatgatcaggagaaggccgccttcaccacacaccagctccagggtcccgcatcagcttggtgggacaatcacatggccacacgtccgccaggcacggaagtcacttgggtggagttctgccgcagcttcaggaaggcgcaggtgccagatggggtcgtggcacaaaagaagagagaattccgagcactccaccagggcaacaggacggtgacggagtatctccatgagttcaatcgcctcgcgcgatatgcaccggaggatgtccgtactgacgccgagaagcaggagaaattcctagcaggtctggatgatgagctaaccaaccagttgatatctggagactacgccgacttcgagaggctggttgacaaggcaatccgtcaggaggatcagcgcaacaaaatggataggaagaggaaggcggcgcagttccgcaacttccatcagggcgctagtggcagccagaaccaccatggcggtcagcccaaccgcagtgcagctccacgcccaccaatggcaccagcacagtcagcttcgtccacgcaagccaagaaggagactgggacaaagccagggtcctgcttcaactgtggcgagcttggccacttcgctaacaaatgcccgaagcctaggcgtgctgggccaaggtttgtccaggctcgtgtcaaccacgcgtctgcggaggaggcacaagtagcaccagaggtcgtactgggtacgtttcctgttaactcaatccctgcaacagtactttttgattctggtgcaacgcattcattcatttcaaagaagtttgtcgggatgcatgggttaataagagaggaacttagtacaccaatgcgggttcataccccagggaatagctccactttggttcaattcagcccctcggtaacgatagaaattcaaagatcactctttctggccaacctcatccttctcgaatccaaagacctagatgtcattcttggtatggattggctgaccaggtttaagggtgtcattgattgtgcgaatcgcacagtcaccttgaccaatgagaagggagaaaccgtggtgtacaagtcactagtctcaccaaagcaaggggtttccttgaatcagattaaggtggaaaaccctgtgaccaccgaggagaagggaactgcccctatttacaagagaccgtacagaatggcggccaacgagctagcagaggtcaagaagcaggtcgatgagcagctgcagaaagggtacattcgaccaagtacttcaccttggggtgcaccggtcatttttgtggagaaaaaggataagacgaagaggatgtgcgtcgactatcgcgcactcaatgaggtcacaatcaagaacaaatatcctttaccgcggatcgatgatttctttgataagctgaaaggagctaaattgagaattcgggaagaggatattccaaagacggccttcaccactcggtacgggctatatgagtgcacggttatgtctttcagacttaccaacgcacccgcattcttcatgaatctgatgaacaaagtgttcatggaatttctcaacaagtttgttgtggtgttcatcgacgacatacttatctattcaaaatctgaagaagaacataagcaacatctccgtctggtactcgagaagttgaaggagcaccagttatatgccaagttcagcaagtgtgacttcttgttgtcggaagtcaaatttctgggtcacgtcatcacagctcagggcgtggcagtcgatccgtcgaatgtggagtcagttaccaaatggaccccaccgaagaccgtgtcgcaaattcggagttttcttggacttgcgggttattaccgtcgattcattgaaaacttctcgaggatcgcccgacccatgactcagttgcttaagaaagatgagaagtttaaatggacagctgagtgtgacaagagttttgaggagttcaagaagaaattagtatccgccccagttctgattctgcccgaccagatgaaagacttccaaggcagagtggtcgcatatgcctcgcggcagttgcgtccacatgaagggaattatccaactcatgacctggaattggcagcagtggttcatgctttgaagatctggaggcactatttgattggcaaccgctgcgaagtatatacggaccacaagagtctgaaatacatcttcacccaaccggacctaaatctccgacaacgaagatggttggaactaatcaaagactatgacatgagcattcactaccacccgggtaaagtcaatgtggtggcaaatgcgcgaagcaggaaaagctactgcaatgccctatgcatcgagggcatgtgtggagaattgcagcaggagcttgagcgtctcaacttgcgacttgttgaacacgggtacgtggctgccctagaggcacgacctacgctcgtggatcaagtcagagtagcccaagtgaatgatcctgagatagctgaactgaaaaagaatatgagggtcggaaaagcctgggacttccacgaagatgaacacggcacaatttggatgggagaaagattgtgtgtacctgacgacaagttggcagagctctacctctcgagaatcatgtgtctacatggagtacccaaaaagatagtatctgatcgagggagccaattcacttcaaagttctggcagaaattgcaagaggaattgggaacccggctgaatttctgcacagcctaccatccgcagacagatggtcagaccgaaagggtcaaccaaatcttggaagatatgctacgagcatgtgcactcgactttggtggagcatgggataaaagtctgccttatgccgaattcttgtacaacaacagctatcaggccagtctacaaatggcgccgttcgaagcgttgtatggccggaagtgccgcacacctctcttctgggatcaaacaggcgaacgtcaactgttcggaacggaagtgttaacagaagcagaggagaaagtcaggattgtcagagagaggctgaggattgcccagtctcgacagaaaagctacgtggacaaccgccgacgagagctcacgttttaa

SEQ ID NO: 15598 - DNA, 4419 bp, Oryza sativa
  Clone ID: TFbOSC416291j.C1.o22.fg
atggtctacaccaggaatggtagccgcgcgacaggcgagggcagcaacggcgaagagcgcactgatggggcgcatccccacagcgattctggccatggtccgccgccacttcccaagaatccgacgctagcccaagtgatggcacatcagacacagatgatggcagccatgatgcagcagatgcagcagcagcaccagcagatgcaccagcggatgctgcagcacgccgaacagcagcaccagcagtttggtccccctccccctcagtccaagttgccagagtttctacgcgtcaggccacccaccttctccagcaccaccaaccctatggaggcgaatgactggctccatgtcatagagaagaagctgaatctcctgcagtgcaatgatcaggagaaggttgctttcgccacacaccagcttcaaggtcctgcgtcggcttggtgggacaatcacatggccacccgcccaccaggtactgaagtcacttgggcagagttctgccgtagcttcaggaaggcgcagggcaacaggactgtgacagagtacctccatgagttcaatcgcctcgcgcgatatgcaccagaggatgtccgcaccgacgccgagaagcaggaaaagttcatggcgggtctggatgacgagctgaccaaccaactgatatctggggactacgctgacttcgagaggctggttgacaaggcaatccgtcaggaggatcaacgcaacaagatggacaggaagaggaaggccgcacagttcagagcacctcagggaagtcaccagaggccgcgcttcgctcccgggcagcagggtggacctaccaccatgatcgttcatcagcaccgcccgttcaaccctagcaactttccccagggcgccagtggcagtcagaaccaccatggaggtcagtccaatcacggtgcagctccacgcccaccaatggcaccggcacagacaggcccgcccgcgcaatccaagaaggagactggagcaaaaccagggtcctgcttcaactgtggcgagcttggccacttcgctaacaaatgcccgaagcctaggcgtgccgggccaaggtttatccaggctcgtgtcaaccacgcatctgcggaggaggcacaagcagcaccagaggctgtactgggtacgtttcctgttaactcaatccctgcaacaatactttttgattctggtgcaacgcattcgttcatttcaaagaagtttgtcgggatgcatgggttaataagagaggaacttagcacaccaatgcgggttcataccccagggaatagctccacttcagttcaattcagcccttctataacaatagaaatccaaagatcaccatttctagccaacctcattcttctcgaatccaaagacctagatgtcattcatgggatggattggctgaccaagtttaagggggtcatcgattgtgcgaatcgcacagtcaccttgaccaacgagaagggagaaaccgtggtgtataaatcactagtctcaccaaagcgaggggtctctttgaatcagattgagacggaaattccagtggacactgtggagaagaatttggggaaattggaagatatacccatagtctgcgagtatccagaagtgttccccaaagaccttactaccatgccacccaagagagagattgaattccggattgacttggcaccggggaccgctccaatttacaagaggccgtacagaatggcggccaacgaattagcagaggtcaagaagcaggttgatgagcagctgcagaaagggtacattcgaccaagtacttcaccttggggtgctccggtcatttttgtggagaaaaaggataagacgaagaggatgtgcgttgattatcgcgcactcaacgagatagacctgcgatcaggctaccaccagttgagaatctgggaagaggatattccaaagacggagatcaggctatatgagtgcacggttatgtccttcggacttactaacgcacctgcattcttcatgaatctgatgaacaaagtgttcatggaatttctggacaagtttgttgtggtattcatcgacgacatacttatctattcaaagtccgaagaagaacatgagcaacatctccgtctggtactcgagaagttgaaggagcaccagctatacgccaagttcagcaagtgtgacttttggttgacggaagtcaaatttctgggccatgtcattacagctcagggtgtggcagttgatccatcgaacgtggagtcagtcaccaaatggaccccaccgaagaccgtgtcgcagattcgaagttttcttggacttgcaggttattaccgccgattcatcgaaaacttctccagaatcgcccgacccatgactcagttgcttaagaaagatgagaagtttaaatggacagctgagtgcgataagagttttgaggagctcaaaaagaaattagtatccgcaccagttttgattctgcctgaccagatgaaagacttccaagtctattgcgatgcatcccgtcacggacttggatgtgttctaatgcaagagggcagagtggttgcgtatgcctcgcggcagttacgtccacacgaagggaattatccaactcatgacctggaattggcagcagtggttcatgctttgaagatctggagacactatctgattggcaaccgctgcgaagtatatacggaccataagagtctgaaatacatcttcacccaaccggacctaaatctccgacaacgaagatggttggaactaatcaaagactatgacatgagtattcactaccacccgggtaaagccaatgtggtggcagacgctttaagccggaaaagttactgtactgccctgtgcatcgagggcatgtgtgaggaattgcggcaggaatttgagcatctcaacgtgggaattgttgaacacgggtttgtggccgctctggaggcgcggcctacgctcgtggatcaagtcagagctgctcaagtaaacgattctgaaatagcagagctaaaaaagaacatgagagtcggaaaagcccgggatttccacgaagatgaacatggcacaatctggttgggagaaagattgtgtgtgcctgacgacaaggaactgaaggatctgatactcaccgaggctcatcagacccagtactcgattcatccaggcagcactaaaatgtatcaagacctcaaagaaaagttttggtgggtcagcatgaggagagaaatagctgaattcgtcgcactctgtgatgtttgccaacgagtgaaggcagagcaccaaagaccagcaggtttactccaacctcttcaaatcccggaatggaaatgggaggagattggaatggactttataacaggactgccccggacatcatcgggtcacgattcgatctgggtagtcgtggatcgactcactaaggttgctcacttcataccagtacataccacatatacgggcaaaaggttggcggagctttacctttcgagaatcatgtgcctacatggagtacccaaaaagattgtatctgaccgagggagtcagttcacctcaaaattctggcagaagctgcaggaagaattggggacccgtttaaatttcagcacgggctatcacccgcaaactgatggtcagaccgagcgagtcaatcaaatcttggaagatatgttgagagcttgcgctcttgattttggtggagcttgggacaaaagcttgccatatgcggaattctcgtacaacaacagctaccaggccagtctacagatggcaccgtttgaagctttatacggccggaagtgccgcacacctctcttctgggatcagacaggcgagcgtcaactgttcggaacagaggtattagcggaagcagaagagaaagtcagaatcatcagggaaaggttgaggattgcccagtctcgacagaagagctacgcggataaccgccgaagggaactcacttttgaggcaggagattacgtgtatctttgtgtcactccgctccggggagtacaccgttttcagacaaaaggcaagttggcaccacgcttcgtgggaccatacaaaattttggaacgaaggggagaagttgcttatcagttagaacttccatccaatatgatcggcatccatgacgtgttccacgtgtcccaattaaagaagtgcttaagggtacctgaagaacaggctgattcggaacacattgatatccaggaggatctaacatacgtggagaagccggttcgcatacttgataccagtgaaaggaaaaccagaaacaaggtcacccgattttgccgagttcagtggagtcatcattcaaaagaggaagcaacctgggaaagggaagatgagttgaaagccgcccatccgcatctcttcaccagctcctccgaatctcggggccgagattccgtttaa

SEQ ID NO: 15599 - DNA, 1521 bp, Oryza sativa
  Clone ID: TFbOSC10633j.C1.o1.fg
atgtcaggagtcacgtcaatgtcacccaccgcaggtgcgagatcagatgccagcccggaacccgaatcagagtcagagtcaggagttcccaatatcggcaccgaagacccctgtcaaaatgctgtccagattcccgaagataacgacagccaagtcaacgtcagaccaaaggaaagtcattatgtaaggaactgtccatggaaggtgttcgccaggtcacctgaaaaagacgagaagcagtgcccagggagtaaccaagctccaagtcagtctaccgacaagaaggatggtactttgcagcccaactctggagcgaacaggacagtgatatggaagatggataatggcaggaccatgatcatcaccggttcagaatttactcctgaagacgcagcaaggatacccaagcgtcagagaggaagaaataccttccgaggagcgcgtcagctaacccgtcatctcataaagtacggtccgcccagacccgaagatgatgaatcaggagaacggttttctgctgatgacgatgacgacaacgatgatgataatgatgagaatgatgatgcgacccttgacagtttcagggaaagagagttgaagttcaaagcatgtgctagatgtgggatagtcggacacactgctagtttatgcctccccacatgccgctgtggtgaatatacccattactcagatgcatgccctttaaggaaggtcacatgtttcttgtgtgaaggaacagatcatgtgcctaaggactgtcagttgaatgcggtcatagctaagaccaagaaagaacaagggacaaccgtgcaacccattcgtcaaccaatgacaatcgacaacagcggtcacaatccttctgctcttcctccaactccagctccagtggaagccaaccatggaagaagcaacgtcaccaaggatgttcataagtctctgcttgttcccgtttcagctgccaaagtgcataatcagaagcctgcaccctgggaccaagcaagtcgatcctgtcgcaactgtcgtaagccaggacattgtttcagtgattgccctcttccaagagcagcaaaggcagttcgtcgtgattcacaagttaccagcactgcccatgacaccaatcgacacctaaatgtgcaacctccgccccaacggattatcgtcaagggcaccgtcaaaggtcgcattgttccaccggcaatcgtttcaagcctacaacaccaacgccagcaaggtaagcaatgccaggagaataatagctcgctacagctacaaagaggcagtacactccttcgccagcacccgcggcaagcttcgtcagccccaggtcacccagcagttgtcagctctagcaatgcacctcgtattgctccaatccaaaggcccatcggcaaatcaccgctcggtaaccccgcgagcaagaagttcctacctgctgcagctgtcaagagagttgttactccaccatcgaagatcaacaagcagagcaacattcccggtgagacttcagccagtaggaattaa

SEQ ID NO: 15600 - DNA, 1647 bp, Oryza sativa
  Clone ID: TFbOSC404116j.C1.o1.fg
atgtcggccttagggggaaaggacgggaaaattggaaatgaagatggagcgagcagcaaaggaactccatcacccaaggttgccactataccttttgattacagcaaacttaccattccctctcacaacttcgtctccgtgccttccgggcgtgctcctcaatttgatgggacacattacgctgcttggaagcacaagatgaagttgcatataatctctttgcatccaagtatttggaaagttgtgtgtacaggtattgacgtaccttatgaggacatggagctcacttcggagcaagaacaactcatccaccacaatgctcaagcttccaatgcaattctctccgccttgagtccggaggagttcaacaaggttgatggactagaggaggccaaagagatatgggatactttgcaattggctcatgagggatcacccgccgttcgtgaggccaagattgaattattggaaggaaggctaggaagatttgtgatggatgacaaggagacgccacaagagatgtatgataggatgatgatccttgtcaacaagattaaagaacttgggagtgaggacatgacaaatcactttgttgtcaagagatttctccgtgcttttggtctaagaaatcccactcttgtatcaatgatatgggaaaggaaagacttcaagaggctcaccccaagtgacattcttggaagaattgtgtctcatgagatgcaagaagaggaagctcgtgaagcaaaacaagaagaagagtcaagtggagaagaaagtgaagatgaagaaatggcttttattgtcaagagattcaagcactttcttcgcaagagtggctatggcaaagggaggaaggatgatgacaagggaaagaggcaatcaaagatagcgtgcttcaattgtggcgaatttggccatttcattgccgattgtcccaagtcaaatgaagctaaggctaagggaggcaagaagaagccggagcgtgctcatgtggcggaggcacacatggcagaagtgtggtcctccggagatgaagaagatcccgaagtcaagcccaagcccaagtcaaaagacaaggttgaaggagaaggtggtgttgctaccgtcgccttcaagtcatcctcttcaagcaaggagcgtcttttcaacaacttgagtgatgacgacaacgactcctaccactactcttgcttcatggcccaaggccgcaaggtgatgactcaaaagccctctcacacttctcttgatgtttattctagtaatgaggaaagtgataatgaattagatgatgtgcttaagagttttagcaaacccgctatgcaacatttggctaagttaatgagagctttagatagtaaagaacaattactcgaaaggcaagaagaattgcttattctggagaagaaaagaaaccttgccttagaggagagcttagctaaagaatgtgctaaaaatgaacaactagctaatgagcttaatttggctaatggttctttagctagccttagagatgtcaatgagactcttcaagagaaatttgcttgtttggacaaaagtcataaagatcttgaagttcaatttgacactctttggaatagtacctctcaaccaaatgtggttatgttaggtgttacaatattgatttga

SEQ ID NO: 15601 - DNA, 3777 bp, Oryza sativa
  Clone ID: TFbOSC10942j.C1.o1.fg
atgatgccaccccattcaccgagaaatttgatcaaggtgttagggttcgtcagggagctgaggttgatggcttttgaggtaggctatgaagttgctcccgagtatcgccaaatttcccatgaccccgacgaggagaagtgtcgtgttcgtgtgacgttggctagtgatagtgatgaccttccgtcttttaagttcgaagctggaggaagatcgtacagccatgcttgtcaagaggcagctttggtggccattggagagttgcgtcaacgctttgaagaagagttggattcatcagctttccagtatcatcctcacaagcctcatggtcaagactatggaacctatacctgtcctgacggtgaagagagtgccactctgatgcatgcggtgcatatgcttagtgctatggatgcagtaagtgtggagcgagacaaagcagctcatgacagggaaaactggaatcgaggcaagatttgcaagttggagagcaaggtgtaccgtctacaaaaggaattagctgaacttaaaggagaaacgccgccgccaacacccaagcatcgcctcactcaaagaaaaagaacctgtccgccacctcgtctccagttagcttcgaagattcgcgtgatgggtgaagctgtgcccgatcgtgctgaacctgtcatcgacatcataagtgatgaggaagaggaggaagaccctgaagaaagagagccagctactccagaggaagaagatccatcgcttcgttccgacacaaggcggatggtgaacacgcgcaccggaagtggaagtggaagtggaagtggagctactaacaatggaggagatcccacgctagctcagattctggcccaacaaacacaactgatcaatctgttagtgcagcaggcacagaatcagcaggcaaacaatcagaaccagaatccacccccacctccccaaaacaagctggcagatttcttacgcgtgagaccccctaccttttccagcaccaccaatccagtagaagcaggagattggctgcatgcggtggagaagaagttggatttgatccagtgtactgagcaggagaaagtttcttttgcttcgcatcaactgcatggtcctgctgctgaatggtgggatcattttcgccaaggcagggctgaaggagagcctattacgtggcaggaattcacggccgctttcaggaagacacacataccgtcgggtgttgtagctctaaagaagagagaatttagggcactcaaccagggatctcgatcggtcaccgagtacctccatgatttcaaccgtttagctcgttatgctccggaagatgttcgcaccgatgaagagcgtcaggagaaattcttggagggactgaatgatgagttgtcttatgctttgatgtctacggatttccgggatttccagcagttggtggacaaggcgattcgtcaggaagacaagtataaccggatggagcagaagaagcgcagggctgcccaattcaaggcacaacagggcagtaaccagaggccgcgtctcgttactggacctcaagttccatcgtaccctcaaggaggatcttcatcagttgtccgtccccaacgccagttctacaacaacaatactagtaatcgtggcaatgacaaccgcaacgtggttgctcgtcctgcagcaacttcagctcagaaccagcctgtcaggaaggaacagggaagcaagccagtgatatgcttcaattgcggtgatccaggacattatgctgataagtgtcctaagcctcggcgcgtgaagaacgctccagccccgaacaactccaatgttccagcaccaaaggcacgtgttaatcatgttgcagcagcagaagctcagaatgcaccagatgtggttttgggtacgttccctgttaactctatacccgcaactgtgctttttgattccggtgctacacattcctttttgtctaaaagttttacgagcaatcatgggatggaagttattagtctcgagagacctttactagttaataccccaggcaatcaagtattttcgacacagtattgtccttccgctactatagaaatagaagaagttcctttcccatcctcgcttatcttgctagaatccaaagatctagatgttatcttagggatggattggttatcttgtcacagaggagttatagattgtgccaaccgtaaggtgactttaaccagtagcaatggggaaacagtttctttctttatgtcctctcctaaatctcatggtgtgatcttaaaccaagttgctctacaagagatccccatagtacaagactacccagacgtgtttcccgaggatttgccaggcatgccacctaagagagagatagagtttcggatagacttggtacctggaaccaaccctatccataagagaccatacagaatggcagctaatgagttagttgaggtgaagagacaggtggaagatttgcttcagaaaggatacatcagacccagtacttcgccatggggagcaccagtcatctttgtggagaagaaagatcatactcagagaatgtgcgtggattatcgagcgttgaatgaggttactatcaagaataagtatcctctacccagaattgatgacctatttgatcaattggaaggtgctacagttttctccaagatagatctccgttctggatatcatcaacttcgaatccgtgaggaagatataccaaagaccgccttcacaactcggtatggtttgttcgaatgtaccgttatgtcatttggactcactaatgccccagcctttttcatgaatctgatgaacaaggtgtttatggaatatctggataagttagtcgtggtgtttattgatgacattcttatttactccaagacgaaggaagaacatgaagagcatcttcgtctagctttagagaaactacgtgaacatcagctttatgccaagttcagtaaatgtgaattttggttgtccgaagtgaagtttcttggtcatgtcatctcgtctggaggagtggcagtagatccaagcaatgtggagtcagtgttaagttggaagcaacccaagacggtttcagaaattcgtagtttccttggacttgcggggtattaccgcaggtttattgagaacttttcaaagatcgccagaccaatgactcgtctgcttcagaaggaagtgaagtacaagtggacagaggattgtgaacaaagtttccaagaactgaagaaaaggctagcgactgcgctggtgttaattttgcctgattcgaggaaaggtttccaagtgtattgtgatgcatctcgactcggtttgggttgtgtgttgatgcaagaaggaaaggtggttgcctatgcatctaggcaattacgtcctcatgagaataactacccaacgcatgacctagagttggcagctgtggtgcatgcattgaagatttggcgtcattatcttttcggtaaccgtacagaggtgtatacggatcataaaagtttgaagtacattttcactcaacctgatttgaacatgcgtcagcgaagatggttagagttgattaaagattatgatatggaaatctactatcacccggggaaagcaaatgttgtagccgatgctcttagcaggaaaagctactgtaatatgtcagaaggtcgacgtttaccttgggagttatgccaagaatttgaaaagttgaacttgggaatagtcagcaatggttttgtggccgctttggaagctaaacctactctgtttgatcaagttaagaggctcaagtga

SEQ ID NO: 15602 - DNA, 4907 bp, Oryza sativa
  Clone ID: TFbOSC11373j.C1.o1.np
gtgacaagttggtatcagagccaccttgaccttaggataagccaaatgatgccgccccattcaccgagaaatttgatcgaggtgttaggattcgtcagggagctgaggttgatggcttttgaggtaggttatgaagttgctcctgagtatcgccagatttcccatgaccccgacgaggagaagtgtcgtgttcgtgtgacgttggctagtgatagagaagaccttccgtctattaagttcgaagctggaggaagatcgtactgccatgcttgtcaagaagcagctttggtggccattggagagttgcgtcaacgttttgaagaagagttggattcatcagctttccagtatcatcctcacaagcctcatggtcaagactatggaacctatatctgtcctgatggtgaagagagtgccactctgatgcatgtggtgcatatgcttagtgctatggatgcagtaagtgtggagcgagacaaagcagctcatgacagggaaaactggaatcgaggcaagatttgcaagttggagagcaaggtgtaccgtctacagaaggaattagctgaactcaaaggagaaacgccgccgccaacacccaagcttcgcctcgtcgcaagaaagagaacctgtccgccacctcgtctccagttagcttcgaagattcgcgtgatgggtgaagctgtgcccgatcgtgctgaacctgtcatcgacatcataagtgatgaggaagaagaggaagaccctgaagaaagagagccagctactccagaggaagaagatccatcgcttcgttccgacgcaaggcgcaccaccaatccagtagaagcaggagattggttgcatgcggtggagaagaagttggatttgatccagtgtactgagcaggagaaagtttcttttgcttcgcatcagttgcatggacctgctgctgaatggtgggatcattttcgccaaggcagggctgaaggagaacttatcacttggcaggagttcacgactgcttttaagaagacgcatataccgtcaggtgttgtagctctaaagaagagagaatttagagcactcaatcagggatctcgttcggtcaccgagtacctccatgatgtcaaccgtttagctcgttatgctccggaagatgttcgcaccgatgaagagcgtcaggagaagttcttggagggactgaatgatgagttgtcttatgccttgatgtctacggatttccgggatttccagcagttggtggacaaggcgattcgtcaggaagacaagtataaccggatggagcagaagaagcgcagggctgcccaattcaaggcacaacagggcagtaaccagaggccgcgtctcgttactggacctcaagctccatcgtaccctcaaggaggatcttcatcagttgtccgtccccaacgccagttctacaataacaatactggtaatcgtggcaatgacaaccgcaacatggttgctcgtcctgcagcaactccagctcagaatcagcccgttaggaaggaacagggaagcaagccagtgatatgcttcaattgtggtgatccaggacattatgctgataagtgtcctaagcctcggcatgtgaagaacgctccagccccgaacaactccaatgttctagcaccgaaggcacgtgttaatcatgttgcagcagcagaagctcagaatgcaccagatgttgttttgggtacgtttcctgttaactctataccgcaactgtgctttttgattccggtgctacacattcctttttgtctaaaagttttgcgagcaaacatgggatggaagttgttagtcttgggagacctttactagttaataccccaggcaatcaagtattttcgacatagtattgtccttctgttactatagaaatagaagaagttcttttcccatcctcgcttatcttgctagaatccaaagatctagatgttatcttagggatggactggttatctcgtcacagaggagttatagattgtgccaaccgtaaggtgactttaaccagtagcaattgggaaaccgtttctttctttgtgtcctcccctaaatatcatggtgtgaacttaaaccaagttgctctacaagagattcctatagtacaagactacccagacgtgtttcccgaggatttgccaggtatgccacctaagagagacatagagtttcggatagacttggtacctggaaccaacccaatccataagagaccatacagaatggcagctaatgagttagctgaggtgaagaaacaggtggatgatttgcttcagaaaggatacatcagacccagtacttcgccatggggagcaccagttatctttgtggagaagaaagatcatactcagagaatgtgcgtggattatcgagcgttgaatgaggttactatcaagaataaatatcctctacccagaattgatgacctgtttgatcaactggaaggtgctacagttttctccaagatagatctccgttctggatatcatcaacttcgaatccgtgaggaagatataccgaagaccgccttcacaactcggtatggtttgttcgaatgtaccgttatgtcatttggactcactaatgccccagcctttttcatgaatctgatgaacaaggtgtttatggaatatctggataagtttgtcgtggtgtttattgatgacattcttatttactccaagacgaaggaagaacatgaagagcatcttcgtctagctttagagaaactacgtgagcatcagctttatgccaagttcagtaaatgtgaattttggttgtccgaagtgaagtttcttggtcatgtcatctcgtctggaggagtggcagtagatccaagcaatgtggagtcagtattaagttggaagcaacccaagacggttacagaaattcgtagtttccttggacttgcatggtattaccgcaggtttattgagaacttttcaaagatcgctagaccaatgactcgtctacttcagaaggaagtgaagtacaagtggacggaggattgtgaacgaagtttccaggaactgaagaaaaggctagtgactgcgcctgtgttaattttgcctgattcgaggaaaggtttccaagtgtattgtgatgcatcccgacacggtttgggttgtgtgttgatgcaagaaggaaaggtggttgcctatgcatctaggcaattacgtcctcatgagaataactacccaacgcatgacctagaattggcagctgtggtgcatgcattgaagatttggcgtcattatcttttcggtaaccgtactgaggtatatacggatcataaaagtttgaagtacatttttactcaacctgatttgaacatgcgtcagcgaagatggttagagttaattaaagattatgatatggaaatccattatcacccggggaaagcaaatgttgtagccgatgcccttagcaggaaaagttactgtaatatgtcagaaggtcgacgtttaccttgggagttatgccaagaatttgaaaagttgaacttgggaataatcagtaaaggttttgtggctgctttagaagctaaacctactctgtttgatcaagtgagagaagctcaagtgaatgatcctgatatacaagaaattaaaaagaacatgagaagaggtaaagccatcggttttgtagaagatgagcagggaactgtgtggttaggagaaacaatttgcgtcccagaaaataaggagttgaagaatactatcatgaaggaagctcatgaaactttgtattccgttcaccctggaagcactaagatgtaccaagacttaaagcaacaattctggtgggccagtatgcgacgtgagatagcagaatatgtggctctatgtgatgtatgtcagcgggtcaaggcagaacatcagaaaccagccggtctgttacaaccgttgaagattccagagtggaagtgggaagaaataggaatggattttataaccggtctacccagaacgtcggcaggacatgattctatttgggtagtggttgatagattgactaaagtcgctcactttataccggttaaaacaacctatacgggacataagcttgcagagttatacatggccagagtggtatgtttgcatggtgttcctaagaagatagtgtcagatagaggtagccagtttacttcgaagttttggcagaaattacaattagaattgggtactcgtttgaatttcagtactgcttatcaccctcaaacagatggtcagacggaaagagtaaaccaaattttagaagatatgttgagagcctgtgttctagattttggtggaagttgggataagaatttgccgtacgcggaattctcatataacaacagttatcaagctagtttgcaaatggctccgtatgatgcattaaatggtcgaaagtgccgtacgccgctcctttgggatcaaaccggtgaacgtcaagtttttgggacagacatattgcgacaggcagaagaaaaagtaaagattatccaagagaggttgcgcgttgctcagtcgcgtcagaagagttatgccgacaatcgtcgcagagatttggctttcgaagaaggagattatgtatacctgcgggttacgccgttacgaggtgttcatcgtttccaaaccaaagggaaattggcaccgcgttttgtgggaccttttaagattgtgagtcgaagaggtgaagtagcttatcagttagagttgcctccgtcaatggcgggaatacacgacgtgttccatgtgtctcagctgaagaaatgtttacgtgtacctacagaggaagcagatcctgatcgtatagagcttcaagaagatttaacttatgttgagaagccagtcagaattttggaatttccgacgttccggaggagagtgtttccgttgaggaagtttctgacg

SEQ ID NO: 15603 - DNA, 1796 bp, Oryza sativa
  unsure (1)..(1796): unsure at all n locations
  Clone ID: TFbOSC14733j.C1.o1.fg
ctcgctatgctccagaggatgtccgcaccgatgaggagcgtcaggagaagtttttggagggactgaatgatgagttgtcctatactttgatgtctacggaattccgagatttccagcagttgatggacaaagcgattcgtcaggaagacaagtacaaccgtatggagcagaagaagcgcagggctgcccaatttaaggcacagcagggtagtaaccagaggccgcgtctcgttactggacctcaagttccatcgtaccctcaaggaggatcttcatcagttgtccgtccccaacgccagttctacaacaacaatactggtaatcgtagcaatgacaaccgcaatgtggttgctcgtcctgcagcaacttcagttcagaaccagcctgtcaggaaggagcagggaagtaagccggtgatatgcttcaactgtggtgatccaggacattatgctgataagtgtccgaagcctcggcgtgtgaagaacgttccagccccgaacaactccaatgttccagcaccgaaggcacgtgttaatcatgttgcagcagctgaagctcagaatgcaccagacgttgttttgggtacgtttcctgttaactctatacccgcaactgtgctttttgattccggtgctacacattcctttttgtctaaaagttttgcaagcaaacatgggatggaagttgttagtcttgggagacctttactagttaataccccaggcaatcaagtattttcgacacggtattgtccttctgttaccatagaaatagaagaagtttctttcccatcctctcttatcttgctagaatccaaagatctagatgttatcttagggatggactggttatctcgtcacagaggaattatagattgtgccaaccgtaaggtgattttaaccaatagcaatgggaaaaccgtttctttctttgcgtcctcccctaaatttcatggtgtgatcttaaaccaagttgctctacaagagatccttatagtccaagantcctcacgtgtgttcccggaagatttgtcaggtatgccacttaagagagacatagagtttcggatagatttggtacttgcaaccaacccaatccataagagaccgtgcacgggaaattttcgcgcaagcgtaatccatgttagcgtgagagtgaagaaacaggtggatgattgggctcagaaaggatatattagacccagtacttcgccatggggagcaccagtcatctttgtggagaagaaagatcatactcagagaatgtgcgtggattatcgagcgttgaatgaggttactatcaaaaataagtatcctctacccagaatcgatgacctgtttgatcaattgaaaggtgctacagttttctccaagatagatgtccgttctggatatcatcaacttcgaattcgtgaggaagacataccaaagaccgccttcacaactcggtatggtttgttcgaatgtaccgttatgtcgtttggtctcactaatgccccagcctttttcatgaacctgatgaacaaagtgtttatggaatatctggataagtttgtcgtggtgtttattgatgacattcttatttactccaagacgaaggaagaacatgaagagcatcttcgtctagctttagataaactacgtgagcatcagctttatgccaagttcagtaaatgtgaattttggttgtctgaagtgaagtttcttggtcatgtcatctcgtctggaggagtggcagtagatccaagcaatgtggagtcagtgttaagttggaagcaacccaagacggtttcataa

SEQ ID NO: 15604 - DNA, 4586 bp, Oryza sativa
  Clone ID: TFbOSC1737j.C1.o1.np
tattaccgcaggtttattgagaacttttcaaagatcgccagaccaatgactcgtctacttcagaaggaagtgaagtacaagtggacggaggattgtgaacgaagtttccaagtactgaagaaaaggctagtgactgcgcctgtgttaattttgcctgattcgaggaaaggtttccaagtgtattgtgatgcatcccgactcggtttgggttgtgtgttgatgcaagaaggaaaggtggttgcttatgcatctaggcaattgcgtcctcatgagaataactacccaacgcatgacctagagttggcagctgtggtgcatgcattgaagatttggcgtcattatcttttcggtaaccgtacagaaatatatacggatcataaaagtttgaagtacattttcactcaacctgatttgaatatgcgtcagcgaagatggttagagttgattaaagactatgatatggaaatccattatcacccggggaaggcaaatgttgtagccgatgctcttagcaggaaaagctactgtaatatgtcagaaggtcaacgtttaccttgggagttgtgccaagaatttgaaaagttgaacttgggaatagtcagtaaaggttttgtggccgcattagaagctaaacctactctgtttgatcaagttagagaagctcaagtgaatgatcctgatatccaggaaataaagaagaacatgagaaggggtaaagccatcggttttgtagaagatgagcaaggaactgtgtggttaggagaaagaatttgtgtcccagagaataaggagttgaaggatactatcatgaaagaagcacatgaaactttgtattccattcaccctggaagcactaagatgtatcaagacttaaagctacaattctggtgggccagtatgcgacgtgagatagcagaatatgtggctctatgtgatgtatgtcagcgggtcaaagcagaacatcagaagccagccggtctgttacaaccattgaagattccagagtggaagtgggaagaaataggaatggattttataaccggtctacccagaacgtcggcagaaacaacttacacggggaataagcttgcagagttatacatggccagagtggtatgtttgcatggtgttcctaagaagatagtgtcagatagaggaagccagtttacttcgaagttttggcagaagttacaatcagaattgggtacccgtttgaatttcagtactgcttatcaccctcaaacagatggtcagacggaaagagtaaaccaaattttagaagatatgttgagagcttgtgttctagattttggtggaagttgggataagaatttgccgtatgcggaattctcatataaccatagttatcaagctagtttgcaaatgtctccgaatgaagcattatatggtcgaaagtgccgtacgccgctcctttgggatcaaaccggtgaacgtcaagtttttgggactgacatattgcgagaggcggaagaaaaagtgaagattatccaagaaaggttgcgcgttgcccagtcgcgtcagaagagctatgccgacaatcgtcgcagagatttggttttcgaagaaggagattatgtataccttcgggtcacgccgttacgaggtgttcatcgtttccaaaccaaagggaaattagcaccgcgttttgtaggaccttttaagatcgtgagtcgaagaggtgaagtagcttatcagttagagttgcctccgtcaatggcgggaatacatgacgtgttccatgtgtctcagttgaagaaatgtttacgagtacctacggaggaagcagatcctgatcgtatagagcttcaagaagatttaacttatgttgagaagccagttagaattttggaacgccgccgcgacgctctccaagtccgccgccgtcgccggccgtcttcagcaacgccgccgcgcatgcctcgccattcaccaagaaatttgatcgaggtgttaggattcgtcagggagctgaggttgatggcttttgaagtaggttatgaagttgctcccgagtatcgccagatttcccatgaccccgacgaggagaaatgtcgtgttcgtgtgacgttggctagtgatagtgaagaccttccgtcttttaagttcgaagctggaggaagatcgtactgccatgcttgtcaagaagcagctttggtggccattggagagttgcgtcaacactttgaagaagaattggattcatcagctttccagtatcatccccacaagcctcatggtcaagactatggaacctatacctgtcctgatggtgaagagagtgccactctgatgcatgcggtgcatatgcttagtgctatggatgcagtaagtgtggagcgagacaaagcagctcatgacagggaaaactggaatcgaggcaagatttgcaagttgaagagcaaggtgtaccgcctacagaaggaattagctgaacttaaaggagaaacgccgccgccaacatcctagcttcgcctcactgcaagaaagagaacctgtccgccccctcgtctccagttagcttcgaagattcgcgtgatgggtgaagctgtgcccgatcgtgttgagcctgtcatcgacatcatggtgaacacgcgcactggcactggaagtggaagtggaagtggagccaataacaatgaagagaacccaacgctagctcagattttggctcaacaaacacaactgatcaatctgttagtgcagcaggcacagaatcagcaggcaaataatcaaaaccagaatccacccccacctccccaaaacaagttggcagatttcttgcgtgtgagtccccctactttttcgagcaccaccaatccagtagaagcaggagattggttgcatgcggtggagaagaagttggacttgatccagtgtactgagcaggagaaagtttcttttgcttcgcatcagttgcatggacccgctgctgaatggtgggatcattttcgccaaggcagagcgggaggagaacctattacttggcaggaattcacaactgcttttaagaagacgcatataccaacgggtgttgtagctctaaagaagagagaatttagagcactcaaccagggatctcgttcggtcaccgagtacctccatgatttcaaccgtttagctcgctatgctccagaggatgttcgcactgatgaagaacgtcaggagaagtttttggagggactaaatgatgagttgtcttatgctttgatgtctacggatttccgggatttccaacaattggtggacaaggcgattcgtcaggaagacaatcgtggcaatgacaaccgcagtgtggttgctcgtcctgcagcaactccagttcagaaccagcccgttaggaaggagcaggggagcaaaccagtgatatgcttcaattgtggtgatccgggacattatgctgataagtgtccgaagcctcggcgtgtgaagaacgctccagccccgaacaactccagtgctccagcaccgaaggcccgtgtcaatcatgttgcagcagcagaagctcagaatgcaccagatgtggttttgggtacgtttcctgttaactctatacccgcaactgtgctttttgattccggtgctacacattcctttttgtctaaaagttttgcaagcaatcatgggatagaagttattagtcttgggagacctttactagttaataccccaggcaatcaagtattttcgacacagtattgtccttctgttactatagaaatagaagaagttcttttcccatcctctcttatcttgctagaatccaaagacctagatgttatcttagggatggattggttatctcgtcatagaggagttatagattgtgccaaccgtaaggtgactttaaccaatagcaatggggaaactgtttctttctttgcgtcctctcctaaatctcatggtgtggttttaaaccaagttgctctacaagagattcctatagtacaagactacccagatgtgtttcccgaggatttgccgggtatgccacctaagagagacatagagtttcggatagacttggtacctggaactaaccctatccataagagaccatatagaatggcagctaacgagttagcagaggtgaagaaacaggtggatgatttgcttcagaaaggatacattagacccagtacttcgccatggggagcaccagtcatctttgtggagaagaaagatcatactcaaagaatgtgcgtggattatcgagcgttgaatgaggttactatcaagaataaataccctttacctagaattgatgacctgtttgatcaattggaagagtttgtcgtggtgtttatcgatgacattctcatttactccaagacgaaagaagaacatgaagagcatcttcgtctagctttagagaaactacgtgagcatcagctttatgccaagttcagtaaatgtgaattttggttgtccgaagtgaagtttcttggtcatgtcatctcgtctggaggagtggcagtagatccaagcaatgtggagtcagtattaagttggaagcaacccaagacggtttcagaaattcgtagtttccttggacttgctgggtattt

SEQ ID NO: 15605 - DNA, 3453 bp, Oryza sativa
  Clone ID: TFbOSC25598j.C1.o1.fg
atgatgccgccccgttcaccaagaaatttgatcgaggtgttaggactcgtcagggagctgaggttgatggcttttgaagtaggctatgaagttgctcccgagtatcgccagattccccatgaccccgacgaggagaaatgtcgtgttcgtgtgacattggctagtgatagtgaagatcttccatcttttaagtttgaagctggaggaagatcgtactgccatgcttgtcaagaagtagctttggtggccattggagagttgcgtcaacactttgaagaagaattggattcatcagctttccagtatcatcctcacaagcctcatggtcaagactatggatcttatacctgtcctgatggcgaagagagtgctactctgatgcatgtggtgcatatgcttagtgctatggatacagtaagtgtggagcgagacaaagcagctcatgacagggaaaattggaatcgaggcaagatttgcaagttgaagagcaaggtgcaccgtctacagaaggaattagctgaacttaagggagagatgccgccgccaacatccaagcttcgcctcactgcaagaaagagaacctgtccgccccctcgtctccagttagcttcgaagattcgcgtgatgggtgaagctgtgcccgatcgtgctgaacctgtcatcgacatcataagtgatgaggaagaggaggaagatcctgaagaaagagagccagctactccagaggaagaagattcatcgcttcgttccgacgcaagagtgatggtgaacacgcgcactggaagtggaagtggaagtggagctaataacaatgagggagaacctacgctagcccagattttggcccaacaaacacaactgatcaatctgttagtgcagcaggcacagaatcagcagggaaataatcagaaccagaatccaccccctcctccccaaaataagttggcagatttcttacgtgtcagaccccctaccttttccagcacaaccaatccagtagaagcaggagattggctgcatgcggtggagaagaagttggatttgatccagtgtactgagcaggagaaagtttcatttgcttcgcatcaattgcatggacctgctgctgaatggtgggatcattttcgccaaggcagggctggaggagaacctatcacttggcaggagttcacagctgcttttaagaagacgcatataccgtcaggtgttgtagctctaaagaagagagaatttagagcactcaatcagggatctcgttcggtcacagaatacctccatgatttcaaccgtttagcacgctatgctccagaagatgttcgcactgatgaagagcgtcaggagaagtttttggagggactgaatgatgagttgtcttatactttgatgtctacggaatttcgggatttccagcagttggtggacaaggcgattcgtcaggaagacaagtataaccggatggagcagaagaagcgcagggctgctcaatttaaggcacaacagggcagtaatcagaggccgcgactcgttactggacctcaagttccatcgtaccctcaaggaggatcttcatcagttgtccgtccccagcgccagttctacaacaacaatactggtaatcgtggcaatgacaaccgcaatgtggttgctcgtcctgcagcaacttcagttcagaaccagcccgtcaggaaggaacagggaagcaagcccgtgatatgcttcaattgtggtgatcctggacattatgctgataagtgtccgaagcctcggcaatccaaagatctagatgttatcctagggatggattggttatctcgtcacagaggagttatagattgtgccaaccgtaaggtgactgtaaccaatagcaatggggaaattgtttctttctttgcatcctctcctaaatctcatggtgtggtcttaaaccaagttactttacaagagattcctatagtgcaagactacccagatgtgtttccggaggatttgccaggtatgccacctaagagagatatagagtttcggatagacttggtacctggaactaacccaatccataagagaccgtacagaatggcagctaatgagttagctgaggtgaagaagcaggtggatgatttgcttcagaaaggatacataagacccagtacttcgccatggggagcgccagtcatctttgtggagaagaaagatcatactcagagaatgtgcgtggattatcgagcgctgaatgaggttactattaagaataagtatccgctacccagaatcgatgatctgtttgatcaattgaaaggtgctacagttttctccaagatagatctccgttctggatatcatcaacttcgaatccgtgaggaagatataccaaagactgccttcacaactcggtatggtttgttcgagtgtactgttatgtcatttggactcactaatgccccagcctttttcatgaatctaatgaataaggtgtttatggaatatctggataagtttgtcgtggtgtttattgatgacattcttatttactccaagacgaaggaagaacatgaagagcatcttcgtctagctttagagaaattacgtgagcatcacttttatgccaagttcagtaaatgtgaattttggttgtccgaagtgaagtttcttggtcatgtcatctcatctggaggagtggcagtagatccaagcaatgtggagtcagtgttaagttggaagcaacccaagacggtttcagaagttcgtagtttccttggacttgcagggtattaccgcaggtttattgagaacttttcaaagatcgccagaccaatgactcgtctgcttcagaaggaagtgaagtataagtggacagaagattgcgagcgaagtttccaagaactgaagaaaaggctagtgtctgcgcccgtattaattttgcctgattcgaggaaaggtttccaagtgtattgtgatgcatctcgactcggtttgggttgtgtgttgatgcaagaaggaaaggtggttgcttatgcatctaggcaattacgtcctcatgagaataactacccaacgcatgacctagaattggccgctgtggtgcatgcattgaagatttggcgtcattatctttatggtaaccgtacggagatatatacggatcataaaagtttgaagtacattttcactcaacctgatttgaacatgcgtcagcgaagatggttagagttgattaaggactatgatatggaaatccattatcatccggggaaagcaaatgttgtagccgatgcccttagcaggaaaagctactgtaatatgtcagaaggtagatgtttaccttgggagttatgccaagaatttgaaaagttaaacttgggaatagtcagcaaaggttttgtggccgctttggaagctaaacctactctgtttgatcaaattagagaagctcaagtgaatgatcctgatatctag

SEQ ID NO: 15606 - DNA, 2334 bp, Oryza sativa
  Clone ID: TFbOSC27003j.C1.o1.np
ttgagcttaccccaatcggaggggtatgtcattgtgctgcaccagatgttgaggcgtctgcgataccctggttttccgtcataccgagtgaggcagtgtggcccagtttgggaggctcgggtcgagattcacccccgagtcccttccgagttggactacagctttcagacacgtcaccaccgagacctgccagagaccgcgatgcaggatgccgcccgggaggccttcctccgactcagctctatccaccgagccgagttagtgagtaccgagtttgctcaccacccgttccgggaggagggcaactcagtttgcacagttcagaacacgccctgctgctacaacccgatagtgactcggttgtcacgatgggctgaggcagtagatgactactacgaggaggctctgttggagattgacgaccaccagagacgtatgggagagttagagactgaggtgaccgacctcacagcgcagcagcttcagttggaggaggagcaccaggcttggggcagtgagatagactcactgaaggcacagctccagctgggttccggtttggagactccgatccagatcgactcggagacagaggagaccgacaccgagccggagatcgagccagacatcactgatccttcagaggatgaggctcctgttccccgcatcaccttccttggaggccctcgcaccctcagcactgctcgcaagagcacacgacctccgggcaagaggcccaagccagatccagaggccactacttctgagccgtggggactcagggtcattgagaaaaagctaactcttgttcgagtacgtgaggccgataaagtgatctttgcggcaaaccaattggaaggaccagccggagactggtgggatacctacaaggaagcccgagaagacggtgctggagaacccacctgggaggagttcactgcagcatttcgcgagaacttcgtacctgctgcagtgatgcgcatgaagaagaacgagtttagaagactgcggcaagggaatacaacagtgcaggagtatctgaacaagttcactcagttggcccgctacgcaattggagacctggcagatgaagaagaaaagatcgacaagttcatagaagggctgaatgatgaattgcgtggacctatgatcgggcaggatcacgagagtttccagagcctgatcaacaaggtcgtcaggctagagaacgatcaaaggacggtggaacacaaccgcaagaggaggcttgctatgagtcgcccacctcagacagtgcctcagcgactcaagggagccactccgtccggatggaagccccctgtcgtggtgaccaaccgtcccgctgcacctagcaacttcaacaggccagttgcacttcagaaccgcacccctacaccaactttggctgcccctggagccaagaagaatgtggactgcttcaactgtggggaatacgggcactacgctaacaactgccctcatccacgcaaaacccctgtccgaactggcgcgaatgcaatgactgttcgcggcactactacccctactgtcgggcgaggcctattcaagactccgcaatcgaacaggaccaccactggatttgggcgcggacaagtgaaccatgtccgagctgaagaggcccaggaagatcagggcgtactaatgggtatgttctctatcaattccaccccggttaaagttctcttcgattctggtgcatcgcattcatttatatctctgaaggctagtcaaaagcacaacttgaccctcgtgggacttagaaagcctatgatagtacactcacctgggggcgagataactgtgagtcatgcttgcatagacgtaccaattctccttagggatgtggtatttccctccaatcttatggtgctaataccccaaactcttgatgtcattttgggtatggattggttagcaaagcatacaggagtaattgactgtagacgtagagaagttaccctgaccacaccctggggatcggatatgcgagcaaccatggatcaagatcctaggctaaccgaacgtgccggaggtatatttaccatgctacccctaaagggaatgcccgtagtgcagcgatttcctgatgtgttcccagaagatttacctgggatgccaccagatcgtgacatagagttcattatcgacctgatacccggaactacccccatatccaagagaccatatcggatgccggtcaatgagttagaagaacttaaaaagcaaatcagggagttgcaagagaagggatttgtacgccccagttcgtcaccttggggagccccagtgttgtttgttaaaaagaaagacggt

SEQ ID NO: 15607 - DNA, 896 bp, Oryza sativa
  Clone ID: TFbOSC29560j.C1.o2.np
cagcagcaggtccatgcaactgatgcgaagcaaaagaaactttcattgatcaagttagagaagcccaaattaatgatcctgatattcaagagatcaagaagaatatgagaagaggaaaagctatcggtttcttggaggatgagcatggaactgtatggttgggtgagagaatctgtgtccccgacaacaaagatttaaaagatgcaattctaaaagaagctcatgatactttatactccatacaccctggtagtactaagatgtaccaggatctcaaggaaaggttttggtgggcaagtatgaagcgtgaaatcgcagaatacgtagcagtatgtgatgtttgtcagcgagtcaaggcagaacatcagaaacccgccggtttgctgcagcctttgaaaattcctgaatggaaatgggaagaaatcggtatggattttatcactggtctacccagaacgtcatcaggccatgactctatttgggtgatagtcgacagacttaccaaagtggctcatttcatcccggtaaagacaacctattctggaagtcggttagcggaattgtatatggcaaggattgtgtgtttgcatggcgtccctaagaaaatagtgtctgatcgaggcagtcagtttacttcaaatttttggaagaaacttcaggaagagatgggttctaagctgaactttagtactgcttaccatccgcaaactgatagacaaactgaaagggtgaatcagattttggaagacatgttgagagcttgtgctttagatttcggtggaagttgggataagaatctaccttatgcagaattttcgtataataacagttatcaagctagtcttcagatggctccttacgaagcactgtatggtcggaagtgtcgcactccgctt

SEQ ID NO: 15608 - DNA, 1699 bp, Oryza sativa
  Clone ID: TFbOSC2960j.C1.o1.fg
atggcttttgaggtaggctatgaagttgctcccgagtatcgccagatttcccatgaccccgacgaggagaagtgtcgtgttcgtgtgacgttggctagtgatagtgaagaccttccgtcttataagttcgaagctggaggaagatcgtactgccatgcttgtcaagaagtagctttggtggctattggagagttgcgtcaacactttgaagaagagttggattcatcagctttccagtatcatcctcataagcctcatggtcaagattatggaacctatacctgtccagatggtgaagagagtgccactctgatgcatgtggtgcatatgcttagtgctatggatgcagtaagtgtggagcgagacaaagcagctcatgatagggaaaactggaatcgaggcaagatttgcaagttgaagagcaaggtgcaccgtctacagaaggaattagctgaacttaaaggagagacgccaccgccaacatccaagcttcgcctcactgcaaggaagagaacctgtccgccccctcgtctccagttagcttcgaagattcgcgtgatgggtgaagctgtgcccgattgtgctcaacctgtcatcgacatcataagtgatgaggaagaagaggaagatcctaaagaaagagagccagctactccagaggaagaagattcatcgcttcgttccgacgcaaggcggaatgcagcaggaacagaatcagcagggaaacaatcagaaccagaatccaccccacctccccaaaataagttggcagatttcttacgtgtgagaccccctaccttttcaagcaccaccaatccagtagaagcaggagattggttgcatgcggtggagaagaagttggatttgatccagtgtactgagcaggagaaagtttcttttgcttcgcatcaactgcatggacctgctgctgaatggtgggatcattttcgccaaggcagggcgggaggagaacctattacttggcaggagttcacagctgcttttaagaagacgcatataccgtcaggtgttgtagctctaaagaagagagagtttagagcactcaaccagggatctcgttcggttactgagtaccttcatgatttcaaccgtttagctcgctatgctccagaagatgttcgcactgatgaagagcgtcaggagaagtttttagagggactgaatgatgagttgtcttatgctttgatgtctacggatttccgggatttccagcagttggtggacaaggcgattcgccaggaagacaagtataaccgtatggagcagaagaagcgcagggctgcccaatttaaggcacaacagggcagtaatcagaggccgcgtctcgttactggacctcaagctccatcgtaccctcaaggaggatcttcgtcagttgtccgtccccaacgccagttctacaacaacaatactggtaatcgtggcaatgacaaccgcaacgtgatagctcgtcctgcagcaactccagttcagaatcagtctgtcaggaaggaacagggaagcaagcccgtgatatgcttcaattgtggtgatccaggacattatgctgataagtgtccgaagcctcggcgtgtgaagaacgttccagccccgaacaactccaatgttccagcaccgaaggctcgtgttaatcatgttgtagcagcagaagctcagaatgcaccagatgttgttttgg

SEQ ID NO: 15609 - DNA, 5334 bp, Oryza sativa
  Clone ID: TFbOSC31236j.C1.o2.fg
atggttcctggtttggaatggttagttcctggtctggaggttatatttgttcaactggggttggttgttcaaatgtggctgggcctatgcaacatggaaattccgggcgtgacaagttggtatcagagccaccttgaccttaggataagccaaatgatgcctcgccattcaccgagaaatttgatcgaggtgttaggattcgtcagggagctgaggttgatggcttttgaagtaggctatgaggttgctcctgagtatcgtcagattccccatgaccccgacgaggagaagtgtcgtgttcgtgtgacgttggctagtgatagtgaagaccttccatcttttaagtttgaagctggaggaagatcgtactgccatgcttgtcaagaagtagctttggtggccattggagagttgcgacaacactttgaagaagagttggattcatcagctttccagtatcatcctcataagcctcatggtcaagactatggaacctatatctgtcctgatggtgaagagagtgctactctgatgcatgcggtgcatatgcttagtgctatggatgcagtaagtgtggagcgagacaaagcagctcatgaccgggaaaattggaatcgaggcaagatttgcaagttggagagcaaggtgtaccgtctacagaaggaattagctgaacttaaaggagaaatgccgccgccaacacccaagcttcgtctcgtcgcaagaaagagaacctgtccgccacctcgtctccagttagcttcgaagattcgcgtgatgggtgaagctgtgcccgatcgtgctgaacctgtcatcgacatcataagtgatgaggaagaggaggaagatcctgaagaaagagagccagctactccagaggaagaagattcatcgcttcgttccgacgcaagttgctgcttacatcatgggtgggatatggtgaacacgcgcaccggcactggaagtggaagtggaagtggagccaataacaatgagggagaaccaacgctagcccagattctggcccaacaaacacaactgatcaatctgttagtgcagcaggcacagaatcagcagggaaataatcagaaccagaatccacccccacctccccaaaacaaattggcagatttcttacgtgtgagaccccctaccttctcaagcaccaccaatccagttgaagcaggagattggctgcatgcagtggagaagaagttggatttgattcagtgtactgagcaagagaaagtttcttttgcttcgcatcagttgcatggacccgctgctgaatggtgggatcattttcgccaaggcagggctggaggagaacctatcacttggcaggagttcacagctgcttttaagaagacgcatataccgtcaggtgttgtagctctaaagaagagggagtttagagcactcaatcagggatctcgttcagtcaccgagtacctccatgatttcaatcgtttagcgcgttatgctccagaggatgttcgcactgatgaggaacgtcaggagaagtttttggagggactgaatgataagttgtcttatgctttgatgtctacggatttccaggattttcagcagttggtggacaaagcgattcgccaggaagacaagtataaccgtatggagcagaagaagcgcagggctgcccaatttaaggcacaacagggcagtaaccagaggccgcgtctcgttactggacctcaagttccatcgtaccctcaaggaggatcttcatcagttgtccgtccccaacgccagttctacaacaacaatactggtaatcgtggcaatgacaaccgtaatgtggttgctcgtcctgcagcaactccagttcagaaccagcccgttaggagggaacagggaagcaagccagtgatatgcttcaattgtggtgatccgggacattatgctgataagtgtccgaagcctcggcgtgtgaagaacgctccagccccgaacaacttcaatgttccagcaccgaaggctcgtgtcaatcatgttgcagccgcagaagctcagaatgcaccagatgttgttttgggtacgtttcctgttaactctatacccgcaactgtgctttttgattccggtgctacacattcctttttgtgtaaaagttttgcaatcaaacatgggatggaagttgttagtcttgggagacctttactagttaataccccaggcaatcaagcattttcgacacggtattgtccttctgttactatagaaatagaagaagttcctttcccatcctctcttatcttgttagaatccaaagatctagatgttatcctagggatggactggttatctcgtcacagaggagttatagattgtgccaatcgtaaggtgactttaaccagtagcaatggggaaactgtttctttctttgcgtcctctcctaaatctcatggtgaggtcttaaaccaagttgctctacaagagattcctatagtgcaagactacccagatgtatttccggaggatttgccaggtatgccacctaagagagatatagaatttcggatagacttggtacctggaaccaacccaatccataagagaccatacagaatggcagctaatgagttggctgaggtgaagaaacaggtggatgatttgcttcagaaaggatacatcagacccagtacttcgccatggggagcaccagttatctttgtggagaagaaagatcatactcagagaatgtgcgtggattatcgagcgttgaatgaggtcactatcaaaaataagtatcctctacccagaattgatgatctgtttgatcaattgaaaggtgctacagttttctccaagatagatctccgttctggatatcatcaacttcgaattcgtgaggaggatataccaaagaccgcctttacgactcggtatggtttgtttgagtgtaccgtcatgtcatttggactcactaatgccccagcctttttcatgaatctgatgaacaaggtgtttatggaatatctggataagtttgttgtggtgtttattgatgacattcttatttattccaagacgaaggaagaacataaagagcatcttcgtctagctttagagaaactacgtgagcatcagctttatgccaagttcagtaaatgtgaattttggttgtccgaagtgaagtttcttggtcatgtcatctcatctggaggagtggcagtagatccaagcaatgtggagtcagtgttaagttggaagcaacccaagacggtttcagaagttcgtagtttccttggacttgctgggtattaccgcaggtttattgagaacttttcaaagatcgccagaccaatgactcgtctgcttcagaaggaagtgaagtataagtggacagaagattgtgagcaaagtttccaagaactgaagaaaaggctagtgactgcgcctgtgttaattttgcctgattcgaggaaaggtttccaagtgtattgtgatgcatcccgactcggtttgggttgtgtgttgatgcaagaaggaaaggtggttgcttatgcatctaggcaattacgtcctcatgagaataactacccaacgcatgacctagagttggcagcagtggtgcatgcattgaagatttggcgtcattatctttacggtaaccgtacagaggtgtatacggatcataaaagtctgaagtacattttcactcaacctgatttgaacatgcgtcagcgaagatggttagagttgattaaagactatgatatggaaatccattatcatccggggaaagcaaatgttgtagccgatgctcttagcaggaaaagctactgcaatatgtcagaaggtagatgtttaccttgggagttatgccaagaatttgaaaagttgaacttgggaatagtcagcaaaggttttgtagctgctttggaagctaaacctactctatttgatcaaattagagaggctcaagtgaatgatccttatatccaggaaataaagaagaacatgagaagaggtaaagccatcggttttgtagaagatgagcaaggtactgtatggttaggagaaagaatttgcgtcccagaaaataaggagttgaaggatactatcatgaaagaagctcatgaaactttgtattctattcaccctggaagcactaagatgtatcaggatttaaagcaacaattctggtgggccagtatgcgacgtgagatagcagaatatgtggctctatgtgatgtttgtcagcgggtcaaggcagaacatcagaagccagccggtctattacagccgttgaagattccagagtggaagtgggaagaaatagggatggattttataaccggtctacccagaacgtcggcaggacatgattctatttgggtagtggttgatcggttgaccaaagtcgctcacttcataccagtcaaaacaacttatacgggacataagcttgcagagttatacatggccagagtggtatgtttgcatggtgtacctaagaagatagtgtcagatagaggaagtcagtttacttcgaagttttggcagaagttacaatcagaattgggtactcgtttgaatttcagtacggcttatcaccctcaaacagatggtcagacggaaagagtaaaccaaattttagaggatatgttgagagcctgtgttctagattttggtggaagttgggataagaatttgccgtatgcggaattctcatataacaatagttatcaagctagtttgcaaatgtctccgaatgaagcattatatggtcgaaagtgccgtacgccgcttctttgggatcaaaccggtgagcgtcaagttttcgggacagacatattgcgagaagcggaagaaaaagtgaagattatccaagaaaggttgcgcgttgctcagtcgtgtcagaagagctatgccgacaatcgtcgcagagatttagtttttgaagaaggagattatgtgtatcttcgggttacgccgttacgaggagttcatcgtttccaaaccaaagggaaattggcaccgcgttttgtgggaccttttaagatcgtgagtcgaagaggtgaagtagcttatcagttagagttgcctccgtcaatggcgggaatacatgatgtgttccatgtgtctcagttgaagaaatgcttacgtgtacctacggaggaagcagatcctgattgtatagagcttcaggaagatttaacttatgttgagaagccagtcagaatcttggaatttccgacgttccggaggagagcgtttccgttgaggaaggttccgaagcgtttgtggaagctcaaggcaagtcacacagatcccaaacaaccctttgagcatgttgatcccgtttaa

SEQ ID NO: 15610 - DNA, 4599 bp, Oryza sativa
  Clone ID: TFbOSC31236j.C1.o4.fg
atgccgcaccgttcaccgagaaatttgatcaaggtattaggatttgtcagggagctgaggttgatggcttttgaagtaggctatgaagttgctcctgagtatcgccagattccccatgaccccgacgaggagaagtgtcgggttcgtgcgacgttggctagtgatagtgaagaccttccgtcttttaagttcgaagctggaggaagatcgtacagccatgcttgtcaagaagtagctttggtggccattggagagttgcgtcaacactttgaagaagagttggattcgtcagctttccagtatcatccccacaagcctcatggtcaagactatggatcttatacctgtcctgatggcgaagagagtgctactctgatgcatgtggtgcatatgcttaatgctatggatacagtaggtgtggagcgagagaaggcagctcatgaccgggaaaactggaatcgagataagatttgtaagttgaagagcaaggtgaaccgtctacagaaggaattagctgaacttaagggagagacgccgccgccaacatccaagcttcgcctcactgcaagaaagagaacctgtctgccccctcgtctccagttagcttcgaagattcgcgtgatgggagaagctgtgcctgatcgagctgaacctgttatcgacatcataagtgatgaggaagaagaggaagatcctgaagaaagagagccagctactccagaggaagaagattcatcgcttcatttcttacgtgtcagaccccctaccttttcaagcacaaccaatccagtagaagcaggagattggttgcatgcagtggagaagaagttggacttaatccagtgtactgagcaggagaaagtttcttttgcttcgcatcaattgcatggacctgctgctgaatggtgggatcattttcgccaaggcagggctggaggagaacctatcacttggcaggaattcacagccgcttttaagaagacacatataccaacgggtgttgtagctctgaagaagagggagtttagagcactcaaccagggatctcgttcggttactgagtatctccatgattttaaccgtttagcacgctatgctccagaagatgttcacactgatgaggaacgtcaggagaagtttttggagggactaaatgatgagttgtcctatactttgatgtctacggaattccgggatttccagcagttggtggacaaagcgattcgccaggaagacaagtataatcgcatggaacagaagaagcgcagggctgctcaatttaaggcacaacagggcagtaaccagaggccgcgtcttattcctggacctcaagtcccatcgtacccgcaaggaggatcttcatcagttgtccgtccccaacgccagttctacaacaacaatactggtaatcgtggcaatgaaaaccgcaacgtagtcgctcgtcccgcagcaactccagttcagaaccagcctgtcaggaaggaacagggaagcaagccggtgatatgcttcaattgtggtgatccaggacattatgctgataagtgtccgaagcctcggcatgtgaagaacgttccggtcccgaataactccaatgtcccagcaccaaaggcacgtgttaatcatgttgcagccgcagaagctcagaatgcaccagacgtggttttgggtacgtttcctgttaactctatacccgcaactgtgctttttgattccggtgctacacattcctttttgtctaaaagttttgcgaccaaacatgggatggaagttgttagtcttgggagacctttactagttaataccccaggcaaccaagtgttttcgacacggtattgtccttccgttaccatagaaatagaaggagttcctttcccatcctctcttatcctgctagaatccaaagatctagatgttatcttagggatggattggttatctcgtcacagaggagttatagattgtgccaatcgcaaggtgactttaaccaatagcaatggggaaactgtttctttctttgcgtcctctcctaaatctcatggtgtggtcttaaaccaagttgctctacaagagattcctatagtgcaagactacccagatgtatttccggaggatttgccaggtatgccacctaagagagatatagaatttcggatagacttggtacctggaactaaccctatccataagagaccgtacagaatggcagctaatgagttagctgaggtgaagaaacaggtggatgatttgattcagaaaggatacatcagacccagtacttcgccatggggagcaccagtcatctttgtggagaagaaagatcatactcagagaatgtgtgtggattatcgagcgttgaatgaggttactatcaagaataagtaccctttacccagaattgatgacttgttcgatcaactcgaaggtgctacagttttctctaagatagatctccgttctggatatcatcaacttcgaatccgtgaggaagatataccaaagaccgccttcacaactcggtatggtttgtttgagtgtaccgttatgtcatttggactcactaatgccccagcctttttcatgaatctgatgaacaaggtgtttatggaatatctggataagtttgtcgttgtgtttattgatgacattcttatttactccaagacgaaggaagaacatgaagagcatcttcgtctagctttagagaaactacgtgagcatcagctttatgccaagttcagtaaatgtgaattttggttgtccgaagtgaagtttcttggtcatgtcatctcgtctggaggagtggcagtagatccaagcaatgtggagtcagtgttaagttggaagcaacccaagacggtttcagaaattcgtagtttccttggacttgcagggtattaccgcaggtttgttgagaacttttcaaagatcgctagaccaatgactcgtctacttcagaaggatgtaaagtacaagtggacggaggattgtgaacaaagtttccaagaactgaagaaaatgctagtgactgcgcctgtgttaattttacctgattcgaggaagggtttccaagtgtattgtgatgcatcccgacacggtttgggttgtgtgttgatgcaagaaggaaaggtggttgcttatgcatctaggcaattacgtcctcatgagaataattacccaacgcatgacctagagttggcagctgtggtgcatgcattgaagatttggcgtcattatcttttcggtaatcgtacagagatatatacggatcataaaagtttgaagtacattttcactcaacctgatttgaacatgcgacagcgaagatggttagagttgattaaggattatgatatggaaatccactatcacccgggaaaagcaaatgtggtagccgatgcccttagcaggaaaagttactgtaatatgtcagaagctcgatgtttaccttgggagttgtgccaagaatttgaaaggttgaacttgggaatagtcagcaaaggttttgtggctactttggaagctaaacctactttgtttgatcaaattagagaagctcaaatgaatgatcctgatatccaggaaataaagaagaacatgagaaggggtaaggccatcggttttgtagaagatgagcaaggaactgtgtggttaggagaaagaatttgtgtcccagaaaataaggagttgaagaatactatcatgaaagaagctcatgaaactttgtattccattcaccctggaagcactaagatgtaccaagacttaaagctacaattctggtgggctagtatgcgacgtgagatagcagaatatgtggctctatgtgatgtatgtcagcgggtcaaagcagaacatcagaaaccagctggtctgttacaaccgttgaagattccagagtggaagtgggaagaaataggaatggattttataaccggtctacccagaacgtcggcaggacatgattctatttgggtagtggttgatcggttgacaaaagtcgctcatttcataccgatcaaaacaacctatacgggacataagcttgcagaattatatatggccagagtggtatgtttgcaaggtgttcctaaaaagatagtgtcagatagaggtagccagtttacttcgatgttttggcagaaattacaatcagaattgggtacccgtttgaatttcagtactgcctatcatcctcaaacagatggtcagacggaaagagtaaaccaaattttagaagatatgttgagagcctgtgttctagattttggtggaagttgggataagaatttaccgtatgcggaattctcatataacaatagttatcaagctagtttgcaaatgtctccgaatgaagcattatatggtcgcaagtgctgtacgccgcttctttgggatcaaaccggtgaacgtcaagtttttgggacagacatattacgagaggcggaagaaaaagtgaagattatccaagaaaggttgcgcgttgctcagtcacgtcagaagagctatgccgacaatcgtcgtagagatttggctttcgaagaaggagattatgtatatcttcgggttacgccgttacgaggtgttcatcgtttttag

SEQ ID NO: 15611 - DNA, 3512 bp, Oryza sativa
  Clone ID: TFbOSC32906j.C1.o1.np
atgacaagttggtatcagagccaccttgaccttaggataagccaaatgatgccgccccattcactgagaaatttgatcaaggtgttaggattcgtcagggagctgaggttgatggcttttgaggtaggctatgaagttgctcccgagtatcgccaaatttcccatgaccccgacgaggagaagtgtcgtgttcgtgtgacgttggctagtgatagtgaagaccttccgtcttttaagttcgaagctggaggaagatcatactgccatgcttgtcaagaagcagcgttggtggccattggagagttgcgtgaacactttgaagaagagttggattcatcagctttccagtatcatcctcacaagcctcatggtcaagactatggaatctatacctgtcctgatggtgaagagagtgccactctgatgcatgcggtgcatatgcttagtgctatggatgcagtaagtgtggaacgagacaaagcagctcatgacagggaaaactggaatcgaggcaagatttgcaagttggagagcaaggtgtaccgtctacagaaggaattagctgaacttaaaggagaaacgccgccgccaacacccaagcttcgcctcactccaagaaagagaatctgtccgccacctcgtctccagttagcttcgaagattcatgtgatgggtgaagctgtgcccgatcgtgctgaacctgtcatcgacatcataagtgatgaggaagaggaggaagatcctgaagaaagagagccagctactccagaggaagaagattcatcgcttcgttccgacgcaaggcgcaccaccaatccagtagaagcaggagattggctgcatgcggtggagaagaatttggatttgatccagtgtactgagcaggagaaagtttcttttgcttcgcatcaactgcatagacctgctgctgaatggtgggatcattttcgccaaggcagggctgaaggagagcctattacgtggcaggaattcatggccgctttcaagaagacacacataccaacgggtgttgtagctctaaagaagagagaatttagagcactcaaccagggatctcgttcggtcaccgagtacctccatgatttcaaccgtttagctcgctatgctccagaggatgttcgtaccgatgaggaacgtcaggagaagttcttggagggactgaatgatgagttgtcgtatgccttgatgtctacggatttccgggatttccagcagttggtggacaaggcgattcgtcaggaagacaagtataaccggatggagcagaagaagcacagggctgcccaattcaaggcacaacagggcagtaaccagaggccgcgtctcgttactggacctcaagctccaccgtaccctcaaggaggatcttcatcagttgtctgcccccaacgccagttctacaacaacaatactggtaatcgtggcaatgacaaccgtaacacggttgctcgtcctgcagcaactccagctcagaaccagcccgttaggaaggaacagggaagcaagccagtgatatgcttcaattgtggtgatccaggacattatgctgataagtgtcctaagcctcggcgtgtgaagaatgccccaaccccgaacaactctaatgttccagcaccgaaggcacgtgttaatcatgttgcagcagcagaagctcagaatgcaccagatgtggttttgggtacgtttcctgttaactctatacccgcaactgtgctttttgattccggtgctacacattcatttttgtctaaaagttttgcgagcaatcatgggatggaagttattagtcttgggagacctttactagttaataccccaggcaaccaagtattttcgacccagtattgtccttccgctaccatagaaatagaagaagttcctttcccatcctcgcttatcttgctagaatccaaagatctagatgttatcttagggatggactggttatctcgtcacagaggagttatagattgtgccaaccgtaaggtgaccttaaccagtagcaatggggaaaccgtttctttctttgtgtcctctcctaaatatcatggtgtgatcttaaaccaagttgctctacaagagattcccatagtacaagactaccccgacgtgtttcccgaggatttgccaggtatgccacctaagagggacatagagtttcggatagacttggtacctggaaccaaccctatccataagagaccatacagaatggcagctaatgagttagctgaggtgaagagacaggtggatgatttgcttcagaaaggatacatcagacccagtacttcgccatggggagcaccagtcatctttgtggagaagaaagatcatactcagagaatgtgcgtggattatcgagcgttgaatgaggtcactatcaagaataagtatcctctacccagaattgatgacctgttcgatcaactggaaggtgctacagttttctccaagatagatctccgttccggatatcatcaacttcgaatccgtgaggaagatataccaaagaccgccttcacaactcggtatggtttgttcgaatgtaccgttatgtcgtttggactcactaatgccccagcctttttcatgaatctgatgaacaaggtgttcatggaatatctggataagtttgtcgtggtgtttattgatgacattcttatttactctaagacgaaggaagaacatgaagagcatcttcgtctagctttagagaaactacgtgagcattagctttatgccaagttcagtaaatgtgaattttggttgtccgaagtgaagtttcttggtcatgtcatctcgtgtggaggagtggcagtagatccaagcaatgtggagtcagtattaagttggaagcaacccaagacggtttcagaaattcgtagtttccttggacttgctgggtattactgcaggtttattgagaacttttcaaagatcgccagaccaatgactcgtctgcttcagaaggaagtgaagtacaagtggacagaggattgtgaacgaagtttccaagaactgaagaaaaggctagtgactgcgcctgtgttaattttgcctgattcgaggaaaggtttccaagtgtattgtgatgcatcccgactcggtttgggttgtgtgttgatgcaagaaggaaaggtggttgcctatgcatctaggcaattacgtcctcatgagaataactacccaacgcatgacctagaattggcagctgtggtgcatgcattgaagatttggcgtcattatcttttcggtaaccgtacagagatgtatacggatcataaaagtttgaagtacattttcactcaacctgatttgaacatgcgtcagcgaagatggttagagttgattaaagattatgatatggaaatccactatcacccggggaaagcaaatgttgtagccgatgcccttagcaggaaaagctactgtaatatgtcagaaggtcgacatttaccttgggagttatgccaagaatttgaagggttgat

SEQ ID NO: 15612 - DNA, 2577 bp, Oryza sativa
  Clone ID: TFbOSC33037j.C1.o1.fg
atgatgccaccccattcaccgagaaatttgatcaaggtgttagggttcgtcagggagctgaggttgatggcttttgaggtaggctatgaagttgctcccgagtatcgccaaatttcccatgaccccgacgaggagaagtgtcgtgttcgtgtgacgttggctagtgatagtgatgaccttccgtcttttaagttcgaagctggaggaagatcgtacagccatgcttgtcaagaggcagctttggtggccattggagagttgcgtcaacgctttgaagaagagttggattcatcagctttccagtatcatcctcacaagcctcatggtcaagactatggaacctatacctgtcctgacggtgaagagagtgccactctgatgcatgcggtgcatatgcttagtgctatggatgcagtaagtgtggagcgagacaaagcagctcatgacagggaaaactggaatcgaggcaagatttgcaagttggagagcaaggtgtaccgtctacaaaaggaattagctgaacttaaaggagaaacgccgccgccaacacccaagcatcgcctcactcaaagaaaaagaacctgtccgccacctcgtctccagttagcttcgaagattcgcgtgatgggtgaagctgtgcccgatcgtgctgaacctgtcatagacatcataagtgatgaggaagaggaggaagaccctgaagaaagagagccagctactccagaggaagaagatccatcgcttcgttccgacacaaggcggatggtgaacacgcgcaccggaagtggaagtggaagtggaagtggagctactaacaatggaggagatcccacgctagctcagattctggcccaacaaacacaactgatcaatctgttagtgcagcaggcacagaatcagcaggcaaacaatcagaaccagaatccacccccacctccccaaaacaagctggcagatttcttacgcgtgagaccccctaccttttccagcaccaccaatccagtagaagcaggagattggctgcatgcggtggagaagaagttggatttgatccagtgtactgagcaggagaaagtttcttttgcttcgcatcaactgcatggtcctgctgctgaatggtgggatcattttcgccaaggcagggctgaaggagagcctattacgtggcaggaattcacggccgctttcaggaagacacacataccgtcgggtgttgtagctctaaagaagagagaatttagggcactcaaccagggatctcgatcggtcaccgagtacctccatgatttcaaccgtttagctcgttatgctccggaagatgttcgcaccgatgaagagcgtcaggagaaattcttggagggactgaatgatgagttgtcttatgctttgatgtctacggatttccgggatttccagcagttggtggacaaggcgattcgtcaggaagacaagtataaccggatggagcagaagaagcgcagggctgcccaattcaaggcacaacagggcagtaaccagaggccgcgtctcgttactggacctcaagttccatcgtaccctcaaggaggatcttcatcagttgtccgtccccaacgccagttctacaacaacaatactagtaatcgtggcaatgacaaccgcaacgtggttgctcgtcctgcagcaacttcagctcagaaccagcctgtcaggaaggaacagggaagcaagccagtgatatgcttcaattgcggtgatccaggacattatgctgataagtgtcctaagcctcggcgcgtgaagaacgctccagccccgaacaactccaatgttccagcaccaaaggcacgtgttaatcatgttgcagcagcagaagctcagaatgcaccagatgtggttttgggtacgttccctgttaactctatacccgcaactgtgctttttgattccggtgctacacattcctttttgtctaaaagttttacgagcaatcatgggatggaagttattagtctcgagagacctttactagttaataccccaggcaatcaagtattttcgacacagtattgtccttccgctactatagaaatagaagaagttcctttcccatcctcgcttatcttgctagaatccaaagatctagatgttatcttagggatggattggttatcttgtcacagaggagttatagattgtgccaaccgtaaggtgactttaaccagtagcaatggggaaacagtttctttctttatgtcctctcctaaatctcatggtgtgatcttaaaccaagttgctctacaagagatccccatagtacaagactacccagacgtgtttcccgaggatttgccaggcatgccacctaagagagagatagagtttcggatagacttggtacctggaaccaaccctatccataagagaccatacagaatggcagctaatgagttagttgaggtgaagagacaggtggaagatttgcttcagaaaggatacatcagacccagtacttcgccatggggagcaccagtcatctttgtggagaagaaagatcatactcagagaatgtgcgtggattatcgagcgttgaatgag

SEQ ID NO: 15613 - DNA, 4809 bp, Oryza sativa
  Clone ID: TFbOSC34537j.C1.o1.fg
atggcagattcggattcacccgctacctgggagttgagcttaccccaatcggaggggtatgtcattgtgctgcaccagatgttgaggcgtctgcgataccctggttttccgtcataccgagtgaggcagtgtggcccagtttgggaggctcgggtcgagattcacccccgagtcccttccgagttggactacagctttcagacacgtcaccaccgagacctgccagagaccgcgatgcaggatgccgcccgggaggccttcctccgactcagctctatccaccgagccgagttagtgagtaccgagtttgctcaccacccgttccgggaggagggcaactcagtttgcacagttcagaacacgccctgctgctacaacccgatagtgactcggttgtcacgatgggctgaggcagtagatgactactacgaggaggctctgttggagattgacgaccaccagagacgtatgggagagttagagactgaggtgaccgacctcacagcgcagcagcttcagttggaggaggagcaccaggcttggggcagtgagatagactcactgaaggcacagctccaggtccacggcgaccagtaccagcagttgtctgaccagtacaacgatcgccgcgggatgatggatactcttgaggagcagctgagagagagtcaggagcacgtcagccagttggaggagcagcttcgagcagccaagatcagcactacaggggcttctacttccacagcagcaggccgtgaccgctacttcttcctcaccccgccgtacccaccagcgttccacgctctcctgggagaggctagtatgctagctaccgagtcagcaccctacctagtggaccctacagcagcacagccacctgttccggagttggtgcacactccactggtccctacaccttccccgcagctgggttccggtttggagactccgatccagatcgactcggagacagaggagaccgacaccgagccggagatcgagccagacatcactgatccttcagaggatgaggctcctgttccccgcatcaccttccttggaggccctcgcaccctcagcactgctcgcaagagcacacgacctccgggcaagaggcccaagccagatccagaggccactacttctgagccgtggggactcagggtcattgagaaaaagctaactcttgttcgagtacgtgaggccgataaagtgatctttgcggcaaaccaattggaaggaccagccggagactggtgggatacctacaaggaagcccgagaagacggatcacgagagtttccagagcctgatcaacaaggtcgtcaggctagagaacgatcaaaggacggggaacacaaccgcaagaggaggcttgctatgagtcgcccacctcagacagtgcctcagcgactcaagggagccactccgtccggatggaagccccctgtcgtggtgaccaaccgtcccgctgcacctagcaacttcaacaggccagttgcacttcagaaccgcacccctacaccaactttggctgcccctggagccaagaagaatgtggactgcttcaactgtggggaatacgggcactacgctaacaactgccctcatccacgcaaaacccctgtccgaactggcgcgaatgcaatgactgttcgcggcactactacccctactgtcgggcgaggcctattcaagactccgcaatcgaacaggaccaccactggatttgggcgcggacaagtgaaccatgtccgagctgaagaggcccaggaagatcagggcgtactaatgggtatgttctctatcaattccaccccggttaaagttctcttcgattctggtgcatcgcattcatttatatctctgaaggctagtcaaaagcacaacttgaccctcgtgggacttagaaagcctatgatagtacactcacctgggggcgagataactgtgagtcatgcttgcatagacgtaccaattctccttagggatgtggtatttccctccaatcttatggtgctaataccccaaactcttgatgtcattttgggtatggattggttagcaaagcatacaggagtaattgactgtagacgtagagaagttaccctgaccacaccctggggatcggatatgcgagcaaccatggatcaagatcctaggctaaccgaacgtgccggaggtatatttaccatgctacccctaaagggaatgcccgtagtgcagcgatttcctgatgtgttcccagaagatttacctgggatgccaccagatcgtgacatagagttcattatcgacctgatacccggaactacccccatatccaagagaccatatcggatgccggtcaatgagttagaagaacttaaaaagcaaatcagggagttgcaagagaagggatttgtacgccccagttcgtcaccttggggagccccagtgttgtttgttaaaaagaaagacggtagcatgagaatatgtgtagactaccgatcactgaacgaagtaactatcaaaaacaagtatccactaccacggattgatgacctcttcgaccaacttaagggagctaaggtgttttcaacgatagaccttcgatcaggataccaccaactgaagattaggaccgaggatatccccaaaaccgcgttttcaacacgctatgggttgtatgaattcacagtaatgtcgtttggtctaaccaatgccccggcatacttcatgaatcttatgaacaaagtattcatggattacttggataagtttgtggtggtattcatcgatgacattctgatctactccaaagatgaagaagaacatgcggaacacttaagattggttctccagaaactccgaaagcacaagttatacaaaaaattcagcaagtgcgaattttggttgaaggaagtcgcttttctgggtcacgtaatctcagccggtggagtagcagtggaccctgctaaagtggaggctgtcacggaatggaaagcacccaaatctgtgactgaaattcggagttttctaggcttggctggatactaccgaaggttcattgaagggttctctaagatagcccgaccgatgacacaactactcaagaaggaaaagaagtttgtatggtcagaacaatgtcaggaaagctttgaacagcttaaagaaaagctgacctcggcacctattttagttcttcccgacatcaggaaagactttgttatatattgtgatgcgtcaaggcaaggactaggaggagtactgatgcaggacggaaaagttgtggcctatgcgtcgcgacaattacgaccacatgaggaaaactaccctacccatgacctagaactcgcagctgtggttcatgcgctaaagatttggagacattacctaattggaaaccattgcgatatctacactgaccacaagagtctaaagtatatcttcacccagtcagatctcaacttgaggcaaagacgatggttagaattaatcaaggactatgatttagaggttcactatcacccaggcaaagcaaacgttgtggccgacgctctgagtcgtaagagccattacaatcatctgagaatggaagggatggtccctgagcttagggaggaaatagctcagctgaacctacatatagtgcctcatggacggataaacaccctggacattcaacctcttttgagaacccaaatagaagaagcccagaaggacaacgaggaggtccgagaggtgaaggaacgcttagctgcaggacgtgcaaaagaattttcaaccgacggaaaagacgttctatggtataaaaagagaatttacgtacccgaacagggtggactgaggggattaattttaaaggaagctcacgagtcggcatactcattacaccccggaagtaccaaaatgtaccaggatttgaaggagggctactggtggcccaacatgaagagagatgtggccgaatacgtagcactttgcgacgtatgccaaaaggtgaaggctgaacaccagaggccggcaggtttgttgcaacctctcaggattcccgaatggaaatgggatgagataggcatggattttattgttggattgcccaaaaccgcaacaggatatgattccatttgggtgatcgtggatcgactcaacaagacggcaagattcatccccgtcaagacaaactatagcagtgcaaaactcgccgagttgtacatgaccaggatagtgtgtcttcatggtatacctaagaagattatatctgatcgaggcacacaatttacctcacatttctgggagaaagtccatgaagccctgggaagttacctcgcatttagcaccgcttatcatccacagacagatggccagacggagagaaccaaccagactggagaacgggcggtatttgggcctgacattattcaagaagcagaagaaaaggttcgcttgatccgtgatcgtctaaaagtagcacaatcacgacaaaagagttacgccgacactcgaagaagaaacctggaatttaaggaaggagattacgtttatctaaaggtttctccgatgagaggaacaaaaaggtttaaggttaaaggaaaactggcaccaagatatgtggggccattccagatcattgccaggcgaggagaagtcgcatatcagttacagctaccagaatatatcgccgatgtgcacccagtcttccatgtgtcccaattaaagaaatgcttacgagtgccggaagaacaagctccgctggaagagattcacattagcaatgatctcacatatccagaacacccgatccggatattggatgaagcagattag

SEQ ID NO: 15614 - DNA, 4703 bp, Oryza sativa
  Clone ID: TFbOSC400236j.C1.o2.np
atgcaggatgcagcccgggaggccttcctccgacttagctctatccaccgagctgagttggctagtactgagtttgctcaccacccgtttcgagaggagagcaactccgtctgcacagttcaggacacaccttgctgctacaacccgatagtgacccgactgtcacgatgggctgaggcagtagacgacttttacgaggaggctctgttagagatcaacgaccagcagaggcgtgttggagagttagagaccgaggtgactgacctcacagtgcagcagcttcagctggaggaggagcaccaggcttggggcactgggttgcagtatggagactccgatccaggtcgactccgagacagaggagaccaacaccgagccagagatcgagccagacatcactgatccttcagaggatgagacccctgttccccgcatcaccttcatcggaggcccttgcaccctcagcactgctcacaagaacacacgacctccgggcaagaagcccaagccagatccagaggccactacttccgagccgtggggactcagttcccatcaaaacaactcccttaatgggataaaaccataagagctagttagaaaattatgatacttacttaatcggcctacacagatggcaagccgacgtcgggcgtcaaccagcaatgaagaaacttagacacctgacttaaccaccctggccggagttatggccactcaaacccaacttctgcaagccattgcaaataatcaaggcaaccgcggcggatcgagctttggagagtttgtgaggaccaagccacctacgttcgctacggcagacgagcccatggaggcagaagattggctacgcatcatagagaagaaactgactcttgtgcgggtacgcgaagccgacaaagtgatcttcgcagtaaaccaactggagggacccgctggtgattagtgggatacttacaaggaagctcgggaagaggatgctggagaacccacttgggaagagttcactgcagcattctgcgagaactttgtgcctgctgcggtaatgcgtatgaagaacgagtttagaaggctacgacaagggaacacaacggtgcaagaatatctgaaccggttcactcagttggcccgctatgcaattggagacctcgcagatgaagaggaaaagattgacaagttcatagaagggctgaatgatgaattgcatggacctatgattgggcaagaccatgagagcttccagagcctgatcaacaaagtcgttaggctggagaacgatcaaaggactgtagagcacaaccgaaagaggaggcttgctatgaatcgcccacctcagggagtgcctcagcgactcaagggagccccttcgtctgggtggaaaccccctattgtggcgaccaaccgccccgccgcacctagcaatttcaacaggccgattgcgattcagaaccacacccctacaccaactttggctgcccttggagccaagaagaatgtggactgtttcaactgcggggagtatgggcactacgccaacaactgccctcatccacgcaaaactcctgtccgtactggcgctaatgcaatgactgttcgtggaactactacccctgctgctagacgaggtctattcaagactccgcaaacaaacaggaccgctaccggatttggacgcggacaagctagtcaaaagcacaacttaaccctagtgggacttagaaagcctatgatagtacactcacctgggggcgagataactggatgtggtgtttccctccaaccttatggttttgataccccagaccctggatgtcatattgggtatggattggttaacaaagaacagagggaagatttacctgggatgccaccagatcgtgacatagagttcattattgatctgataccaggaactgcccccatatccaagagaccttatcggatgccggtcaatgagttggaggaacttaaaaagcaaatcagagagttgcaagaaaagggatttgtacgccccagttcgtcaccttggggagccccagtgctattcgtcaagaagaaagatggtagcatgaggatgtgtgtagactaccgttcactgaacgaggtaactatcaaaaacaagtatccactaccatggattgatgatcttttttatcaactcaagggagctaaggtgttctctaagtttgaccttcgatcaggataccaccaattgaaaattaagaccggggatatatccaagactgcgttttcaacatgctatagattgtatgagttcacagttatgtcgtttgggttaaccaacgccccggcatgctttatgaatctcatgaacaaagtgttcatggattacttggacaaatttgtagtagtattcatcgatgatattttaatttactccaaagatgaggaagaacatgcggaacacttgcgattggtactcgagaaacttcggaagcataaattatatgcaaagtttagcaaatgtgagttctggttaaaagaagtcgcttttctaggccacgtaatctcagccggtggagtagcagtggatcctgccaaagtggaggctgttacggaatagaaagcacccaaatctgtgactgaaattcggacttttctaggcttggccggatactaccgaaggtttattgaggggttctctaagatagcccgaccaatgacacaactactcaagaaggaaaagaaatttgtgtggtcaggacagtgtcaggaaagctttgagcagctcaaagaaaagctgaccttggcgcctattctagttcttcccgacatcaggaaaaactttgttatatattatgatgcatcaaggcaaggactaggaggagtactgatgcaggacggaaaggttgtggcctatgcgtcgcgacaattgcgaccacatgaggaaaactaccctacccatgacctagaactcgcagttgtggttcatgcactaaagatttggagacattatctgattggaaatcattgcgatatctacactgaccacaagagtctgaagtatatttttacccagtcagatctcaacttaaggcaaaggcgatggctggaattaatcaaggattatgacttagaggttcactatcaccccggcaaggcaaacgttgtggccgatgctttgagtcggaagagccattgcaatcatctgagaacggaagggatggcccctgagcttaaggaggaaatggcccagctaaacctacatatagtaccccacggacagataaacacactggacgttcaacctcttttgagaacccaaatagaagaagcccagaaggacaacgaggaaatccgagaagtgaaggaacgcttagctgcaggacgtgcaaaggaattttcaaccgatgaaaaaggtgttctatggtataaaaagaggatctatgtacccgaacaggggggactgagaggattaatcctaaaggaagctcacgaatcggcatattcattgcaccccggaagtaccaagatgtaccaggatctgaaggaaggatactggtggcccaatatgaagagatgtggccgaatacgtagcactctgtgacgtgtgccaaaaggtgaaggctgagcatcagcgaccggcaggtttgctgcaaccccttagaattcccgagtggaaatgggatgagataggtatggattttattgttggattgcccaagaccgcaacaggatatgattccatttgggtgatcgtggatcgactcaccaagacggcgagattcattcccgttaagacaaattatagcagtgccaagctcgccgagttatacatgaccaggatagtatgtcttcatggtgtacctaagagaattatatccgatcgaggcacacagtttacctcgcatttctgggagaaagtacatgaagccctaggaagttaccttgcgtttagcaccgcttatcacccacaaatagatggccagacagagagaacaaaccagctcttggaggacatgctgagagcttgtgctctggattttagcaaggattgggagatatgtttgccctacgccgaattctcctataacaacagctttcaagcaagcctaaaaatgccacccaatgaggcattgtttggtcgacgatgtcgaaccccgctaatgtggtccgagacaggtgaacgggcggtatttggacctgacattatcaacgaggccgaagaaaaggttcgtctgattcgagaccgtttaaaagtggcacaatcacggcagaagagttacgccgacacccgaagaagaaacctggaatttaaggaaggagattatgtttagctgaaggtttctccgatgagaggcacgaaaaggtttaaggtcaaaggaaaactagcgccaaggtatgtgggacctttccaaatcacggctagacggggagaagtcgcatatcagttacagctaccagagaatatcgctgatgtgcacccagtcttccatgtgtctcaattaaagaaatgcttactagtgccggaagaacaagctccgctggaagagattcacattagcaatgatctcacgtatccagaacacccgatccggatattggatgaagccgaaaagaggactaggagcaaagtgtggcgtgtgtacaaggtacaatggagtaatcacactgaggacgaagccacctgggaaagcgaagaattcctgaggacggaatacccgcatctattcgaaaactgg

SEQ ID NO: 15615 - DNA, 4248 bp, Oryza sativa
  Clone ID: TFbOSC400304j.C1.o3.fg
atggcaagccgacgtcgggcgtcaatcagcaatgaagaaactcaaacacctgacctaaccaccctggccggagttatggccactcaaacccaacttctgcaagccattgcaaacaaccaaggcaaccgcggacgatcaagctttggagagtttatgaggaccaagccacccacgttcactacggcagacgagcccatggaggcagaagattggctacgcatcatagagaagaaactgactcttgtccgggtacgcgaagccgacaaagtgatcttcgcagtaaaccaactggagggacccgctggtgataggtgggatacttacaaggaagctcgggaagaggatgctggagaacccacttgggaagagttcactgcagcatttcaagagaacttcgtgcctgctgcggtaatgcgtatgaagaagaacgagtttagaaggatgcgacaagggaacacaacggtgcaggaatatctgaaccggttcactcagttggcccgctatgcaattggagacctcgcagatgaagaggaaaagatcgacaagttcatagaagggctgaatgatgaattgcgcggacctatgattgggcaagaccatgagagcttccagagcctgatcaacaaagtcgttaggctggagaacgatcaaaggactgtagagcacaaccacaagaggaggcttgctatgaatcgcccacctcagggagtgcctcagcgactcaagggagccacttcgtctgggtggaagccccctattgtggcacccaaccgtcccgccgcgcctagtaatttcaacaggccggttgtgattcagaaccgcacccctacaccaactctggctgcccctggagccaagaagaatgtggactgcttcaactgcggggagtatgggcactacgccaacaactgccctcatccacgcaaaactcctgtccgtactggcgctaatgcaatgactgttcgtggaactactacccctgctgccggacgaggtctattcaagactccgcaaactaacaggaccgctaccggatttggacgcggacaagtgaaccatgttcgagctgaagaggcccaggaagaccagggcgtactaatgggtatgttctctatcaattccaccccggttaaagttctcttcgattctggtgcatcgcattcattcatatctcggaaggctagtcaaaagcacaacttaaccctagtgggacttagaaagcctatgatagtacactcacctgggggcgagataactgtgagtcatgcttgcatagacgtacctattcgtcttagggatgtggtgtttccctccaaccttttggttttgatacctcagaccctggatgtcatattgggtatggattggttgacgaagaacagaggagtaatcgactgtagacgtagaaaagttaccctgaccacaccctggagatcggatatgagagcaaccatggatcaagatcctagactaatcgaacgtgccggaggcatatttaccatgctacccctgaaaggaatgcccatagtgcagcgatttcccgatgtgtttccagaagatttacctggaatgccaccagatcgtgacatagagttcattattgacctgatacccggaactgctcccatatccaagagaccttatcggatgccagtcaatgagttggaggaacttaaaaagcaaatcagagagttgcaagagaagggatttaacaagtatccacttccacggattgatgatcttttcgatcaacttaaaggagctaaggtgttctctaagattgaccttcgatcaggataccaccaattgaaaattaggaccggggatgtacccaagactgcgttctcaacacgctatggattatatgagttcacagtaatgtcgtttggattaaccaacaccccggcatactttatgaatcttatgaacaaagtgttcatggattacttggacaaatttgtggtagtattcatcgatgatattttaatctactccaaagacgaggaagagcatgtggagcacttgcggttggtactcgagaaacttcggaagcataaattatatgcaaagtttagtaaatgtgagttctggttaaaagaagtcgcctttctaggccacgtaatctcagccggtggagttgtagtggatcctgctaaagtggaggctgttacggaatggaaagcacccaaatctgtgactgaaattcggagttttctaggcttggccggatactaccgaaggttcattgaggggttctctaagataacccgaccaatgacacaactactcaagaaggaaaagaagtttgtgtggtcagaacagtgtcaggaaagctttgagcagctcaaagaaaagctgacctcggcgcctattctagactggggaggagtactgatgcaagaaggaaaggacgtggcttatgcatcgcgacaactgcgaccacacgaggaaaattaccctacccatgacctagaactagcagtcgtggttcatgagctaaagatttggagacactatttgattggaaaccattgcgatatctacactgactacaagagtctgaagtatattttcacccagtcagatctcaacttgaggcaaaggcgatggttggaactaatcaaggattatgatctagaggttcactatcacccaggcaaagcaaacattgtggccgacgctttaagtcgaaagagccattgcaatcatctgaggatggaagggataacccctgaacttaaggaggaaatagcccaactgaatttacatttagttccttatggtcaaataaacaccttggacatccagccccttttgaggacccagatagaggaagcccagaaggacaacggagagatccaagaggtgaaggagcgcatagccgctggttgtgcgaaagaattctcaattgatgagaaggaaacactatggtataagaagaggatttacgtacccgaacagggtggactgaggggattaattctaagggaagctcacgaatcagcatattcattacaccccggaagtacgaagatgtaccaggacctgaaggaaggatactggtggcccaacatgaaaagggatgtagcagaatacgtagcactctgcgacgtatgccagagggtgaaggccgagcaccagcgaccggcaggtttgctgcaaccccttaggattccagaatgcaaatgggacgagataggtatggactttatcgttggattgcataagaccgcaactggttacgattccatttgggtaatcgtggaccgactcactaagactgcaaggttcatccccgtcaagacaaattatagcggagccaagctagctgagttatacatgacaaggatagtatgtcttcatggtgtgcctaagagaattatatccgatcgaggcacacagtttacctcgcatttctgggaaaaagtacatgaagccctaggaagttaccttgcttttagcacagcttatcacccacaaacagatggccagacagagagaacaaaccaggtcttggaggacatgttgagagcttgtgctttggattttagcaaggattgggagaaatgtttgccctacgccgaattctcctacaacaacagtttccaagcgagcctaaagatgtcgccaaatgaggcattatttggtcgacgatgtcgtaccccactaatgtggtccgagactggagaacggacggtatttggacctgacattatccaagaagccgaagaaaaggttcgcctaatccgtgaccgtctaaaagtggcacaatcacgacaaaagagttacgctgacacccggagaagagatctagaatttaaggaaggggattatgtatatctgaaggtttctccgatgagaggtacaaaaatgtttaaggttaaagggaaactagcaccaagatatgtgggacctttccaaatcatcgctagacgaggagaagttgcatatcagttacagctaccagaaaatatcgctgatgtgcacccagttttccatgtgtctcaattaaagaagtgcttacgagtgccggaggaacaagctccgttggaagaaattcatattagcaatgatctcacgtatccagaacacccagtccggatattggatgaagcagaaaagaggactaggaccaaagtgtggcgtatgtacaaggtacaatggagtaatcatactgaggatgaagccacttgggaaagcgaagaattcttggagacagaatacccgcatctattcgaaatccgataa

SEQ ID NO: 15616 - DNA, 2023 bp, Oryza sativa
  Clone ID: TFbOSC400340j.C1.o1.np
atgggcgtaccccgctcagagggatacgtcatagagctacatcgggtgatgaggcgccttcggtaccccagatttccgatctaccgagtgagacaatgtggacccttttgggagggccggattgaggttcatccgcgagtcccttcagagtcagactacagcttctcgacacgccaccgtcgtgacttaccggagaccgcgatgcaggacgcagcccgggaggccttcctctgacttagttctattcactgggcagagttagcgagtaccgagtttgctcaccatccgtttcgggaggagagcaactctgtctgcacagttcaggacataccttgctgctataacccgatggtgactcgactgtcccgatgggctgaggctgtggacgacttctacgaggaggccctgttggagatcgacgaccagcagaggcgtatgggagagttggagaccaaggtaactgacctcacagcacaacagcttcagctagaggaggagcatcaggcttggggcagcgagatagactcgctgaaggcacagctccagccagggtccagtttagagactccgattcaggtcgactccgagacagaggggaccgacaccgagccagagatagagccggacatcactgatccttcagaggacgcgactcctgtcccccgcattaccttcatcggaggccctcgtaccctcagcaatgcccgcaagagcacacgacctccgggcaagaagcccaagccagatttagaggccactacttccgagccgtggggactccgcatcatagagaagaaactgactcttgtccgggtacgcgaagccgacaaagtgatcttcgcagtaaaccaactggagggacccgttggtgataggtgggatacttacaaggaagctcgggaaaaggatgctggagaacccacttgggaagagttcactgcagcatttcaagagaacttcgtgcctgctgcggtaatgcgtatgaagaagaacgagtttagaaggatgcgacaagggaacacaacggtgcaggaatatctgaaccggttcactcagttggcccgctatgcaattggagacctcgcagatgaagaggaaaagatcgacaagttcatagaagggctgaatgatgaattgcgcggacctatgattgggcaagaccatgagagcttccagagcctgatcaacaaagtcgttaggctggagaacgatcaaaggactgtagagcacaaccacaagaggaggcttgctatgaatcgcccacctcagggagtgcctcagcgactcaagggagccacttcgtctgggtggaagccccctattgtggcacccaaccgtcccgccgcgcctagtaatttcaacaggccggttgtgattcagaaccgcacccctacaccaactctggctgcccctggagccaagaagaatgtggactgcttcaactgcggggagtatgggcactacgccaacaactgccctcatccacgcaaaactcctgtccgtactggcgctaatgcaatgactgttcgtggaactactacccctgctgccggacgaggtctattcaagactccgcaaactaacaggaccgctaccggatttggacgcggacaagtgaaccatgttcgagctgaagaggcccaggaagaccagggcgtactaatgggtatgttctctatcaattccaccccggttaaagttctcttcgattctggtgcatcgcattcattcatatctcggaaggctagtcaaaagcacaacttaaccctagtgggacttgaaagcctatgatagtacactcacctgggggcgagataactgtgagtcatgcttgcatagacgtacctattcgtcttagggatgtggtgtttccctccaaccttttggttttgatacctcagaccctggatgtcatattgggtatggattggttgacgaagaacagaggagtaatcgactgtagacgtagaaaagttaccctgaccacaccctggagatcggatatgagagcaaccatggatca

SEQ ID NO: 15617 - DNA, 4710 bp, Oryza sativa
  Clone ID: TFbOSC400724j.C1.o13.fg
atgcaggatgcagcccgggaggccttcctccgacttagctctatccaccgagctgagttggcgagtactgagtttgctcaccacccgtttcgagaggagagcaactccgtctgcacggctcaggacacaccttgctgctacaacccgatagtgactcgactgtcacgatgggctgaggcagtagacgacttttacgaggaggctctgttagagatcaacgaccagcagaggcgtgtgggagagttagagaccgaggtgactgacctcacagtgcagcagcttcagctagaggaggagcaccaggcttggggtactaggttcgagtttggagactccgatccaggtcgactccgagacagaggggaccgacaccgagcagagatcgagccagacatcactgatccttcagaggatgagacccctgttccccgcatcaccttcctcggacgccctcacaccctcagcactgcccgcaagagcacacgacccccgggcaagaagcccaagccagatccagaggccactacttctgagccgtggggactcagttcacaccaaaacaactcccttaatgggataaaaccacaagagctagttagaaaattaggatacttacttaatcggcctacacagatggcaagccgacgtcgggcgtcaaccaacaatgaagaaactcagacacctgacctaaccaccctggccggagttatggccactcaaacccaacttctgcaagccattgcaaatgaccaaggcaaccgcggcggatcgagctttggagagtttatgaggaccaaaccacccacattcgctatggcagacaagcctatggaggcagaagattggctacgtatcatagagaagaaactgacccttgtccgggtacgcgaagccgacaaagtgatcttcgtagtaaaccaactggagggacccgctggtgattggtgggatacttacaaggaagctcgggaagaggatgctggagaacccacttgggaagagttcactgcagcatttcatgagaacttcgtgcctgctgcggtaatgcgtatgaagaagaacgagtttagaaggctgcaacaagggaacacaacggtgcaggaatatctaaaccgattcactcagttggcccgctatgcaattggagacctcgcaaatgaagaagaaaagatcgacaagttcatagaagggctgaatgatgagttgcgtggacctatgattgggcaagatcatgagagtttccggagcctaatcaacaaggtcgttaggctggagaacgatcaaaggactgtagggcacaaccgcaagaggaggcttgctatgaattgcccacctcagggagtgcctcagcgacacaagggagccacttcgtctgggtggaagccccctattgtggcaaccaaccgccccgccgcacctagaaatttcaacaggccggttgcgattcagaatcgcacccctacaccaactctggctgcccctggagccaagaagaatgtggactgcttcaattgcggggagtatgggcactacgccaacaactgccctcatccacgcaaaactcctgtccatactggcgctaatgcaatgactgttagtggaactactgcccctgctgccggacgaggactattcaagactccgcaaactaacaggaccgctaccagatttggacgcggacaagctagtcaaaaacacaacttaaccctagtgggacttagaaagcctatgatagtacactcacctgggggcgagataactggatgtggtgtttccctccaaccttatggttttgataccccagaccgtgggtgtcatattgggtatggattggttaacaaagaacagagggaagatttacctgggatgccaccagatcgtgacatagagttcattattgatctgatacccggaactgctcccatatccaagagaccttatcggatgccagtcaatgagttggaggaacttaaaaagcaaatcagagaattgcaagaaaagggatttgtacgccccagttcgtcaccttggggagccccagtgctattcgtcaagaagaaagatggtagcatgaggatgtgtgtagactaccgttcactaaacgaagtaactatcaagaacaagtatccactaccatggattgatgatctttttgatcaactcaaaggagctaaggtgttctctaagattgaccttcgatcaggataccaccaattgaaaattaggaccggggatatacccaagaccgcgttttcaacacgctatggattgtatgagttcacagtaatgtcgtttgggttaaccaacgccccggcatactttatgaatcttatgaacaaagtgttcatggattacttggacaaatttgtggtagtattcattgatgatattctaatctactccaaagatgaggacgaacatgcggaacacttgcgattggtactcgagaaacttcggaagcataaattatatgcaaagtttagtaaatgtgagttctggttaaaagaagtcgcttttctaggccacgtaatctcagccggtggagtagcaatggatcctgctaaagttgaggccgttacggaatggaaagcacccaaatttgtgactgaaattcggagttttataggcttagccggatactaccgaaggtttattgaaggattctctaagatagcccgaccaatgacacaactactcaagaaggaaaagaagtttgtgtggttagaacagtgtcaggaaagctttgagcagctcaaagaaaagctgacctcgtcgcctattttagttcttccggacatctggaaagactttgttatatattgtgatgcatcaaggcagggactaggaggagtactgatgcaggacggaaaggttgtggcctatgcatcacgacaattgcgaccacatgaggaaaactaccctacccatgacctagaactcgcagctgtggttcatgcgctaaatatttggagacactatttgattggaaaccattgcgatatctacactgaccacaagagtctgaagtatattttcacccagtcagatctcaacttgaggcaaaggcgatggctggaattaatcaaggactatgatctagaggttcactatcaccccggcaaggccaacgttgtggccgacgctttgagtcggaagagccattgcaatcatctgaggacggaagggatggctcctgagcttaaggaggaaatagcccaactaaacctacatatggtacctcatggacagataaacaacctggacattcaacctcttttgagaacccaaatagaagaggcccagaaggacaacgaggaaatccgagaggtgaaggaacgtctagttgcaggatttgcaaaggaattttcaaccgacgagaaggatgtcctatggtataaaaagaggatttatgtacctgaacagggtggactgagaggattaattctaaaggaagctcacaaatcagcatattcattacaccccggaagtacgaagatgtaccaggatctgaaggaaggatactggtggcccaacatgaagagagatgtggcagaatacgtagcactctgtgacgtgtgccaaaaggtgaaggctgagcatcagcgaccggcaggtttgctgcaaccccttaggattcccgagtggaaatgggatgagataggtatggattttattgttggattgcccaagaccgcaacagggtacgattccatctgggtgattgtggatcgactcaccaagacggcaagattcatccccgtcaagacaaactataacagtgctaaactcaccgagttgtacatgaccaggatagtgtgtcttcatggtgtacctaagaggattatatctgatcgaggcacacagtttacctcgtatttctgggagaaagtacatgaagccctaggaagttaccttgcgtttagcacagcttatcatccacagacagatggccagacggagagaaccaaccaggttttggaggacatgctgagagtttgtgcaatggattttagcaaagactgggagagatgtttgccctacgccgaattctcctacaacaacagtttccaagcgagcctaaagatgtcgccaaatgaggcattatttggtcgacgatgtcgtaccccactaatgtggaccgagacaggtgaacgggcgatatttggacttgacattatcaaagaagccgaagaaaaggttcgcctgattcgagaccatctaaaagtggcacaatcacgacagaagagttacgccgacacccgaagaagaaacctggaattgaaggaaggagactacgtttatctaaaggtttctccgatgaggggaacgaaaaggtttaaggtcaaaggaaaactagcgccaagatatgtgagaccttttcaaatcacggctagacgaggagaagttgcataccagttacagctaccagaaaatatcgccgatgtgcacccagtctttcatgtgtctcagttaaagaagtgcttgcgagtgccggaagaacaagctacgttggaagaaattcatatcagcaatgatctcacgtatccagaacacctagtccggatattggatgaagctaaaaagaagactagaaccaaagtgtggcgtatgtacaaagtacaatggagtaatcacactgaggatgaagccacttgggaaagcgaagaattcttgaagacagaatacccccacctattcgaaaacctgtaa

SEQ ID NO: 15618 - DNA, 4628 bp, Oryza sativa
  Clone ID: TFbOSC401044j.C1.o17.np
ccgtcgcgacttaccggagaggcctttctccgaattagctctattcaccgagctgagttagcgagtaccgagtttgctcaccacccatttcgagaggagagcaactccgtctgcacagtccaggacacaccttgctgctacaacccgacagtgactcgactgtcccgatgggctgaggcagtagacgacttctacgaggaggctctgttagagatcgacgaccagtagaggcgtgtgggagagttagagagactgaggtgactgacctcacagtgcagcagcttcagctagaggaggagcacctggcttggggcactgggttccagtttggagactccaatccaggtcgactccgagacagaggggaccgacactaagccagagatagagccggacatcactgatctttcagaggatgagactcctgcccaccgcatcacctttgtcggaggccctcgtaccctcagcactgctcgcaagagcacacgacctccgggcaagaagcccaagccagatccagaggccactacttccgagccgtggggactcagttcacaatcaaaacaactcccttaacgggataaaaccaaaagggctagttaggaaaataggatacatacctcatcggcctacacagatggcaagccgacgtagggcgtcaaccagcaatgaagaaactcaagtacccgacctaaccaccctggccagagttatggccactcaaacccaacttctgcaagccattgcaaacaatcaagacaactgcggaggatcgagctttggagagtttatgaggactaagccacccactttcgctacggcagatgagcctatggaggcagaagattggctacgcatcatagagaagaaactgacccttgtccgggtgcgcgaagctgacaaagtgatcttcgcagtaaaccaactggagggaccaactggcgattggtgggatacttacaaggaagctcgggaagaagatgctggagaacccacttggggagaattcactacagcttttcgtgagaacttcgtgcctgctgcggtgatgcgcatgaagaagaataagttcagaaggctgcgacaaggaaacacaatggtgcaagaatatctgaaccggttcactcagttggcctgctacgcaatcggagatctcgcagatgaagaggaaaagatcgacaagttcatagaagggctgaatgatgaattgcgtggacctatgattgggcaagaccatgagagcttccagagcctgatcaacaaagtcattaggctggagaacgatcaaaggactgtagagcacaaccgcaagaggaggcttgctatgaatcgcccacctcagggacctcagcgactcaagggagccacttcgtctgggtggaagccccctattgtggcaaccaaccgtcccgccgcgcctagcaatttcaacaggctggttgcgattcagaaccacacccctacaccaactctggctacccctggagccaagaagaatgtggactgcttcaactgcggggagtatgggcactacgccaacaactgccctcatccacgcaaaactcctgtccgtactggtgctaatgcaatgactattcgtggaactactacccctgctgccggacgaggtctattcaagactccgcaaactaacaggaccgctaccggatttggacgcggacaagtgaaccatcgtggcaactcgacgacgacgacctcctcatctgccggcgccgccgcctcgccgtcgtcggtcaccgacgtcgctgctgtgtcggcggcttgcgacctcgcctctcctcttctcggcgttctcgccgccactggcgccaccagcggcaactcgaggatgaagctccccggtttaccaccggccagagtatttgaccattcaattcctttactgccaggagcaaaacctgttaacttgcgaccttattgatataatccagctcaaaaagatgagattgaacggcaagttgcggatatgctccaacagggaatcatacaacccagctctagtcctttttcatcacctgttctgctggtgcttaagaaggaccttacttggcgattctgtattgactaccgccatctcaatgcaattacagtcaagaatcgatatcctttgccaattatcgatgagttgcttgatgaattagcgggatcctgtttattcacgagtttcgatttaagagctggctatcatcagatccggatgcgcccagaagatgagcacaaaacagcgtttaagacgcacaatggacactacgaattcagggttatgtcctacggccttaccagtgccccggctaccttccaagtactgatgaatcagatcttagctccattgcttcgcaaaggagtgctggtgttcacagatgacatcttaatctatagtcaaaatttggatgaccatgtagctttgttgcgacgggtgtttcaattgctaactgatcatcaacttaaggtcaagagaagcaaatgctcgttcgcccgtgcaagtttaccatatcttgggcatgttattagtgcagaaggtgtggccactgactcgaagaatattcaagcggtgcacaactgggcagtaccctgtaatgtgaaggaagtgcgaggatttttgggtcttgcagggtactaccggaagtttgtacactcttttggtattatcagcaggccccttactgatctgctaaagaagaatgtggtgtttgtttggacgtcggagcatcaagcgtcttttgatgccttgaaggaagctctagtttctgctcctgtcctagcactaccggatttctccaaagtttttgaaattgagaccgatgcgtctgataagggtgttggcgctgtgttgatgcaagctggccatccgttagcctttctcagtaaatctttggggcctcgaaatcaagggctgtccacttacgagaaggagtgcttggcgattctcctcgctgtggaacaatagcgctcttacttgcagtttggagagtttataatccgtactgaccagcgcagtttgattcatttggatgatcagagattagtaacaccttggcaacagcgtgctctgaccaaactgcttggtttacaatacagaattgtctataagaagggactggaaaataaagctgccgatgctttgtcacgcaatcagtcaaccgatgtgtttcagctcagtgcggtgtcttcctgcattccagtttggttggcagatgtgcagctgggatatgctcaggatcaagtatcctctcaactgttgactaaactctcgtttaagtcctgaggcgctccctgagtacagattacagaatggcattatctaccataagggaaggatttggttgggtaacaatgtggagttacagactaaagttctgactgcactgcacaacgcagcaattgggggtcattctggtactcaggcaactttcagtcgagtgaataagttatttgcttggcctggactcagaaaagctgtgcgccagtttgtgtcggcttgttccatctgtaaacaggccaaagcagaacgggttcggtacccaggtttcttacagcctcttccagtgcccgagcatgcttggcaaacagtctcgttggatttcattgaaggcttacccagctcatcgggttttgattgtatacttgtggtggtcgacaaattcagtaagtatgctcactttgttgctcttgctcatcccttcacagccttcgacgtggctctggcctacctcaacaatgtctacaagatgcacggattgcctcagcatctgatctctgatcgagatcgtatctttaccagtgcattgtggaaggaactctttcagttggccgacactcaattgcaaatgagctctgcttatcatcctcaaacggacggacagaccgaacgggttaatcagtgcttggaaacctttttgagatgttttgtgcacgcttgcccaaagaggtggtatcgttggcttgctttggcggaattctggtacaatactgcctttcattcggctctggacaaatcaccatttgaggtattatatggtcattctcctcggcattttggtgtgttcgatcgctttgagtgtgctgttccagatttgcaagactggttgaaggaacgggaagtgattaccagtttgccgcgacaacatctgttacgagctcagcaaagtatgaagttacaggctgacaagaaacgttctgatcgtgagtttgcagttggtgactgggtgttcctgaaggcacagccgcatgctcagttctctatgacaggacgttctaatcacaaattggctttccgttattttggcccctttcagatcttggcgcgcattggaagtgtggcttatcgccttcaactaccgacaacttgtgctattcacccagtagtacatgtctcacagctccgtcaggcttcttcaccagctcctgactcgtcgattcaagacctgccagcgttaactgaagatgaagcgctaccagtccaaattcttgctcgtcgtgcagtcaagaaaggcgctggagctgtggaacaactcaagattcgctggtctggtcagacgtccgctgaagcaacctgggaggatggtgctgcactgcgtgcgcgtttccctgaagcaccggcttgggga

SEQ ID NO: 15619 - DNA, 4382 bp, Oryza sativa
  Clone ID: TFbOSC401051j.C1.o12.np
atggtgaacacgcgcaccggaagtggaagtggaagtggaagtggagctactaacaatggaggagaacccacgctagctcagattctggctcaacagacacaactgatcaacctgttagtgcagcaggcacagaatcagcaagcaaataatcagaaccagaatccacccccacctccccaaaataagctggcagatttcttacgtgtgagaccccctaccttttcaagcaccaccaatccagtagaagcaggagattggttgcatgcggtggagaagaagttggatttgatccagtgtactgagcaggagaaagtttcttttgcttcgcatcagttgcatggacccgctgctgaatggtgggatcattttcgccaaggcagggcgggaggagaacctattacttggcaggaattcacagctgcttttaagaagacgcatataccgtcaggtgttgtagctctaaagaagagagaatttagagcactcaaccagggatctcgttcggtcactgagtacctccatgattttaaccgtttagctcgctatgctccagaggatgttcgcaccgatgaagagcgtcaggagaagtttttagagggactaaatgatgagttgtcttatgctttgatggctacggatttccgggatttccaacaattggtggacaaggcgattcgtcaggaagacaataaccaaaggccgcgtctcattactggacctcaagctccatcgtaccctcaaggaggatcttcatctgttgcccgtccccaacgccagttctacaacaacaatactagtaatcgtggcaatgacaaccgcaatatggttgcttgtcctgcagcaactccagttcagaaccagcctgtcaggaaggaacagggaagcaagccagtgatatgctttaattgtggtgatccaggacattatgctgataagtgtcctaagcctcggcgtgtgaagaacgctccagtcccgaacaaccccaatgttccagcaccgaaggcacgtgttaatcatgttgcagcagcagaagctcagaatgcaccagatgttgttttgggtacgtttcctgttaactctatacccgcaactgtgctttttgattccggtgctacacattcctttttgtctaaaagttttgcaagcaaacatgggatggaagttgttagtcttgggagacctttactagttaataccccgggcaatcaggtattttcgacacagtattgtccttccgttactatagaaatagaagaagttcctttcccatcctctcttatcttgctagaatccaaagacctagatgttatcttagggatggattggttatctcgtcacagaggagttatagattgcgccaatcgtaaggtgactttaaccaatagcaatggggaaacagtttctttctttgcatcctctcctaaatctcatggtgtggtcttaaaccaagttgctctacaagagattcctatagtgcaagactacccagacgtgtttcccgaggatttgccaggtatgccacctaagagagacatagagtttcggatagacttggtacctggaaccaaccccatccataagagaccatacagaatggcagctaacgagttagctgaggtgaagaaacaggtggatgatttgcttcagaaaggatacatcagacccagtacttcgccgtggggagcaccagtcatctttgtggagaagaaagatcatactcaaagaatgtgtgtggattatcgagcgttgaatgaggttactatcaagaataaatatcctctacccagaattgatgacctgtttgatcaactcgaaggtgctacagttttctccaagatagatctccattctggatatcatcaacttcgaatccgtgaggaagatataccaaagaccgccttcacaactcggtatggtttgttcgaatgtaccgttatgtcgtttggactcactaatgccccagcctttttcatgaatctgatgaacaaggtgtttatggaatatttggataagtttgtcgtagtgtttattgatgacattcttatttactccaagacgaaggaagaacatgaagagcatcttcgtctagctttagagaaactacgtgagcatcagctttatgccaagttcagtaaatgtgaattttggttgtccgaagtaaagtttcttggtcatgtcatctcgtctggaggagtggcagtagatccaagcaatgtggagtcagtattaagttggaagcaacccaagacggtttcagaaattcgtagtttccttggacttgcagggtattaccgcaggtttattgagaacttttcaaagatcgccagaccaatgactcgtctgcttcagaaggaagtgaagtataagtggacggaggattgtgaacgaagtttccaagaactgaagaaaaggctagtgactgcgcctgtattaattttgcctgatacgaggaaaggtttccaagtgtattgtgatgcatcccgactcggtttgggttgtgtgttgatgcaagaaggaaaggtggttgcctatgcatctaggcaattacgtcctcatgagaataactacccaacgcatgacctggaattggcagctgtggtgcatgcattgaagatttggcgtcattatcttttcggtaaccgtacagagatatatacggatcataaaagtttgaagtacattttcactcaacctgatttgaacatgcgtcagcgaagatggttagagttgattaaagattatgatatggaaatccattatcacccggggaaagcaaatgttgtagccgatgcccttagcaggaaaagttactgtaatatgtcagaaggtagacgtttaccttgggagttatgccaagaatttgaaagttgaacttgggaatagtcagccaaggtttagtggctactttggaagctaaacctactctgtttgatcaaattagagaagctcaagtgaatgatcctgatatccaggaaataaagaagaacatgagaagaggtaaagccatcggttttgtagaagatgagcaaggaaccgtatggttaggagaaagaatttgcgtcccagataataaggagttgaaggataccatcatgaaagaagctcatgaaactttgtattcgattcaccctggaaacactaagatgtatcaggacttaaagcaacaattctggtgggccagtatgcgacgtgagatagcagaatatgtggctctgtgtgatgtatgtcagcgggtcaaggcagaacatcggaagccagctggtctgttacaaccgttgaagattccagagtggaagtgggaagaaataggaatggattttataaccggtctacacagaacgtcggcaggacatgattctatttgggtagtggttgataggttgacaaaagtcgctcatttcatacctgtcaagacaacctatacgggacataagcttgcagagttatatatggccagagtggtatgtttgcatggtgttcctaaaaagatagtgtcagatagaggtagccagtttacttcgaagttttggcagaaattacaattagaattgggtacccgtttgaatttcagtactgcttatcaccctcaaacagatggtcagacggaaagagtaaaccaaattttagaagatatgttgagagcctgtgttctagattttggtggaagttgggataagaatttgccgtacgcagaattctcatataacaatagttatcaagctagtttgcaaatggctccgtatgaagcattatatggtcgaaaatgtcgtacgccgctcctttgggatcaaaccggtgaacgtcaagtcttcgggacagacatattgcgacaggcagaagaaaaagtgaagattatccaagaaaggttgcgcgttgctcagtcacgtcagaagagctatgctgacaatcgtcgcagagatttggctttcgaagaaggagattatgtataccttcgggttacgccgttacgaggtgttcatcgttttcaaaccaaagggaaattggcaccgcgttttgtgggaccttttaagattgtgagtcgaagaggtgaagtagcttatcagttagagttgcctccgtcaatggcgggaatacatgacgtgttccacgtgtctcagctgaagaaatgtttacgtgtacctacggaggaagccgatcctgatcgtatagagcttcaagaagatttaacttatgttgagaagccagtaagaattttggaagaaagcgagaggaaaaccaggaatcgcgttatacggttctgtaaggttcagtggagtaatcattcagaagaagaagccacctgggagcgagaagatgaattgaagtcagctcatcctcatctattcgctagttcttctgaatctcgaggacgagattccgtt

SEQ ID NO: 15620 - DNA, 4899 bp, Oryza sativa
  Clone ID: TFbOSC401235j.C1.o43.np
atgacaagttggtatcagagccaccttgaccttaggataagccaaatgatgccgccccattcactgagaaatttgatcaaggtgttaggattcgtcagggagctgaggttgatggcttttgaggtaggctatgaagttgctcccgagtatcgccaaatttcccatgaccccgacgaggagaagtgtcgtgttcgtgtgacgttggctagtgatagtgaagaccttccgtcttttaagttcgaagctggaggaagatcatactgccatgcttgtcaagaagcagcgttggtggccattggagagttgcgtgaacactttgaagaagagttggattcatcagctttccagtatcatcctcacaagcctcatggtcaagactatggaatctatacctgtcctgatggtgaagagagtgccactctgatgcatgcggtgcatatgcttagtgctatggatgcagtaagtgtggaacgagacaaagcagctcatgacagggaaaactggaatcgaggcaagatttgcaagttggagagcaaggtgtaccgtctacagaaggaattagctgaacttaaaggagaaacgccgccgccaacacccaagcttcgcctcactccaagaaagagaatctgtccgccacctcgtctccagttagcttcgaagattcatgtgatgggtgaagctgtgcccgatcgtgctgaacctgtcatcgacatcataagtgatgaggaagaggaggaagatcctgaagaaagagagccagctactccagaggaagaagattcatcgcttcgttccgacgcaaggcgcaccaccaatccagtagaagcaggagattggctgcatgcggtggagaagaatttggatttgatccagtgtactgagcaggagaaagtttcttttgcttcgcatcaactgcatagacctgctgctgaatggtgggatcattttcgccaaggcagggctgaaggagagcctattacgtggcaggaattcatggccgctttcaagaagacacacataccaacgggtgttgtagctctaaagaagagagaatttagagcactcaaccagggatctcgttcggtcaccgagtacctccatgatttcaaccgtttagctcgctatgctccagaggatgttcgtaccgatgaggaacgtcaggagaagttcttggagggactgaatgatgagttgtcgtatgccttgatgtctacggatttccgggatttccagcagttggtggacaaggcgattcgtcaggaagacaagtataaccggatggagcagaagaagcacagggctgcccaattcaaggcacaacagggcagtaaccagaggccgcgtctcgttactggacctcaagctccaccgtaccctcaaggaggatcttcatcagttgtctgcccccaacgccagttctacaacaacaatactggtaatcgtggcaatgacaaccgtaacacggttgctcgtcctgcagcaactccagctcagaaccagcccgttaggaaggaacagggaagcaagccagtgatatgcttcaattgtggtgatccaggacattatgctgataagtgtcctaagcctcggcgtgtgaagaatgccccaaccccgaacaactctaatgttccagcaccgaaggcacgtgttaatcatgttgcagcagcagaagctcagaatgcaccagatgtggttttgggtacgtttcctgttaactctatacccgcaactgtgctttttgattccggtgctacacattcatttttgtctaaaagttttgcgagcaatcatgggatggaagttattagtcttgggagacctttactagttaataccccaggcaaccaagtattttcgacccagtattgtccttccgctaccatagaaatagaagaagttcctttcccatcctcgcttatcttgctagaatccaaagatctagatgttatcttagggatggactggttatctcgtcacagaggagttatagattgtgccaaccgtaaggtgaccttaaccagtagcaatggggaaaccgtttctttctttgtgtcctctcctaaatatcatggtgtgatcttaaaccaagttgctctacaagagattcccatagtacaagactaccccgacgtgtttcccgaggatttgccaggtatgccacctaagagggacatagagtttcggatagacttggtacctggaaccaaccctatccataagagaccatacagaatggcagctaatgagttagctgaggtgaagagacaggtggatgatttgcttcagaaaggatacatcagacccagtacttcgccatggggagcaccagtcatctttgtggagaagaaagatcatactcagagaatgtgcgtggattatcgagcgttgaatgaggtcactatcaagaataagtatcctctacccagaattgatgacctgttcgatcaactggaaggtgctacagttttctccaagatagatctccgttccggatatcatcaacttcgaatccgtgaggaagatataccaaagaccgccttcacaactcggtatggtttgttcgaatgtaccgttatgtcgtttggactcactaatgccccagcctttttcatgaatctgatgaacaaggtgttcatggaatatctggataagtttgtcgtggtgtttattgatgacattcttatttactctaagacgaaggaagaacatgaagagcatcttcgtctagctttagagaaactacgtgagcattagctttatgccaagttcagtaaatgtgaattttggttgtccgaagtgaagtttcttggtcatgtcatctcgtgtggaggagtggcagtagatccaagcaatgtggagtcagtattaagttggaagcaacccaagacggtttcagaaattcgtagtttccttggacttgctgggtattactgcaggtttattgagaacttttcaaagatcgccagaccaatgactcgtctgcttcagaaggaagtgaagtacaagtggacagaggattgtgaacgaagtttccaagaactgaagaaaaggctagtgactgcgcctgtgttaattttgcctgattcgaggaaaggtttccaagtgtattgtgatgcatcccgactcggtttgggttgtgtgttgatgcaagaaggaaaggtggttgcctatgcatctaggcaattacgtcctcatgagaataactacccaacgcatgacctagaattggcagctgtggtgcatgcattgaagatttggcgtcattatcttttcggtaaccgtacagagatgtatacggatcataaaagtttgaagtacattttcactcaacctgatttgaacatgcgtcagcgaagatggttagagttgattaaagattatgatatggaaatccactatcacccggggaaagcaaatgttgtagccgatgcccttagcaggaaaagctactgtaatatgtcagaaggtcgacatttaccttgggagttatgccaagaatttgaaaggttgaatttgggaatagtcagcaaaggttttgtggccgctttggaagctcaacctactctgtttgatcaagtgagagaagctcaagtgaatgatcctgatatacaagaaattaaaaagaacatgagaagaggaaaagccatcggttttgtagaagatgagcaaggaactgtgtggttaggagaaagaatttgcgtcccagaaaataaggagttgaaggatactatcatgaaagaagctcatgaaactttgtattccattcaccctagaagcactaagatgtaccaagacttaaagcaacaattctggtgggccagtatgcgacgtgagatagcagaatatgtggcactatgtgatgtatgtcagcgggtcaaggcagaacatcagaaaccagctggtctgttacaaccgttgaagattccagagtggaagtgggaagaaataggaatggattttataaccggtctacctagaacgtcggcaggacatgattctatttgggtagtggttgatcggttgacaaaagtcgctcacttcataccggtcaaaacaacctatacggggaataagcttgcagagttatacatggccagagtggtatgtttgcatggtgttcctaagaagatagtgtcagatagaggtagccagtttacttcgaagttctggcagaaattacaattagaattgggtacccgtttgaatttcagtactgcttatcaccctcaaacagatggtcagacggaaagagtaaaccaaattttagaagatatgttgagagcctgtgttctagattttggtggaagttgggataagaatttgccgtacgcggaattctcatataacaatagttatcaagctagtttgcaaatggctccgtatgaagcattatatggtcgaaagtgccgtacgccgctcctttgggatcaaaccggtgaacgtcaagtcttcgggacagacatattgcgacaggcagaagaaaaagtgaagattatccaataaaggttgcacgttgctcagtcacgacagaagagctatgccgacaatcgtcgtagagatttggcttttgaagaaggagattatgtataccttcgggttacgccgttacgaggtgttcatcgtttccaaaccaaagggaaattggcaccgcgttttgtgggaccttttaagattgtgagtcgaagaggtgaagtagcttatcagttagagttgtctccgtcaatggcgggaatacacgacgtgttccacgtgtcacagttgaagaaatgtttatgtgtacctacggaggaagcagatccagatcgtatagagcttcaagaagatttaacttatgttgagaagccagtcagaattttggaatttccgacgttccggaggagagcgtttccgttgaggaag

SEQ ID NO: 15621 - DNA, 4890 bp, Oryza sativa
  Clone ID: TFbOSC401235j.C1.o75.np
aaggtgggttgtgagcatatggttttgatggttgtgctcatgacaattaaggaccggttcgcgagctactgttgtgaaacatttatcgtgccaaccacaagccagcgtgggcaacggctttatcttttgtatagcatgattcattatagtgcgccagactgagaagtggcgagaagtccatgggggtcgttggggagtccatgccttgttttaaagggggtgattatgatccaggtacggtgcactgtagtgaattgtgttatgcgaggggtattgtcactactcctttccgagatgcctcgccattcaccgagaaatttgatcgaggtgttaggattcgtcagggagctgaggttgatggcttttgaagtaggctatgaggttgctcctgagtatcgtcagattccccatgaccccgacgaggagaagtgtcgtgttcgtgtgacgttggctagtgatagtgaagaccttccatcttttaagtttgaagctggaggaagatcgtactgccatgcttgtcaagaagtagctttggtggccattggagagttgcgacaacactttgaagaagagttggattcatcagctttccagtatcatcctcataagcctcatggtcaagactatggaacctatatctgtcctgatggtgaagagagtgctactctgatgcatgcggtgcatatgcttagtgctatggatgcagtaagtgtggagcgagacaaagcagctcatgaccgggaaaattggaatcgaggcaagatttgcaagttggagagcaaggtgtaccgtctacagaaggaattagctgaacttaaaggagaaatgccgccgccaacacccaagcttcgtctcgtcgcaagaaagagaacctgtccgccacctcgtctccagttagcttcgaagattcgcgtgatgggtgaagctgtgcccgatcgtgctgaacctgtcatcgacatcataagtgatgaggaagaggaggaagatcctgaagaaagagagccagctactccagaggaagaagattcatcgcttcgttccgacgcaaggtggaaggctggaggagaacctatcacttggcaggagttcacagctgcttttaagaagacgcatataccgtcaggtgttgtagctctaaagaagagggagtttagagcactcaatcagggatctcgttcagtcaccgagtacctccatgatttcaatcgtttagcgcgttatgctccagaggatgttcgcactgatgaggaacgtcaggagaagtttttggagggactgaatgataagttgtcttatgctttgatgtctacggatttccaggattttcagcagttggtggacaaagcgattcgccaggaagacaagtataaccgtatggagcagaagaagcgcagggctgcccaatttaaggcacaacagggcagtaaccagaggccgcgtctcgttactggacctcaagttccatcgtaccctcaaggaggatcttcatcagttgtccgtccccaacgccagttctacaacaacaatactggtaatcgtggcaatgacaaccgtaatgtggttgctcgtcctgcagcaactccagttcagaaccagcccgttaggagggaacagggaagcaagccagtgatatgcttcaattgtggtgatccgggacattatgctgataagtgtccgaagcctcggcgtgtgaagaacgctccagccccgaacaacttcaatgttccagcaccgaaggctcgtgtcaatcatgttgcagccgcagaagctcagaatgcaccagatgttgttttgggtacgtttcctgttaactctatacccgcaactgtgctttttgattccggtgctacacattcctttttgtgtaaaagttttgcaatcaaacatgggatggaagttgttagtcttgggagacctttactagttaataccccaggcaatcaagcattttcgacacggtattgtccttctgttactatagaaatagaagaagttcctttcccatcctctcttatcttgttagaatccaaagatctagatgttatcctagggatggactggttatctcgtcacagaggagttatagattgtgccaaccgtaaggtgactttaaccagtagcaatggggaaacagtttctttctttgcatcctctcctaaatctcatggtgaggtcttaaaccaagttgctctacaagagatacctatagtacaagactacccagatgtgtttccggaggatttgccaggtatgccacctaagagagatatagagtttcggatagacttggtacctggaactaaccctatccataagagaccgtacagaatggcagctaatgagttagctgaggtgaagaaacaggtggatgatttgattcagaaaggatacatcagacccagtacttcgccatggggagcaccagtcatctttgtggagaagaaagatcatactcagagaatgtgtgtggattatcgagcgttgaatgaggttactatcaagaataagtaccctttacccagaattgatgacttgttcgatcaactcgaaggtgctacagttttctctaagatagatctccgttctggatatcatcaacttcgaatccgtgaggaagatataccaaagaccgccttcacaactcggtatggtttgtttgagtgtaccgttatgtcatttggactcactaatgccccagcctttttcatgaatctgatgaacaaggtgtttatggaatatctggataagtttgtcgttgtgtttattgatgacattcttatttactccaagacgaaggaagaacatgaagagcatcttcgtctagctttagagaaactacgtgagcatcagctttatgccaagttcagtaaatgtgaattttggttgtccgaagtgaagtttcttggtcatgtcatctcgtctggaggagtggcagtagatccaagcaatgtggagtcagtgttaagttggaagcaacccaagacggtttcagaaattcgtagtttccttggacttgcagggtattaccgcaggtttgttgagaacttttcaaagatcgctagaccaatgactcgtctacttcagaaggatgtaaagcaattacgtcctcatgagaataattacccaacgcatgacctagagttggcagctgtggtgcatgcattgaagatttggcgtcattatcttttcggtaatcgtacagagatatatacggatcataaaagtttgaagtacattttcactcaacctgatttgaacatgcgacagcgaagatggttagagttgattaaggattatgatatggaaatccactatcacccgggaaaagcaaatgtggtagccgatgcccttagcaggaaaagttactgtaatatgtcagaagctcgatgtttaccttgggagttgtgccaagaatttgaaaggttgaacttgggaatagtcagcaaaggttttgtggctactttggaagctaaacctactttgtttgatcaaattagagaagctcaaatgaatgatcctgatatccaggaaataaagaagaacatgagaaggggtaaggccatcggttttgtagaagatgagcaaggaactgtgtggttaggagaaagaatttgtgtcccagaaaataaggagttgaagaatactatcatgaaagaagctcatgaaactttgtattccattcaccctggaagcactaagatgtaccaagacttaaagctacaattctggtgggctagtatgcgacgtgagatagcagaatatgtggctctatgtgatgtatgtcagcgggtcaaagcagaacatcagaaaccagctggtctgttacaaccgttgaagattccagagtggaagtgggaagaaataggaatggattttataaccggtctacccagaacgtcggcaggacatgattctatttgggtagtggttgatcggttgacaaaagtcgctcatttcataccgatcaaaacaacctatacgggacataagcttgcagaattatatatggccagagtggtatgtttgcaaggtgttcctaaaaagatagtgtcagatagaggtagccagtttacttcgatgttttggcagaaattacaatcagaattgggtacccgtttgaatttcagtactgcctatcatcctcaaacagatggtcagacggaaagagtaaaccaaattttagaagatatgttgagagcctgtgttctagattttggtggaagttgggataagaatttaccgtatgcggaattctcatataacaatagttatcaagctagtttgcaaatgtctccgaatgaagcattatatggtcgcaagtgctgtacgccgcttctttgggatcaaaccggtgaacgtcaagtttttgggacagacatattacgagaggcggaagaaaaagtgaagattatccaagaaaggttgcgcgttgctcagtcacgtcagaagagctatgccgacaatcgtcgtagagatttggctttcgaagaaggagattatgtatatcttcgggttacgccgttacgaggtgttcatcgtttttagaccaaagggaaattggcaccgcgttttgtgggaccttttaagattgtgagtcgaagaggtgaagtagcttaccagttagagttgcctccgtcaatggcgggaatacatgatgtgtttcatgtgtctcagttgaagaaatgtttacgtgtacctacggaggaagcagatcctggtcgtatagagcttcaggaagatttaacttatgtcgagaagccagtcagaatcttggaatttccgacgtttcggaggagagcgtttccgttgaggaaggttccgaagcatttgtggaagcccaaggcaagtcacacagatcccaaacaaccctttgagcatgttgatcccgtt

SEQ ID NO: 15622 - DNA, 5337 bp, Oryza sativa
  Clone ID: TFbOSC401235j.C1.o76.fg
atgggggtcgctggggagtccatgccttgttttaaagggggtgattatgatccaggtacggtgcactgtagtgaattgtgttatgcgaggggtattgtcactactcctttccgaggtatcgtggtggtactgaggcacatgatgcctcgccattcaccgagaaatttgatcgaggtgttaggattcgtcagggagctgaggttgatggcttttgaggtgggctatgaagttgctcctgagtatcgccaaattcctcatgaccccgacgaggagaaatgtcgtgttcgtgtgacattggctagtgatagtgaagaccttccgtcctttaagtttgaagctggaggaagatcgtactgccatgcttgtcaagaagtagctttggtggccattggagagttgcgtcaacactttgaagaagagttggattcatcagctttccagtatcatcctcacaagcctcatggccaagattatggaacctatacctgtccggatggtgaagagagtgccactttggtgcatgtggtgcatatgcttagtgctatggatgcagtaagtgtggagcgagacaaagcagctcatgaccgggaaaactggaatcgaggcaagatttgcaagttgaagagcaaggtgcaccgtctacagaaggaattagctgaacttaaaggagaaatgccgccgccaacatccaagcttcgcctcactgcaagaaagagaacctgtccgccacctcgtctccagttagcttcgaagattcgcgcgatgggtgacgctgtgcccgttcgtgctgaacctgtcatcgacatcataagtgatgaggaagaagaggaagatcctgaagaaagagagccagctactccagaggaagaagattcatcgcttcgttccgacgcaagttgttgcttacatcatgggtgggatatggtgaacacgcgcaccggcactggaagtggaagtggaagtggagccaataacaatgagggagaaccaacgctagcccagattctggcccaacaaacacaactgatcaatctgttagtgcagcaggcacagaatcagcagggaaataatcagaaccagaatccacccccacctccccaaaacaaattggcagatttcttacgtgtgagaccccctaccttctcaagcaccaccaatccagttgaagcaggagattggctgcatgcagtggagaagaagttggatttgattcagtgtactgagcaagagaaagtttcttttgcttcgcatcagttgcatggacccgctgctgaatggtgggatcattttcgccaaggcagggctggaggagaacctatcacttggcaggagttcacagctgcttttaagaagacgcatataccgtcaggtgttgtagctctaaagaagagggagtttagagcactcaatcagggatctcgttcagtcaccaagtacctccatgatttcaatcgtttagcgtgttatgctccagaggatgtttgcactgatgaggaacgtcaggagaagtttttggaaggactaaatgatgagttgtcttatgctttgatgtctacggatttccgggatttccaacaattggtggacaaggcgattcgtcaggaagacaaggctgcccaatttaaggcacaacagggcagtaaccagaggccgcgtctcgttactggacctcaagttccatcgtaccctcaaggaggatcttcatcagttgtccgtccccaacgccagttctacaacaacaatactggtaatcgtggcaatgacaaccgtaatgtggttgctcgtcctgcagcaactccagttcagaaccagcccgttaggagggaacagggaagcaagccagtgatatgcttcaattgtggtgatccgggacattatgctgataagtgtccgaagcctcggcgtgtgaagaacgctccagccccgaacaacttcaatgttccagcaccgaaggctcgtgtcaatcatgttgcagccgcagaagctcagaatgcaccagatgttgttttgggtacgtttcctgttaactctatacccgcaactgtgctatttgattccggtgctacacattcctttttgtctaaaagttttgcaatcaaacatgggatggaagttgttagtcttgggagacctttactagttaataccccaggcaatcaagcattttcgacacggtattgtccttctgttactatagaaatagaagaagttcctttcccatcctctcttatcttgctagaatccaaagatctagatgttatcctagggatggactggttatctcgtcacagaggagttatagattgtgccaaccgtaaggtgactttaaccagtagcaatggggaaacagtttctttctttgcatcctctcctaaatctcatggtgaggtcttaaaccaagttgctctacaagagatacctatagtacaagactacccagatgtgtttccggaggatttgccaggtatgccacctaagagagatatagagtttcggatagacttggtacctggaactaaccctatccataagagaccgtacagaatggcagctaatgagttagctgaggtgaagaaacaggtggatgatttgcttcagaaaggatacatcagacccagtacttcgccatggggagcaccagtcatctttgtggagaagaaagatcatactcagagaatgtgcgtggattatcgagcgttgaatgaggttactatcaagaataagtaccctttacccagaattgatgacctgttcgatcaactcgaaggtgctacagttttctctaagatagatctccgttctggatatcatcaacttcgaatccgtgaggaagatataccaaagaccgccttcacaactcggtatggtttgtttgagtgtaccgttatgtcatttggactcactaatgccccagcctttttcatgaatctgatgaacaaggtgtttatggaatatctggataagtttgtcgttgtgtttattgatgacattcttatttactccaagacgaaggaagaacatgaagagcatcttcgtctagctttagagaaactacgtgagcatcagctttatgccaagttcagtaaatgtgaattttggttgtccgaagtgaagtttcttggtcatgtcatctcgtctggaggagtggcagtagatccaagcaatgtggagtcagtgttaagttggaagcaacccaagacggtttcagaaattcgtagtttccttggacttgcagggtattaccgcaggtttattgagaacttttcaaagatcgctagaccaatgactcgtctgcttcagaaggatgtaaagtacaagtggacggaggattgtgaacaaagtttccaagaactgaagaaaaggctagtgactgcgcctgtgttaattttacctgattcgaggaagggtttccaagtgtattgtgatgcatcccgacacggtttgggttgtgtgttgatgcaagaaggaaaggtggttgcttatgcatctaggcaattatgtcctcatgagaataattacccaacgcatgacctagagttggcagctgtggtgcatgcattgaagatttggcgtcattatcttttcggtaatcgtacagagatatatacggatcataaaagtttgaagtacattttcactcaacctgatttgaacatgcgacagcgaagatggttagagttgattaaggattatgatatggaaatccactatcacccgggaaaagcaaatgtggtagccgatgcccttagcaggaaaagttactgtaatatgtcagaaggtcgatgtttaccttgggagttgtgccaagaatttgaaaggttgaacttgggaatagtcagcaaaggttttgtggctacattggaagctaaacctactttgtttgatcaaattagagaagctcaaatgaatgatcctgatatccaggaaataaagaagaacatgagaaggggtaaggccatcggttttgtagaagatgagcaaggaactgtgtggttaggagaaagaatttgtgtcccagaaaataaggagttgaagaatactatcatgaaagaagctcatgaaactttgtattccattcaccctggaagcactaagatgtaccaagacttaaagctacaattctggtgggctagtatgcgacgtgagatagcagaatatgtggctctatgtgatgtatgtcagcgggtcaaagcagaacatcagaaaccagctggtctgttacaaccgttgaagattccagagtggaagtgggaagaaataggaatggattttataaccggtctacccagaacgtcggcaggacatgattctatttgggtagtggttgatcggttgacaaaagtcgctcaattcataccgatcaaaacaacctatacgggacataagcttgcagagttatatatggccagagtggtatgtttgcatggtgttcctaaaaagatagtgtcagatagaggtagccagtttacttcgaagttttggcagaaattacaatcagaattgggtacccgtttgaatttcagtactgcctatcatcctcaaacagatggtcagacggaaagagtaaaccaaattttagaagatatgttgagagcctgtgttctagattttggtggaagttgggataagaatttaccgtatgcggaattctcatataacaatagttatcaagctagtttgcaaatgtctccgaatgaagcattatatggtcgcaagtgccgtacgccgcttctttgggatcaaaccggtgaacgtcaagtttttgggacagacatattacgagaggcggaagaaaaaatgaagattatccaagaaaggttgcgcgttgctcagtcacgtcagaagagctatgccgacaatcgtcgcagagatttggctttcgaagaaggagattatgtatatcttcgggttacgccgttacgaggtgttcatcgttttcaaaccaaagggaaattggcaccgcgttttgtgggaccttttaagattgtgagtcgaagaggtgaagtagcttaccagttagagttgcctccgtcaatggcgggaatacatgatgtgtttcatgtgtctcagttgaagaaatgtttacgtgtacctacggaggaagcagatcctggtcgtatagagcttcaggaagatttaacttatgttgagaagccagtcagaatcttggaagtaagcgagaggaataccaggaatcgcgttatacgattctgcaaggttcagtggagtaatcattcagaagaagaatcaacttgggagcgagaagatgaattaaagtcagctcatcctcatctgttctctagttcttctgaatctcgaggacgagattctgtttaa

SEQ ID NO: 15623 - DNA, 5076 bp, Oryza sativa
  Clone ID: TFbOSC401235j.C1.o80.fg
atgggggtcgctggggagtccatgccttgttttaaagggggtgattatgatccaggaaaggtgcactgtggtgagttgtgttatgcgagggatattgtcacaattcctttccgagataccgtggtggtactgaggcacatgatgccgcaccgttcaccgagaaatttgatcaaggtattaggatttgtcagggagctgaggttgatggcttttgaagtaggctatgaagttgctcctgagtatcgccagattccccatgaccccgacgaggagaagtgtcgggttcgtgcgacgttggctagtgatagtgaagaccttccgtcttttaagttcgaagctggaggaagatcgtacagccatgcttgtcaagaagtagctttggtggccattggagagttgcgtcaacactttgaagaagagttggattcgtcagctttccagtatcatccccacaagcctcatggtcaagactatggatcttatacctgtcctgatggcgaagagagtgctactctgatgcatgtggtgcatatgcttaatgctatggatacagtaggtgtggagcgagagaaggcagctcatgaccgggaaaactggaatcgagataagatttgtaagttgaagagcaaggtgaaccgtctacagaaggaattagctgaacttaagggagagacgccgccgccaacatccaagcttcgcctcactgcaagaaagagaacctgtctgccccctcgtctccagttagcttcgaagattcgcgtgatgggagaagctgtgcctgatcgagctgaacctgttatcgacatcataagtgatgaggaagaagaggaagatcctgaagaaagagagccagctactccagaggaagaagattcatcgcttcgttccgacgcaaggcggaattacacaaccaatccagtagaagcaggagattggttgcatgcagtggagaagaagttggacttaatccagtgtactgagcaggagaaagtttcttttgcttcgcatcaattgcatggacctgctgctgaatggtgggatcattttcgccaaggcagggctggaggagaacctatcacttggcaggaattcacagccgcttttaagaagacacatataccaacgggtgttgtagctctgaagaagagggagtttagagcactcaaccagggatctcgttcggttactgagtatctccatgattttaaccgtttagcacgctatgctccagaagatgttcacactgatgaggaacgtcaggagaagtttttggagggactaaatgatgagttgtcctatactttgatgtctacggaattccgggatttccagcagttggtggacaaagcgattcgccaggaagacaagtataatcgcatggaacagaagaagcgcagggctgctcaatttaaggcacaacagggcagtaaccagaggccgcgtcttattcctggacctcaagtcccatcgtacccgcaaggaggatcttcatcagttgtccgtccccaacgccagttctacaacaacaatactggtaatcgtggcaatgaaaaccgcaacgtagtcgctcgtcccgcagcaactccagttcagaaccagcctgtcaggaaggaacagggaagcaagccggtgatatgcttcaattgtggtgatccaggacattatgctgataagtgtccgaagcctcggcatgtgaagaacgttccggtcccgaataactccaatgtcccagcaccaaaggcacgtgttaatcatgttgcagccgcagaagctcagaatgcaccagacgtggttttgggtacgtttcctgttaactctatacccgcaactgtgctttttgattccggtgctacacattcctttttgtctaaaagttttgcgaccaaacatgggatggaagttgttagtcttgggagacctttactagttaataccccaggcaaccaagtgttttcgacacggtattgtccttccgttaccatagaaatagaaggagttcctttcccatcctctcttatcctgctagaatccaaagatctagatgttatcttagggatggattggttatctcgtcacagaggagttatagattgtgccaatcgcaaggtgactttaaccaatagcaatggggaaactgtttctttctttgcgtcctctcctaaatctcatggtgtggtcttaaaccaagttgctctacaagagattcctatagtgcaagactacccagatgtatttccggaggatttgccaggtatgccacctaagagagatatagaatttcggatagacttggtacctggaaccaacccaatccataagagaccatacagaatggcagctaatgagttggctgaggtgaagaaacaggtggatgatttgcttcagaaaggatacatcagacccagtacttcgccatggggagcaccagttatctttgtggagaagaaagatcatactcagagaatgtgcgtggattatcgagcgttgaatgaggtcactatcaaaaataagtatcctctacccagaattgatgatctgtttgatcaattgaaaggtgctacagttttctccaagatagatctccgttctggatatcatcaacttcgaattcgtgaggaggatataccaaagaccgcctttacgactcggtatggtttgtttgagtgtaccgtcatgtcatttggactcactaatgccccagcctttttcatgaatctgatgaacaaggtgtttatggaatatctggataagtttgttgtggtgtttattgatgacattcttatttattccaagacgaaggaagaacataaagagcatcttcgtctagctttagagaaactacgtgagcatcagctttatgccaagttcagtaaatgtgaattttggttgtccgaagtgaagtttcttggtcatgtcatctcatctggaggagtggcagtagatccaagcaatgtggagtcagtgttaagttggaagcaacccaagacggtttcagaagttcgtagtttccttggacttgctgggtattaccgcaggtttattgagaacttttcaaagatcgccagaccaatgactcgtctgcttcagaaggaagtgaagtataagtggacagaagattgtgagcaaagtttccaagaactgaagaaaaggctagtgactgcgcctgtgttaattttgcctgattcgaggaaaggtttccaagtgtattgtgatgcatcccgactcggtttgggttgtgtgttgatgcaagaaggaaaggtggttgcttatgcatctaggcaattacgtcctcatgagaataactacccaacgcatgacctagagttggcagcagtggtgcatgcattgaagatttggcgtcattatctttacggtaaccgtacagaggtgtatacggatcataaaagtctgaagtacattttcactcaacctgatttgaacatgcgtcagcgaagatggttagagttgattaaagactatgatatggaaatccattatcatccggggaaagcaaatgttgtagccgatgctcttagcaggaaaagctactgcaatatgtcagaaggtagatgtttaccttgggagttatgccaagaatttgaaaagttgaacttgggaatagtcagcaaaggttttgtagctgctttggaagctaaacctactctatttgatcaaattagagaggctcaagtgaatgatccttatatccaggaaataaagaagaacatgagaagaggtaaagccatcggttttgtagaagatgagcaaggtactgtatggttaggagaaagaatttgcgtcccagaaaataaggagttgaaggatactatcatgaaagaagctcatgaaactttgtattctattcaccctggaagcactaagatgtatcaggatttaaagcaacaattctggtgggccagtatgcgacgtgagatagcagaatatgtggctctatgtgatgtttgtcagcgggtcaaggcagaacatcagaagccagccggtctattacagccgttgaagattccagagtggaagtgggaagaaatagggatggattttataaccggtctacccagaacgtcggcaggacatgattctatttgggtagtggttgatcggttgaccaaagtcgctcacttcataccagtcaaaacaacttatacgggacataagcttgcagagttatacatggccagagtggtatgtttgcatggtgtacctaagaagatagtgtcagatagaggaagtcagtttacttcgaagttttggcagaagttacaatcagaattgggtactcgtttgaatttcagtacggcttatcaccctcaaacagatggtcagacggaaagagtaaaccaaattttagaggatatgttgagagcctgtgttctagattttggtggaagttgggataagaatttgccgtatgcggaattctcatataacaatagttatcaagctagtttgcaaatgtctccgaatgaagcattatatggtcgaaagtgccgtacgccgcttctttgggatcaaaccggtgagcgtcaagttttcgggacagacatattgcgagaagcggaagaaaaagtgaagattatccaagaaaggttgcgcgttgctcagtcgtgtcagaagagctatgccgacaatcgtcgcagagatttagtttttgaagaaggagattatgtgtatcttcgggttacgccgttacgaggagttcatcgtttccaaaccaaagggaaattggcaccgcgttttgtgggaccttttaagatcgtgagtcgaagaggtgaagtagcttatcagttagagttgcctccgtcaatggcgggaatacatgatgtgttccatgtgtctcagttgaagaaatgcttacgtgtacctacggaggaagcagatcctgattgtatagagcttcaggaagatttaacttatgttgagaagccagtcagaatcttggaatttccgacgttccggaggagagcgtttccgttgaggaaggttccgaagcgtttgtggaagctcaaggcaagtcacacagatcccaaacaaccctttgagcatgttgatcccgtttaa

SEQ ID NO: 15624 - DNA, 3735 bp, Oryza sativa
  Clone ID: TFbOSC401468j.C1.o1.fg
atggaaattccgggcgtgacaagttggtatcagagccaccttgaccttaggataagccaaatgatgccgccccattcaccgagaaatttgatcgaggtgttaggattcgtcagggagttgaggttgatggcttttgaggtaggctatgaagttgctcccgagtatcgccaaatttcccatgaccccgacgaggagaagtgtcgtgttcgtgtgacattggctagtgatagtgaagaccttccgtcctttaagttcgaagttggaggaagatcgtactgccatgcttgtcaagaagtagctttggtggccattggagagttgcgacaacactttgaagaagagttggattcatcagctttccagtatcatcctcacaaggctcatggtcaagactatggaacctatacctgtcctgatggtgaagagagtgccactctgatgcatgtggtgcatatgcttagtgctatggatgcagtaagtgtggagcgagacaaagcagctcatgacagggaaaactggaatcaaggcaagatttgcaagttgaagagcaaggtgcaccgtctacagaaggaattagctgaacttaaaggagaaacgccgccgccaatatccaagcttcgcctcactgcaagaaagagaacctgtccgccacctcgtctccagttagcttcgaagattcgcgtgatgggtgaagctatgcccaatcgtgctgaacctgtcatcgacatcataagtgatgaggaagaagaggaagatcataaagaaagggagccagctactccagaggaagaagattcatcgtttcgttccgacgcaaggcggaattgttgcttacatcattggtgggatatggtgaacacgcgcaccggaagtggaagtggaagtggaagtggagctactaacaatggaggagaacccacgctagctcagattctggctcaacagacacaactgatcaacctgttagtgcagcaggcacagaatcagcaagcaaataatcagaaccagaatccacccccacctccccaaaataagctggcagatttcttacgtgtgagaccccctaccttttcaagcaccaccaatccagtagaagcaggagattggttgcatgcggtggagaagaagttggatttgatccagtgtactgagcaggagaaagtttcttttgcttcgcatcagttgcatggacccgctgctgaatggtgggatcattttcgccaaggcagggcgggaggagaacctattacttggcaggaattcacagctgcttttaagaagacgcatataccgtcaggtgttgtagctctaaagaagagagaatttagagcactcaaccagggatctcgttcggtcactgagtacctccatgattttaaccgtttagctcgctatgctccagaggatgttcgcaccgatgaagagcgtcaggagaagtttttagagggactaaatgatgagttgtcttatgctttgatggctacggatttccgggatttccaacaattggtggacaaggcgattcgtcaggaagacaagtataaccgtatagagcagaagaagcgcagggctgcccaatttaaggcacaacagggcagtaaccaaaggccgcgtctcattactggacctcaagctccatcgtaccctcaaggaggatcttcatctgttgcccgtccccaacgccagttctacaacaacaatactagtaatcgtggcaatgacaaccgcaatatggttgcttgtcctgcagcaactccagttcagaaccagcctgtcaggaaggaacagggaagcaagccagtgatatgctttaattgtggtgatccaggacattatgctgataagtgtcctaagcctcggcgtgtgaagaacgctccagtcccgaacaaccccaatgttccagcaccgaaggcacgtgttaatcatgttgcagcagcagaagctcagaatgcaccagatgttgttttgggtacgtttcctgttaactctatacccgcaactgtgctttttgattccggtgctacacattcctttttgtctaaaagttttgcaagcaaacatgggatggaagttgttagtcttgggagacctttactagttaataccccgggcaatcaggtattttcgacacagtattgtccttccgttactatagaaatagaagaagttcctttcccatcctctcttatcttgctagaatccaaagacctagatgttatcttagggatggattggttatctcgtcacagaggagttatagattgcgccaatcgtaaggtgactttaaccaatagcaatggggaaacagtttctttctttgcatcctctcctaaatctcatggtgtggtcttaaaccaagttgctctacaagagattcctatagtgcaagactacccagacgtgtttcccgaggatttgccaggtatgccacctaagagagacatagagtttcggatagacttggtacctggaaccaaccccatccataagagaccatacagaatggcagctaacgagttagctgaggtgaagaaacaggtggatgatttgcttcagaaaggatacatcagacccagtacttcgccgtggggagcaccagtcatctttgtggagaagaaagatcatactcaaagaatgtgtgtggattatcgagcgttgaatgaggttactatcaagaataaatatcctctacccagaattgatgacctgtttgatcaactcgaaggtgctacagttttctccaagatagatctccattctggatatcatcaacttcgaatccgtgaggaagatataccaaagaccgccttcacaactcggtatggtttgttcgaatgtaccgttatgtcgtttggactcactaatgccccagcctttttcatgaatctgatgaacaaggtgtttatggaatatttggataagtttgtcgtagtgtttattgatgacattcttatttactccaagacgaaggaagaacatgaagagcatcttcgtctagctttagagaaactacgtgagcatcagctttatgccaagttcagtaaatgtgaattttggttgtccgaagtaaagtttcttggtcatgtcatctcgtctggaggagtggcagtagatccaagcaatgtggagtcagtattaagttggaagcaacccaagacggtttcagaaattcgtagtttccttggacttgcagggtattaccgcaggtttattgagaacttttcaaagatcgccagaccaatgactcgtctgcttcagaaggaagtgaagtataagtggacggaggattgtgaacgaagtttccaagaactgaagaaaaggctagtgactgcgcctgtattaattttgcctgatacgaggaaaggtttccaagtgtattgtgatgcatcccgactcggtttgggttgtgtgttgatgcaagaaggaaaggtggttgcctatgcatctaggcaattacgtcctcatgagaataactacccaacgcatgacctggaattggcagctgtggtgcatgcattgaagatttggcgtcattatcttttcggtaaccgtacagagatatatacggatcataaaagtttgaagtacattttcactcaacctgatttgaacatgcgtcagcgaagatggttagagttgattaaagattatgatatggaaatccattatcacccggggaaagcaaatgttgtagccgatgcccttagcaggatgtcacgcccagcaattcactag

SEQ ID NO: 15625 - DNA, 5133 bp, Oryza sativa
  Clone ID: TFbOSC401768j.C1.o3.fg
atggcagattcggattcacccgctacctgggagttgagcttacctcaatcagaggggtatgtcattgagctgcatcggatgttgaggcgtctgcgataccctggattcccgtcataccgagtgagacagtgtggctcagtttgggaggctcgggttgagattcacccccgagtcccttccgagttggactacagcttccagacacgtcaccaccgagacctgccagagactgcgatgcaggatgccgcccgggaggccttcctccgactcagctctatccaccgagctgagttagtgagtaccgagtttgctcatcacctgttccgggaggagggcaactcagtttgcacagttcaggacacgccctgctgctacaacccgatggtgactcggttgtcacgatgggctgaggcagtagatgactactacgaggaggctctgttggagattgacgaccaccagagacgtgtgggggagttagagactgaggtgaccgacctcacagcacagcagcttcagttggaggaggagcaccaggcttggggcagtgagatagactcactgaaggcacagctccaggtccacggcgaccagttccagcagttatctgaccagtacaacgatcaccgcgggatgatggatactcttgaggagcagctgagagagagtcaggagcacgtcagccagctggaggagcagcttcgagcagccaagatcagcactacaggggcttctacttccacagcagtaggccgtgaccgctactttttcctcaccccgccatacccaccggcgttccacgctcttctgggagaggctagtatgctagctaccgagtcagcgccctacctagtggaccctacagcgacacagccacctgttccggagttggtgcacactccactgatccctacaccttctccgcagctgggttccagtttggagactccgatccaggtcgactccgagacagaggggaccgacaccgagccagagatcgagccagacatcactgatccttcagaggatgaggctcctgttccccgcatcaccttccttggaggccctcgcaccctcagcactgctcgcaagagcacacgacctccgggcaagaggcccaagccagatccagaggccactacttctgggccgtggggactcagcaatgacgaaactcagacacccgacttaaacactctggccggagttatggccacccaaactcaacttctgcaagccatcgcaaacaaccaaggcaaccgcggagggtcaagctttggagagttcatgagaaccaagccgcccacgttcgctactgccgacgagcccatggaagcaaaagactggctacgcatcatagaaaagaaactgactctagtcagggtacgcgaagccgacaaggtgatcttcgcagtgaaccagctggaaagacccgctggtgattggtgggatacctacaaggaagcccgagaagacggtgctggagaacccacctgggaggagttcactgcggcgtttcgcgagaatttcgtacctgctgcagtgatgcgcatgaagaagaacgagtttagaagactgcggcaagggaatacaacagtgcaggagtatctaaacaagttcactcagttggctcgctacgcaattggagacctggcagatgaagaagaaaagatcgacaagttcatagaaggactgaatgatgaattgcgtggacctatgatcgggcaggatcacgagagtttccagagcctgatcaacaaggtcgtcaggctagagaacgatcaaaggacggtggaacacaaccgcaagaggaggcttgctatgagtcacccacctcagacagtgcctcagcgacttaagggagcccctccgtccggatggaagccccctgtcatggtgaccaaccgtcccgctgcacttagcaacttcaacaggccagttgcacttcagaaccgcacccctacaccaactttggctgcccctggagccaagaagaatgtggactgcttcaactgtggggaatacgggcactacgctaacaactgccctcatccacgcaaaacccctgtccgaactggcgcgaatgcaatgactgttcgcggcactactacccctgctatcgggcgaggtctattcaagactccgcaatctaacaggaccgccactggatttgggcgcggacaagtgaaccatgtccgagctgaagaggcccaggaagatcagggcgtactaatgggtatgttctctatcaattccaccccggttaaagttctcttcgattccggtgcatcgcattcatttatatctctgaaggctagtcaaaagcacaacttgaccctcgtgggacttagaaagcctatgatagtacactcacctgggggcgagataactatgagtcatgcttgcatagatgtaccaattcgccttagggatgtggtatttccctctaatcttatggtgctaataccccaaactcttgatgtcattttgggtatggattggttagcaaagcatagaggagtaattgactgtagacgtagagaggttaccctgaccacaccctggggatcggatatgagagcaaccatggatcaagaacctaggctaaccgaacgtgctgggggtatattcaccatgctacccctaaagggaatgcctgtagtacagcgatttcctgatgtgtttccagaagatttacctggaatgccaccagatcgtgacgtagagttcattattgacctgatacccggaactgcccccatatccaagagaccatatcggatgccggtcaatgagttagaagaacttaaaaggcaaatcagagagttgcaagagaagggatttgtacgccccagttcgtcaccttggggagccccagtgttgtttgttaaaaagaaagacggtagcatgagaatgtgtgtagactaccgatcactgaacgaagtaactatcaaaaacaagtatccactaccacggattgatgacctcttcgaccaacttaagggagctaagattaggaccgaggatatccccaaaaccgcgttttcaacacgctatgggttgtatgaattcacagtaatgtcgtttggtctaaccaatgccccggcatacttcatgaatcttatgaacaaagtattcatggattacttggataagtttgtggtggtattcatcgatgacattctgatctactccaaagatgaagaagaacatgcggaacacttaagattggttctccagaaactccgaaagcacaagttatacgcaaaattcagcaagtgcgaattttggttgaaggaagtcgcttttctgggtcacgtaatctcagccggtggagtagcagtggaccctgctaaagtggaggctgtcacggaatggaaagcacccaaatctgtgactgaaattcggagttttctaggcttggctggatactaccgaaggttcattgaagggttctctaagatagcccgaccaatgacacaactactcaagaagaaaaagaagtttgtgtggtcagaacagtgtcaggaaagctttgagcagctcaaggaaaagctgacctcagcgcctattttagttcttcccgacatcaggaaagactttgttatatattgtgatgcgtcaaggcaaggactaggaggagtactgatgcaggacagaaaagtggtggcctatgcgtcgcgacaattgcgaccacatgaggaaaactaccctacccatgacctagaactcgcagctgtggttcatgcgctaaagatttggagacattatctaattggaaaccattgcgatatctacactgaccacaagagtctaaagtatatcttcacccagtcagatctcaacttgaggcaaaggcgatggttagaattaatcaaggactatgatttagaggttcactatcacccaggcaaagcaaacgttgtggccgacgctctgagtcgtaagagccattgcaatcatctgagaatggaagggatggtccctgagcttagggaggaaatagctcagctgaacctacatatagtaccccgtggacagataaacaccctggacattcaacctcttttgagaacccaaatagaagaagcccagaaggacaacgaggaagtccgagagttgaaggaacgcttggctgcaggacgtgcaaaggaattttcaaccgacgaaaaagatgttctatggtataaaaagagaatttacgtacctgaacagggtggactgaggggattaattttaaaggaagctcacgaatcggcatattcattgcaccccggaagtacgaagatgtaccaagatctgaaggaaggatactggtggcccaacatgaagagagatgtggccgaatacgtagcactctgcgacgtatgccagaaggtgaaggctgaacaccagaggccagcaggtttgttgcaacctctcaggattcccgaatggaaatgggatgagataggtatggattttattgttggattgcccaaaaccgcaacaggatatgattccatttgggtgatcgtggatcgactcaccaagacagcgagattcattcccgttaagacaaattatagcagtgctaagctagccgagttatacatgaccaggatagtatgtcttcatggtgtaccaaagaaaattatatctgatcggggcacacaatttacctcacatttctgggagaaagtccatgaagccctaggaagttatctcgcatttagcacagcttatcatccacagacagatggccagacggagagaaccaaccaggtcctagaagacatgctgagggcttgtgctctggattttagcaaggactgggagagatgtttgccctacgccgaattctcctacaacaacagctttcaagcaagcctaaagatgtcacccaacgaggcattgtttggtcgacgatgtcgtaccccgctaatgtggtccgagactggagaacgggcggtatttggacctgatattattcaagaagccgaagaaaaggttcgcttgatccgtgaccgtctaaaagtagcacaatcacgacaaaagagttacgccgacactcgaagaagaaacctggaatttaaggagggagattacgtttatctaaaggtttctccgatgaggggaaacaaaaaggtttaa

SEQ ID NO: 15626 - DNA, 990 bp, Oryza sativa
  Clone ID: TFbOSC401836j.C1.o3.gm
atggacctgctgctgaatggtgggatcattttcgccaaggcagggctgaaggagagcctattacgtggcaggagttcacggccgctttcaagaagacgcacataccagcgggagaagttcttggagggactaaatgatgagttgtcttatgctttgatgtctacggatttccgggatttccagcagttggtggacaaggcgattcgtcaggaagacaagtataaccggatggagcagaagaagcgcagggctgcccaattcaaggcacaacagggcagtaaccagagaccgcgactcgttactggacctcaagctccatcgtaccctcaagtaggatcttcatcagttgtccgtccccaacgccagttctacaacaacaatactggtaatcgtggcaatgacaaccgcaacatggttgctcgtcctgcagcaacttcagctcagaatcagcccgtcaggaaggaacagggaagcaagccagtgatatgcttcaattgtggtgacccaggacattatgctgataagtgtcctaagcctcggcgcgtgaagaacgctccagccccgaacaactccaatgttccagtaccgaaggcacgtgttaatcatgttgcagcagtagaagctcagaatgcaccagatgttgttttggcctttttcatgaatctgatgaacaaggtgtttatggaatatctggataagtttgtcgtggtgtttattgatgacattcttatttactccaagacgaaggaagaacatgaagagcatcttcgtctagctttagagaaactacgtgagcatcagctttatgccaagttcagtaaatcggcggctcggcttgacggcgacggcggagctccggtggtcggcggcgaaggggaacgggcggccgagattcctctcaccacggcgcacctaacggcggcgacggcaaacggcggcgacggcggaggcgacggcgcggcgcaactggagatcgccggcgacggctag

SEQ ID NO: 15627 - DNA, 2290 bp, Oryza sativa
  Clone ID: TFbOSC420873j.C1.o1.np
aaggtgggttgtgagcatatggttttgatggttgtgctcatgacaattaaggaccggttcgcgagctactgttgtgaaacatttatcgtgccaaccacaagccagcgtgggcaacggctttatcttttgtatagcgtgattcattatagtgcgcccgactgagaagtggcgagaagtccatgggggtcgctggggagtccatgccttgttttaaagggggtgattatgatccaggaaaggagcactgtaatgggttatgttgtgcgaggggtattgtcacgactcctttccgagatgccgccccattcaccgagaaatttgatcgaggtgttaggattcgtcagggagctgaggttgatggcttttgaggtaggttatgaagttgctcctgagtatcgccagatttcccatgaccccgacgaggagaagtgtcgtgttcgtgtgacgttggctagtgatagagaagaccttccgtctattaagttcgaagctggaggaagatcgtactgccatgcttgtcaagaagcagctttggtggccattggagagttgcgtcaacgttttgaagaagagttggattcatcagctttccagtatcatcctcacaagcctcatggtcaagactatggaacctatatctgtcctgatggtgaagagagtgccactctgatgcatgtggtgcatatgcttagtgctatggatgcagtaagtgtggagcgagacaaagcagctcatgacagggaaaactggaatcgaggcaagatttgcaagttggagagcaaggtgtaccgtctacagaaggaattagctgaactcaaaggagaaacgccgccgccaacacccaagcttcgcctcgtcgcaagaaagagaacctgtccgccacctcgtctccagttagcttcgaagattcgcgtgatgggtgaagctgtgcccgatcgtgctgaacctgtcatcgacatcataagtgatgaggaagaagaggaagaccctgaagaaagagagccagctactccagaggaagaagatccatcgcttcgttccgacgcaaggcgcagggctgaaggagaacttatcacttggcaggagttcacgactgcttttaagaagacgcatataccgtcaggtgttgtagctctaaagaagagagaatttagagcactcaatcagggatctcgttcggtcaccgagtacctccatgatgtcaaccgtttagctcgttatgctccggaagatgttcgcaccgatgaagagcgtcaggagaagttcttggagggactgaatgatgagttgtcttatgccttgatgtctacggatttccgggatttccagcagttggtggacaaggcgattcgtcaggaagacaagtataaccggatggagcagaagaagcgcagggctgcccaattcaaggcacaacagggcagtaaccagaggccgcgtctcgttactggacctcaagctccatcgtaccctcaaggaggatcttcatcagttgtccgtccccaacgccagttctacaataacaatactggtaatcgtggcaatgacaaccgcaacatggttgctcgtcctgcagcaactccagctcagaatcagcccgttaggaaggaacagggaagcaagccagtgatatgcttcaattgtggtgatccaggacattatgctgataagtgtcctaagcctcggcatgtgaagaacgctccagccccgaacaactccaatgttctagcaccgaaggcacgtgttaatcatgttgcagcagcagaagctcagaatgcaccagatgttgttttgggtacgtttcctgttaactctataccgcaactgtgctttttgattccggtgctacacattcctttttgtctaaaagttttgcgagcaaacatgggatggaagttgttagtcttgggagacctttactagttaataccccaggcaatcaagtattttcgacatagtattgtccttctgttactatagaaatagaagaagttcttttcccatcctcgcttatcttgctagaatccaaagatctagatgttatcttagggatggactggttatctcgtcacagaggagttatagattgtgccaaccgtaaggtgactttaaccagtagcaattgggaaaccgtttctttctttgtgtcctcccctaaatatcatggtgtgaacttaaaccaagttgctctacaagagattcctatagtacaagactacccagacgtgtttcccgaggatttgccaggtatgccacctaagagagacatagagtttcggatagacttggt

SEQ ID NO: 15628 - DNA, 5331 bp, Oryza sativa
  Clone ID: TFbOSC900401j.C1.o12.fg
atggcagattcggattcacccgctacctgggagttgagcttacctcaatcagaggggtatgtcattgagctgcatcggatgttgaggcgtctgcgataccctgggttcccgtcttaccgagtgaggcagtgtggctcagtttgggaggctcgggtcgagattcacccccgagtcccttccgagttggactacagctttcagacacgtcaccaccgagacctgccagagaccgcgatgcaggatgctgcccgggaggccttcctccgactcagctctatccaccgagctgagttagcgagtaccgagtttgctcatcacccgttccgggaggagggcaactcagtttgcacagttcaggacacgccctgctgctacaacccgatggtgactcggttgtcacgatgggctgaggcagtagatgactactacgaggaggctctgttggagattgacgaccaccagagacgtgtgggggagttagagactgaggtgaccgacctcacggcacagcagcttcagttggaggaggagcaccaggcttggggcagtgagatagactcactgaaggcacagctccaggtccacggcgatcagttccagcagttatccgaccagtacaacgatcgccgcgggatgatggatactcttgaggagcagctgagagagagtcaggagcacgtcagccagctggaggagcagcttcgagcagccaagatcagcactacaggggcttctacttccacagcggtaggccgtgaccgctacttcttcctcaccccgccgtacccaccggcgttccacgctcttctgggagaggctagtatgctagctactgagtcagcgccctacctagtggaccctacagcgacacagccacctgttccggagttggttcacactccactgatccctacaccttctccgcagctgggttccaatttggagactccgatccaggtcgactccgagacagaggggaccgacaccgagccagagatcgagccagacatcactgatccttcagaggatgaggctcctgttccctgtatcaccttcctcggaggccctcgcaccctcagcactgctcgcaagagcacacgacccccgggcaagaggcccaagccagatccagaggccactacctctgagccgtggggactccggttatttatgatggcaagccgacgtcgtgcaacaaccagcaatgacgaaactcagacacccgacttaaacgctctggccggaattatggccacccaaactcaacttctgcaagctatcgcgagcaaccaaggcaaccgcggagggtcaagctttggagagttcatgaggaccaagccgcccacgttcgctacggccgatgagcccatggaagcagaagactggctacgcatcatagaaaagaaactgactctagtcagggtacgcgaagccgacaaggtgatcttcgcagtgaaccagctggaaggacccgctggtgattggtgggatacctacaagggggcccgagaagacggtgctggagaacccacctgggaggagttcactgcagcgtttcgcgagaatttcgtacctgctgcagtgatgcgcatgaagaagaacgagtttagaagactgcggcaagggaatacaacagtgcaggagtatctaaacaagttcactcagttggctcgctacgcaattggagacctggcagatgaagaagaaaagatcgacaagttcatagaagggctgaatgatgaattgcgtggacctatgatcgggcaggatcacgagagtttccagagcctgatcaacaaggtcgtcaggctagagaacgatcaaaggacggtggaacacaaccgcaagaggaggcttgctatgagtcgcccacctcagacagtgcctcagcgacttaaggaagccactccgtccggatggaagccccctgtcatggtgaccaaccgtcccgctgcacttagcaacttcaacaggccagttgcacttcagaaccgcacccctacgccaactttggctgcccctggagccaagaagaatgtggactgcttcaactgtggggaatacgggcactacgctaacaactgccctcatccacgcaaaacccctgtccgaactggcgcgaatgcaatgactgttcgcagcactactacccctgctgtcgggcgaggcctattcaagactccgcaatcgaacaggaccaccactggatttgggcgcggacaagtgaaccatgtccgagctgaagaggcccaggaagatcagggcgtactaatgggtatgttctctatcaattccaccccggttaaagttctcttcgattctggtgcatcgcattcatttatatctctgaaggctagtcaaaagcacaacttgaccctcgtgggacttagaaagcctatgatagtacactcacctgggggcgagataactgtgagtcatgcttgcatagacgtaccaattcgccttagggatgtggtatttccctccaatcttatggtgctaataccccaaactcttgatgtcattctgggtatggattggttagcaaagcatagaggagtaattgactgtagacgtagagaggttaccctgaccacaccctggggatcggatatgagagcaaccatggatcaagatcctaggctaaccgaacgtgctgggggtatatttaccatgctacccctaaagggaatgcccgtagtacagcgatttcctgatgtgttcccagaagatttacctggaatgccaccagatcgtgacatagagttcattattgacctgatacccggaactgcccccatatccaagagaccatatcggatgccggtcaatgagttagaagaacttaaaaagcaaatcaaagagttgcaagagaagggatttgtacgccccagttcgtcaccttggggagccccagtgttgtttgttaaaaagaaagatggtagcatgagaatgtgtgtagactaccgatcactgaacgaagtaactatcaaaaacaagtatccactaccacggattgatgacctcttcgaccaacttaagggagctaaggtgttctcaaagatcgaccttcgatcaggataccaccaactgaagattaggaccgaggatattcccaaaaccgcgttttcaacacgctatgggttgtatgaattcacagtaatgtcgtttggtctaaccaatgccccggcatacttcatgaatcttatgaacaaagtattcatggattacttggataagtttgtggtggtattcatcgatgacattctgatctactccaaagatgaggaagaacatgcggaacacttacgattggttttccagaaacttcggaagcataagttatatgcaaaattcagcaagtgcgagttctggttaaaagaagtcgcttttctaggccacgtaatctcggccggtggagtagcagtggatcctgctaaagtggaggctgtcacggaatggaaagcacccaaatctgtgactgaaattcggagttttctaggcttggctggatactaccgaaggttcattgaagggttctctaagatagcccgaccaatgacacaactactcaagaaggaaaagaagtttgtgtggtcagaacagtgtcaggaaagctttgagcaactcaaggaaaagctgacctcagcgcctattttagttcttcccgacatcaggaaagactttgttatatattgtgatgcgtcgaggcaaggactaggaggagtactgatgcaggacggaaaagttgtggcctatgcgtcgcgacaattacgaccacatgaggaaaactaccctacccatgacctagaactcgcagctgtggttcatgcgctaaagatttggagacattatctgattggaaaccattgtgatatctacactgaccacaagagtctaaagtatatcttcacccagtcagatctcaacttgaggcaaaggcgatggttagaattaatcaaggactatgatttagaggttcactatcacccaggcaaagcaaacgttgtagccgatgctctgagtcgtaagagccattgcaatcatctgagaatggaagggatggtccctaagcttagggaggaaatagctcagctgaacctacatatagtaccccgtggacagataaacaccctggacattcaacctcttctgagaacccaaatagaagaagtccagaaggacaacaaggaagtccgagagaaggtgaaggctgaacaccagaggccggcaggtttgttgcaacctctcaggattcccgaatggaaatgggatgagataggtatggattttattgttggattgcccaaaaccgcaacaggatatgattccatttgggtgatcgtggatcgactcaccaagacggcgagattcattcccgttaagacaaactatagcagtgctaagctagccgagttgtacatgaccaggatagtgtgtcttcatggtatacctaagaggattatatctgatcgaggcacccagtttacctcacatttctgggagaaagtccatgaagccctagggagttacctcgcatttagcacggcctatcatccacagacagatggccagacagagagaaccaaccagatcctggaagacatgctgagggcttgtgctctggattttagcaaggattgggagagatgtttgccctacgccgaattctcctacaacaacagctttcaagcaagcctaaagatgtcacccaatgaggcattgtttggtcgacgatgtcgtaccccgctaatgtggtccgagactggggaacgggcggtatttggacctgacattattcaagaagccgaagaaaaggttcgtttgatccgtgaccgtctgaaagtagcacagtcacgacaaaagaattacgccgacactcgaagaagagacctggaatttaaggaaggagattacgtttatctaaaggtttctccgatgaggggaacaaaaaggtttaaggtcaaaggaaaactggcaccaagatatgtgggaccattccagatcattgccaggcgaggagaagttgcctatcagttacagttgccagagaatatcgcggatgtacacccagtcttccatgtatctcagctaaagaaatgtttacgagtgccagaagagcaagctccgctggaagaaattcacatcagcaatgatctcacatatccagaacacccgatccggatattggatgaagccgaaaagaggactaggagcaaagtgtggcgtatgtacaaggtacaatggagcaatcacactgaggatgaagccacatgggaaagcgaagaattcttgaggacagagtacccacatctattcgaaaaccggtaa

SEQ ID NO: 15629 - DNA, 1572 bp, Oryza sativa
  Clone ID: TFbOSC19735j.C1.o1.fg
atggctgacaatgagaaaggcaataaggtcagaagtcaggacattggtacctcaagctctcgagtgaatgaagcaccagacaccagttgtgtggcagtggtccaacacctgattaaccagaacaaattgcttatagagatactacagcagcatcggatgccaattttgaacccgagtcagatacaacctcaagtgcagttggaggcagtccaagcactcacaccacaagtcagcgcaccgccaacatcccagaaggcccctcatgccatgccacatgttgacccaaaagaagcaagtatcatctgttttatgtgtgatgagcaagggcactatgcaaggaactgtcctcagcagaaaagaaaagcaccaatgcgaaccgaagatgaagtccgtaagatgatcattaccagcacagaatggcctccaccaggaatgacaaaatgtcagagaagaaattcctcccgaggtgcacaacagttgacagagcatcttttagctaatggaggtagagtgtctggtagtgaagattcagatcaagtctcctcagatgatgaagatgagaagtctccccaaggttttaaccagaataaaatagaacttaaggcatgctctcgttgtggagaaatcggtcatgttgccagctcgtgtgccactacatgcgttcattgtgaggaagaccatccacccgacagatcccatgttcccgcaggaatgatcacactgagaaaacgagagttccgctacctgaagcaagaagatttgaccgtcacagagtacctgcacgagttccatcgtttggctcactatgcaccagaagatgtggaaaatgatgaagacaaacaagagaagtatctccaggggttaaaagatgagatcacagtgcaactactcctagaggaatatgaagattttgagaaacttgtggacaaagccatacaactcgaaagtgagcataatcggatgaagaactgtaagagaaggattgtcagcatcccagtattcccatgtggtaaccaaagacagcgcacggagccacttcagatcaccggatcttctgttgcgcatcaagagtttccgccccaagaagatggacacaatgcagacaacaacattagcaatactaatgatgatgataccaccaacaaccatgcttcttgccccattagtgaccactcaaatcaagcgtgcaatgtcaacatcattcaccaaggtgtcgacgatagtatcaatgatggcacccaaaatgacaaccctagcaattgtgactctgagaaagactccaatggtgatagcaactatggtaccactgatgccaatgttagcaaggatttccaaccaccaattccaactccaagtcagaatgatcgtccccagacggatagctcagcaaagaagacgttgatttgctacaattgcaaaggaccagggcattactcgagggactgcctgcaaccaaggcaaagtcgatctccacattaccgccaatttacacgaagcagacatcccaatcgtattgtggtcactggagcaaacgccgtacccgtgaggcctcgtgttaatcagaacccatag

SEQ ID NO: 15630 - DNA, 266 bp, Oryza sativa
  Clone ID: TFbOSC25205j.C1.o1.np
actgagccacaaactaagccttacccactagacatgtggaagtacggtagtgctttgcaacagaggcccgaagaccggtccttatatggccgaggtgctaccatcaaaaccatgcaccccgagcccagcctaaaaccattttggggaattttgaatagaaggagcgatgatgtgtcttgccttgctcgctttcccaagcgtcggcttcaacttccacgaagagcggatcttccgaagctgcagcgtctacacgaccaacggaaaag

SEQ ID NO: 15631 - DNA, 640 bp, Oryza sativa
  Clone ID: TFbOSC11782j.C1.o1.fg
atttcctaatgatttgtgcaacaattgtaagcgtccaggacattttgctagagattgtccaaatgtggctctttgccatgcatgtgggcttccagggcacattgcagcagagtgttcttccaaagatctctgctggaactgcaaagaacctggccacatggctaacagctgcccaaatgaagggatatgccgcaactgtggcaagtcgggtcacattgcaagagaatgcagtgctccaccaatgctgccaggtgaaatgaggctttgcagcaactgctacaaaccagggcaccttgctgcggaatgcaccaatgagaaggcctgcaacaactgtaggaagagtggccatcttgctcgtaactgccctaacgagcccgtctgcaacctatgcaacgtgtcaggacatttggcccgagagtgccccaaatctgatgctatcaatgagaggggtgggcctcctcccttccgtggtggatacagtgatgtggtctgccgtgcttgcaatcaggttggtcatatgagccgtgattgcatggccggtgcgttcatgatctgccacaactgcggtggtcgtggtcacatggcttatgagtgcccatctgggaggcttatggatcggtttccccctcgccgtttttga

SEQ ID NO: 15632 - DNA, 744 bp, Oryza sativa
  Clone ID: TFbOSC400622j.C1.o112.fg
atgagcagccgcagcccgccaccaaaggaccgcaggattcgtactgagcgtacctcataccgtgatgcgccatacaggagagacagccgccgtggtcctagcagatttcctaatgatttgtgcaacaattgtaagcgtccaggacattttgctagagattgtccaaatgtggctctttgccatgcatgtgggcttccagggcacattgcagcagagtgttcttccaaagatctctgctggaactgcaaagaacctggccacatggctaacagctgcccaaatgaagggatatgccgcaactgtggcaagtcgggtcacattgcaagagaatgcagtgctccaccaatgctgccaggtgaaatgaggctttgcagcaactgctacaaaccagggcaccttgctgcggaatgcaccaatgagaaggcctgcaacaactgtaggaagagtggccatcttgctcgtaactgccctaacgagcccgtctgcaacctatgcaacgtgtcaggacatttggcccgagagtgccccaaatctgatgctatcaatgagaggggtgggcctcctcccttccgtggtggatacagtgatgtggtctgccgtgcttgcaatcaggttggtcatatgagccgtgattgcatggccggtgcgttcatgatctgccacaactgcggtggtcgtggtcacatggcttatgagtgcccatctgggaggcttatggatcggtttccccctcgccgtttttga

SEQ ID NO: 15633 - DNA, 962 bp, Oryza sativa
  Clone ID: TFbOSC5579j.C1.o1.gm
atgaagagaatgaaagtgagactcagaagcttcctgaatattctacaagtgattcagaagatttctgggaggaggaattgtttcctgaacttattaagcccttgccagatgatgggggtatgcgcttgaaaaatacttttgaagaggaatttgctgaagatacatggtgcaaactgagtaaaaaggttgctttaaatacatcccaaagtgttgtctcacttgcttcgttcaaagactactccatcccgctcgccggcgtgcaccagcgatcgggagagcaggtctccggaacctctgcctttgacgtcctgcaccgggagaaggcggcaataaggcactgtgattttactatggctggttttgccgatgcactgaggccggataaattcaccggtgtgcattttaagagatggcagatcagggtcactctgtggctgacagctatgaaatgcttctgggaatactctgttgaggggttgatagcgtctcttgatgttgaggagaaagctcggaaaaaagatgatgcgtctaagggcgatggtgggcagtctagtgccaatgttgtgcacaaggcccagaacaagagcaaggggaaatacaaagctcagcagaccaccaacttcaagaagcagaagaagaacaacaacaatcctaatcaggatgagatgacttgctttgtgtgtggccaagttggtcatctggctaggaagtgtccacaacgcaaggggatgaaggcacctgcagggcagacttctaagtctgctaatgtgaccattggcaacactggagatggaagcgggtatggtaatttacctactgtcgcacggggttccaccgtcctaatggggaatgggtcacatgcttctgttcatggtgttggcacggtagatctgaagtttacttcgggaaagatcgtgcagctgaagaacgtgcagcatgtcccttctatcgacaggaatctt

SEQ ID NO: 15634 - DNA, 2523 bp, Oryza sativa
  Clone ID: TFbOSC407628j.C1.o7.fg
atggacatctctaggacaaatgaaggctacacgagctgcggcccggtagtcgagatgtcatggcacagggctggtgtcctgctgctaggggctcaatcctgcctacctgtcccggaggttccggccgtaggtgggattgggtcggtactcttgtctatggctaggatgggttgggaactatgtcacgtcttccgtccgtataccgtggtgaataagcctaacatacatcataacagcaaaagacttagatctgttaaggtcctatccttagtttctaatctgtctcttccctttgttttccctctctccctctccaaacctttgcaacagatggctgacaatgagaaaggcaataaggtcagaagtcaggacatcggtacctcaagctcccgagtgaatgaagcaccagacaccagttgtgtgacactggtccaacacctgattaaccaaaaccgattgcttatagagatactacagcagcatcagacgccaattctgaacctgagtcagatacagcctcaagtgcagttggaggcagtccaagcactcacaccacaagtcagcatgccgccagcatcccaaaagaccgatggtggcgtgccacatgttgactcaaaagaagcaagtatcatttgttttatgtgtgatgagcaagggcactatgcaaggaactgtcctcagcagaaaggaaaaacaccaatgcgaaccgaagatgaagtccgtaagatgatcattaccagcacagaatggcctccaccaggaatgacaaaacgtcagagaagaaataccttccgaggtgcaccacagttgacagagcatcttttagctaatggaggtagagtgtctgatagtgaagattcagatcaagtctcctcagatgatgaagatgagaagtctccccaagattgtcaattcagttttttgctgacgaagaagatggccaaccaacccgccagttccaatggagagaagcatcaaggcaacacaaatcctcgccaagattacagtttcagcctaactccagtgccaggacagaggaatcaaaatgagaaaagaaaatgccgagtccgggaagatatctgttgcttcaattgtcaaggaatgggtcatttcgccgacaagtgcccaaaaccgagaaacatagctgccagcacgtcagtccacgcaactccctgcaatcagaagcttgctcctcagcgaattgtcatccatgcatcccgaagcagtcctatagcccgcgttacaacagctccaactccagcgagtgcattaccacaaggtgtcaatgctcaatttcagccccagccaccagttgacaagacagaggccagtatcggcattgtacctttggatgttccagcacagcagccaagaaatcaaaattggaacaacccagcaggggcaaccaacgttcaagtacctacagtccagcaacagtgcaagttatcagaatttctcaaaattgagactccaacctttgccattgccgtcgaacctatggaagccagtgattggttgcgcacagtcgagaagaagctggggttgattcagtgcacagaccaggagcgggttgtcttcgcaactcatcagttggttggactggcttcagaatggtgggatagctacgaagcatcacggccagaaggacataccatcacctgggacgagttttcatctgtattcaagagatcccatgttcccgcaggaatgatcacactgagaaaacgagagttccgctacctgaagcaagaagatttgaccgtcacagagtacctgcacgagttccatcgtttggctcactatgcaccagaagatgtggaaaatgatgaagacaaacaagagaagtatctccaggggttaaaagatgagatcgcagtgcaactactcctagaggaatatgaagattttgagaaacttaattgtaagagaaggattgtcagcatcccagtattcccatgtggtaaccaaagacagcgcacggagccacttcagatcaccggatcttctgttgcgcatcaagagtttccgccccaagaagatggacacaatgcagacaacaacattagcaatactaatgatgatgataccaccaacaaccatgcttcttgccccattagtgaccactcaaatcaagcgtgcaatgtcaacatcattcaccaaggtgtcgatgatagtatcaatgatggcacccaaaatgacaaccctagcaattgtgactctgagaaagactccaatggtgatagcaactatggtaccactgatgccaatgttagcaaggatttccaaccaccaattccaactccaagtcagaatgatcgtccccagacggatagctcagcaaagaagacgttgatttgctacaattgcaaaggaccagggcattactcgagggactgcctgcaaccaaggcaaagtcgacctccacattaccgccaatttacacgaagcagacatcccaatcgtattgtggtcactggagcaaacgccgtacccgtgaggcctcgtgttaatcagaacccatag

SEQ ID NO: 15635 - DNA, 2592 bp, Oryza sativa
  Clone ID: TFbOSC900017j.C1.o25.fg
atggctgacaatgagaaaggcaataaggtcagaagtcaggacattggtacttcaagctcccgagtgaatgaagcaccagacaccagttgtgtgacactggtccaacacctgattaaccagaaccgattgcttatagagatactacagcagcatcagacgccaattctgaacctgagtcagatacaagctcaagtgcagttggaggcagtccaatcactcacaccacaagtcagcatgccgccagcatcccaaaagacccatggtggcgtgccacatgttgactcaaaagaagcaagtatcatttgttttatgtgtgatgagcaagggcactatgcaagggagtgtcctcagcagaaaagaaaaacaccaatgcgaaccgaagataaagtccgtaagatgatcattaccagcacagaatggcctccaccaggaatgacaaaacgtcagggaagaaataccttccgaggtgcaccacagttgacagagcatcttttagctaatggaggtagagtgtctgatagtgaagattcagatcaagtctcctcagatgatgaagatgaaatggaacgtaaggcatgctctcgttgtggagaaatcggtcatgttgccagctcgtgtgccactacatgcgttcattgtgaggaagaccatccacccgacaggtgtccaacgagcaggatcacttgtttcttttgtgaaggaactgatcatgtaccaaaagattgtcaattcagttttctgctgacgaagaagatggccaaccaacccgccagttccaacggagagaagcatcaaggcaacacaaatcctagccaagattacagtttcagcctaactccagtgccaggacagaggaatcaaaatgagaaaagaaaatgccgagttcgggaagatatctgttgcttcaattgtcaaggaaggggtcatttcgccgacaagtgcccaaaaccaagaaacatagctgccagcacgtcagttcacgcaactccctgcaatcagaagcttgctcctcagcgaattgtcatccatgcatcccgaagcagtcctatagtccccgttgcaacagcttcaactccagcgagtgcattaccacaaggtgtcaatgctcaatttcagccccagccaccagttgacaagatagaggccagtatcggcattgtacctttggatgttccagcacagcagccaagaaatcaaaattggaacaacccagcaggggcaaccaacgttcaagtacctacagtccagcaacagtgcaagttatcagaatttctcaaaactgagcctccaacctttgccattgccgtcgatcctatggaagccagtgattggttgcgcacagtcgagaagaagctgggattgattcagtgcacagaccaggagcgggttgtcttcgcaactcatcagttggttggactggcttcagaatggtgggatagctacgaagcatcacggccagaaggacataccatcacctgggacgagttttcatctgtattcaagagatcacatgttcccgcaggaatgatcacactgagaaaacgagagttccgctacctgaagcaagaagatttgaccgtcacagagtacctgcacgagttccatcgtttggctcactatgcaccagaagatgtggaaaatgatgaagataaacaagagaagtttctccaggggttaaaagatgagatcgcagtgcaactactcctagaggaatatgaagatttcgagaaacttgtggacaaagccatacaactcgaaagtgagcataatcggatgaagaactgtaagagaaggattgtcagcatcccagtatttccatgtggtaaccaaagacagcgcactgagccacttcagatcaccggatcttctgttgcgcatcaagagtttccgccccaagaagatggacacaatgcagacaacaacattagcaatactaatgatgatgataccaccaacaaccatgctttttgccccattagtgaccactcaaatcaagcgtgcaatgtcaacatcattcaccaaggtgtcgacgatagtatcaatgatggcacccaaaatgacaaccctagcaattgtgactctgagaaagactccaatggtgatagcaactatggtaccactgatgccaatgttagcaaggatttccaaccaccaattccaactccaagtcagaatgatcatccccagacggatagctcagcaaagaagacgttgatttgctacaattgcaaagaaccagggcattactcgagggactgcctgcaaccaaggcaaagtcgacctccacattaccgccaatttacacgaagcagacatcccaatcgtattgtggtcactggagcaaacgccgtacccgcaacaaccgtcagtctagcttttgatgaaccacttgaaggttctctgaaaggcagcaggctcaagtaccactttgtcaccagaagcatccacaactctcggagtgaagagtacttggttgacaaagttcaaaaggtgattgatagaagataccagcaaaggtgtttatcaccgggcaaagaagtaggtcgaaaggtgattgataagagaaatctgaaaagaacacatcagggttga

SEQ ID NO: 15636 - DNA, 3057 bp, Oryza sativa
  Clone ID: TFbOSC400718j.C1.o77.fg
atggctgaagctgtgaaacatcatgtctcatatgaaaagaagctcttgagtctaatatccaatttgctatcagagcctcgttggctcgctggtgccatgtcggagcataccccaccgcggccatcctgctcgccgccgccaacaccgccgcgctcacgctctcccctcgttcgcccgtcacaaacaccgccatgccacaatcctgctgagtccccgccgtgccgtgggcgcgggcgtggcgagcgacagcccttcgctgcccagccacgcgtcgtcagggagtcgagcgccgccgtccactacccggtcctaacgaggaccaactacgaggaatgtgcgctcttcatgaccgtcaaccagcaagcacagggactttggcacgccgtggagccgtatgaagacgaggagatcgagtaccgcgacgatcggctggtgctggccgcgatcttgcgtgtggtgccaccggagatgcttcgctccctctccaccaagcgcacggtgaaatccgcatgggaagcgatcaagaccgtatgcgtcggcactcggcgcgtgcgagaggcgaatgagcagctacttcgccgggagtttgccgatgcgcggttcaaggatggcgagaacatcgacgacttctccatgcgcatcttcggcatcgcaaacagcattcgcactcttggaggcgatctccccgagatagatgttatagcaatctcgatcgaaacgctcctcgacatccgcgacctgtcaattaaggaggtcaccgtccggctccgctccgtcgagaaatgcaaggccaagccgaaggaggtcgttgacagtggcggccgtctcatgctcactgaggagcagtggctggcacggctcaagaaccgcgagcagggcggtgagagcagtggcaccacgcccggcgcggccgcgaacaacagcggcaagaaacgcgggaatcggcgcagacgtgggcgtggccaggagcaccctggcgacaagtgccataactgcagcaagatgggccactgggccaaggactgccgctccaaggccaagaaggccgaggctcacatcgccacgaaggacgacgacgagcccacgctgctgatggcgcgtgcgtgcttggtccagcggcgatgcccgccagccgaacccacgtcgaagatcacgccggtgctcgcgcatcttgatggcgaccccgatcccgcggatttgtggtacctcgacaccggcgtgacgaaccacatgaccggtgcccgctccgtcttctccgagctcaacacggcggtgactggatccgtcgtcacgatcgagggctacggcacgatcctcttcgcctgcaagaatggcgagcaccgcgggctgaccggcgtctactacattccccgcctcaccgtcaacctcataagcctcgggcagctcgacgagaatggctgcgagtccctgggtgacatggtgcgaggtctgccgctaatcgaccacgtcgaccaagtgtgcgatagctacctggccgggaaacaacgttgtgctccgttcccggcacatgcgaagcatttcgctgaacacctgctcgacctcgtgcacggctacctctgtgggccgatcttgccggcgatgctgggtgggaaccactacttcttgctactagtcgatgatgtgagccgctacatatggcttactctgctagcaagcaaggatcaagcaccggcggcgatcaagcgcttccaagcggcggccgagctggagtccgggtgcaagctcaaggtgctcaggactgatcgtggtgaggagacggcctcattcaaggaggccgagcaacacaagagctggcggcacgcgatgatggaggaaatggagtccatcacccacaacaaaacatgggttctcgtcgacccgccgccgtcgcaccgcccgatcagactgaagtgggtgtacaaagtcaagcaggacgagcgcggtgtcatcgtcaagtacaaggcgcgcctcatcgctaagggctacatccagcaagccggcattgacttcgaagaggtgtttgcgccggtggcacgcatggagtccgtgcggctcctgctcgccgtcgcggcgcacgccggctggggcgtccatcacatggacgtcaaaagtgctttcctaaacggagagcttgccgaggaggtccagggcgatgcgaagctgatcgtcggcgtctatgtggatgacctgatcatcaccggcgcgaatcaagcaaacatcggtgaattcaagaaggagatgtgcaacatcttcaagatgagtgacctcaggctcttgtcctactatcttgggctcgagtcggcgtatgccgacaagctgctctacaagagtggcatgggagactgcaactcatgcgccacgccgatggagatacacctgaagctgagtaaggcaagctcaagtccaccggtgagcgcgacaagctatcgcagcatcatcggtgggctgcgttatctggtgaacacgcgccccgacattgctcacgccgtcggctacctgagtcggttcatggaggaaccacatgaggatcatcaagcggcggtgaagcatgtgctgaggtacatcggcagaacgcgacaccatggtgttcattacgccagggggaaaggaggatggctggagctgcatggcttcagcgacagcgacatggccggcgatctggacacgcgccggagcacgagcggcgttctccttccacgactccagtcctgtctcttggcaatcagcgaaacagaaggtggtcacactatcatcttagctcggctcctgagcgacctgcttgactcggagcctggagcaccggagatcatggtggacaataagtctgccatagcaatcaccaagaatcccgttttccatgaccggagcaagcatatcgacacgagataccatttcatccgggagtgcgtggagaacgggaagatcgtcatcaactacattcgtatagaggagcagctggcggccgtactgatgaagccgctcggccgtgttccattccaggagttatgcaatgggatcggcatcgttgagctcaagggcgatggcgacaagaattag

SEQ ID NO: 15637 - DNA, 2007 bp, Oryza sativa
  Clone ID: TFbOSC401348j.C1.o24.np
atgggtcctcaaatagaacgagttgtagatgtgagcatttctcctcctaatgataaagagctatcatttaaagaggaagagaaatgtatacatctcaatgctcaagttactaatgttttatttagtgttttgagtgaagatgtatttaaaaccatcatgccgcttgaagatgctcatctcatttggaccacactcaaggagagatacgacaagtccaaatgtgatgatgtactctttatggaagaaccacttgaggagcgttcaacttcatcaccaaattgcgaagaacctcaagtgactaccttcgatgatcaagataatcatcccacatccaccttatcatcaacacatgactacattgaaggtaacgaattggtgagtaaggttgacgatcgtccaattctcccattggattccaacaacaccgacaatgaaattgtcatattgcattgtgttgttgactcatgcatctcacctagcaccaagtatgtgtgtgaggatgatatggataaatgctctacttcctatagtacttgtggaactaaccttttaaaggaagaagtaaatgaacgccattggacaagtgaagaatccacctcatcaagatgctcatcttctatttccgaagattatgcttgctttatgggtgaagatggtgactccgagtttgatcacttgagcaagaaggatataacaatggtgatcaagctcatggaagccattgagaagcaacaagcatgcactatcaagaagaatggagaaatcgtgagtctaaccgaagaactcaagaaacttaagaattttcattcttcttagactatgaggtatgaaaaattggaaaatgaatttgcttgtgccactaattctattgcttgtgtagcatctttggagaagcaaaatcaagagctcaaatctcaacttgatgagatcactaacaagtatgtggatttacaagaaagacatgatgaacttttgtgttctcatgagaatcttgtggattctcatgctatgctagaggtatctcatgaggtgataattgcaatggtaaaatcgtatgagcctcatgttcaagttgatctcacttgtactaacccttgttgctcacaagcaaatatttccccgagcactatatgtgatttggattgtgtaggcaaaagggagaagcaaatagatcatggacttgtgtgcattgctcaaccttctcaagataaccgtgagggcatggtgaagaatcttgaggagggatcaaccgtggcttgcaccaagatccatcaaagggatagcaagtccatcaatgcttataccaagggacgaaatcaaaagatgatcaagaattccattacttgcttcaagtgcaagaaagtgcgacatcatgttagaaattgcccttggaagaaaggaaataagttgatcaagaagaaggacattcctcacatcaagtgcttcaagtgcaccgaagtgggacactttgcctccaaggtctccttgcacattggatgaacgatgtaaaacatcaagtgagaggcaaacaagcaaaccgagaaaaatatataagcaaaagtcgactttgctataattgctgggcaaagggacatattggtaaaaatagtcccatgggtaacattcctaagccaagtctctcatttgattataatttgcttaggaatgccaaaaatgatatttgtgctactaggatgatttgttcgccacacactagcacaaaggccatttgggtgtctaagtctcttgtgactaacctttatggacccaatgttgttggggaccaaaatgtgctaaaattttattgtggaaccaaaggcttcggtaagaccgctcgatttgcaatcaagctcatctatcaccatgccatcgaccccggagaccccaagaagagcacaagcactatcaggatgtagactgtgatcaaggagttaaacatgttcgtgatggaaaagcttaagttctttctcgggattggaatcaaggaagagatttcatcaagcccat

SEQ ID NO: 15638 - DNA, 1743 bp, Oryza sativa
  Clone ID: TFbOSC400390j.C1.o65.fg
atggctgacaatgagaaaggcaataaggtcagaagtcaggacattggtacctcaagctcccgagtgaatgaagcaccagacaccagttgtgtggcagtggtccaacacctgattaaccagaacaaattgcttatagagatactacagcagcatcggatgccaattttgaacccgagtcagatgcaacctcaagtacagttggaggcagtccaagcactcacaccacaagtcagcgcaccgccaacatcccagaaggcccctcatgccatgccacatgttgacccaaaagaagcaagtatcatctgttttatgtgtgatgagcaagggcactacgcaaggaactgtcctcagcagaaaagaaaagcaccaatgcgaaccgaagatgaagtccgtaagatgatcattaccagcacggaatggcctccaccaggaatgacaaaacatcagagaagaaattccttccgaggtgcacaacagttgacagagcatcttttagctaatggaggtagagtgtctgatagtgaagattcagatcaagtctcctcagatgatgaagatgaagtagaacttaaggcatgccctcgttgtggagaaatcggtcatgttgccagctcgtgtgcctctacatgcgttcattgtgaggaagaccatctacccgacaggtgtccaacgagcaggatcacttgtttcttttgtgaaggaactgatcatgtaccaaaagattgtcaattcagttttctgctgacaaagaagatggccaaccaacccgccagttccaacggagagaagcatcaaggcaacacaaatccccgccaagatcaccgtttcagcctaactccagtgccaggacagaggaatcgaaatgagaaaagaaaatgccgagtccgggaagacatctgttgcttcaattgtcaaggaatgggtcatttcgccgacaagtgcccaaaaccgagaaacatagctgccggcacgtcagtccacgcaactccctgcaatcagaagcttgctcctcaacgaattgtcatccatgcatcccgaagcagtcctatagcccgcgttgcaacagctccaattccaatgaatgcactaccacaaggtgtcaatgctcaatttcagccccagccaccagctgacaagacaggggccagtatctgcgttgtacctttggaagttccaatacagcagctgagaaatcaagtacaagatgaagaacccgagttgaagaagggcattattccaaaaactgtccccaaccaaggcaaaatcgacctccacattaccgccaatttacacgaagcagacattccaatcgtattgtggtcactggagcaaacgccgtacccgtttcaccgaaaggcagcaagccaaaggacctcatcgtccccagaagcgtccgcaatccacattaaagaataccacctgttagacataagccgaaagaagattgataaaaagagattggcaaagatgttctctagcatgaaagaagtgggccgaaaggttgactccgaagatatgaatcatgagaagttctggaacggaagcatcactgcactaccgcaacctagtctgagtcagccaaaaggtgcaccctggtccaagtcaggtgaagagaagattccatccgcaacaggaggtcaagccaagcagttccgagtggtaaagttttgctggaagttcgtcaagacgcaacggaagaagtcagacaagaagagaagaccgcccaacctatcttcttgctag

SEQ ID NO: 15639 - DNA, 2170 bp, Oryza sativa
  Clone ID: TFbOSC13329j.C1.o2.np
ctgtggttgtactcattattccctagcgccgccgccgccgcggattccgccgcatcccgccgtccccgcgcgcattaaagagaggggaattactccccgcgtttccctctcccgattccccctcttttccctctctctctccctcggattcgtccggattcatcccgcgaagttcgccggcgtcttcaatggcgcccgagatctccgcgcgcggtttcctctctccccggccgcgctctccccctcccgttgctataaaatcgtccctcgtgcttcgctcttccgtttccgccgctcgccgctcgctctcgccgtcggtttcgtgcccgcgccgtgctcctctctctccgccgtcgccgccgagctccgtttcgccgccgtcgtcgctccggtcctcctcccgactcggcgccacctccatcggcttcgccgagtggttgccgaccccgtccgccgctccgcttcgcccgccgaccgccggagcaccgtcgacatcggcatcccgaaccgcgccgccgcttttctccactccggccgtcgtttccgccgtcctcgttgtcccggggtgagccgtggaccgtccctctcgcttccctctcctctccgctctctcgggcgccgctccgccgcgccggtggtcgccggcggtgaccatcggggcgcgggcgcgccgctcccgtcggccgtgccggcgaggccgccttcgggcgcgccccgcggctgccaggtgggcccggccgtcagccgcccgcgcccgcgggtgcggctgacgcgtgggacccacggcgccgaccgccgccagccgcgtgctcccggtccaccgtggaccgagaggctgacgcgtgggccccacttcccgtggacccgggcaaatgaaggctacacgagctgcggcccgatggctgacaatgagaaaggcaataaggtcagaagtcaggacattggtacctcaagctcccgagtgaatgaagcaccagacaccagttgtgtggcagtggtccaacacctgattaaccagaacaaattgcttatagagatactacagcagcatcggatgccaattttgaacccgagtcagatgcaacctcaagtgcagttggaggcagtccaagcactcacaccacaagtcagcgcaccgccaacatcccagaaggcccctcatgccatgccacatgttgacccaaaagaagcaagtatcatctgttttatgtgtgatgagcaagggcactacgcaaggaactgtcctcagcagaaaagaaaagcaccaatgcgaaccgaagatgaagtccgtaagatgatcattaccagcacagaatggcctccaccaggaatgacaaaacatcagagaagaaattccttccgaggtgcacaacagttgacagagcatcttttagctaatggaggtagagtgtctgatagtgaagattcagatcaagtctcctcagatgatgaagataaaatagaacttaaggcatgctctcgttgtggagaaatcggtcatgttgccagctcgtgtgcctctacatgcgttcattgtgaggaagaccatccacccgacaggtgtccaacgagtaggatcacttgtttcctttgtgaaggaactgatcatgtaccaaaagattgtcaattcagttttctgctgacgaagaagatggccaaccaacccgccagttccaacggagagaagcatcaaggaaacacaaatcctcgccaagattccagtttcagcctaactccagtgccaggacagaggaatcgaaatgagaaaagaaaatgccgagtccgggaagacatctgttgcttcaattgtcaaggaatgggtcatttcgccgacaagtgcccaaaaccgagaaacgtagctgccggcacgtcagtccacgcaactccctgcaatcagaagcttgctcctcaacgaattgtcatccatgcatcccgaagcagtcctatagcccgcgttgcaacaactccaattccaatgagtgcactaccacaaggtgtcaatgctcaatttcagccccagcaaagaattgttgtagatggaagaagttgtgtctctccccgacctactccaggcctagccaagggcaatcaacctccggagggcgataccaagcagaagaccgtcatccgcttcaaccagcaatcagaaggaagcttgcatgcctgcagg

SEQ ID NO: 15640 - DNA, 3708 bp, Oryza sativa
  Clone ID: TFbOSC414006j.C1.o3.fg
atggctggttttgccgatgcactgaggccggataaattcaccggtgtgcattttaagagatggcagatcagggtcactctgtggctgacagctatgaaatgcttctgggtgagtactggcaaacctgaaggagttcttactgctgaacagcagaagcaattcgaggaagccactactctctttgtgggatgcattcttagcgttcttggcgatcgtctggtcgaggtgtatatgcatatgaccgacgctaaggagttatgggatgcactgaatactaaattcggtgctactgatgctagcaatgatctgtatatcatggagcagtttcatgactacaaaatggctgacaaccattctgtagtcgaacaggctcatgagatacaaaccatggctaaggaactcgaactccttaagtgtgtcttacccgacaaatttgtggccgggtgcattattgcaaaactacctccatcttggaggagtttcggtactgcactcaaacacaagagacaggaatactccgttgaggggttgattgcgtctcttgatgttgaggagaaagctcgggaaaaagatgccgcgtctaagggcgatggtgggcagtccagtgccaatgttgtgcacaaggcccagaacaagagcaaggagaaatacaaagctcagcagaccaccaacttcaagaagcagaagaagaacaacaacaatcctaatcaggatgagaggacttgctttgtgtgtggccaagttggtcatctggctaggaagtgtccacaccgcaaggggatgaaggcacctgcagggcagacttctaagtctgctaatgtgaccattggcaacactggagatggaagcgggtatggtcgcacggggttccaccgtcctaatggggaatgggtcacatgcttctgttcatggtgttggcacggtagatctgaagtttacttcgggaaagatcgtgcagctgaagaacatgcagcatgtcccttctatcgacaggaatcttgttatgagtgcggaggcctgttccgcttttccctttctgatttctgcaataagtatgtgaaccatatttgtggcagtgtggatgatgaggctaatgtttggcattcacgtttatgtcatattaattttggcttgatgtctcggctttccagcatgtgtttaattcctaagtttttcattgtcaaaggttctaagtgccatagttgtgtgcaatcgaagcaacctcgcaagcctcacaaggctgccgaggagagaaacttggcaccactagaactcctacattcagatctttgtgaaatgaatggggtgttgacgaagggtggaaaacgatatttcatgacattgattgatgatgctactagattttgctatgtgtacttgttgaaaacgaaagacgaggctctagactattttaaaatttataaggcagaagttgaaaatcaacttgacagaaagataaaaaggcttaggtctgatcgtggtggagagtttttctcgaacgagtttgacttattctgtgaggaacatggcatcatacatgagaggacgcctccctattctcccgagtctaatgggattgctgaaaggaagaaccgcacactgactgacttggtgaatgccatgttggacaccgcgggactgcctaaggcatggtggggggaggcattgttgacctcaaatcatgtgttaaacagagttcctaacagaaataaggacaaaacaccatatgagatatggattggtagaaaaccatcactttcttatttgcgcacatgggggtgcttggcgaaagtcaatgtaccaataacgaagaagcgcaaacttggacctaagactgtggactgtgtttttctgggatatgctcatcatagcattgcctatagatttttaatagttaaatccgaggtaccggacatgcatgttggtacaattatggagtctcgtgatgctaccttccttgagagctttttcccaatgaaggatacacatagtggttcgaaccaaccctctgaaataattcccagttcaatcacaccaccagaacaaactgaacatacacatgaacttgtgtctgaggaggatgtcagtgaagctcctcgaaggagtaagagacaaaggacggctaagtcttttggtgatgacttcactgtgtacctcgtggatgacactcctaagtcaatttcaaaagcatatgcatctcctgatgcagactactggaaggaggctgtccgtagtgaaatggattccattatcgctaacgggacttgggaggtgacagagcgaccctatgggtgtaaacctgtggggtgcaagtgggtgttcaagaagaagcttaggcctgacggtactattgaaaagtacaaggctcggcttgttgctaagggctatactcagaaagaaggcgaagatttctttgacacttactcacctgttgctagattgaccacaattcgtgtgctactttccctagcagcctcacatggtcttctcgttcatcaaatggacgttaagacagcttttcttaatggagagctggatgaggagatctatatggatcaacctgatgggtttgtagttgaaggtcaagaaggcaaagtgtgcaaattgttgaagtctttgtatggtctgaaacaagctcctaagcaatggcatgagaaatttgacaaaacattgacatctgcaggctttgcagtcaatgaggcagataaatgtgtgtactatcgccatggtgggggtgaaggagttattttgtgcttgtatgttgacgacatactgatatttgggacaaaccttcaggtgataaatgaggttaaatcattcttgtctcaaaattttgatatgaaagatttgggagtagctgatgttatcttaaacattaagctaattagaggtgagaatgggattaatctcttgcagtcccattatgtggagaagatcttgaatcgctttggctacattgatagtaagccttctccaacaccttatgatcctagcttgttgcttcgcaagaacaagagaattgctaggaatcaactggaatactctcaaatcattggctcgttgatgtacctggctagtgcaactaggcctgatatctcctttgctgtgagcaagttgagccgatttacttctaatccgggagatgatcactggcgtgcgcttgagcgagtaatacgctatctgaaaggtactgtggaattggggcttcactatactgggtatcctgcggtactggagggtcatagtgattctaactggatctctgatgtggatgagatcaaagccactagtggatatgttttcacactgggtggtggtgctgtttcatggaggtcttgcaaacagacaattttgacgaggtcaaccatggaagcagagctaacggcactggatactgctactgttgaggcagaatggctgcgtgatctattaatggatcagcctgttgttgaaaaaccggtgccggctatccttatgaactgtgacaatcaaacggtaattgtcaaagtgaatagttctaaggataatatgaaatcgtctagacatgtgaaaagacgattgaagtctgtcaggaaattaagaaactccggagttataacgttggattacatccaaacagcgagaaacctggcagatcccttcacgaagggactatcacgaaatgtgatagacaatgcatcgaaggagatgggtttgagacccatgtga

SEQ ID NO: 15641 - DNA, 1868 bp, Oryza sativa
  Clone ID: TFbOSC13321j.C1.o1.fg
ctcctggtttggaatggtgtattcctggtttggagatagaactgtgcagccgggatggttgttcagaacgattgggcctatgcaacaggatgccgcgctacaagcctgagtacttgttcggtactgaaggatttgtccaggagttgcgtacgatgtccttcctcatagggtttggaattgcccctttgtatgcccagatcccgcatgatcgtgatgaagaaaaatgcggagtcaaagtcaccttgaatagcaaccgtgaagatattccatcagtgatgttcgaggctggaggaggaagctacattcatgcttgtcaggaggtggcaaggatcgccataggagaactccgggaaagctataatgatcggttggccgacaccgagtaccgctaccatcctcgtcaaccccagggaagtgattgtggcagctactttgaaccggctgggatcgagaacgacgctaccacaaggcatttggttgagatgctatgggctatggatgaaacccgcgctgagattgtaatagccgctcaagatcgtgaagaccggaatagggggaagatctgcaagctagaagacaaggtggatcatttggagaaggagctagccgcgttgaagggagaagcaccaccgcagaaggccagagtccgtctaccgcaaggaagagagctctattcgtccctcgctatcagttggcaccaaaggttcgtctggtggaaaaagaagctaccccagcggatcctccggttgtcaatcactactaatcccgtcgaagctggtgattggttgcacgccatagagaagaagttggatctgctccagtgcacagaccaggagaaggtctccttcgcatcacaccagctgcatggccctgcttcggaatggtgggatcacttccgcctcaacaggactacccctgaacctatctcttggcttgaattcaacgctgctttccggaagacgcatataccctcgggagtggtgtctctcaagaagaaggaattcaggtcactcacacaaggttcccgcactgtcaccgagtatctgcacgagttcaatcgtctggctcgttatgctccggaagaggtgcgcactgatgaagagcgtcaggagaggttcttaaaaggacttaatgatgaactttcctacccacttatgactggagattatcatgatttccagaagttagtggataaagctattcgccaggaggacaaatacaaccgcatggagcagaagaaacgccggattgctcatttcaaggcacagcaggggaatagtcaaaggccacgccttactttgggaccccagtccatgccacagggagctccacgccctgttgcatctccaacacagcaacagcctgccaagagggagcaaggcagtaagcccggggtgtgcttcaactgtggagacccaggacattacgctgacaagtgtccgaagccccgccgcgtgaaggtcgtccctgcccagaacaacccctccgcacccgcagccaaggctcgtgtcaaccatgttgctgctgcagaagctcaaggtgctccagatgtgattttgggtacattccctgttaactcagttcctgcaaccgtgctttttgattctggtgctatgcattcatttttatccatgagttttgcgggaaatcaagggatggaggtaaaggaacttagacgtcctttgatggttagtactccgagtaaccaagcactctcctcacaacgtagcccctctgtcagaatagagatccaaggtgtacctttcctggccaaccttattctgttagaatccaaagaccttgatgtcatcctagggatggactggttagccagatataaaggtgtgatagattgtgctaatagaaaa

SEQ ID NO: 15642 - DNA, 917 bp, Oryza sativa
  Clone ID: TFbOSC15264j.C1.o1.np
gcgccattcgccattcaggctgcatgcaagcttgcagcctagtgtgcaaagcagagagcccaatgaagagaatccattgaatcccgggaattgctttcctcctagcctttcgtaccacgtggggtcacgtactaagcacgccaaaggcaagaagagtaagaatcagaagagaaaagcgccgatgcgaactgaagaagaagtacgtaagatgactattaccagcaccgaatggcctccagcagggataactattcctagacgtcaaagaggaaataccttccgaggtgcacggcagttgacccagcacctcctaagccatggtggcagagtatctgatagtgaagggtcagatcaagtctcctcggattatgaatatgagtccccccgacgtctcggcgaggaagagatggaattaaaagcatgcacccgttgcggagaaattggacacattgctagcatgtgtctcacactctgccctcattgtgaagaagaccatccaccaggggagtgtcccacccgcaaggtcacatgttttctatgcgaaggtacaaaccatgtgcccaaggattgccaactcagtgtgttgttgaccaagaccgcagaaatccaacgaacaaccctacgattgtctcatcagctagtcagctccaacagcaacctcgacgatatcatccacagcaccaatgctcctcctgctgcacctgactctgcaataaatcatagcaataataccttcagcaccaaccattctctgcactgacagcctcagcaatgaattgtcgtcgatggaagaagttgtttctctccccgacctactccaggccgagcgaagggaaatcaacctcaggagggtgataccaagcagaagaccattatccacttcaaccagcaatcagaaggaatttttctcctgtgaa

SEQ ID NO: 15643 - DNA, 672 bp, Oryza sativa
  Clone ID: TFbOSC15276j.C1.o1.hg
atggctatggattactgggatttccagcagttgatggacaaggcgattcgccaagaagacaagtataataggatggaacagaaaaagcgtagggctgctcatttcaaggcacaacagggtagtagccagaggccgcacattgctttgggacctcaagctgcaccatacccacagggaggatcctcttcagttgctcgccctcaacgccagttctacaacaacaacactggtaatcgcagcaacgataatcgtaatatggtcactcgtcctgtagcagctccaactcagaatcatcctgtcaggaaggaacagggaagcaagccaggggtgtgcttcaattgtggtgatccaggacattatgctgataagtgtcccaagcctcggcgtgtgaagaatgctcctgttcagaacaactccaatgctccagcaccgaaggctcgtgttaatcatgttgcagccgcagaagcccagaatacacctgatgtggttttggaggaggagtgcttcaatgaagtggctaaacagccgggcccacatgtcagtgactcggcggcaagagaagcagaggcagcaggagagcaacggcgaccaacagcgttcgtggcggcgtattggcttcatcatatgtgggcgtcgttctgctgggacctaggcgatgtcagtggcgcaatg

SEQ ID NO: 15644 - DNA, 2040 bp, Oryza sativa
  Clone ID: TFbOSC15283j.C1.o3.fg
atgggggtcgctggggagtccattgcctctggttttgagggggagattatgatccaggaacggtgcactgtgatgccgccccattcaccgagaaatttgatcaaggtgttaggattcgtcagggagctgaggttgatggcttttgagtatcatcctcacaagcctcatggtcaagattatggaacttacacctatcctgatggtgaggagagtgccactctgatgcaggcggtgcatatgcttagttctatgtatgcagtaagtgtggagcgagacaaagccgctcatgacagggaaaactggaatcgaggcaagatttgcaagttggagagtaaggtgtaccgtctacagaaggaattagctgagcttaaaggagagacgccgccgccaacacccaagcttcacctcaccgcaaggaagagaacctgtccaccacctcgtctccagttagcttcgaagcttcgcgtgatgggagatgctgtgccagatcgtgctgaacctgtcatccacgtcttaagtgatgaggaagaagaggaatacccagaagaaagaatggtgaacacgcgcactggaagtggaagtggagctgctaacaatggaggagattccacgctagctcagattttggcccaacaaacacaactgatcaatctgttagtgcagcaggcacagaatcagcaggcaaacaaccagaaccagaatcaacccccacctccccaaaacaagttggcagatttcttacgtctgcatggtcccgctgctgaatggtgggatcactttcgccaagccagggctgaaggagaacctatcacttggcaggaattcacggccgctttcaagaacacgcacataatgacaggtgttgtagctctgaagaagagagaatttagagcgctcaaccagggatctcgttcggtcactgagtacctccatgatttcaatcgtttagctcgctatgctccaaaatatgttcgcaccgatgaagaacgtcaggagaagtttttggagggactgaatgatgagttgtcttatgctttgatgtctacggatttccgggatttccagcagttagtggacaaggctattcgtcaggaagacaagtacaatcgaatagagcagaagaagcgcagggctgcccaatttaaggctcaacagggcagtaaccagaggtcgcgtctcgttacgggacctcaagctacatcataccctcaaggaggatcttcgtcagttgctcgccctcaacgccagttctacaacaacaatactggtaatcgtggcaatgacaaccgcaacgtggtcgctcgtcctgcagcaactccagctaagaaccagcctgtcaggaaggaacagggaagcaagccaggggtgtgcttcaattgtggtgatccagggcactatgctgataagtgtcctaagcctcggcgtgtgaagaacgctccagccccgaacaactctaatactccagcaccgaaggcacgtgttaatcatgttgtagcggcagaagctcagaatgcaccagatgtggttttggatctagatgttatcttagggatggattggttatctcgtcacagaggagttatagattgtgccaaccgtaaggtgactttaaccagtagcaatggggaaaccgtttctttctttgtgtcctctcctaaatatcatggtgtgatcttaaaccaagttgctctacaagagatccccatagtacaagactacccagacgtgtttcccgaggatttgccaggtatgccacctaagagagacatagagtttcggatatacttggtacctggaaccaaccctatccataagagaccatacagaatggcagctaatgagttagctgaggtgaagagacaggtgggtgattttcttcagaaaggatacatcagacccagtacttcgccatggggagcaccagtcatctttgtggagaagaaagatcatactcagagaatgtgcgtggattattcagaagaattcagtggagcaatcattcagaagaagaagccacttgggagcgagaagatgaattga

SEQ ID NO: 15645 - DNA, 3533 bp, Oryza sativa
  Clone ID: TFbOSC15295j.C1.o2.fg
atggctcctggtttggaatggtatattcctggtttggagatagaactgtgcacccgggatggttgttctgaatggttgggcctatacaacaggatgccgccccattcaccgagaaatttgatcaaggtgttaggattcgtcagggagctgaggttgatggcttttgaggtaggctatgaagttgctcctgagtatcgccggatttcccatgaccccaacgaggagaagtgtcgtgttcgtgtgacgttggctagtgatcgtgaagaccttccgtccattaagttcgaaactagaggaagatcgtacaaccatgcttgtcaagaagcagctttggtggccattggagagttgcgtcaacgctttgaagaagagttggattcatcagctttccagtatcatcctcacaagcctcgtggtcaagactatggaacctatacctgtcctgatggtgaagagagtgccactctgatgcatgcggtgcatatgcttagtgctatggatgcagtaagtgtggagcgagacaaagcagctcatgacagggaaaattggaatcgaggcaagatttgcaagttggagagcaaggtgtaccatctacagaaggaattagctgaacttaaaggagaaacgccgctgccaacacccaagcttctcctcaccgcaagaaagagaacctgtccgccacctcgtctccagttagcttcaaagattcgcgtgatgggtgaagttgtgcccgatcgtgctgaacttgtcatcgacatcatggtgaacacgcgaactggaagtggaagtggaagtggaagtggagctgctaacaatggaggagatcccacgctagctcagattctggcccaacaaacacaactgatcaatctgttagtgcagcaggcacagaatcagcaggcaaacaatcagaaccagaatccacccccacctccccaaaacaagctggcagatttcttacgtcagttggtggacaaggcgattcgtcaggaagacaagtataaccggatggagcagaagaagcgcagggctgcccaattcaaggcacaacagggcagtaaccagaggccgcgtctcgttacggaacctcaagctccatcgtaccctcaaggaggatcttcatcagttgtccgcccccaacgccagttctacaacaacaatactggtaatcgtggcaatgacaaccgcaacatggttgctcgtcctgcagcaactccagctcagaaccagcccgtcaggaaggaacagggaagcaagccaggggtgtgcttcaattgtggtgatccaggacattatgctgataagtgtcctaagcctcggcgcgtgaagaacgctccagccccgaacaactccaatgctccagcaccgaaggcacgtgttaatcatgttgcagcagcagaagctcagaatgcaccagatgtggttttgggtacgtttcctgttaactctatacccgcatctgtgctttttgattccggtgctacacattcctttttgtctaaaagttttgcgagcaatcatgagatggaagttattagtcttgggagacctttactagttaataccccaggcaatcaagtatcttcgacacagtattgtccttccgctactatagaaatagaagaagttcctttcccatcctcacttatcttgctagaatccaaagatctagatgttatcttagggatggattggttatctcgtcacagaggagttatagattgtgccaaccgaaaggtgaccttaacctgtagcgatggggaaaccgtttctttctttgtgtcctctcctaaatctcatggtgtgaccttaaaccaagtcgctctacaagaaatcccagtagtacaagactactcagatgtgtttcccgaggatttgccaggtatgccacctaagagagacatagagttccggatagacttggtccctggaaccaaccctatccataagagaccttacagaatggcagctaatgagttagctgagataaagaggcaggtggatgatttgcttcagaaaggatatatcaggcccagtacttcgccgtggggagcaccagtcatctttgtggagaagaaagatcatactcagagagtgtttatggaatatctggataagtttgtcgtggtgtttattgatgacattcttatttactccaagacaaaagaagaacatgaagagcatcttcgtctagctttagagaaactacgtgagcatcagctctatgccaagttcagtaaatgtgaattttggttgtctgaagtgaagtttcttggtcatgtcatctcatccggaggagtggcagtagatccaagcaatgtggagtcagtgttaaattggaagcaacccaagacggtttcagaaattcgtagtttccttggacttgcggggtactaccgcaggtttattgagaacttctcaaagatcgccagaccaatgactcgtctgcttcagaaggatgtgaagtataagtggacagaagattgcgagcaaagtttccaagaactgaagaaaaggctagtgactgcgcctgtgttaattctgcctgattcaaggaaaggttttcatgtgtattgtgatgcatcccgactcggtttgggttgtgttttgatgcaagaaggaatggtggttgcctatgcatctaagcaattacgtcctcatgagaataactacccgacgcatgacctagagttggcagctgtagtgcatgcattgaagatttggcgtcattatcttttcggtaaccgtacagagatgtatacggatcataaaagtttgaaatggttagagttgattaaagattatgatatggaaatccattatcacccgggtaaagcaaatgttgtagccgatgccctcagcaggaaaagctattgtaatatgtcagaaggtcgacatctaccttgggagttatgccaagaatttgaaaagctgaatttggggatagtcagcaaaggttttgtggctgctttagaagctcaacctaccttgtttgatcaagttagagaagctcaagggaatgatcctgacatccaagaaatcaaaaagaacatgagaagaggaaaagccatcggttatgtagaagatgagcaaggaactgtgtggttaggagaaagaatttgcgtacctgataacaaggagttgaaggataccatcgtgaaagaagctcatgaaactttgtattccattcaccctagaagcactaagatgtaccaagacctaaagcaacaattctggtgggctagtatgcgacgtgagatagcagaatatgtggctctatgtgatgtatgtcagcgagtcaaggctgaacatcagaagccagccggtctgttgcaaccattgaagattccagagtggaagtgggaagaaataggtatggattttataaccggtctacccagaacgtcggcaggacatgattctatttgggtagtggttgacagattgactaaagtcgctcatttcatacctgtcaaactgtcaaaacaacctacacggggaataaacttgcagagctatacatggccagagtg

SEQ ID NO: 15646 - DNA, 5129 bp, Oryza sativa
  Clone ID: TFbOSC15641j.C1.o2.np
agattccgacgtttccggagagtctgttttcgcaggagaagattttgaagagttccaaggccagcaaggcaactcctggtttggaatggtatattcctggtttggagatagatctgtacagccgggtatggttgttcagaaaggttgggcctatacaacaggatgccgcgctacaagcctgagtacttgtttggtgttgagggatttgtccaggagttgcgtacgatgtcctttgccataggatttgggactgcccttttttatgcccagattcctcatgatcgtcacgaagagaagtgccgagtcaaagtcaccttgaacagtaatagtgaagatatcccctcagtgatgttcgaagctggaggaagaaactacatccatgcatgtcaggaggtggcaaggatcgccataggagagctccgcaatcgctacagtgatcggttggccgacactgagtatcactaccatcctcgtcaaccacagggaagtgaccgtggcagctaccttgagactgaaggaattgagaatgatgctaccacaaggcatttggttgagatgctgtgggctatgatgaaacccgtgcagagactgtgttagcagctcaagatcgtgaagaccggaatcgtggtaagatttgcaagctagaggacaaggtggatcgtttggagaaggaactagccatgttgaagggagaagcaccaccgcagaaggccagggttcgttttaccgcaaggaagagagctctatttgtccctcgctaccaattggcgccaaagatggtgctcactcgcagcaacgggaatggccccaacaacaacaacaacaacaacaatggagagaatcccacacttgcccaagtcctggctcaacaggcacagcttatgaacatgatgatgcagcaactccagaaccagcagaaccagggaaataaccatgcacctccccagaacaagttagcagaatttcttcgtgtgaggccgcccactttctctagtaccactaatcctgttgaagctggtgattggctgcatgccatagaaaagaagttggatttgcttcagtgcaccgatcaggagaaggtctcatttgcatcacatcagttgcatggccctgcctctgaatggtgggatcacttccgccttaacaggacaactgctgaacctatcacttggcttgaattcaccgctgctttccggaagacgcatataccatcgggagtggtgtctctcaaaaagaaggaattcaggtcgctcactcaggggtctcgctctgttaccgagtatctgcacgagttcaatcgtctggctcgttatgctccggaagatgtgcgcactgatgaagagcgtcaggagaagttcttggaaggacttaatgatgagctttcttacccactcatgactggggaacagaagaaatgccggattgctcacttcaaggcacaacaggggaatagtcagaggccgcgtcttaccttaggaccctagaccatgccacagggaggttcttcgtctgttgttcgtccgcagcgtcagttcttcaacaacaatgctggcaacaacatccgcaatcaagctccacgccctattgcagcttcgacaccgcaacaacctgccaagagggagcaaggcagcaagcccggggtgtgcttcaattgtggagacccaggacattacgctgacaagtgtccgaagccccgacgtgtgaaggttgtccctgaccagagcaactctaccgtaccagcatcaaaggcccgtgtcaatcatgttgttgctgcagaagctcaagatgctccagatgtgattttgggtacgtttcttgttaacttagttcctgcaacagtgcttttcgattctggtgctacacattcattcttatctatgagttttgcgagaaatcatgggatggaagtagaagatcttagacgtcctttgatggttagtaccccaagtaatcaggcactctctttgcaacgtagcccctctgtcagaatagaaattcaaggagtaccatttctggccaatcttatcctgttagaatccaaagaccttgatgtcatcctagggatggactggttagccagacataaaggtgtgatagactgtgctaacagaaaagtaactctcaccagcaatgatggtcgagttgtaactgttcatgcattgtcttctgagtctttgagatcaaaactgaaccaaataactttggaagagattcctatagtccgggagtatcccgttgtgttcccagacgatttacctggtatgccgcctaaaagggatatagagttcagaatagatttggtaccaggaacaactccgatccataagagaccttatagaatggcagccaatgaattagcaaaagtcaagagacaagtagacgatttgcttcagaaaggatacatcagaccgagttcatctccgtggggagctccggttatttttgtagaaaagaaagatcatacccagaggatgtgtgtggactatcgtgcactaaatgatgtgactatcaagaataagtatccgctgcccagaattgatgatttgtttgatcagcttaaaggtgccaccgttttctccaagatagatcttcgatcagggtatcatcagttgagaatcaaagaggaagatatacctaagacagcttttaccactaggtatggattgttcgaatgtactgttatgtcttttggacttaccaatgcccccgctttcttcatgaacttgatgaataaggtgtttatggaatacctagacaacttcgtggtagtctttattgatgacattcttatctactcccgaaccaaagaagagcatgaagaacatcttcgccttgcactagagaagctacgagaacatcaattgtatgctaagtttagcaagtgtgaattttggttgtctgaagtgaagttccttggtcacgtcatctcagcaggaggagttgccgtcgatcctagtaatgtggaatccgtaaccaactggaaacaaccaaagacagtttcagagattcgccgtttcctaggcctcgcaggatattatcggaggtttatagagaatttttccaagattgctaagcccatgacacgactgcttcagaaagatgtgaagtacaagtggtcagaagaatgtgagcagagttttcaagagttgaagaatcgcttaatatcagctcctattttgattttacctgatccaaagaagggtttccaagtgtattgcgatgcatccaaacttgggttaggttgtgttctgatgcaagatgggaaggtggttgcctatgcatctcgtcagttacgtccgcatgagaagaactaccctactcatgatcttgagttagctgcagtggttcatgcgttgaaaatttgacgtcattatcttttcggtactcgtacagaggtgtacaccgatcacaagagtttaaagtatatctttactcagccggacctgaacatgagacaacggagatggttggaattaattaaggattatgacatgggaattcattatcacccgggaaaggctaatgctgtagcagacgctcttagcaggaaaggctattgcaatgctacgaaaggacgacagttgccattggaattatgtaaggactttgaaagattaaatttgggaattgtcagtagaggtttcgttgcagccttagaagcgaagcccactctaattgatcaagttagagaagcccaaattaatgatcctgatattcaagaaaccaagaagaatatgagaagaggaaaagctatcggtttcttggaagatgagcagggaactgtatggttgggcgaaagaatctgcatccccaacaacaaagatttaaaagatgtaattctgaaagaagcccatgatactttatactccattcaccctggtagtaccaagatgtaccaggatctcaaggaaagattttggtgggcaagtatgaagcgtgaaatcacagaatacgtagcagtatgtgatgtttgtcagcgagttaaggcagaacatcagaaacccgccggtttgttgcagcctttgaagattcctgaatggaagtgggaagaaatcggtacggatttcatcactggtctacccagaaggtcatcaggccatgactctatttgggtgatagtcgacagacttaccaaagtggctcatttcatcccagtaaagacaacctattccggaagtcggttggcggaattgtatatggcaaggattgtgtgtttgcatggcgtccctaagaaaatagtgtctgatcgaggcagtcagtttacttcaaatttttggaagaagcttcaggaagagatgggttctaagctgaactttagtactgcttatcatccgcagacagacggacaaaccgaaagggtgaatcagattttggaagatatgttgagagcttgtgctttagacttcggtggaagttgggataagaatctaccttatgcagaattttcatacaacaacagttatcaagctagtcttcagatggctccttacgaagcactgtatggtcggaagtgccgcactccgcttttgcgggatcaaacgggagaacgtcaggttttcgggacggatatcctaagggaagcaaaagagaaggtaaagatcattcaagaaaggttgcgtgtggctcagtctcgccataagagttatgccgacaatcgtcgcagagatttgagttttgacgaaggagattatgtgtaccttcgtgtcacgcctcttcgagaagttcatcgttttcacaccaaaggaaaattggcaccgcgttttgtgggaccttataagattgtcagtagaagaggagaggttgcttatcagttggaattacctcaatttttggcaggagtccataatgtgttccatgtgtcgcaattgaaaaagtgtttaagcgtacctaccgaagaagctaatcttgaacagatagaagtccaagaggatcttacctatgttgagaaaccaatccgtatcttggaaatagatgagagaagaaccagaaatcgagttatccgtttttgcaaagtccaatggagtaatcactcggaagaagaatcaacttgggaacgagaagatgaattgaagtcagctcatccgcatctgttcgccagttcttccgaatctcgaggacgagattctgtt

SEQ ID NO: 15647 - DNA, 4776 bp, Oryza sativa
  Clone ID: TFbOSC15717j.C1.o3.fg
atggcttttgaggtaggctatgaagttgctcctgagtatcgccggatttcccatgaccccaacgaggagaagtgtcatgttcgtgtgacgttggctagtgatcgtgaagaccttccgtccattaagttcgaagctggaggaagatcgtacagccatgcttgtcaagaagcagctttggtggccattggagagttgcgtcaacgctttgaagaagagttggattcatcagctttccagtatcatcctcacaagcctcatggtcaagactatggaacctatacctgtcctgatggtgaagagagtgccgctctgatgcatgcggtgcatatgcttagtgctatggatgcagtaagtgtggagcgagacaaagcagctcatgacagggaaaactggaatcgaggcaagatttgcaagttggagagcaaggtgtaccgtctacagaaggaattagctgaacttaaaggagaaacgccgccgccaacacccaagcttcgcctcatcgcaagaaagagaacctgtccgccacctcgtctccagttagcttcgaagattcgtgtgatgggtgaagctgtgcccaatcgtgctgaacctgtcatcgacatcataagtgatgaggaagaagaggaagaccctgaagaaagagagccagctactccagaggaagaagatccgtcgcttcgttccgacgcaaggcgggattacaccaccaatccagtagaagcaggagattggctgcatccggtggagaagaagttggatttgatccagtgtactgagcaggagaaagtttcttttgcttcgcatcaattgcatggtcctgctgctgaatggtgggatcattttcgccaaggcagggctgaaggagagcctattacgtggcaggaattcacggccgcttttaagaagacacacataccaacgggtgttgtagctctaaagaagagagaatttagagcactcaaccagggatctcgttcggtcaccgagtacctccatgatttcaaccgtttagctcgttatgctccggaagatgttcttaccgatgaagagcgtcaggagaagttcttggagggactgaatgatgagttgtcttatgccttgatgtctacggatttccgggatttccagcagttggtggacaaggcgattcgtcaggaagacaagtataaccggatggagcagaagaagcgcagggctgcgcaattcaaggcacaacagggcagtaaccagaggccgcgtctcgttacgggacctcaagctccatcgtaccctcaaggaggatcttcatcagttgtccgcccccaacgccagttctacaacaacaatactggtaatcgtggcaatgacaaccgcaacatggttgctcgtcctgcagcaactccagctcagaaccagtccgtcaggaaggaacagggaagcaagccaggggtgtgcttcaattgtggtgatccaggacattatgctgataagtgtcctaagcctcggtgcgtgaagaacgttccagccccgaacaactccaatgctccagcaccgaaggcacgtgttaatcatgttgcagcagcagaagctcagaatgcaccagatgtggttttgggtacgtttcctgttaactctatacccgcatctgtgctttttgattccggtgctacacattcctttttgtctaaaagttttgcgagcaataatgggatggaagttattagtcttgggagacctttactagttaataccccaggcaatcaagtattttcgacacagtattgtccttccgttactatagaaatagaagaagttcctttcccatcctcgcttatcttgctagaatccaaagatctagatgttatcttagggatggactggttatctcgtcacagaggagttatagattgtgccaaccgtaaggtgactttaagcagtagcaatggggaaaccgtttctttctttgtgtcctctcctaaatatcatggtgtgatcttaaaccaagttgctttacaagagatccccatagtacaagactacccagacgtgtttcccgaggatttgccaggtatgccacctaagagagacatagagtttcggatagacttggtacctggaaccaaccctatccataagagaccatacagaatggcagctaatgagttagctgaggtgaagagacaggtggatgatttgcttcagaaaggatacatcagacccagtacttcgccgtggggagcaccagtcatctttgtggagaagaaagatcatactcagagaatgtgcgtggattatcgagcgttgaatgaggttactatcaagaataagtatcctctacccagaattgatgacctgtttgatcaactagaaggtgctacagttttctccaagatagatctccgttctggatatcatcaacttcgaatccgtgaggaagatataccaaagaccgccttcacaactcggtatggtttgttcgaatgtaccgttatgtcatttggactcactaatgccccagcctttttcatgaatctgatgaacaaggtgtttatggaatatctggataagtttgtcgtggtgtttattgatgacattcttatttactccaagacgaaggaagaacatgaagagcatcttcgtctagctttagagaaactacgtgagcatcagctttatgccaagttcagtaaatgtgaattttggttgtccgaagtgaagtttcttggtcatgtcatctcgtctagaggagtggcagtagatccaagcaatgtggagtcagtgttaagttggaagcaacccaagacggtttcagaaattcgtagtttccttggacttgcggggtattaccgcaggtttattgagaacttttcaaagatcgccagaccaatgactcgtctgcttcagaaggaagtgaagtacaagtggacagaggattgtgaacaaagtttccaagaactgaagaaaaggctagtgactgcgcctgtgttaattttgcctgattcgaggaaaggtttccaagtgtattgtgatgcatcccgactcggtttgggttgtgtgttgatgcaagaaggaaaggtggttgcctatgcatctaggcaattacgtcctcatgagaataactacccaacgcatgacctagaattggcagctgtggtgcatgcattgaagatttggcgtcattatcttttcggtaaccgtagagagatgtatacggatcataaaagtttgaagtacattttcactcaacctgatttgaacatgcgtcagcgaagatggttagagttgattaaagattatgatatggaaatccactatcacccggggaaagcaaatgttgtagccgatgctcttagcaggaagagctactgtaatatgtcagaaggtcgacatttaccttgggagttatgccaagaatttgaaaagttaaacttggatatagtcagcaaaggttttgtggctactttacaggctcaacctactctgtttgatcaagttagagaagctcaagtgaatgatcttgatatccaagaaataaaaaagaacatgagaagaggaaaagccatcggttatgtagaagatgagcaaggaactgtgtggttaggagaaagaatttgcgtcccagaaaataaggagttgaaggatactatcatgaaagaagctcatgaaactttgtattccattcaccctggaagcactaagatgtaccaagacctaaagcaacaattctggtgggccagtatgcgacgtgaaatagcagaatatgtggctctatgtgatgtatgtcagcgggtcaaggcagaacatcagaagccagccagtctgttacaaccgttgaagattccagagtggaagtgggaagaaataggaatggattttataaccggtctacccagaacgtcggcgggacatgattctatttgggtagtggttgataggttgacaaaagtcgctcacttcataccggtcaaaacaacctatacggggaataagcttgcagagttatacatggccagagtggtatgtttgcatggtgttcctaagaagatagtgtcagatagaggtagccagtttacttcgaagttttggcagaaattacaagtagagatgggtacccgtttgaatttcagtaccgcttatcaccctcaaacagatggtcagacggaaagagtaaaccaaattttagaagatatgttgagagcctgtgttctagattttggtggaagttgggataagaatttgccgtacgcggaattctcatataacaacagttatcaagctagtttgcaaatggctccgtatgaagcattatatggccgaaagtgccgtacgccgctcctttgggatcaaaccggtgaacgtcaagtttttgggacagacatattgcgcgaggcagaagaaaaagtgaagattatccaagaaaggttgcgcgttgctcagtcacgtcagaagagctatgccgacaatcgtcgcagagatttggctttcgaagaaggagattatgtataccttcgggttacgccattacgaggtgttcatcgtttccagaccaaagggaaattggcgccgcgtttcgtgggaccttttaagattgtgagtcgaagaggtgaagtagcttatcagctagagttgcctccgtcaatggcgggaatacatgacgtgttccatgtgtcgcagttgaagaaatgtttacgtgtacctacggaggaagcagatcctgatcgtatagagcttcaggaagatttaacttatgtggagaagccagtcagaatcttggaaaattttctgggaattatttga

SEQ ID NO: 15648 - DNA, 1107 bp, Oryza sativa
  Clone ID: TFbOSC19350j.C1.o5.gm
atgtctacggatttccgggatttccagcagttggtggacaaggcgattcgtcaggaagacaagtataaccggatggagcagaagaagcgcagggctgcccaattcaaggcacaacagggcagtaaccagaggccgcgtctcgttacgggacctcaagctccatcgtaccctcaaggaggatcttcatcagttgtccgcccccaacgccagttctacaacaacaatactggtaatcgtggtaatgacaaccgcaacatggttgctcgtcctgcagcaactccagctcagaaccagcccgtcaggaaggaacagggaagcaagccaggggtgtgcttcaattgtggtgatccaggacattatgctgataagtgtcctaagcctcggcgcgtgaagaacgctccagccccgaataactccaatgctccagcaccaaaggcacgtgttaatcatgttgcagcagcagaagctcagaatgcaccagatgtggttttggggtattaccgcaggtttattgagaacttttcaaagatcgccagaccaatgactcgtctgcttcagaaggaagtgaagtacaagcaattacgtcctcatgagaataactacccaacgcatgacctagaattggcagctgtggtgcatgcattgaagatttggctttcgaagaaggagattatgtataccttcgggttacgccgttacgaggcgggtgatcaggtttttgaggagtgcttccgcatgactgctcctcgtcttctgttcgtcgtcgtcgtctgctacaccatgtctggtgcctccgcagctgccgcgcctagagatggaggcgcactaggagccggagccgctgcgaacgaaaacatcaacggaggcagttctgcctcacaatccagcggagggacattcacagggttaataaaaggtgcaccctgctgtgacgagcccagggtggcctcagccctgaagtccggtggaggcagcggtggcggcggccacgacctcccctccaccaaatctggccacaggggaggcggcgagatgggaggcagcgatggcgcctgcgtcctcccctccgccagatccggtggtgttttcccaatcggggctcattag

SEQ ID NO: 15649 - DNA, 4116 bp, Oryza sativa
  Clone ID: TFbOSC20906j.C1.o1.fg
ctccttgtttggaatattcctggtttggagatagaattgtgcagccgggatggttgttcagaatggttgggcctaggcaacaggatgccgcgcttcaagcctgagtacttgtttggtgttgagggatttgtccaggagttgcgtacgatgtcctttgccataggatttgggactgcccctttgtatgcccagattcctcatgatcatgatgaagagaagtgccgagtcaaagtcaccttgaacagtaatagtgaagatatcccatcagtgatgttcgaagctggaggaggaaactacatccatgcatgtcaggaggtggcaaggatcgccataggagagctccgcgatcgctacagtgatcagttggccgacactgagtatcgctaccatcctcgccaaccccagggaagtgaccgtggcagctaccttgagactgaggggattgagaatgatgctaccacaaggcatttggttgagatgctgtgggctatggatgaaacccgcgcggaggttgtgctagcagctcaagatcgtgaagaccagaatcgtggtaagatttgcaggctagaggacaaggtggatcgtttagagaaggaactagccgcgttgaagggagaagcaccaccgcagaaggccaggattcgtcttaccgcaaggaagagagctctattcgtccctcgctaccaattggcgccaaaggtccgtgtggtggagaaagaagttaccccagccctagcggatcctccggtcgtcaatatggtgctcactcgcagcaatgggaatggccccaataataacaacaacaacaatggagagaatcccacgcttgcccaagtcctggctcaacaggcccagcttatgaacatcatgatgcagcaactccaaaaccagcagaaccagggaaataaccatgcacctccccagaacaagttagcagaatttcttcgttgcactgatcaggagaaggtctcatttgcatcacaccaactgcatggccctgcctctgagtggtgggatcacttccgccttaacagaactactgctgaacctatcacttggcttgaattcaccgctgctttccggaagacgcatataccatcgggagtggtgtctctcaagaagaaggaattcaggtcgctcacccagggatctcgcacggtcaccgagtatctgcacgagttcaatcgtctggctcgttatgctccggaagatgtgcgcactgatgaagagcgccatgagaggttcttggaaggacttaatgatgagctttcttacccactcatgactagggattatcatgatttccagaagttagtggataaggctattcgccaggaggacaagtacaaccgcatggagcagaagaaacgtcggattgctcacttcaaggcacaacaggggaatagtcagaggccgcgtcttactttaggaccccagtccatgccacagggaggttcttggtctgttgttcgtccgcagcgacagttcttcaacaacaatgctggcaacaacatccgcaatcaagctccacgccctgttgcagctccaacacagcaacagcctgccaagagggagcaaggcagcaagcccggggtgtgcttcaactgtggagacccaggacattacgctgacaagtgtccgaagccccgacgcgtgaaggttgtccctgcccagagcaactctaccgcaccagcgccaaaggctcgtgtcaatcatgttgctgctgcagaagctcaagttcctgcaacagtgcttttcgattctggtgctacacattcatttttatctatgagttttgtgggaaatcatgggatggaagtagaagatcttagacgtcctttgatggttagtaccccgagtaatcaagcactctctttgcaacgtagcccctctatcagaatagaaattcaagaagtaccatttctggccaatcttatcctgttagaatccaaagaccttgatatcatcctagggatggactggttagccagatataaaggtatgatagactgcgccaacagaaaagtaattctcaccagcaatgatggtcgagttgtaactgttcatgcattatcttctgagtctttaaggtcaagtctgaaccaaatgactttggaagagattcctatagtccgggagtaccccgatgtgttcccgaacgatttacttggtatgccgcctaaaagggatatagagttcagaatagatctggtaccaggaacaactccgatccataagagaccttatagaatggcagccaatgaattagcagaagtcaagagacaagtagatgatttgcttcagaaaggatacatcagaccgagttcatctccatggggagctccagttatttttgtggaaaagaaagatcatacccagaggatgtgtgtggactatcgtgcactaaatgatgtgactatcaagaataagtacccgctgcccagaattgatgatttgtttgatcagtttaaaggtgccaccgttttctccaagatagatctccgatcagggtatcaccagttgagaatcaaagaggaagatatacctaagacaacttttaccactaggtatgggttgtttgaatgtactgttatgtcttttggacttaccaatgcccccgctttcttcatgaacttgatgaataaggtgtttatggaatacctagacaagttcgtggtggtctttattgatgacattcttatctactcccgaaccaaagaagagcatgaagaacatcttcgtcttgcactagagaagctgcgagaacatcagttgtatgccaagtttagcaaatgtgaattctggttgtctgaagtgaagttccttggtcacgtcatctcagccggaggagatgccgttgatcctagtaatgtggaatccgtaaccaactggaaacaaccaaagacagtttcagagattcacagtttcctaggcctcgtaggatattatcggaggtttatagagaatttttccaagattgctaagcccatgacacgattacttcaaaaggatgtaaaatacaagtggtcagaagaatgtgagcagagttttcaagagttgaagaatcgcttaatatcagctcctattttgattttgcctgatccaaaaaagggttttcaagtgtattgtgatgcatccaagcttgggttaggttgtgttctgatgcaagatgggaaggtggttgcctatgcatcttgtcagttacgtccgcatgagaagaactaccctactcatgatcttgagttagttgcagtggttcatgcgttgaagatttggcgtcattatcttttcggtactcgtacaaaggattatgacatgggaattcattatcacccgggaaaggctaatgttgtagcagatgctcttagcaggaaaggctattgcaatgctacggaaggacgacagttgccattggagttatgcaaggaatttgaaagattaaatttgggaattgtcagtagaggtttcgttgcagccttagaagcaaagcccactctaattgatcaagttagagaagcccaaattattgatcctgatattcaagaaatcaagaagaatatgagaagaggaaaagctatcggtttcttggaagatgagcaaggaactgtatggttgggcgagagaatctgcgtccccgacaacaaagatttaaaagatgcaattctgaaagaagctcatgatactttatactccattcaccctggtagtaccaagatgtaccaggatctcaaggaaagattttggtgggcaagtatgaagcgtgaaatcgccgaatacgtagcagtatgtgatgtttgtcagcgagtcaaggcagaacatcagaaacccacaggtttgctgcagcctttgaagataccagaatggaagtgggaggaaatcggtatggatttcatcactggtctacccagaacatcatcaggccatgactctatatgggtgatagtcgacagacttaccaaagtggctcatttcatcccagtaaagacaacatattccggaagtcagttggcggaattgtatatggcacggattgagaagaatttgaagagttccaaggccagcaaggcaagtcacacagatcccaaacaaccctttgagcatgttgattccgtttaa

SEQ ID NO: 15650 - DNA, 1026 bp, Oryza sativa
  Clone ID: TFbOSC23055j.C1.o1.fg
ataccctcgggagtggtgtctctcaagaagaaggaattcaggtcactcacacaaggttcccgcactgtcaccgagtatctgcacgagttcaatcgtctggctcgttatgctccggaagaggtgcgcactgatgaagagcgtcaggagaggttcttaaaaggacttaatgatgaactttcctacccacttatgactggagattatcatgatttccagaagttagtggataaagctattcgccaggaggacaaatacaaccgcatggagcagaagaaacgccggattgctcatttcaaggcacagcaggggaatagtcaaaggccacgccttactttgggaccccagtccatgccacagggagctccacgccctgttgcatctccaacacagcaacagcctgccaagagggagcaaggcagtaagcccggggtgtgcttcaactgtggagacccaggacattacgctgacaagtgtccgaagccccgccgcgtgaaggtcgtccctgcccagaacaacccctccgcacccgcagccaaggctcgtgtcaaccatgttgctgctgcagaagctcaaggtgctccagatgtgattttgggtacattccctgttaactcagttcctgcaaccgtgctttttgattctggtgctatgcattcatttttatccatgagttttgcgggaaatcaagggatggaggtaaaggaacttagacgtcctttgatggttagtactccgagtaaccaagcactctcctcacaacgtagcccctctgtcagaatagagatccaaggtgtacctttcctggccaaccttattctgttagaatccaaagaccttgatgtcatcctagggatggactggttagccagatataaaggtgtgatagattgtgctaatagaaaagtaactctcaccagtaatgatggtcgagttgtaactgttcatgcattatcttctgagtctataaggtcacgtctgaaccaattgactttggaagagattcctatagtccgggagtatcccgat

SEQ ID NO: 15651 - DNA, 4422 bp, Oryza sativa
  Clone ID: TFbOSC25185j.C1.o21.fg
atggtgcgctgtggtggattgtgttgtgcgaggggtactgtcacagctcctttccgagctcctggtttggaatggtatattcctggtttggagatagaactgtgcagccgggatggttgttcagaatggttgggtctatgcaacaggatgccgcgctacaagcctgagtacttgtttggtgttgagggatttgtccaggagttgcgtacgatgtcctttgtcataggatttaggactacccctttttatgcccagattcctcatgatcgtcacgaagagaagtgccgagtcaaagtcaccttgaacagtaatagtgaagatatcccctcagtgatgttcgaagctggaggaggaaactacatccatgcgtgtcaggaagtggcaaggatcgccataggagagctccgcgatcgctacagtgatcagttggccgacactaagtatcgctaccatcctcgtcaaccacagggaagtgaccgtggcagctaccttgagactgagggaattgagaatgatgctaccacaaggcatttggttgagatgctgtgggctatggatgaaacccgtgcggagactgtgttagcagctcaagatcgtgaagaccagaatcgtggtaagatttgcaagctagaggacaaagtggatcgtttggagaaggaactagccgcattgaagggagaagcaccaccgcagaaggccaggattcgtcttaccgcaaggaagagagctctatttgtccctcgctaccaattggcgccaaagatggtgctcactcgcagcaacgggaatggccccaacaacaacaataacaacaacaatggagagaatcccacacttgcccaagtcctggctcaacaggcacagcttatgaacatgatgatgcagcaactccagaaccagcagaaccagggaaataaccatgcacctccccagaacaagttagtagaatttcttcgtgtgaggccgcccactttctctagcaccactaatcctgttgaagctggtgattggttgcatgccatagagaagaagttggatttgcttcagtgcaccgatcaggagaaggtctcatttgcatcacaccagctgcatggccctgcctctgaatggtgggatcacttccgtcttaacaggactactgctgaacctatcacttggcttgaattcaccgctgctttccggaagacgcatataccatcgggagtggtgtctctcaagaagaaggaattcaggtcgctcacccagggatctcgctctgtcaccgagtatctgcacgagttcaatcgtttggctcgttatgctccggaagatgtgcgcactgatgaacagcgccaggagaggttcttggaaggacttaatgatgagctttcttatccactcatgactggggattatcatgatttccagaagttagtggataaggctattcgtcaggaggacaagtacaaccgcatggagcagaagaaacgccggattgctcacttcaaggcacaacaggggaatagtcagaggccgcgtcttactttaggaccccagtccatgccacagggaggttcttcgtctgttgttcgtccgcagcgtcagttcttcaacaacaacgcgggcaacaacatccgcaatcaagctccacgccctgttgcagcttcgacacagcaacagcctgccaagaaggagcaaggcatcaagcccggggtgtgcttcaactgtggagacccaggacattacgctgacaagtgtccgaagccccgacgcgtgaaggttgtccctgcccagagcaactctaccgcaccagcatcaaaggcccgtgtcaatcatgttgctgctgcagaagctcaaggtgctccagatgtgattttggactgtgccaacagaaaagtaactctcaccagcaatgatggtcgagttgtaactgttcatgcattgtcttctgagtctttaaggtcaagtctgaaccaaataactttggaagagattcctgtagttcgggagtatcccgatgtgttcccagacgatttacctggtatgccgcctaaaagggatatagagttcagaatagatttggttccaggaacaactccgatccataagagaccttatagaatggcagccaatgagttggcagaagtcaagaggcaagtagacgatttgcttcagaaaggatacatcagaccgagttcatctccatggggagctccggttatttttgtggaaaagaaagatcatacccagaggatgtgtgtggactatcgtgcactaaatgatgtgactatcaagaataagtatccgttgcccagaattgatgatttgtttgatcaacttaaaggtgctaccgttttctccaagatagatcttcgatcagggtatcaccagttgagaatcaaagaggaagatatacctaagacagcttttaccactaggtatggattgttcgaatgtactgttatgtcttttggacttaccaatgcccccgctttcttcatgaacttgatgaataaggtgtttatggaatacctagacaagttcgtggtggtctttattgatgacattcttatctactcccacaccaaagaagagcatgaagaacaccttcgccttgcattggagaagctacgagaacatcaacttaatgtggaatccgtaaccaactggaaacaatcaaagacagtttcagagattcgcagtttcctaggcctcgcaggatattatcggaggtttatagagaatttttccaagattgctaagtccatgacacgattacttcaaaaagatgtgaagtataagtggtcagaagaatgtgagcagagttttcaagagttgaagaatcgcttaatatcagctcctattttgattttacctgatccaaagaagggtttccaagtgtattgcgatgcatccaaacttgggttaggatgtgttctgatgcaagatgggaaggtggttgcctatgcatctcgtcagttacgtccgcatgagaagaactaccctactcatgatcttgagttagctgcagtagttcatgcgttgaaaatttggcgtcattatcttttcggtactcgtacagaggtgtacaccgatcacaagagtttaaagtatatctttactcagccggatctgaacatgagacaacggagatggttggaattaattaaggattatgacatgggaattcattatcacccgggaaaggctaatgttgtagcagatgctcttagcaggaaaggctattgcaatgctacggaaggacgacagttgccattggaattatgcaaggaatttgaaagattaaatttgggaattgtcagtagaggttttgttgcagccttagaagcgaagcccactctaattgatcaagttagagaagcccaaattaatgatcctgatattcaagaaatcaagaagaatatgagaagaggaaaagctatcggtttcttggaggatgagcaaggaactgtatggttggatgagagaatctgcgtccccgacaacaaagatttaaaagatgtaattctgaaagaagctcatgatactttatactccattcaccctggtagtaccaaaatgcaccaggatctcaaggaaagattttggtgggcaagtatgaagcatgaaatcgcagagtacgtagcaacagacggacaaaccgaaagggtaaatcagattttggaagacatgttgagagcttgtgctttagacttcggtggaagttgggataagaatctaccttatgcagaattctcgtacaacaacagttatcaagctagtcttcagatggctccttacgaagcactgtatggtcggaagtgccgcactccgcttttgtgggatcaaacgggagaacgtcaggttttcgggatggatatcctaagggaagcagaagaaaaggtgaaaatcattcaagaaagattgcgtgtggcccagtctcgtcataagagttatgccgacaatcgtcgtagagatctaagttttgacgaaggagattatgtgtacctttgtgtcacgcctcttcgaggagttcatcgttttcacaccaaaggaaaattggcaccgtgttttgtgggaccttataagattgtcagtagaagaggagaggttgcttatcagttggagttacctcaatctttggcaggagtccataatgtgttccatgtgtcgcaattgaaaaagtgtttaagggtacctaccgaagaaactaatcttgaacagatagaagtccaagaggatctgacctatgttgagaaaccaatccgtatcttggaaatagatgagagaagagccagaaatcgagttatccgtttttgcaaagtccaatggagtaatcactcggaagaagaatcaacttgggaacaagaagatgaattgaagtcagctcatccgcatctgttcgccagttcttccgaatctcgaggacgagattctgtttaa

SEQ ID NO: 15652 - DNA, 4824 bp, Oryza sativa
  Clone ID: TFbOSC29665j.C1.o2.fg
atgatgcctccccattcaccgagaaatttgatcgaggtgttaggattcatcagggagctgaggttgatggcttttgaggtaggctatgaagttgctcctgagtatcgccagatttcccatgaccccgacgaggagaaatgtcgtgttcgtgtgatgttggctagtgatcgtgaagaccttccgtcttttaagtttgaagctggaggaagatcgtactgccatgcttgtcaagaagtagctttggtggccattggagagttgcgtcaacgctttgaagaagagttggattcatcagctttccagtatcatcctcacaagcctcatggtcaagactatggaacctatacctgtcctgatggtgaagagagtgccactcttatgcatgtggtgcatatgcttagtgctatggatgcagtaagtgtggagcgagacaaagcagctcatgacagggaaaactggaatcgaggcaagatttgcaagttggagagcaaggtgtaccgtctacagaaggaattgtctgaacttaaaggagaaacgccgccaccaacacccaagctacgcctcgtcgcaagaaagagaacctgtccgccacctcgtctccagttagcttcgaagattcgtgtgatgggtgaagctgtgcccgatcgtgctgaacctgtcatcgacatcataagtgatgaggaagaggaggaagaccctgaagaaagagagccagctactccagaggaagaagatccatcgcttcgttccgacgcaaggcgggattatgcagcaggcacagaatcagcaggcaaacaatcagaatcagaatccacccctcctccccaaaacaagttggcagatttcttacgtgtgagaccccctaccttttcaagcacaaccaatccagtagaagcaggagattggctgcatgcggtggagaagaagttggatttgatccagtgtactgagcaggagaaagtttcatttgcttcgcatcagttgcatggacccgctgctgaatggtgggatcattttcgccaaggcagggcgggaggagaacctattacttggcaggagttcacagctgctttcaagaagacgcatataccaacgggtgttgtagctctaaagaagagagaatttagagcactcaaccagggatctcgttcggtcactgagtacctccatgatttcaaccgtttagctcgctatgctccggaagatgtccgcaccgatgaggaacgtcaggagaagtttttagagggactgaatgatgagttgtcttatgctttgatgtctacggatttccgggatttccagcagttggtggacaaagcgattcgtcaggaagacaagtataaccgtatggaacagaagaagcgcagggctgcccaattcaaggcacaacagggcagtaaccagaggccgcgtctcgttactggacctcaagctccatcgtaccctcaaggaggatcttcatcagttgtccgtccccaacgccagttctacaacaacaatactggtaatcgtggcaatgacaaccgcaacatggttgctcgtcctgcagcaacttcagttcagaaccagcctgtcaggaaggaacagggaagcaagccaggggtgtgcttcaactgtggtgatccaggacattatgctgataagtgtcctaagcctcggcgtgtgaagaacgctccaaccccgaacaactccaatgttccagcaccgaaggcccgtgtcaatcatgttgcagcagcagaagctcagaatgcaccagatgtggttttgggtacgtttcctgttaactctatacccgcaactgtgctttttgattccggtgctacacattcctttttgtctaaaagttttgcaagcaatcatgggatggaagttgttagtcttgggagacctttactagttaataccccaggcaatcaagtattttcgacacagtattgtccttctgttactatagaaatagaagaagttcctttcccatcctcgcttatcttattagaatgcaaagatctagatgttatcttagggatggactggttatctcgtcacagaggagttatagattgtgccaaccgtaaggtgactttaaccagtagcaatggggaaactgtttctttctttgtgtcctctcctaaatatcatggtgtgatcttaaaccaagttgctctacaagagatacctatagtacaagactacccagacgtgtttcccgaggatttgccaggtatgccacctaagagagagatagagtttcggatagacttggtccctggaaccaaccctttccataagagatcatacagaatggcagctaatgagttagctgaggtgaagaaacaggtggatgatttgcttcagaaaggatacatcagacccagtacttcgccatggggagcaccagtcatctttgtggagaagaaagatcatactcagagaatgtgcgtggattatcgagcgttgaatgaggtcactatcaagaataagtatcctctacccagaattgatgacctgtttgatcaactggaaggtgctacagttttctccgagatagatctccgttctggatatcatcaacttcgaatccgtgaggaagatataccaaagaccgccttcacaactcggtatggtttgttcgaatgtaccgttatgtcatttggactcactaatgccctagcctttttcatgaatctgatgaacaaggtgtttatggaatatttggataagtttgtcgtggtgtttattgatgacattctcatttactccaagacgaaggaagaacatgaagagcatcttcgtctagctttagagaaactacgtgagcatcagctttatgccaagttcagtaaatgtgaattttggttgtccgaagtgaagtttcttggtcaggtcatctcgtctggaggagtggcagtagatccgagcaatgtggagtcagtgttaagttggaagcaacccaagacggtttcagaaattcgtagtttccttggacttgcagggtattaccgcaggtttattgagaacttttcaaagatcgccagaccaatgactcgtctgcttcagaaggaagtgaagtacaagtggacagaggattgtgaacaaagtttccaagaactgaagaaaaggctagtgactgcgccggtattaattttgcctgattcgaggaaaggtttccaagtgtattgtgatgcatcccgactcggtttgggttgtgtgttgatgcaagaaggaaaggtggttgcttatgcatctaggcaattacgtcctcatgagaataactacccaacgcatgacctagaattggcagctgtggtgcatgcattgaagatttggcgtcattatctttttggtaatcgtacagagatatatacggatcataaaagtttgaagtacatcttcactcaacctgatttgaacatgcgtcagcgaagatggttagagttgattaaagattatgatatggagatccactatcacccgggaaaagcaaatgttgtagccgatgcccttagcaggaaaagctactgtaatatgtcagaaggtcgacgtttaccttgggagttatgccaagaatttgaaaggttgaacttgggaatagtcagcaaaggttttgtggctgttttagaagctaaacctactctgtttgatcaagttagagaagctcaagtgaatgatcctgatatccaagaaataaagaagaacatgagaagaggtaaagccatcggttttgtagaagatgagcaaggtactgtgtggttaggagaaagaatttgcgtcccagaaaataaggagttgaaggatactatcatgaaagaagctcatgaaactttgtattccattcaccctggaagcactaagatgtaccaagacctaaagcaacaattctggtgggccagtatgcgacgtgagatagcagaatatgtggctctatgtgatgtatgtcagcgggtcaaggcagaacatcagaagccagccggtctattacaaccgttgaagattccagagtggaagtgggaagaaataggaatggattttataaccggtctacccagaacgtcggcaggacatgattctatttgggtagtggttgataggttgacaaaagtcgctcacttcataccggtcaaaacaacctatacggggaataagcttgcagagttatatatggccagagtggtatgtttgcatggtgttcctaagaagatagtgtcagatagaggtagccagtttacttcgaagttttggcagaaattacaatcagaattggatacccgtttgaatttcagtaccgcttatcaccctcaaacagatgacatattgcgagaggcagaagaaaaagtgaagattatccaagaaaggttgcgcgttgctcagtcgcgtcagaagagttatgccgacaatcgtcgcagagatttggctttcgaagaaggagattatgtataccttcgggttacgccgttacgaggagttcatcgtttccagaccaaagggaaattggcaccgcggtttgtgggaccttttaagatcgtgagtcgaagaggtgaagtagcttatcagttagagttgcctccgtcaatggcgggaatacatgatgtgtttcatgtgtctcagttgaagaaatgtttacgagtacctacggaagaagcagatcctgatcgtatagagcttcaagaagatttaacttatattgagaagccggtcagaatcttggaatttccgacgttccggaggagagcgtttccgttgaggaaggttccgaagcgtttgcggaagcccaaggcaagtcacacagatcccaaacaaccctttgagcatgttgaacccatttaa

SEQ ID NO: 15653 - DNA, 3363 bp, Oryza sativa
  Clone ID: TFbOSC34887j.C1.o15.fg
atgtctttcctcataggatttgggactgcccctttgtatgcccagattcctcatgattgtgatgaagagaagtgccgtgtcaaagtcactttgaacagtaatcgtgaagatatcccttcggtgatgttcgaggctggagggggaagctacattcatgcttgtcaggaggtggcaaggatcgccataggagagctccacgaaagctacaacgatcggttggctgacaccgagtatcgctaccatcctcgtcaaccccagggaagtgaccgtggcagctaccttgaacctgcagagattgagaatgatgctaccacaaggcatttggttgagatgctgtgggccatggatgaaacccgtgctgagattgtgatagcagctcaagattgtgaagaccggaatcgcgggaagatttgcaagctggaggacaaggtggatcgtttggagaaggagctagcagcattgaagggagaagcaccaccgcagaaggccagggttcgtcttacagcaaggaagagagctctattcgtccctcgctaccagttggcgccaaaggttcgtgtggtggaaaaagaagctaccccagccccagtggatcctccggtcgtcaacgtgagtgatgatgatgaagaagaatccaagcgcacccattccaaggtcgagtggggagctactcaagatgatggggatatggtgcttactcgcagcaacgggaatggccccaaccccaacaaaaacaacaacaatgcagagaatcccacgcttgctcaagtcctggcccaacaggcacagcttaagaatctgatgatgcagcaactccagaaccagcagaaccagggaaacaaccatgcacctcccccgaataagctggtagaatttcttcgcgtgaggccgcctactttatctagcaccaccaatcctattgaagctggtgattggctgcacgccatagagaagaagttggacctacttcagtgcactgatcaagagaaagtctcttttgcttcacatcggcttcatggccctgcctctgaatggtgggatcacttccgtctcaacaggactacagctgaaccaatcacttggcttgagttcactgctgcttttcgtaagacgcatataccctcgggagtagtgtctctcaagaagaaggagttcagggcgctcactcagggatctcgctctgtcactaaatatctgcatgaatttaatcgtctggctcgttatgctccggaagatgtgcgcattgatgaagagcgccaagagaagttcttagaagggctgaatgatgagctttctaacccactcatgactggggattatcatgatttccagaagttggtggataaggctattcgccaggaggacaagtacaaccgcatggagcagaagaaacgccggattgctcacttcaaggctcagcaggggaatactccgacacagcatcagcctgccaagagggagcaaggcagtaagcccggggtgtgcttcaactgtggagacccaggacattatgctgacaagtgtccgaagccccaccgcgcgaaggttgtccctgctcagaacaacccctccgcaccagcgacaaaggctcgtgtcaaccatgttgctgccgcagaagcccaaggtgctccagatgtgattttgggtacgttccctgttaactcagttcctgcaacagtgcttttcgattctggtgctacgcattcctttttatctttgagttttgcgggaaatcatgagatggaagtagaagatcttagacgtcctttgatggttagtacaccgagtaaccaagcactctcatcacaacgtagcccctctgtcagaatagagattcaaggagtaccatttttggccaaccttattctgttagaatccaaagaccttgatgtcatcctagggatggactggttagccaaatataaaggtgtgatagactgtgccaatagaaaagtaactctcaccagcaatgatggtcaagttgtaactgttcatgcattgccttctgagcctttaaggtcaagtctgaaccaaataactttggaagagattcctatagtacaggagtacccggatgtgttcccggatgatttacctggtatgccgcccaagagagatatagaattcagaatagatctggtaccaggaacaactccgatccataagagaccttatagaatggcagccaatgaattagcagaagtcaagaggaaagtagatgatttgcttcagaaaggatatatcagaccgagttcgtctccgtggggagctccagtgatctttgtggaaaagaaagatcatacccagaggatgtgtgtggactatcgtgaactaaatgatgtgactatcaagaataagtacccgctgcccagaattgatgatttgtttgatcagcttaaaggtgccaccgttttctccaagatagatcttcgatcagggtatcatcagttgaggattaaagaggaagacatacctaagatagcttttaccactacgtatgggttgtttgaatgtactgttatgtcttttggacttaccaatgcccccgctttcttcatgaacttgatgaacaaggtgtttatggaatacctagacaagttcgtggtagtctttattgatgacattctcatttactcccgaaccaaagaagagcatgaagaacatcttcgtcttgcactagagaagctgcgagaacatcagttgtatgccaagtttagcaaatgtgaattctggttgtctgaagtgaagttccttgatcacgtcatctcagccgggggagttgccgttgatcctagttattactggaggttcatagagaatttttccaagattgccaagcccatgacacgactgcttcagaaagatgtgaagtacaagtggtcagaagagtgcgagcagtgttttcaagagttgaaaagtcgcctaatatcagcacccattttgattttgcctgatccaaagaagggtttccaagtgtattgcgatgcatccaagcttgggttaggttgtgttctgatgcaagatgggaaggtggttgcctatgcatctcgtcagttacgcccgcatgagaagaactaccctactcatgatcttgagttagccgcagtggttcatgcgttgaagatttggcgtcactatctttttggtactcgtacggaggtgtatacggatcacaaaagtttgaagtatattttcacccagccggatctgaacatgagacagcggagatggttggaattgattaaggattatgatatgggaattcattattgtaacatcctgaaaatgtgtcattttctaatcttgcatcatgctgattcttatgttcttaataaccttttaaacctaggaaaatatacttag

SEQ ID NO: 15654 - DNA, 2979 bp, Oryza sativa
  Clone ID: TFbOSC400055j.C1.o4.gm
atggagaggagtagatgcgtacctagctatctacgtcttgcgtgcggggaggagccgcggggcgcgcccgaaggcggcctcgccggcacagccgacgggaggcggcgcacccgcgccccgatggtcgctgccggcgaccaccggcgcggcggggcggcgcccgagagaggggagggaagggggaaacgaatcggcggtccacggctcaccccggatcgacggcgacgacgggaacggcgaccggagcggagagaggcggcggcgcggctcgggtcgacggggacggcggcgttccggcgatcggcgaccgaaacggagaggtggacgaggtcggcgaggacgcggcgaagccgaaggtggcaacgccgaggcgggaggtggtccggggcgacgacggcggcggaccggagctcggcggcgatggcggagagagagagcgacggcgcctcgtgggtgattgctcctgcccaagcctctagtcatgatactcccggtcccatgtcaccgacaaggtcgctcacacaaggttcccgcactgtcacggagtacctgcacgagtttaatcgtctggctcgttatgctccgaaggatttgcgcactgatgaggagcgccaggagaaattcttggaaggacttaatgatgagctctcctacccacttatgactggagattatcatgatttccagaagttagtggataaagctattcgtcaggaggacaaatacaatcgcatggagcaaaagaagcgccggattgctcatttcaaggcacagcaggggaatagtcagaggccacgccttactttgggaccccagtccatgccacagggaggttcttcatctgttgttcgtccgcagcgtcagttcttcaacaacaacgcgggcaacaacaaccgcaaccaagctccacgtccggtggcaactccgtcgcagcaacagcctgccaagagggagcaaggcagcaagcccggtgtgtgcttcaactgtggagacccaggacattatgctgacaagtgtccgaagccccgccgcgcaaaggtcgtccctgcccagaacaactcctccgcaccagcagccaaggctcgtgtcaaccatgttgctgctacagaagctcaaggtgctccagatgtgattttgggtacgttccctgttaactcagttcctgcaaccgtgctttttgactctggtgctacgcattcatttttatccatgagttttgcgggaaatcatgggatggaggtagaggaacttagacgtcctttgatggttagtactccgagtaaccaagcactctcctcacaacgtagcccctctgtcagaatagagatccaaggtgtatccttcctggccaaccttattctgttagaatctaaagatcttgatgtcatcctagggatggactggttagccagatataaaggtgtgatagattgtgctaatagaaaagtgactcttaccagcaatgatggtcaagttgtaactgttcatgcattgccttctgaacctctaaggtcaagcctgaaccaaataacgttggaaaagattcctatagtacgagagtacccagatgtgttccccgatgatttacctgttatgtcttttggacttaccaatgcccctgctttcttcatgaacttgatgaacaaggtgttcatggaatacctggataagttcgtggttgtctttattgatgacattctcatatattcccgaactaaagaagagcatgaagaacatcttcgccttgcactagagaagctgcgagaacatcagttgtatgccaagtttagcaaatgtgaattctggttgtctgaagtaaagttccttggtcacgtcatctcagcaggaggagttgccgttgatcctagtaacgtggaatccgtaaccaactggaaacaacccaagacagtttcagagatccgcagtttcctaggcctcgcaggatattaccggaggttcatagagaatttctccaagattgccaagcccatgacacgactgcttcaaaaagatgatgggaaggtggtcgcctatgcatctcgtcagttacgtccgcatgagaagaactaccctactcatgatcttgagttagctgcagtggattatgacctgggaattcattatcacccgggaaaggctaatgtcgtagcagatgcccttagcagaaaaggctattgtaatgttatgggaggacgacagttgcctttggaattgtgcaaggagtttgaaaggttgaatctgggaattgtcagcagaggctttgttgcagctttagaagcgaagcctactctcattgatcaagtcagagaagcccaaattaatgatcctgatattctggagatcaagaagaatatgagaagaggtaaagctatcggtttcttggaagatgagcaaggaactgtatggttgggtgagagaatctgtgtcccagacaacaaagacttgaaggatgcaattctaaaggaagctcatgatactttatactccattcaccccgcctttgaagataccagaatggaagtgggaggaaatcggtatggatttcatcactggactacccagaacgtcgtcggtctagcgccgccgtcgccgccgccgctccagccgtgcgtcgccgtcgctccagtcatcaccgtcgctcgtggaggtcgccgtctcgtcgccgttctcgtccgccccttcgccgtcgctgtcgaccgccggagcaccgtcgccgtcgtcaagccgaaagttgccgccgcttctttctcgtcgccgacgtcgtccggtcatcgtccgccgtcgctttggtcgccggtgagttcgtcgtgccgcctgcaacccgtaggtgctttccgttcacgctgtcgtgccgtggttcgccgacgagctcgtgtggttcggtcgccgccggtggtgacgtcgtcgctgacgtcatcgtcgtcgtccatccgtgagccgcggtggatccaatcgatctcggccgtccgttgtagatag

SEQ ID NO: 15655 - DNA, 4899 bp, Oryza sativa
  Clone ID: TFbOSC400677j.C1.o41.np
gtgacaagttggtatcagagccaccttgaccttaggataagccaaatgatgccgccccattcaccgagaaatttgttcaaggtgttaggattcgtcagggagctgaggttgatggcttttgaggtaggatatgaagttgctcccgagtatcgccaaatttcccatgaccccgacgaggagaagtgtcgtgttcgtgtgacgttggctagtgatcgtgaagaccttccgtccattaagttcgaagctggaggaagatcgtacagccatgcttgtcaagaagcagctttggtggccattggagagttgcgtcaacgctttgaagaagagttggattcatcagctttccagtatcatcctcacaagcctcatggacaagactatggaacctatacctgtcctgatggtgaagagagtgccactctgatgcatgcggtgcatatgcttagtgctatggatgcagtaagtgtggagcgagacaaagcagctcatgacagggaaaactggaatcgaggcaagatttgcaagttggagagcaaggtgtaccgtctacagaaggaattagctgaacttaaaggagaaacgccgccgccaacacccaagcttcgcctcaccgcaagaaagagaacctgtccgccacctcgtctccagttagcttcgaagattcgcgtaaggggtgaagttgtgcccgatcgtgctgaacctgtcatcgacatcataagtgatgaggaagaagaggaagatcctgaagaaagagagccagctactccagaggaagaagatccatcgcttcgttccgacgcaaggcgcactaccaatccagtagaagcaggagattggctacatgcggtggagaagaagttggatttgatccagtgtactgagcaggaaaaagtttcttttgcttcgcatcaactgcatggacctgctgctgaatggtgggatcattttcgccaaggcagggctgaaggagagcctattacgtggcaggaattcacggccgttttcaaaaagacgcatataccagcaggtgttgtggctctaaagaagagagaatttagagcactcaaccagggatctcgttcggttaccgagtacctccatgatttcaaccgtttagctcgttatgctccggaagatgttcgcaccgatgaagagcgtcaggagaagtttttggagggactgaatgatgagttgtcttatgctttgatgtctacggatttccgggatttccagcagctggtggacaaggcgattcgtcaggaagacaagtataaccggatggagcagaagaagcgcagggctacccaattcaaggcacaacagggcagtaaccagaggccgcgtctcgttactggacctcaagctccatcgtaccctcaaggaggatcttcatcagttgtccgtccccaacgccagttctacaacaacaatactggtaatcgtggtaatgacaaccgcaacgtggttgctcgtcctgcagcaactccagttcagaaccagcccgtcaggaaggaacagggaagcaagccaggggtgtgtttcaattgtggtgatccaggacattatgctgataagtgtcctaagcctcggcgcgtgaagaacgctccagccccgaacaactccaatgctccagcaccaaaggcacgtgttaatcatgttgcagcagcagaagctcagaatgcaccagatgtggttttgggtacgtttcctgttaactctatacccgcaactgtgctttttgattccggtgctacacattcctttttgtctaaaagttttgcgagcaatcatgggatggaagttattagtcttgggagacctttactagttaataccccaggcaatcaagtattttcgactcagtattgtccttccgttactatagaaatagaagaagttcatttcccatcctcgcttatcttgctagaatccaaagatctagatgttatcttagggatggactggctatctcgtcacagaggagttatagattgtgccaaccgtaaggtgactttaaccaatagcaatggggagaccgtttctttctttgtgtcctctcctaaatctcatggtgcggtcttaaaccaagttgctctacaagagatccccatagtacaagactacccagacgtgtttcccgaggatttgccaggtatgccacctaagagagacatagagtttcggatagacttggtacctggaaccaaccctatccataagagaccatacagaatggcagctaacgagttagctgaggtgaagagacaggtggatgatttgcttcagaaaggatacatcagacccagtacttcgccatggggagcaccagtcatctttgtggagaagaaagatcatactcagagaatgtgcgtagattatcgagcgttgaatgaggttactatcaagaataagtatcctctacccagaattgatgacctgtttgatcaattggaaggtgctacagttttctctaagatagatctccgttctggatatcatcaacttcgaattcgtgaggaagatataccaaataccgccttcacaactcggtatggtttgttcgaatgtaccgttatgtcatttggactcactaatgccccagcctttttcatgaatctgatgaacaaggtgtttatggaatatctggataagtttgtcgtggtgtttattgatgacattcttatatactctaagacgaaggaagaacatgaagagcatcttcgtctagctttagagaaactacgtgagcatcagctttatgctaagttcagtaaatgtgaattttggttgtccgaagtgaagtttcttggtcatgtcatctcgtctggaggagtggcagtagatccaagcaatgtggagtcagtgttaagttggaagcaacccaagacggtttcagaaattcgtagtttccttggacttgcagggtattaccgcaggtttattgagaacttttcaaagatcgccagaccaatgactcgtctgcttcagaaggaagtgaagtacaagtggacagaggattgtgaacgaagtttccaagaactgaagaaaaggctagtgactgcgcctgtattaattttgcctgattcgaggaaaggtttccaagtgtattgtgatgcatcccgactcggtttgggttgtgtgctgatgcaagaaggaaaggtggttgcttatgcatctaggcaattacgtcctcatgagaataactacccaacgcatgacctagagttggcagctgtggtgcatgcattgaagatttggcgtcattatcttttcggtaaccgtacagagatatatacggatcataaaagtttgaagtacattttcactcaacctgatttgaacatgcgacagcgaagatggttagagttgattaaagattatgatatggaaatccactatcacccggggaaagcaaatgttgtagccgatgctcttagcaggaaaagctactgtaatatgtcagaaggtcgacgtttaccttgggagttatgccaggaatttgaaaagttgaacttgggaatagtcagcaaaggttttgtggccgctttagaagctaaacctactctgtttgatcaagtcagagaagctcaagtgaatgatcctgatatccaagaaataaagaagaacatgagaagaggaaaagccatcggttatgtagaagatgagcacggaactgtgtggttaggagaaagaatttgcgtcccagaaaataagaagttgaaggatactatcatgagagaagcacatgaaactttgtattccattcaccctggaagcactaagatgtatcaagacttaaagcaacaattctggtgggccagtatgcgacgtgagatagcagaatatgtggctctatgtgatgtatgtcagcgagtcaaggcagaacatcagaagccagccggtttgttacaaccgttgaagattccacagtggaagtgggaagaaataggaatggattttataaccggtctacccagaccgtcggcaggacatgattctatatgggtagtggttgataggttgacaaaagtcgctcacttcataccggtcaaaacaacctatacggggaataagcttgcagagttatacatggccagagtggtatgtttgcatggtgttcctaagaagatagtgtcagatagaggtagccagtttacttcgaagttttggcagaagttacagttagagatgggtacccgtttgaatttcagtaccgcttatcaccctcaaacagatggacagacggaaagagtaaaccaaattttagaagatatgttgagagcctgtgttctagattttggtggaagttgggataagaatttgccgtacgcggaattctcatataacaatagttatcaagctagtttgcaaatggctccgtatgaagcattatatggtcgaaagtgccgtacgccgctcctttgggatcaaaccggtgaacgtcaagtttttgggacagacatattgcgagaggcggaagaaaaagtgaagattatccaagaaaggttgcgcgttgctcagtcacgacagaagagctatgccgacaatcgtcgcagggatttggcttttgaagaaggagattatgtataccttcgggttacgtcgttacgaggtgttcatcgtttccaaaccaaagggaaattggcaccgcgttttgtgggaccttttaagattctgagtcgaagaggtgaagtagcttatcagttagagttgcctccgtcaatggcaggaatacatgacgtgttccacgtatctcagttgaagaagtgtttacgtgtacctacggaggaagcagatcctgatcgtatagagcttcaggaagatttaacttatgttgagaagccagtcagtattttggaatttccgacgttccggaggagagcgtttcctttgaggaag

SEQ ID NO: 15656 - DNA, 1383 bp, Oryza sativa
  Clone ID: TFbOSC401071j.C1.o1.fg
atggcatttgaagtaggttacgaggttgcccccgagtattgccagattccctatgaccccaatgaggagaagtgtcgtgttcgcgtgacgttgactagtgatcgtgaagaccttccgtcgataaagtttgaagctgggggaagaaagtacagccatgcttgtcaggaagcagccttggtggccattggagagctacgtcatcgctttgatgaggagttagagtcatcagctttccagtatcacccacacaagcctcatggtcaagactatggaacttacaactgtcccgaaggtgaaggtagtgccactgtgatgcacgccgtgtatatgcttagcgccatggatgcagtaggcgtggagcgggagaaagcagctcatgatagggaaaactggaaccgtggcaggatttgtaagttggagagcaaggtgtaccgtctgcagaaggaactagctgagcttaagggagaagcaccaccgccagcacccaagctacgcctcaccgcaaggaagagaacccgtccaccacctcgtctccagttagcttcgaagactggtgtggtgggagacgctgtgcctgatcatgctaaacctgtcatccatgtcttaagtgatgaggaagaagaggaagacctagaagaaagagagccagctactccagaggaggaagatccatctcttcattctgacgcaaggcgagacatgttgcttacatcaatggtgggatgtaactacatgagtttagttcttttgcttgtcagagactcgttatgccccagaagatgtcgcactgatgaagaacatcaggagaagtttttagagggattgaatgatgagttgtcttatgcattgatggctatggattactgggatttccagcagttgatggacaaggcgattcgccaagaagacaagtataataggatggaacagaaaaagcgtagggctgctcatttcaaggcacaacagggtagtagccagaggccgcacattgctttgggacctcaagctgcaccatacccacagggaggatcctcttcagttgctcgccctcaacgccagttctacaacaacaacactggtaatcgcagcaacgataatcgtaatatggtcactcgtcctgtagcagctccaactcagaatcatcctgtcaggaaggaacagggaagcaagccaggggtgtgcttcaattgtggtgatccaggacattatgctgataagtgtcccaagcctcggcgtgtgaagaatgctcctgttcagaacaactccaatgctccagcaccgaaggctcgtgttaatcatgttgcagccgcagaagcccagaatacacctgatgtggttttggaggaggagtgcttcaatgaaggtgatgatcaggaggattag

SEQ ID NO: 15657 - DNA, 4924 bp, Oryza sativa
  Clone ID: TFbOSC401235j.C1.o70.np
gtgacaagttggtaccagagccaccttgaccttaggacaagccaaatgacgccgccccatccgccggaaagcttgatcaatgcggtaggattcgtcagggagctgagaatgatggcatttgaagtaggctacgacgttgcccctgagtatcgccagattccctatgaccccaacgaggagaagtgtcgtgttcgcgtgacgttgactagtgatcgagaagaccttctgtcgataaagtttgaagctgggggaagaaagtatagtcatgcttgtcaggaggtagccttggtggccattggagagctacgtcatcgctttgatgaggagttagagtcatcagctttccagtatcatccacacaagcctcatggtcaagactatggagtttaccactgccctgaagatgaagatagcaccactctgaagcatgctgtgtatatgcttagcgccatggatgcagtaggcgtggagcgggagaaaacagctgatgacagggaaaactggaaccgtggcaggatttgcaagttggagagcaaggtgtaccgtctgcagaaggaactggccgagcttaagggagaagcaccaccgccagcacccaaacttcgcctcaccgcaaggaagagaacccgtccaccacctcgtatccagttggcttcgaagactcgtgtggtgggagatgttgtgcctgatcatgctgaacctatcatccatgtcttaagtaatgatgaagaggaggaagacccagaagaaagagagccagctactccagaggaagaagatccatctcttcgttccgatgcaaggcgcaccactaacccagtagaggcaggtgattggctgcatgctgttgaaaagaagttagatttgattctgcgcaccgagtaggagaaggtttcctttgctttgcatcagttgcatggtcctgctgctgagtggtgggatcacttttgtcaaacacagagctgcgggagagcctatcacttggcgggagtttactgctactttcaagaagacacatataccatcaggtgttgtggcacttaagaagagagatttcagagcactcaatcagggatcctgttctgtcacagagtacctccatgactttaatcgcctagctcattatgtcccagatgatgttcgcactgatgaagaacgtcaggagaagtttttagagggactgaatgatgagttgtcttatgcattgatggctatagaataccggaatttccagcagttggtggacaaggcgattcgccaagaagacaagtacaataggatggaacagaagaagcgtagggctgcttatttcaaggctcaatagggtaatagccagaggccgcgcattgctttgggacctcaagctgcaccatacccatagggaggatcctcttcagttgctcgccctcaacgccagttctacaacaacaacactggtaatcacagcaacgacaatcgtaatgtggtcactcgtcctgtagcagctccaactcaaaatcagcctgtcaggaaggaacagggaatcaagccaggggtgtgcttcaattgtggtgatccaggacattatgctgataagtgtccaaagcctcggcgtgtgaagaatgctcctgtccagaacaactccaatgctccagcaccgaaggctcgtgttaatcacgttgcagctgcagaagcctagaatgcacctgatgtggttttgggtacgtttcctgttaactctatacccgcaactgtgctttttgatttcggtgctacacattcctttttgtctaaaagttttgcgagcaatcatggaatggaagttattagtcttgggaggcctttactagttaataccccaggcaatcaagtatcctcaacgcagtactgtccttccattactacagaaatacaagaaattcctttcccatccacacttatcttgctagaatccaaagatcttgatgttatcttaggggtggattggctaacccatcacagaggagttatagattgtgctaaccgtaaggtgactttaacaagtagcaatgggtaaacagtgtctttctttgtgtcctcccctagatctcatggtttgacattaaatcaagttgctttgcaagagatcccaatagtacaagactatccagatgtgttcccagaggatttgccaggtatgccacctaagagagacatagagttccggataaacttagtacctggaaccaaccctatccataagagaccttacagaatggcagctattgagttagcagaggtaaagagacaggtggatgatttgcttcagaaaggatatatcagacccagtacttcgccgtggggagcaccagtcatctttgtggagaagaaagatcatacccaaagaatgtgtgtggattatcgagcgttgaatgaggtcactatcaagaataagtatcctctacctaggattgatgacttgtttgatcaattggaaggtgctacagtcttctccaagaaagatctttgttccggatatcaccaactttgaatccgtgaggaggatataccaaagatcgcctttacaacacggtatggtttgtttgaaagtaccgttatgtcgtttggactcactaatgccccggcctatttcatgaacttgatgaacaacgtgtttatggaatatctagataagtttgtcgtggtgtttattgatgacatccttatttactccaagacaaaagaagagcatgaagagcatcttcgtcttgctttagagaaactacgtgagcatcagctctatgccaagtttagtaaatgtgaatttggttgcccgaagtgaagttccttagtcatgtcatctcagctggaggagttgtcgtggatccaagcaatgtggagtgagtgctaaattggaagcaacctaagatggtctcagagattcgtagtttccttggtctgcggggtactaccgcaggtttattgagaacttctcaaagatcgctagaccaatgtctcgactgcttcagaaggatgtgaagtataagtggacggaagagtgtgagcagagttttcaagaattgaagaaaaggctagtgactgcgccaatgttagtcttgcctgatccaaggaaaggttttcaggtgtattgtgatgcatctagacatggtttgggttgtgttttgatgcaagatgggaaggtggttgcctatacatctaggcagttacgccctcatgagaataactatccaacacatgatgtagagttggcagctgtggttcatgaattgaagatttggcgtcattacctttttgataaccgtacggagatgtatacggatcataaatgtttaaagtacattttcactcaacctaatctgaacatgcgtcaacgaagatggttagagttgatcaaggattatgacatggaaattcattatcatccaggtaaagcaaatgttgtagcagatgctctcagcaggaaaagctactgtaatatgtcagaaggacgacacctaccttgggagttatgccaggaattggaaaagttgaacttgggaatagtcaataaaggttttgttgccgctttagaagctcaacctactctttttgatcaagttagagaggctcaagtgaatgatcttgatatctaagaaattgaaaagaacatgagaagaggaaaaaccatcggttatatagaagatgagcaaggaactgtgtggctaggagaaagaatttgcgtgcccgataataaggagttgaaggatactattatgaaagaagctcatgaaactttgtattccattcatcctgggagcactaagatgtatcaagacctgaagcaacaattctggtgggctagcatgcgatgagagatagcggaatatgtggctctatgtgatgtgtgtcagcgagtcaaggcggagcatcagaagccagcctgtcagctgcaaccgttgaagattctagagtggaaatgggaggaaataggaatggattatatcaccggtctacccagaacgtcggcaggacaagattctatttgggtagtggttgataggcttactaaagttgctcattttatacctgtcaaaacaacctactcgggaaataagcttgcagagttatatatggcaagagttgtatgtttacatggtgttcccaagaaaatagtgtcagacagaggtagtcagtttacttcgatgttttggcggaaactacaagaagagatgcgtactcgtttgaatttcagtactacttatcaccctcaaactgatggccagacaaaaagagtgaatcaaattttagaagacatgttgagagcctgtgttctagatttcggtggaagttgggataagaatatgccgtacgccgaattcggttatatcaacagttatcaagctagtcttcaaatggctccatatgaagcattgtatggtcgaaagtgtcgtacaccgctccatttgggatcaaaccggtgagcgtcaagtttttgggacagatatattgcgagaggcagaagaaaaagtgaagattatccaagaaaggttgcgtattgcccagtcacgttagaagagctatgcagacaatcgtcgtagggatttgactttcgaagaaggagattatgtatacctacgggttacgctgctgcggggagttcatcgttttcagaccaaagggaaattggcaccgcgatttgtgggaccttttaagattgtgagtcggagaggtgaagtagcttatcaactagagttgcctccgtcaatggcgggaatacatgacgtgttccatgtgtcgcagttgaagaaatgtttgcgtgtacctacggaggaagcagatcctgagcatatagagcttcaaaaagatttaacttatgttgagaagccagtccgaattcttgtgtttccgacgttccggaggagagcgtttacgttgaggaaggcgattgatcaatactaaaatgctt

SEQ ID NO: 15658 - DNA, 4720 bp, Oryza sativa
  Clone ID: TFbOSC401314j.C1.o26.np
gtgacaagttggtatcagagccaccttgaccttaggataagccaaatgatgccgccccattcaccgagaaatttgatcaaggtgttaggattcgtcagggagctgaggttgatggcttttgaggtaggctatgaagttgctcctgagtatcgccggatttcccatgaccccgacgaggagaagtgtcgtgttcgtgtaacgttggctagtgatcgtgaagaccttccgtccattaagttcgaagctggaggaagatcgtacagccaggcttgtcaagaagcagctctggtggccattggagagttgcgtcaacgctttgaagaagagttggattcatcagctttccagtatcatcctcacaagcctcatggtcaagactatggaacctatacctgtcctgatggtgaagagagtgccactctgatgcatgcggtgcatatgcttagtgctatggatgcagtaagtgtggagcgagacaaagcagctcatgacagggaaaattggaatcgaggcaagatttgcaagttggagagcaaggtgtatcgtctacagaaggaattagctgaacttaaaggagaaacgccgcctccaacacccaagcttcacctcatcgcaagaaagagaacctgtccgccacctcgtctccagttagcttcgaagattcgcgtgatgggtgaagctgtgcccgatcgtgctgaacctgtcatcgacatcataagtgatgaggaagaagaggaagaccctgaagaaagagagccagctactccagaggaagaagatccatcgcttcgttccgacgcaaggcgcaccaccaatcccgtagaagcaggagattggctgcatgcggtggagaagaagttggacttgatccagtgtactgagcaggagaaagtttcttttgcttcgcatcaactgcatggacctgctgctgaatggtgggatcattttcgccaaggcagggctgaaggagagcctattacgtggcaggaattcacggccgctttcaagaagacgcacataccagcgggtgttgtagctctaaagaagagagaatttagagcactcaaccagggatctcgttcggtcaccgagtacctccatgatttcaaccgtttagctcgctatgctccagaagatgttcgttcagatgaagaacgtcaggagaagtttttagagggactgaatgatgagttgtcttatgctttgatgtctacggattttcgggatttccagcagttggtggacaaggcgattcgtcaggaagacaagtataaccggatggagcagaagaaacgcagggctgcccaattcaaggcacaacagggcagtaaccagaggccgcgtctcgttactggacctcaagctccatcgtaccctcaaggaggatcttcatcagttgtccgctcccaacgccagttctacaacaacaatactggtaatcgtggcaatgacaaccgcaacatggttgttcgtcctgcagcaactccagttcagaaccagcccgttaggaaggaacagggaagcaagccaggggtgtgcttcaattgtggtgatccaggacattatgctgataagtgtcctaagcctcggcgcgtgaagaacgttccagccccgaacaactccaatgctccagcaccaaaggcacgtgttaatcatgttgcagcagtagaagctcagaatgcaccagatgtggttttgggtacgtttcctgttaactctatacccgcaactgtgctttttgattccggtgctacacattcctttttgtctaaaagttttgcgagcaatcatgggatggaagttattagtcttgggagacctttactagttaataccccaggcaatcaagtgttttcgacacagtattgtccttccgttattataggaatagaagaagttcttttcccgtcctcccttatcttgctagaatccaaagatctagatgttatcttagggatggattggttatctcgtcacagaggagttatagattgtgccaaccgtaaggtgactttaaccagtagcaatggggaaacagtttctttctttgtgtcctctcctaaatctcatggggtgatcttaaaccaagttgctctacaagagatccccatagtacaagactacccagacgtgtttcccgaggatttgccaggtatgccacctaagagagacatagagtttcggatagacttggtacctggaaccaaccctatccataagagaccatacagaatggcagcaaatgagttagctgaggtgaagagacaggtggatgatttgcttcagaaaggatatatcagacccagtacttcgccatggggagcaccagtcatctttgtggagaagaaagatcatactcagagaatgtgtgtggattatcgagcgttgaatgaggttaccatcaagaataagtatcctctacccagaattgatgacctgtttgatcaactggaaggtgctacagttttctccaagatagatctccgttctggatatcatcaacttcgaatccatgaggaagatataccaaagaccgccttcacaactcggtatgatttattcgaatgtaccgttatgtcatttggactcactaatgccccagcctttttcatgaatctgatgaacaaggtgtttatggaatatctggataagtttgtcgtggtgtttattgatgacattcttatttactccaagacgaaggaagaacatgaagagcatcttcgtctagctttagagaaactacgtgagcatcaggtttatgccaagttcagtaaatgtgaattttggttgtccgaagtgaagtttcttggtcatgtcatctcgtctggaggagtggcagtagatccaagcaatgtggagtcagtgttaagttggaagcaacccaagacggtttcagaaattcgtagtttccttggacttgcggggtattaccgcaggtttattgagaacttttcaaagatcgccagaccaatgactcgtctgcttcagaaggaagtgaagtacaagtggacggagggttgtgaacaaagtttccaagaactgaagaaaaggctagtgactgcgcctgtgttagttttgcctgattcgaggaaaggtttccaagtgtattgtgatgcgtcccgacacggtttgggttgtgtgttgatgcaagaaggaaaggtggttgcctatgcatctaggcaattacgtcctcatgagaataactacccaacgcatgacctagagttggcagctgtggtgcatgcattgaagatttggcgtcattatcttttcggtaaccgtacagagatatatacggatcataaaagtttgaagtacattttcactcaacctgatttgaacatgcgtcagcgaagatggttagagttgattaaagactatgatatggaaatccactatcacccggggaaagcaaatgttgtagccgatgctcttagcaggaaaagctactgtaatatgtcagaaggtcgacgtttaccttgggagttatgccaagaatttgaaaagatgaacttgggaatagtcagcaaaggttttgtggctactttggaagctcaacctactctgtttgatcaagttagagaagctcaagtgaatgatcctgatatccaagaaataaagaacatcagaagccagccggtctgttacaaccattgaagattccagagtggaagtgggaagaaataggaatggattttataaccggtctacccagaacgtcggcaggacatgattctatttgggtagtggttgataggttgacaaaagtcgctcacttcataccggtcaaaacaacctatacagggaataagcttgcagagttatacatggccagagtggtatgtttgcatggcgttcctaagaagatagtgtcagatagaggtagccagtttacttcgaagttttggcagaaattacaagtagagatgggtaaccgtttgaatttcagtaccgcttatcaccctcaaacagatggacagacggaaagagtaaaccaaattttagaagatatgttgagagcttgtgttctagattttggtggaagttgggataagaatttgccgtacgcggaattctcatataacaacagttatcaagctagtttgcaaatggctccgtatgaagcattatatggccgaaagtgccgtacgccgctcctttgggatcaaaccggtgaacgtcaagtttttgggacagacatattgcgagaggcagaagaaaaagtaaagattatccaagaaaggttgcgcgttgctcagtcgcgtcagaagagctatgccgacaatcgtcgcagagatttggctttcgaagaaggagattatgtataccttcgggttacgccgttacgaggtgttcatcgtttccaaaccaaagggaaattggcaccgcgttttgtgggaccttttaagatcgtgagtcgaagaggtgaagtagcttatcagttagagttgcctccgtcaatggcgggaatacatgacgtgttccatgtgtctcagttgaagaaatgtttacgtgtacctacggaggaagcagatcctgatcgtatagagcttcaagaagatttaacttatgttgagaagccagtcagaattttggaatttccgacgttccggaggagagcgtttccgttgaggaagatcgtgcgagtaccttgtcaagccagaggcctcttgggcgaagggtgcaaggcgaagagtatataccggaggaagatgacttc

SEQ ID NO: 15659 - DNA, 5200 bp, Oryza sativa
  Clone ID: TFbOSC401388j.C1.o10.np
taattttaaataataaattccaatataaaattccgacgttcccggagagtccgattttgcaggagaagaatttgaagagttccaaggccagcaaggtaactgctggtttggaatggtatattcctggtttggagatagaactatgcagccgggattggttgttcagaatggttgggcctatgcaacaggatgccgcgctacaagcctaagtacttgtttggtactgagggatttgtccaggagttgcgtacgatgtccttcctcataggatttgggactgcccctttgtatgcccagattcctcatgatcgtgatgaagagaagtgccgtgtcaaagtcaccttgaacagtaatcatgaagatatcccatcggtgatgtttgaggctggagggggaagctacattcatgcttgccaggaggtggcaaggatcgctataggaaagctacgcgaaagctacaatgatcggttggccgacaccgagtatcgctaccatcctcgtcaaccccaaggaagcgaccgtggcagctaccttgaaccggcagggattgagaataatgctaccacaaggcatttggttgagatgctgtgggccatggatgagacccgtgctgacattgtgatagcagctcaagatcgtgaagaccggaatcgcggaaagatttgcaagctggaggacaaggtggatcgtttggagaaggagccagccgcattgaagggagaagcaccactgcaaggaagagagctctattcgttcctcgctaccagttggcgccaaagatggtgcttactcgcagcaatgggaatggacccaaccccaacaacaacaacaacaatggagagaatcccacgcttgccccagtcctggctcaacaggcacagcttatgatgaatctgatgatgcagcaactccagaaccagcagaaccagggaaacaatcatgcacctccccagaataagctggcagaatttcttcgtgtgaggccgcctactttctctagcaccaccaatcctgttgaagctggtgattggctcacgccatagagaagaagttggacctgcttcagtgcacagatcaagagaaggtctcttttgcttcacaccagctgcatggccctgcctctgagtggtgggatcacttccgtctcaacaggactactgctgaacctatcacttggcttgaattcactgctgcttttcggaagacgcacataccatcaggagtggtgtctctcaagaagaaggagttcaggtcgctcactcagggatctcgcactgtcactgagtatctgcatgaatttaatcgcctggctcgttatgctccggaagatgtgcgcactgatgaagagcgccaagagaagttcctggaaggactgaatgatgagctttcttacccattgatgactggggattatcatgatttccagaagttggtggataaggctattcgccaggaggacaagtacaaccgcatggagcagaagaaacgcaggattgctcatttcaaagcttagcaggggagtagtcagaggctgcgtcttgccttgggacctcagtcagtgccacagggaggttcttcgtctattgttcgtccgcagcgtcagttcttcaacaacaatgctggcaacaacaaccgcaaccaagctccacgccctgttgcagctccgacacagaatcagccagccaagagggagcaaggcagcaagcccggagtgtgctttaactgtggtgacccaggacattacgctgataagtgtccgaagccccgccgcacgaaggttgtccctgccaagaacaactcctccgcaccagcgacaaaggctcgtgtcaaccatgttgctgctgcagaagctcaaggtgacccagatgtgattttgggtacgttccttgttaactcagttcctgcaacagtgcttttcgattctggtgctacacattcatttttatctatgagttttgcgggaaatcatgggatggaggtagaagatcttagacgtcctttgatggttagtactccgagtaaccaagcactctcatcacaacgtagcccctctgtcagaatagagattcaaggtgtaccatttctggccaaccttattctgttagaatccaaagaccttgatgtcatcctagggatggactggttagccagatataaaggtgtgatagactgtgccaatagaaaagtaactctcaccagcaatgacggtcaagttgtaactgttcatgcactgccttctgagactttaaggtcaagtctaaaccaaataactttggaagagattcctatagtacgggagtacccagatgtgttccttgatgatttacctggtatgccgcccaagagagatatagaattcagaatagatctggtaccaggaacaactccgatccataagagaccttatagaatggcagccaatgaattagcagaagtcaagaggcaggtagatgatttgcttcaaaaaggatacattagaccaagttcgtctccatggggagctccagttatttttgtggataagaaagaccatacccagaggatgtgtgtggactatcgagcactgaatgatgtgactatcaagaataagtacccgctgcccagaattgatgatttgtctgatcagcttaaaggtgccaccgttttctccaagatcgatcttcgatcaggatatcaccagttgaggatcaaagaggaagatatacctaagacggcttttaccactcggtatgggttgtttgaatgtacagtcatgtcttttggacttaccaatgcccccgctttcttcatgaacttgatgaataaggtgtttatggaatacctagacaagttcgtggtagtctttattgatgacattctcatttactcccgaaccaaagaagagcatgaggaacatcttcgtcttgcactagagaagctacgagaacatcaattgtatgccaagtttagcaaatgtgaattttgattgtctgaagtgaagttccttggtcacgtcatctcagccggaggagttgccgttgatcctagtaatgtggaatccgtaaccaactagaaacaaccgaaaacagtttcagagattcgcagtttcctgggtcttgcaggctattacatgaggtttatagagaatttctccaagattgctaagcccatgacacgactgcttcagaaagatgtgaagtacaagtggtcagaagaatgtgagcagagttttcaagagttgaaaagtcgcttaatatcagcacccattttgattctgcttgatccaaagaagggtttccaagtgtattgtgatgcatccaagcttgggttaggttgtgttctgatgcaagatgggaaggtggttgcctatgcatctcgccagttacgtccgcataagaagaactaccctactcatgaccttgagttagctgcagtggttcatgcgttgaagatttggcgtcattatctttttggtactcgtacggaggtgtatacggatcacaaaagtttgaagtatatctttacccagccggatctgaacatgagacagcggagatggctggaactgattaaggattatgacctgggaattcattatcacccaggaaaggctaatgttgtagcagatgctctcagcaggaaaggctattgcaatgctacggaaggatgacagttgccattggagttatgtaaggaatttgaaagattaaatttgggaattgtcagtagaggtttcgttgcagccttagaagcgaagcccactctcatcgatcaagttagagaagcccaaattaatgatcctgatattcatgagatcaagaagaatatgagaagaggaaaagctatcggtttcttggaagatgagcaaggaactgtatggttgggtgagaggatctgtgtcccagacaacaaagatttgaaagatgcaattctgaaggaagctcatgacacgttgtactccattcaccctggtagtactaagatgtaccaggatctcaaggagagattttggtgggcaagtatgaagcgagagatagcagagtatgtaacagtatgtgatgtttgtcagcgagtcaaggcagaacatcagaaactcgcaggtttgttgcaacctctgaagataccagaatagaagtgggaggaaatcggtatggatttcatcactggtctacccagaacgtcatcaggccatgactctatctaggtgatagtcgacagacttaccaaagtggctcatttcatcccagtgaggacaacatattccggaagtagcttggcggaattgtatatggcaagaattgtgtgtctgcacggtgtgcctaagaagatagtatcagatcgaggtagccagtttacttcaaagttttggaagaagcttcaagaagagatgggttccaagctgaactttagtactgcttatcatccgcggacagatgaacaaaccgaaaggataaatcagattttggaagacatgttgagagcttgtgctttagacttcggtggaagttgggataagaatctgctttacgcggaattctcatacaacaacagttatcaagctagtcttcaaatgcctccttatgaagcactgtatggtcggaagtgccgcacaccacttttgtgggatcaaacgggagaacgtcaggttttcgggactgatatcctaagggaagcagaagagaaggtaaagatcattcaagaaagattgcgagtggctcagtctcgtcataagagttatgccgacaatcgccgtagagatctaagttttgaagaaggagatcatgtgtaccttcgtgtctcgcctcttcgaggggttcatcgttttcacaccaaaggaaaattcgcaccgcgtttcgtgggaccttataagattgtcagtagaagaggtgaggtagcttatcagttggagttacctcaatccttggcaggtgtccataatgtgttccatgtgtcacagttgaaaaagtgtttaagggtacccactgaagaagctaatcctgaacagatagaattccaagaggatctgacgtatgttgagaaaccaatctgtatcttggagacagatgagagaagaaccaggaatcgagttatccatttttgtatggtccaatggagtaatcactcggaagaagaagctacttgggaacgagaagatgaattaaagtcagctcatccgcatctgttcaccagttcttccgaatctcgaggacgagattccgtt

SEQ ID NO: 15660 - DNA, 3960 bp, Oryza sativa
  Clone ID: TFbOSC401693j.C1.o22.fg
atggcttttgaagtaggcaatgaagttgctcccgagtatcgccggatttcccatgaccccaacgaggagaagtgtcgtgttcgtgtgacgttggctagtgatcgtgaagaccttccgtccattaagttcgaagctggaggaagaacgtatagccatgcttgtcaagaagctgctttggtggccattggagatttgcgtcaacgctttgaagaggagttggattcatcagctttccagtatcatccccacaagccccatgtgcatatgcttagtgctatggatgcagttagtgtggagcgagacaaagcagctcatgacagggaaaactggaatcgaggcaagatttgcaagttggagagcaaggtgtaccgtctacagaaggaattagctgagcttaaaggagaaacaccgccgccaacacccaagcttcgcctcactgcaaggaagagaacctgtccaccaccctgtctccagttagcttcgaagattcgcgtgatgggagatgccgtgcctgactgtgctgaacctatcatccacatcttaagtgatgaggaagaagaggaagatccagaggaaagaaaagcacagaatcaggaggcaaacaaccagaaccagaatcaaccccctaccttttcaagcaccactaaccccgtagaagcaggagattggttgcatgcagtggagaagaagttggatttgatccagtgtacgaagcaggaaaaagtttctttcgcttcgcatcagctgcatggtcccgctgctgaatggtgggatcactttcgccaaggcagggctgagggagagcctattacttggcaggaatttacggctgctttcaacaagacgcacataccgacgggtgttgtagctctgaggaagagagaatttagagcgctcaaccagggatcccgttcggtcatcgagtaccttcatgatttcaatcgtttagcccgttatgctccggaagatgttcgcaccgatgaagaacgtcaggagaagtttttggagggactgaatgatgagttgtcttatgctttgatgtctatggatttcagggatttccagcagttggtggacaaagcgattcgtcaggaagacaagtataatcgaatggagcagaagaagcgcagggctgcccaatttaaggctcaacagggcagtaaccagaggccgcgtctcgttacgggacctcaagctccatcgtaccctcaaggaggatcttcattagttgtccgccctcaacgccagttctaccacaacaatactggtaaccgcaccaatgacaaccgcaatatggtcgctcgtcctgcagcaactccagctcagaaccagcccgttaggaaggaacagggaagcaagccaggggtgtgcttcaattgtggtgatccaggacattatgctgataagtgtcctaagcctcgacgtgtgaagaatgctcccgccctgaagaactgcaatactccagcaccgaaggctcgtgttaatcatgttgcagcggcagaagcccagaatgcaccagatgcggttttagatgttatcttagggatggattggttatctcgtcatagaggagttatagattgtgccaatcgtaaggtgactttaaccagtagcgatggggaaaccgtttctttctttgcgtcctctcctaaatctcatggtgtgaccttaaaccaagttgttctacaagagatcccagtagtacaagactacccagatgtgtttcccgaggatttgccaggtgctacagttttctccaagatagatctccgttcgggatatcatcaacttcgaatccgtgaggaagatataccaaagaccgcctttacaactcggtatggtttgttcgaatgcacagttatgtcgtttggactcactaatgccccggccttgttcatgaatctgatgaacaaggtgtttatggaatatctggataagtttgtcgtggtgttcattgatgacattcttatttactccaagacaaaagaagaacatgaagagcatattcgtctagctttagagaaactacgtgagcatcagctctatgccaagttcagtaaatgtgaattttggttgtcggaagtgaagtttcttggtcatgtcatctcatctggaggagtggcagtagatccaagcaatgtggagtcagtgttaaattggaagcaacccaagacggtttcagaaattcgtagtttccttggacttgcggggtactaccgtaggtttattgagaacttctcaaagatcgctagaccgatgactcgtctgcttcagaaggaagtgaagtacaagtggacagaagattgtgaacaaagtttccaagaactgaagaaaaggctagtgactgcgcctgtgttaattctgcctgattcaaggaaagaaggaaaggtggttgcctatgcatctaggcaattacgtcctcatgagaataactacccaacgcatgacctagagttggcagctgtagtacatgcattgaagatttggcgtcattatcttttcggtaaccgtacagggatgtatacggatcataaaagtttgaagtacattttcactcaacctgatttgaacatgcgtcagcgaagattgttagagttgattaaagattatgatatggaaatccattatcacccgggtaaagcaaatgttgtagccgatgccctcagcaggaaaagctactgtaatatgtcagaaggtcgacatctaccttgggagttatgtcaggagtttgaaaagttaaacttgggtatagtcagcaaaggttttgtggctgctttagaagctcaacctactttgtttgatcaagttagagaagttcaagtgaatgatcctgatatccaagaaatcaaaaagaacatgagaagaggaaaagccatcggttatgtagaagatgagcaaggaactattccagagtggaagtgggaagaaataggtatggacttcataaccggtctacccagaacgtcggcaggacatgattctatttgggtagtggttgacagattgactaaagtcgctcatttcatacctgtcaaaacaacctacacggcgaacaagcttgcagagctatacatggccagagtggtatgtttgcatggagttcccaagaagatagtgtcagatagaggtagtcagtttacctcaaaattttggcagaaactacaagtagagatgggtacccgtttgaatttcagtaccgcttatcaccctcaaacagatggtcagaccgagagagtaaatcaaattttagaagacatgttgagagcctgtgttctagattttggtggaagttgggataagaatttgccatacgcggaattcccatataacaacagttatcaagctagtttgcaaatggctccgtatgaagcattatatggccgaaagtgtcgtacgccgctcctgtgggatcaaaccggtgagcatcaagtttttgggacagacatattgcgagagccagaagaaaaagtgaagattatccaagaaaggttgcgcgttgctcagtcacgtcagaagagctatgccaacaatcgtcgcagagatttggcttttgaagaaggggattatgtataccttcgggttacgccgttacgaggtgttcatcgtttccagaccaaagggaaattggcatcgcatttcgtgggaccttttaagatcgtgagtcgaagaggtgaagtagcttatcagctagaattgcctccgtcaatggcgggaatacatgacgtgttccacgtgtcacaattgaagaaatgtttacgtgtacctacggaagaagcagatcctgaacatatagagcttcaagaagatttaacttatgttgagaagccagtcagaatcttggaatttccgacgttccggaggagagcgtttctgttgaggaaggttccgaagcgtttgtggaagcccaaggcaagtcacacagatcccaaacaaccctttgagcatgttgaacccgtgtaa

SEQ ID NO: 15661 - DNA, 5197 bp, Oryza sativa
  Clone ID: TFbOSC401740j.C1.o1.np
attccgacgtttccggagagtccgttttcacaggagaagaatttgaagagttccaaggccagcaaggcaactcctggtttggaatggtatattcctggtttggagatagatctgtacagccgggtatggttgttcaggatggttgggcctgagcagcatgatgccgcgctacaagcctgagtacttgtttggtgttgagggatttgtccaggagttgcgtacgatgtcctttgccataggatttgggactgcccctttttatgcccagattcctcatgatcgtcacgaagagaagtgccgagtcaaagtcaccttgaacagtaatagtgaagatatctcctcagtgatgttcgaagctggaggaggaaactacatccatgcatgtcaggaggtggcaaggatcgccataggagagcttcgcgatcgctacagtgatcagttggccgacactgagtatcgctaccatcctcgccaaccacagggaagtgaccgtggcagctaccttgagactgagggaattgagaatgatgctaccacaaggcatttggttgagatgctgtgggctatggataaaactcgtgcggagactgtgttagcggctcaagatcgtgaagaccggaatcgtggtaagatttgcaagttagaggacaaagtggatcgtttggagaaggaactagccgcattgaagggagaagcaccaccgcagaaggccaggattcgtcttaccgcaaggaagagagctctatttgtccctcgctaccaattagcgctaaagatggtgctcactcgcagcaacgggaatggccccaacaacaacaataacaacaacaacaatggagagaatcccacacttgcccaagtcctggctcaacaggcacagcttatgaacatgatgatgcagcaactccagaaccagcagaaccagggaaataaccatgcacctccccagaacaagttagcagaatttcttcgtgtgaggccgcccactttctctagcaccactaatcatgttgaagctggtgattggctgcatgccatagaaaagaagttggatttgcttcagtgcactgattaggagaaggtctcatttgcatcacaccagctgcatggccctgcctctgaatggtgggatcacttccgcctgaacaggactactgctgaacctatcacttggcttgaattcaccgctgctttccggaagacgcatataccatcgggagtggtgtctctcaagaagaaggaattcaggtcgctcactcaggggtctcgctctgttactgagtatctgcacgagttcaatcgtctggctcgttatgctccggaagatgtgcgcactgatgaagagcgctaggagaggttcttggaaggacttaatgatgagctttcttacccactcatgactggggattatcatgatttccagaagttagtggataaggctattcgccaggaggacaagtacaatcgcatggagcagaagaaacgccggattgctcacttcaaggcacaacaggggaatagtcagaggccgcgtcttactttaggaccccagtccatgccacagggagtttcttcgtctgttgttcgtctgcagcgtcagttcttcaacaacaatgctggcaacaacatccgcaatcaagctccacgccctgttgcagcttcgacacagcaacagcctgccaagaaggagcaaggcagcaagcccggggtgtgcttcaactgtggagacccaggacattacgctgacaagtgtccgaagccccgacgcgtgaaggttgtccctgcccagagcaactctaccgcaccagcatcaaaggctcgtgtcaatcatgttgctgctgcagaagctcaaggtgctccagatgtgattttgggtacgttccttgttaacttagttcctgcaacattgcttttcgattctggtgctatacattcattcttatctatgagttttgcgggaaatcatgggatggaagtagaagatcttagacgtcctttgatggttagtaccccaagtaatcaagcactctctttgcaacatagcccctctgtcaggatagaaattcaaggagtaccatttctggccaatcttatcctgttagaatccaaagaccttgatgtcatcctagggatggactggttagccagatataaaggtgtgatagactgtgccaacagaaaagtaattctcaccaacaatgatggtcgagttgtaactgttcatgcattgtcttctgagtctttaaggtcaagtctgaaccaaataactttgaaagagattcctatagtccgggagtatcccgatgtgttcccagacgatttacctggtatgccgtctaaaagggatatagagttcagaatagatttggtaccaggaacaactccgatccataagagaccttatagaatggcagccaatgagttggtagaagtcaagaggcaagtagacgatttgcttcagaaaggatacatcagaccgagttcatctccatggagagctccggttatttttgtggaaaagaaagatcatacccagaggatgtgtgtggactatcgtgcactaaatgatgtgactatcaagaataagtatccgctgcccagaattgatgatttgtttgatcagcttaaaggtgccaccgttttctccaagatagatcttcgatcagggtatcaccagttgagaatcaaagaggaagatatacctaagacagcttttaccactaggtatgggttgttcgaatgtactgttatgtcttttggacttaccaatgcccccgctttcttcatgaacttgatgaataaggtgtttatggaatacctagacaagttcatggtggtctttattgatgacattcttatctactcccgaaccaaagaagagcatgaagaacatcttcgccttgcactagagaagctacgagaacatcaactgtatgccaagtttagcaagtgtgaattttggttgtctgaagtgaatttccttggtcacgtcatctcagcaggaggagttgccgtcgatcctagtaatgtggaatccgtaaccaactggaaacaaccaaagacagtttcagagattcacagtttcctaggcctcgcaggatattatcggaggtttatagagaatttttccaagattgctaagcccatgacacgactgcttcagaaagatgtgaagtacaagtggtcagaagaatgtgagcagagttttcaagagttgaagaatcgcttaatatcagctcctattttgattttacctgatccaaagaagggtttccaagtgtattgcgatgcatccaaacttgggttaggttgtgttctgatgcaagatgggaaggtggttgcctatgcatctcgtcagttacgtccgcatgagaagaactaccctactcatgatcttgagttagctgcagtggttcatgcgttgaaaatttggcgtcattatcttttcggtactcgtacagaggtgtacaccgatcacaagagtttaaagtatatctttactcagccggatctgaacatgagacaacggagatggttagaattaattaaggattatgacatgggaatttattatcacccgggaaaggctaatgttgtagcagacgctcttagcaggaaaggctattgcaatgctacggaaggacgacagttgccattagaattatgcaaggaatttgaaagattaaatttgggaatggtcagtagaggtttcgttgcagccttagaagcaaagcccactctaattgatgaagttagagaagcccaaattaatgatcctgatattcaagaaatcaagaagaatatgagaagaggaaaagctatcggtttcttggaggatgagcaaggaacggtatggttgggtgagagaatctgcgtccccgacaacaaagatttaaaagatgcaattctgaaagaagctcatgatactttatactccattcaccctggtagtaccaaaatgtaccaggatctcaaggaaagattttggtgggcaagtatgaagcgtgaaatcgcagaatacgtagcagtatgtgatgtttgtcagcgagtcaaggcagaacatcagaaacccgctggtttgctacagcctttgaagattcctgaatggaagtgggaggaaatcggtatggatttcatcactggtctacccagaacgtcatcaggccatgactctatttgggtgatagtcgacagacttaccaaagtggctcatttcatcccagtaaagacaacctattctggaagtcggttggcggaattgtatatggcaaggattgtgtgtttgcatggcgtccctaagaaaatagtatctgatcgaggcagtcagtttacttcaaagttttggaagaagcttcaggaagagatgggttctaagctgaactttagtactgcttatcatccgcagacagacggacaaaccgaaagggtgaatcagattttggaagacatgttgagagcttgtgctttagacttcggtggaagttgggataagaatctaccttatgcagaattttcgtacaacaacagttatcaagctagtcttcagatggctccttacgaagcactgtatggtcgtaagtgccgcactccgcttttgtgggatcaaacgggagaacgtcaggtcttcgggacggatatcctgagggaagcagaagaaaaggtgaaaatcattcaagaaagattgcgtgtggcccagtctcgtcataagagttatgccgacaatcgtcgtagagaactaagttttgacgaaggagattatgtgtaccttcgtgtcacgcctcttcgaggagttcatcgttttcacaccaaaggaaaattggcaccgcattttgtgggaccttataagattgtcagtagaagaggagaggttgcttatcagttggagttaccttaatctttggcaggagtccataatgtgttccatgtgtcgcaattgaaaaagtgtttaagggtacctaccgaagaaaccaatcttgaacagatagaagtccaagaggatctgacctatcttgagaaaccaatccgtatcttggaaatagatgagagaagaaccagaaatcgagttatccgtttttgcaaagtccaatggagtaatcactcggaagaagaatcaacttgggaacgagaagatgaattgaagtcagctcatccgcatctgttcgccagtttttctgaatctcgaggacgagattctgtt

SEQ ID NO: 15662 - DNA, 2966 bp, Oryza sativa
  Clone ID: TFbOSC401750j.C1.o20.np
aagaagagttggattcatcagctttccagtatcatcctcacaagcctcatggtcaagactatggaacctatacctgtcctgatggtgaagagagtgccactctgatgcatgcggtgcatatgcttagtgctatggatgcagtaagtgtggagcgagccaaagcagctcatgacagggaaaactggaatcgaggcaagatttgcaagttggagagcaaggtgtaccgtctacagaaggaattagctgaacttaaaggagaaacgccgccgccaacacccaagcttcgcctcactgcaagaaagagaacctgtccgccacctcgtctccagttagcttcgaagattcgcgtgatgggtgaagctgtgcccgatcgtgctgaacctgtcatcgacatcataagtgatgaggaagaggaggaagaccctgaagaaagagagccagctactccagaggaagaagatccatcgcttcgttccgacgcaaggcgcactaccaatccagtagaagcaggagattggctgcatgcggtggagaagaagttggacttgatccagtgtactgagcaggagaaagtttcttttgcttcgcatcaactgcatggacctgctgctgaatggtgggatcattttcgccaaggcagggctgaaggagagcctattacgtggcaggaattcacggccgctttcaaaaagacacatataccaacgggtgttgtagctctaaagaagagagaatttagagcactcaaccaaggatctcgttcggtcaccgagtacctccatgatttcaaccgtttagctcgttatgctccggaagatgttcgcaccgatgaagagcgtcaggagaagttcttggagggactgaatgatgagttgtcttatgccttgatgtctacggatttccgggatttccagcagttggtggacaaggcgattcgtcaggaagacaagtataaccggatggagcagaagaagcgcagggctgcccaattcaaggcacaacagggcagtaaccagaggccgcgtctcgttacgggacctcaagctccatcgtaccctcaaggaggatcttcatcagttgtccgcccccaacgccagttctacaacaacaatactggtaatcgtggtaatgacaaccgcaacatggttgctcgtcctgcagcaactccagctcagaaccagcccgtcaggaaggaacagggaagcaagccaggggtgtgcttcaattgtggtgatccaggacattatgctgataagtgtcctaagcctcggcgcgtgaagaacgctccagccccgaataactccaatgctccagcaccaaaggcacgtgttaatcatgttgcagcagcagaagctcagaatgcaccagatgtggttttgggtacgtttcctgttaactctatacccgcatctgtgctttttgattccggtgctacgcattcttttttgtctaaaagttttgcgagcaatcatgggatggaagttattagtcttgggagacctttactagttaataccccaggcaatcaagtattttcgacacagtattgtccttccgctactatagaaatagaagaagttcctttcccatcctcgcttatcttgctagaatccaaagatctagatgttatcttagggatggactggttatctcgtcacagaggagttatagattgtgccaaccgtaaggtgactttaaccaatagcaatggggaaacagtttctttctttgtgtcctctcctaaatctcatggtgtgatcttaaaccaagttgctctacaagagatccccatagtacaagactacccagacgtgtttcccgaggatttgccaggtatgccacctaagagagacatagagtttcggatagacttggtacctggaaccaaccctatccataagagaccgtacagaatggcagctaatgagttagctgaggtgaagagacaggtggatgatttgcttcagaaaggatacatcagacccagtacttcgccatggggagcaccagtcatctttgtggagaagaaagatcatacttagagaatgtgcgtggattatcgagcgttgaatgaggttactatcaagaataagtatcctctacccagaattgatgacctgtttgatcaactggaaggtgctacagttttctccaagatagatctccgttctggatattattaacttcgaatccgtgaggaagatataccaaagaccgccttcacaactcggtatggtttgttcgaatgtaccgttatgtcatttggactcactaatgccccagcctttttcatgaatctgatgaacaaggtgtttatggaatatctggataagtttgtcgtggtgtttattgatgacattcttatttactccaagacaaaggaagaacatgaagagcatcttcgtctagctttagagaaactacgtgagcatcagctttatgccaagttcagtaaatgtgaattttggttgtccgaagtgaagtttcttggtcatgtcatctcgtctggtggagtggcagtagatccaagcaatgtggagtcagtgttaagttggaagcaacccaagacggtttccgaaattcgtagtttccttggacttgcagggtattaccgcaggtttattgagaacttttcaaagatcgccagaccaatgactcgtctgcttcagaaggaagtgaagtacaagtggacagaggattgtgaacaaagtttccaagaattgaagaaaaggctagtgactgcgcctgtattaattttgcctgattcgaggaaaggtttccaagtgtattgtgatgcatcccgactcggtttgggttgtgtgttgatgcaagaaggaaaggtggttgcctatgcatctaggcaattacgtcctcatgagaataactacccaacgcatgacctagaattggcagctgtggtgcatgcattgaagatttggcggaaccacaccttcgcctgagatctg

SEQ ID NO: 15663 - DNA, 4731 bp, Oryza sativa
  Clone ID: TFbOSC405551j.C1.o5.fg
atggcttttgaggtaggctatgaagttgctcctgagtatcgccggatttcccatgaccccaacgaggagaagtgtcatgttcgtgtgacgttggctagtgatcgtgaagaccttccgtccattaagttcgaagctggaggaagatcgtacagccatgcttgtcaagaagcagctttggtggccattggagagttgcgtcaacgctttgaagaagagttggattcatcagctttccagtatcatcctcacaagcctcatggtcaagactatggaacctatacctgtcctgatggtgaagagagtgccgctctgatgcatgcggtgcatatgcttagtgctatggatgcagtaagtgtggagcgagacaaagcagctcatgacagggaaaactggaatcgaggcaagatttgcaagttggagagcaaggtgtaccgtctacagaaggaattagctgaacttaaaggagaaacgccgccgccaacacccaagcttcgcctcatcgcaagaaagagaacctgtccgccacctcgtctccagttagcttcgaagattcgtgtgatgggtgaagctgtgcccaatcgtgctgaacctgtcatcgacatcataagtgatgaggaagaagaggaagaccctgaagaaagagagccagctactccagaggaagaagatccgtcgcttcgttccgacgcaaggcgggattacaccaccaatccagtagaagcaggagattggctgcatccggtggagaagaagttggatttgatccagtgtactgagcaggagaaagtttcttttgcttcgcatcaattgcatggtcctgctgctgaatggtgggatcattttcgccaaggcagggctgaaggagagcctattacgtggcaggaattcacggccgcttttaagaagacacacataccaacgggtgttgtagctctaaagaagagagaatttagagcactcaaccagggatctcgttcggtcaccgagtacctccatgatttcaaccgtttagctcgttatgctccggaagatgttcttaccgatgaagagcgtcaggagaagttcttggagggactgaatgatgagttgtcttatgccttgatgtctacggatttccgggatttccagcagttggtggacaaggcgattcgtcaggaagacaagtataaccggatggagcagaagaagcgcagggctgcgcaattcaaggcacaacagggcagtaaccagaggccgcgtctcgttacgggacctcaagctccatcgtaccctcaaggaggatcttcatcagttgtccgcccccaacgccagttctacaacaacaatactgcaactccagctcagaaccagtccgtcaggaaggaacagggaagcaagccaggggtgtgcttcaattgtggtgatccaggacattatgctgataagtgtcctaagcctcggtgcgtgaagaacgttccagccccgaacaactccaatgctccagcaccgaaggcacgtgttaatcatgttgcagcagcagaagctcagaatgcaccagatgtggttttgggtacgtttcctgttaactctatacccgcatctgtgctttttgattccggtgctacacattcctttttgtctaaaagttttgcgagcaataatgggatggaagttattagtcttgggagacctttactagttaataccccaggcaatcaagtattttcgacacagtattgtccttccgttactatagaaatagaagaagttcctttcccatcctcgcttatcttgctagaatccaaagatctagatgttatcttagggatggactggttatctcgtcacagaggagttatagattgtgccaaccgtaaggtgactttaagcagtagcaatggggaaaccgtttctttctttgtgtcctctcctaaatatcatggtgtgatcttaaaccaagttgctttacaagagatccccatagtacaagactacccagacgtgtttcccgaggatttgccaggtatgccacctaagagagacatagagtttcggatagacttggtacctggaaccaaccctatccataagagaccatacagaatggcagctaatgagttagctgaggtgaagagacaggtggatgatttgcttcagaaaggatacatcagacccagtacttcgccgtggggagcaccagtcatctttgtggagaagaaagatcatactcagagaatgtgcgtggattatcgagcgttgaatgaggttactatcaagaataagtatcctctacccagaattgatgacctgtttgatcaactagaaggtgctacagttttctccaagatagatctccgttctggatatcatcaacttcgaatccgtgaggaagatataccaaagaccgccttcacaactcggtatggtttgttcgaatgtaccgttatgtcatttggactcactaatgccccagcctttttcatgaatctgatgaacaaggtgtttatggaatatctggataagtttgtcgtggtgtttattgatgacattcttatttactccaagacgaaggaagaacatgaagagcatcttcgtctagctttagagaaactacgtgagcatcagctttatgccaagttcagtaaatgtgaattttggttgtccgaagtgaagtttcttggtcatgtcatctcgtctagaggagtggcagtagatccaagcaatgtggagtcagtgttaagttggaagcaacccaagacggtttcagaaattcgtagtttccttggacttgcggggtattaccgcaggtttattgagaacttttcaaagatcgccagaccaatgactcgtctgcttcagaaggaagtgaagtacaagtggacagaggattgtgaacaaagtttccaagaactgaagaaaaggctagtgactgcgcctgtgttaattttgcctgattcgaggaaaggtttccaagtgtattgtgatgcatcccgactcggtttgggttgtgtgttgatgcaagaaggaaaggtggttgcctatgcatctaggcaattacgtcctcatgagaataactacccaacgcatgacctagaattggcagctgtggtgcatgcattgaagatttggcgtcattatcttttcggtaaccgtagagagatgtatacggatcataaaagtttgaagtacattttcactcaacctgatttgaacatgcgtcagcgaagatggttagagttgattaaagattatgatatggaaatccactatcacccggggaaagcaaatgttgtagccgatgctcttagcaggaagagctactgtaatatgtcagaaggtcgacatttaccttgggagttatgccaagaatttgaaaagttaaacttggatatagtcagcaaaggttttgtggctactttacaggctcaacctactctgtttgatcaagttagagaagctcaagtgaatgatcttgatatccaagaaataaaaaagaacatgagaagaggaaaagccatcggttatgtagaagatgagcaaggaactgtgtggttaggagaaagaatttgcgtcccagaaaataaggagttgaaggatactatcatgaaagaagctcatgaaactttgtattccattcaccctggaagcactaagatgtaccaagacctaaagcaacaattctggtgggccagtatgcgacgtgaaatagcagaatatgtggctctatgtgatgtatgtcagcgggtcaaggcagaacatcagaagccagccagtctgttacaaccgttgaagattccagagtggaagtgggaagaaataggaatggattttataaccggtctacccagaacgtcggcgggacatgattctatttgggtagtggttgataggttgacaaaagtcgctcacttcataccggtcaaaacaacctatacggggaataagcttgcagagttatacatggccagagtggtatgtttgcatggtgttcctaagaagatagtgtcagatagaggtagccagtttacttcgaagttttggcagaaattacaagtagagatgggtacccgtttgaatttcagtaccgcttatcaccctcaaacagatggtcagacggaaagagtaaaccaaattttagaagatatgttgagagcctgtgttctagattttggtggaagttgggataagaatttgccgtacgcggaattctcatataacaacagttatcaagctagtttgcaaatggctccgtatgaagcattatatggccgaaagtgccgtacgccgctcctttgggatcaaaccggtgaacgtcaagtttttgggacagacatattgcgcgaggcagaagaaaaagtgaagattatccaagaaaggttgcgcgttgctcagtcacgtcagaagagctatgccgacaatcgtcgcagagatttggctttcgaagaaggagattatgtataccttcgggttacgccattacgaggtgttcatcgtttccagaccaaagggaaattggcgccgcgtttcgtgggaccttttaagattgtgagtcgaagaggtgaagtagcttatcagctagagttgcctccgtcaatggcgggaatacatgacgtgttccatgtgtcgcagttgaagaaatgtttacgtgtacctacggaggaagcagatcctgatcgtatagagcttcaggaagatttaacttatgtggagaagccagtcagaatcttggaaaattttctgggaattatttga

SEQ ID NO: 15664 - DNA, 3795 bp, Oryza sativa
  Clone ID: TFbOSC407994j.C1.o15.fg
atggctgctgtccgaatgaccctccgatgggatgggtcataccaacctccactccgccggaagcagatgccgcgctacaagcctgagtacttgtttggtgttgagggatttgtccaggagttgcgtacgatgtcctttgccataggatttgggactgcccctttttatgcccagattcctcatgatcgccacgaagagaagtgccgagtcaaagtcaccttgaacagtaatagtgaagatatcccctcagtgatgttcgaagctggaggaagaaactacatccatgcatgtcaggaggtggcaaggatcgccataggagagctccgcgatcgctattgtgatcagttggccgacactgagtatcgctaccatcctcgtcaaccacagggaagtgaccgtggcagctaccttgagactgaaggaattgagaatgatgctaccacaaagcatttggttgagatgctgtgggctatggatgaaacccgtgcggagactgtgttagcagctcaagatcgtgaagaccggaatcgtggtaagatttgcaagctagaggacaaagtggatcgtttggagaaggaactagccgcgttgaagggagaagcaccaccgcagaaggccaggattcgtcttactgcaaggaagagagctctatttgtccctcgctaccaattggcgccaaaggtccgtgtggtggagaaagaagttaccccagccctagcggatcctccggtcgtcaataataagttagcagaatttcttcgtgtgaggccgcccactttctctagcaccactaatcctgttgaagctggtgattggctgcatgccatagaaaagaagttggatttgcttcagtgcactgatcaggagaaggtctcatttgcatcacatcagctgcatggccctgcctctgaatggtgggatcatttccgccttaacaggactactgctgaacctatcacttggcttgaattcaccgctgctttccggaagacgcatataccatcgggagtggtatctctcaagaagaaggaattcaggtcgctcactcaggggtctcgctctgtcactgagtatctgcacgagttcaatcgtctggcccgttatgctccggaagatgtgcgcactgatgaagagcgccaggagaagttcttggaaggacttaatgatgagctttcttacccactcatgactggggattatcctgatttccagaagttagtggataaggctattcgccaggaggacaagtacaaccgcatggaacagaagaaacgccggattgcttacttcaaggcacaacaggggaatagtcagaggccgcgtcttactttaggaccccagtccatgccacagggaggttcttcgtctgttgttcgtccgcagcgtcagttcttcaacaacaatgctggaaacaacatccgcaatcaagctccacgccctgttgcagctccaacacagcaacagcctgccaagaaggagcaaggcagcaagcccggggtgtgtttcaattgtggagacccaggacattacgctgacaagtgtccgaagccccgacgcgtgaaggttgtccctgcccagagcaactctaccataccagcatcaaaggcccgtgtcaatcatgttgctgctgcagaagctcaagatgctccagatatgattttgggtacgtttcttgttaacttagttcctgcaacagtgcttttcgattctggtgctacacattcattcttatctatgagttttgcgggaaatcataggatggaagtagaagatcttagacgtcctttgatggttagtaccccaagtaatcaggcactctctttgcaacgtagcccctctatcagaatagaaattcaaggagtaccatttctggccaatcttatcttgttagaatccaaagaccttgatgtcatactagggatggactggttagccagatataaaggtgtgatagactgtgccaacagaaaagtaactctcaccagtaatgatggtcgagttgtaactgttcatgcattgtcttctgagtctttaaggtcaagtctgaaccaaataactttggaagagattcctgtagttcgagagtatcccgatgtgttcccagacgatttacctggtatgccgcctaaaagggatatagagttcagaatagatttagtaccaggaacaactccgatccataagagaccttatagaatggcagccaatgagttggcagaagtcaagagacaagtagacgatttgcttcagaaaggatacatcagaccgagttcatctccatggggagctccggttatttttgtggaaaagaaagaccatacccagaggatgtgtgtggactatcgtgcactaaatgatgtgactatcaagaataagtatccgctgcccagaattgatgatttgtttgatcagcttaaaggtgccaccgttttctccaagatagatcttcgatcagggtatcaccagttgagaatcaaagaggaagatatacctaagacagcttttaccactaggtatgggttgtttgaatgtactgttatgtcttttggacttaccaatgcccctgctttcttcatgaatttgatgaataaggtgtttatggaatacctagacaagttcgtggtggtctttattgatgacattcttatctactcccgaaccaaagaagagcatgaagaacatcttcgccttgcactagagaagctacgagaacatcaactgtatgctaagtttagcaagtgtgaattttggttgtctgaagtgaagttccttggtcacgtcatctcagcaggaggagttgccgtcgatcctagtaatgtggaatccgtaaccaactggaaacaaccaaagacagtttcagagatttgcagtttcctaggcctcgcaggatattatcggaggtttatagagaatttttccaagattgctaagcccatgacacgactgcttcaggaagagatgggttctaagctgaactttagtactgcttatcatccacagacagacggacaaaccgaaagggtgaatcagattttggaagatatgttgagagcttgtgctttagacttcggtggaagttgggataagaatctaccttatgcagaattttcgtacaacaacagttatcaagctagtcttcagatggctccttacgaagcactgtatggtcggaagtgccgcactccgcttttgtgggatcaaacgggagaacgtcaggttttcgggacggatatcttgagggaagcagaagaaaaggtgaaaatcattcaagaaatattgcgtgtggcccagtctcgccataagagttatgccgacaatcgtcgtagagatctaagttttgacgaaggagattatgtgtaccttcgtgtcacgcctcttcgaggagttcatcgttttcacaccaaaggaaaattggcaccgcgttttgtgggaccctataagattgtcagtagaagaggagaggttgcttatcagttggagttacctcaatctttggcaggagtccataatgtgttccatgtgtcgcaattgaaaaagtgtttaagggtacctaccgaagaaactaatcttgaacagatagaagtccaagaggatctgacctatgttgagaaaccaatccgtatcttggaaatagatgagagaagaaccagaaatcgagttatccgtttttgcaaagttcaatggagtaatcactcggaagaagaatcaacttgggaacgagaagatgaattgaagtcagcccatccgcatctgttcgccagttcttccgaatctcgaggacgagattctgtttaa

SEQ ID NO: 15665 - DNA, 5972 bp, Oryza sativa
  Clone ID: TFbOSC408075j.C1.o2.np
gtgacaagttggtatcagagccaccttgaccttaggataagccaaatgatgccgccccattcaccgagaaatttgatcaaggtgttaggattcgtcagggagctgaggttgatggcttttgaggtaggctatgaagttgctcctgagtatcgccggatttcccatgaccccaacgaggagaagtgtcgtgttcgtgtgacgttggctagtgatcgtgaagaccttccttccattaagttcgaagctggaggaagatcgtacagccatgcttgtcaagaagcagctttggtggccattggagagttgcgtcaacgctttgaagaagagttggattcatcagctttccagtatcatcctcacaagcctcatggtcaagactatggaacctatacctgtcctgatggtgaagagagtgccactctgatgcatgcggtgcatatgcttagtgctatggatgcagtaagtgtggagcgagacaaagcagctcatgacagggaaaactggaatcgaggcaagatttgcaagttggagagcaaggtgtaccgtctccagaaggaattagttgaacttaaaggagaaacgccgccgccaacacccaagcttcgcctcatcgcaagaaagagaacctgtccgccacctcgtctccagttagctttgaagattcgcgtgatgggtgaagctgtgcccgatcgtgctgaacctgtcatcgacatcataagtgatgaggaagaagaggaagaccctgaagaaagagagccagctactccagaggaagaagatccatcgcttcgttccgacgcaaggcgcaccaccaatccagtagaagcaggagattggctgcatgcggtagagaagaagttggatttgatccagtgtactgagcaggagaaagtttattttgcttcgcatcaattgcatggtcctgctgctgaatggtgggatcattttcgccaaggcagggctgaaggagagcctattacgtggcaggaattcatggccgctttcaagaagacacacataccaacgggtgttgtagctctaaagaagagagaatttagagcactcaaccagggatctcgttcggtcaccgagtacctccatgatttcaaccgtttagctcgttatgctccggaagatgttcgcaccgatgaagagcgtcaggagaagttcttggagggactgaatgatgagttgtcttatgccttgatgtctacggatttccgggatttccagcagttggtggacaaggcgattcgtcaggaagacaagtataaccggatggagcagaagaagcgcagggctgcccaattcaaggcacaacagggcagtaaccagaggccgcgtctcgttacgggacctcaagctccatcgtaccctcaaggaggatcttcatcagttatccgcccccaacgccagttttacaacaacaatattggtaatcgtggcaatgacaaccgcaacatggttgctcgtcctacagcaactctagctcagaaccagcccgtcaggaaggaacagggaagcaagccaggggtgtgcttcaattgtggtgatccaggacattatgctgataagtgtcctaagcctcggcgtgtgaagaacgctccagcctcgaacaactccagtgttccagcaccgaaggcacgtgttaatcatgttgcagcagcagaagctcagaatgcaccagatgtggttttgggtacgtttcctgttaactctatacccgcatctatgctttttgattccggtgctacacattcctttttgtctaaaagttttgcgagcaatcatgggatggaagttattagtcttgggagacctttactagttaatcccccaggcaatcaagtatcttcgacacagtattgtccttccgctactatagaaatagaaaaagttcctttcccatcctcgcttatcttgctagaatccaaagatctagatattatcttagggatggactggttatctcgtcacagaggagttatagattgtgccaaccgtaaggtgactttaaccagtagcaatggggaaaccgtttctttctttgtgtcctctcctaaatatcatggtgtgatcttaaaccaagttgctctacaagagatccccatagtacaagactacccagacgtgtttcccgaggatttgccaggtatgccacctaagagagacatagagtttcggatagacttggtacctggaaccaaccctatccataagagaccatacagaatggcagctaatgaattagctgaggtgaagagacaggtggatgatttgcttcagaaaggatacatcagacccagtacttcgccatggggagcaccagtcatctttgtggagaagaaagatcatactcagagaatgtgcgtggattatcgagcgttgaacgaggttactatcaagaataagtatcctctacccagaattgatgacctgtttgatcaactggaaggtgctacagttttctccaagatagatctccgttctggatatcatcaacttcgaatccgtgaggaagatataccaaagaccgccttcacaactcggtatggtttgttcgaatgtactgttatgtcatttggactcactaatgctccagcctttttcatgaatctgatgaacaaggtgtttatggaatatctggataagtttgtcgtggtgtttattgatgacattcttatttactccaagacgaaagaagaacatgaagagcatcttcgtctagctttagagaaactacgtgagcatcagctttatgccaagttcagtaaatgtgaattttggttgtccgaagtgaagtttcttggtcatgtcatctcatctggaggagtggcagtagatccaagcaatgtggagtcagtgttaagttggaagcaacccaagacggtttcagaaattcgtagtttccttggacttgcggggtattaccgcaggtttattgagaacttttcaaagatcgccagaccaatgactcgtctgcttcagaaggaagtgaagtacaagtggacagaggattgtgaacaaagtttccaagaactgaagaaaaggctagcgactgcgccggtgttaattttgcctgattcgaggaaaggtttccaagtgtattgtgatgaatcccgactcggtttgggttgtgtgttgatgcaagaaggaaaggtggttgcctatgcatctaggcaattacgtcctcatgagaataactacccaacgcatgacctagagttggcagctgtggtgcatgcattgaagatttggcgtcattatcttttcggtaaccgtacagagatgtatacggatcataaaagtttgaagtacattttcacccaacctgatttgaacatgcgtcagcgaagatggttagagttgattaaagattatgatatggaaatccactatcacccggggaaagcaaatgttgtagccgatgctcttagcaggaaaagctactgtaatatgtcagaaggtcgacatttaccttgggagttatgccaagaatttgaaaagttaaacttggatatagtcagcaaaggttttgtggctactttagaagctcaacctactctgtttgatcaagttagagaagctcaagtgaatgatcctgatatccaagaaataaaaaagaacatgagaagaggaaaagccatcggttatgtagaagatgagcaaggaactgtgtggttaggagaaagaatttgcgtgcctgataataaggagttgaaggatactatcatgaaagaagctcatgaaactttgtattccattcaccctggaagcattaagatgtaccaagacctaaagcaacaattctggtgggccagtatgcgacgtgagatagaagaatatgtggctctatgtgatgtatgtcagcgggtcaaggcagaacatcagaagccagccggtctgttacaaccgttgaagattccagagtggaagtgggaagaaataggaatggattttataaccggtctacccagaacgtcggcaggacatgattctatttgggtagtggttgataggttgacaaaactcgctcacttcataccggtcaaaacaacttacacggggaataagcttgcagagttatacatggccagagtggtatgcttgcatggtgttcctaagaagatagtgtcagatagaggtagccagtttacttcaaagttttggcagaaattacaagtagagatgggtacccgtttgaatttcagtaccgcttatcaccctcaaacagatggtcagacggaaagagtaaaccaaattttagaagatatgttgagagcctgtgttctagattttggtggaagttgggataagaatcttcgaagtaagcgagaggaataccaggaatcgcgttatacggttctgcaagttgctatttactttgctccttgccctcctaagtgcttatctgactcttcctccgccctcttctgggagtttagatggctagccgcccccgccgtgcagctcgtgcaccagcccactttggttttgaagatggtagagtcgagccagaagaaaatcatgagtcagccaatgagcagtctcaacacagcaaccgttcgcaccgtactgcttcccgcaacgcagaagttgagcaaccccgccgtagcgaccgctcgcatcgcacagcttcccgtgatgcagagatggaacagtctcaccgctctcaccgctctgccagtcacaattctggagaagaacgcctcccttccccacctcatgtggaaaacaacatgaagcacttaatggcagttcagacacaaatctggcaaggattagtcgacacagacaagaagaagatcaggaaattcttgaaagggatcgcagttggaatgagactccagttgcttgctcatgatttccccacttttcaacatatgatcaacaatatccgaaaagatttcgagatcttctgtgatgcatcaagacaaggcttaggatgtgtcctaatgcaagaacgaaaggttgtggcctatgcatcccggcagctcaggcctcatgaagtcaattatcctacccatgatctcgagttggcagccgtggttcatgctcttaagatctggaggcactatttaatcgggaatagatgtgaagtatacaccgatcacaaaagtcttaagtatatcttcactcagaccgagttaaatatgaggcagagaagatggctggaactaatcaaggattacgatcttggaatccattaccaccccggtaaagctaacgtggtcgctgatgcgctaagtcgcaaggcctattgcaatgtagctcaaatacggcctgaccaagatcgcctgtgcagataaatggagaagttaaggctgaccgtggtacagtcaggtgtccctgctagcttgacagtacagcctaccctagaatcgcaaattcgggaggctcagaaagatgacgaagggataaaagagttaataaaaagaatacaggagaagaaagacaccaatttctccatagacgatcaaggcacagtttggtgcggtccacgcatctgtgtaccggccaagaaggagttaagagatctcatcctaaaggaagctcatgagtccgcctactccattcatccaggaagtacgaagatgtaccaagatatcaaggcatacttctggtgggctggaatgaagcgagatgtcacagaatacgtagccttgtgtgacatttgccaaagagtcaaggcagaacatcagaggccagctggtctgctgcaacccctaccgattcccgagaggaaatgggaagagatcggaatggatttcatcaccggtttgccaagaacccctagcgggtacgactccatctgggtaatcgtggaccgactcacgaaatcagctcatttcatgccagtgaaaaccacctttgatggaaaggaactagcagagaagaccatcaagttctacaaagtccaatggagcaaccattctgaagatgaggcaacctgggagcgagaagatcttctc

SEQ ID NO: 15666 - DNA, 3249 bp, Oryza sativa
  unsure (1)..(3249): unsure at all n locations
  Clone ID: TFbOSC409804j.C1.o8.gm
atggtgaacacgcgcaccggaagtggaagtggaagtggaagtggagctgctaacaatggaggagatcccacgctagctcagattctggcccaacaaacacaactgatcaatctgttagtgcagcaggcacagaatcagcaggcaaacaatcagaaccagaatccatccccacctccccaaaacaagctggcagatttcttacgtgtgagaccccctaccttttcaagcaccaccaatccagtagaagcaggagattggctgcatgcggtggagaagaagttggatttgatccagtgtactgagcaggagaaagtttcttttgcttcgcatcaattgcatggtcctgctgctgaatggtgggatcattttcgccaaggcagggctgaaggagagcctataacttggcaggaattcacggccgctttcaagaagacacacataccaacgggtgttgtagctctaaagaagagagaatttagagcactcaaccagggatctcgttcagtcaccgagtacctccatgatttcaaccgtttagctcgttatgctccggaagatgttcgcaccgatgaagagcgtcaggagaagttcttggagggactgaatgatgagttgtcttatgccttgatgtctacggatttccgggatttccagcagttggtggacaaggcgattcgtcaggaaaacaagtataaccggatggagcagaagaagcgcagggctgcccaattcaaggcacaacaaggcagtaaccagagaccgcgtctcgttacgggacctcaagctccatcgtaccctcaaggaggatcttcatcagttgtccgcccccaacgccagttctacaacaacaatactggtaatcgtggtaatgacaaccgtgacatggttgctcgtcctgcagcaactccagctcagaaccagcccgtcaggaaggaacagggaagcaagccaggggtgtgcttcaattgtggtgatccaggacattatgctgataagtgtcctaagcctcggcgcgtgaagaacgctccagccccaaacaactccaatgctccagtgccgaaggctcgtgttaatcatgttgcagcagcagaagctcaaaatgcaccagatgtggttttgggtatgccacctaagagagacatagagtttcggatagacttggtacctggaaccaaccctatccataagagaccatacagaatggcagctaatgagttagctgaggtgaagagacaggtggatgatttgcttcagaaaggatacatcagacccagtacttcgccatggggagcaccagtcatctttgtggagaagaaaaatcatactcagagaatgtgcgtggattatcgagcgttgaatgaggttactaccaagaataagtatcctctacccagaattgatgacctgtttgatcaactggaaggtgctacagttttctccaagatagatctccgttctggatatcatcaacttcgaatccgtgaggaagatataccaaagaccgccttcacaactcgcaaaggttttgtggctactttggaagctcaacctactctgtttgatcaagttagagaagctcaagtgaatgatcctgatatccaagaaataaaaaagaacatgagaagaggaaaagccatcggttatgtagaagatgagcaaggaaccgtgtggttaggagaaagaatttgcgtcccagataataaggagttgaaggatactatcatgaaagaagctcatgaaactttgtattccattcaccctggaagcactaagatgtaccaagacctaaagcaacaattctggtgggccagtatgcgacgtgagatagcagaatatgtggctctatgtgatgtatatcagcgggtcaaggcaaaacatcagaagccagccggggtggggaagcccggtcgcacctccgccctcgccgccggccgtcggagccccgtcgccgccgccgaccatccaatctccggcgaggtcgccaacccgggccggccattgatgatactgagaagcggcgagaagtccgtgtgggtcgctggggagtccatgcctctagttgtagagggggtgattatgatccagatagaaattttgggcgtgacagcttctgagccatacacgaggaagaagggtctctccttgttggacgttgtcggtgtgcactatgccgtttgccctttcgacttgtccattgctctgagggtgagaaaccgaggcgaagcaaatcttgactcccaatccaatacagtaatcctggaagtcagcgctgatgaactgagagccgttgtctgttatgatgcggtgaggcaatccatatctgcagaatatccctttgacaaacttgatggcattatcggccttgatttctcctgtgggcgttgcctcaatccacttggtgaatttgtcgatggacacaaacaggaacttgtggccgccttgtcctcgtgggaatggtctgagtatgtcgagccccagcacgagaacggccaagaggagatgtttgccgtcgtcggacgagatgcatttgagaagtactccgtttggagcctttttgtacagatctttgccgatcatacagtagattttggcttgtcgggttatcttctcagcttctctgtcgtcttcgggcaactcatcactactcagcaacttaatgagcggggtccgccagtcttccgtggtcttgatatcggcaacgacccgagggagagggcgcgcggaccgggtccacgggagtggggcccacacgtcagcctctcggtccacggtggaccgggtgcacgcggctggcgccggccggcgccgtgggtcccacgcgtcagccgcacccgcgggcgcgggcggctgacggccgggccctacctggcagccgcggggcgtgcccggaggcggcccttcccggcacagccgacgggagacggcgcacccgcgccccgatggtcaccgcccggcgaccaccggcgcggcggaacggcgcccgagagagcggagagganaggaacgaaggggcggtccacggctcaccccgggtcgacggcaacgacgggaacggcggccgaagcggaggaaggcggcggcgcggttcgggacgacgaggacgacggcgctccgacggtcggcgggcgaaacggaggcgcggacgaggtcgacgaggacgctgcgaagccgatggaggtgacgccgagacgggaggaggcgcgcggggacggcgggatgcggcggattcggcggcggcggcggcgctag

SEQ ID NO: 15667 - DNA, 2885 bp, Oryza sativa
  Clone ID: TFbOSC5118j.C1.o2.fg
atgggggtcgctggggagtccattgcctctggttttgagggggagattatgatccaggaacggtgcactgtgatgccgccccattcaccgagaaatttgatcaaggtgttaggattcgtcagggagctgaggttgatggcttttgagtatcatcctcacaagcctcatggtcaagattatggaacttacacctatcctgatggtgaggagagtgccactctgatgcaggcggtgcatatgcttagttctatgtatgcagtaagtgtggagcgagacaaagccgctcatgacagggaaaactggaatcgaggcaagatttgcaagttggagagtaaggtgtaccgtctacagaaggaattagctgagcttaaaggagagacgccgccgccaacacccaagcttcacctcaccgcaaggaagagaacctgtccaccacctcgtctccagttagcttcgaagcttcgcgtgatgggagatgctgtgccagatcgtgctgaacctgtcatccacgtcttaagtgatgaggaagaagaggaatacccagaagaaagaatggtgaacacgcgcactggaagtggaagtggagctgctaacaatggaggagattccacgctagctcagattttggcccaacaaacacaactgatcaatctgttagtgcagcaggcacagaatcagcaggcaaacaaccagaaccagaatcaacccccacctccccaaaacaagttggcagatttcttacgtctgcatggtcccgctgctgaatggtgggatcactttcgccaagccagggctgaaggagaacctatcacttggcaggaattcacggccgctttcaagaacacgcacataatgacaggtgttgtagctctgaagaagagagaatttagagcgctcaaccagggatctcgttcggtcactgagtacctccatgatttcaatcgtttagctcgctatgctccaaaatatgttcgcaccgatgaagaacgtcaggagaagtttttggagggactgaatgatgagttgtcttatgctttgatgtctacggatttccgggatttccagcagttagtggacaaggctattcgtcaggaagacaagtacaatcgaatagagcagaagaagcgcagggctgcccaatttaaggctcaacagggcagtaaccagaggtcgcgtctcgttacgggacctcaagctacatcataccctcaaggaggatcttcgtcagttgctcgccctcaacgccagttctacaacaacaatactggtaatcgtggcaatgacaaccgcaacgtggtcgctcgtcctgcagcaactccagctaagaaccagcctgtcaggaaggaacagggaagcaagccaggggtgtgcttcaattgtggtgatccagggcactatgctgataagtgtcctaagcctcggcgtgtgaagaacgctccagccccgaacaactctaatactccagcaccgaaggcacgtgttaatcatgttgtagcggcagaagctcagaatgcaccagatgtggttttgggtatgccacctaagagagacatagagttccggatagacttggtccctggaaccaaccctatccataagagaccttacagaatggcagctaatgagttagctgagataaagaggcaggtggatgatttgcttcagaaaggatatatcaggcccagtacttcgccgtggggagcaccagtcatctttgtggagaagaaagatcatactcagagagtgtttatggaatatctggataagtttgtcgtggtgtttattgatgacattcttatttactccaagacaaaagaagaacatgaagagcatcttcgtctagctttagagaaactacgtgagcatcagctctatgccaagttcagtaaatgtgaattttggttgtctgaagtgaagtttcttggtcatgtcatctcatccggaggagtggcagtagatccaagcaatgtggagtcagtgttaaattggaagcaacccaagacggtttcagaaattcgtagtttccttggacttgcggggtactaccgcaggtttattgagaacttctcaaagatcgccagaccaatgactcgtctgcttcagaaggatgtgaagtataagtggacagaagattgcgagcaaagtttccaagaactgaagaaaaggctagtgactgcgcctgtgttaattctgcctgattcaaggaaaggttttcatgtgtattgtgatgcatcccgactcggtttgggttgtgttttgatgcaagaaggaatggtggttgcctatgcatctaagcaattacgtcctcatgagaataactacccgacgcatgacctagagttggcagctgtagtgcatgcattgaagatttggcgtcattatcttttcggtaaccgtacagagatgtatacggatcataaaagtttgaaatggttagagttgattaaagattatgatatggaaatccattatcacccgggtaaagcaaatgttgtagccgatgccctcagcaggaaaagctattgtaatatgtcagaaggtcgacatctaccttgggagttatgccaagaatttgaaaagctgaatttggggatagtcagcaaaggttttgtggctgctttagaagctcaacctaccttgtttgatcaagttagagaagctcaagggaatgatcctgacatccaagaaatcaaaaagaacatgagaagaggaaaagccatcggttatgtagaagatgagcaaggaactgtgtggttaggagaaagaatttgggtacctgataacaaggagttgaaggataccatcgtgaaagaagctcatgaaactttgtattccattcaccctagaagcactaagatgtaccaagacctaaagcaacaattctg

SEQ ID NO: 15668 - DNA, 3940 bp, Oryza sativa
  Clone ID: TFbOSC5135j.C1.o1.np
atggtcgccgccggcgaccaccggcgcggcggagcggcgcccgagaaaggggagggaagggggaagtgaaacggcggtccacggctcaccccgggtcgacggtgacgacgggacggcgaccggagcggaggaaggcggcggcgcggctcgggtcaacgagggcgacggcgttccggcggtcggcgggcgaaacggaggggtggacgaggtcggcgaggttgcggcgaacccgaaaaaagcgacgccgaaacgggagagggtccggggcgacgacggcggcggaccggagctcggcggcgacggcggagagagggagtgacggcgcgagctcgattccgacggggagagagagcggcgagtggcggaaacggtggagggaggcacggggagcgtttatatagtgttgggagggggagagaacggccggaggggaaggaaaccggcgcggcgatctcgggctccatcaatggcgccggcgaggtttgcgggagtgtttccaaacgaatccgagggagagagagagggaaaaattaaatgatgatgttaatgtcttgtttaactcctggtttggaatggttaattcctagtttggagatagcactgtgcagccgatgccgcgctacaagcctgagtatttgttcggtactgaaggttttgtccaagagttgcgtacgatgtccttcctcataggatttgggattgcccctttgtatgcccagatccctcatgaccgtgatgaagagaagtgccgggtcaaagttaccttgaacagcaatcgtgaagatattccatcagtgatgttcgaggctggaggaggaagctacatccatgcttgtcaggaggtagcaaggatcgccataggagagctccgtgaaagctacaatgatcggttggccgacaccgagtatcgctaccatcctcgtcaaccccagggaagtgatcatggcagctaccttgaaccggctgggatcgagaatgatgctaccacaaggcacttggttgagatgctatgggctatggatgaaacccgcgctgagatcgtgatagccgctcaagatcgtgaagaccagaatcggggaaagatctgcaagctagaagacaagctggatcgtttggagaaagagctagcagcattgaagggagaagcaccaccgcagaaggccagggttcgtcttaccgcaaggaagagagctctattcgtccctcgctaccagttggcaccaaaggttcgtgtggtggaaaaagaagctaccctagccccagcggatcctccggtcgtcaatgtaagtgatgatgatgaagaggaatccaagcgcacccattccaagatcgagtggggaccaactcaagatgatggggacgtgccgaacgagccttcaatcaactccgatgcccggaagacctagacaacgggaatggccccaacaacaacaacaataacaacaatgcggagaatcccacgctcgctcaagtcctggcccaacagacacagttgatgaatctgatgatgcagcaacttcaaaaccagcagaaccaagggaacaatcatgcgcctcctcagaacaagcttgcagagtttcttcgcgtgaggccacctgttttctctagcaccactaatcctgtcgaagctagtgattggttgcacgccatagagaagaagttggatctgctccagtgcagagaccaggagaaggtctcttttgcgtcacaccagctgcatggccctgcttcggaatggtgggatcactcctgccttaacaggactactgctgaacctatctcttggcttgagttcaccgctgctttgcgcaagacgcatataccatcgggagtggtgtccctcaagaagaaggagttcaggtcgctcacacagggttctcgcacagtcacggagtatctgcacgagtttaatcatctggctcgttatgctccagaggatgtgcgcaccgatgaggagcgccaggagaagttcttggaaggacttaatgatgagctttcttacccactcatgactggagattatcacgatttccagaagttagtggataaggctattcgtcaggaggacaattataatcgcatggagcagaagaaacaccggattgctcacttcaaggcacagcagggaaatagtcagaggccgcgtattgcttcgggacccctgtccatgccacagggaggttcttcgtctgttgttcgtccgcagcgacaattctttaacaacaacgcgggcaacaacaaccgcaagccagctccatgtccggtggcaactccgtcgcagcaatagcctgccaagagggagcaaggcagcaagcccggtgtgtgcttcaactgtggagacccaggacattatgctgacaagtgtccgaagccctgccgcgcgaaggtcgtccctgcccagaacaactcctccgcaccagcagccaaggctcgtgtcaaccatgttgctgctgcagaagctcaaggtgctccagatgtgattttgggtacgttccctgttaactcagttcctgcaacagtgcttttcgattctggtgctacacattcgtttttatctatgagttttgcggaaaatcatgggatggaggtagaggagcttagacgtcctttgatggttagtactccgagtaaccaagcactctcctcacaacgtagcccctctgtcagaatagagatccgaggtgtacctttcctggccaaccttattctgttagaatctaaagatcttgatgtcatcctagggatggactggctagccagatataaaggtgtgatagattgtgccaatagaaaagtaactctcaccagcaatgatggtcaagttgtaactgttcatgcattgccctctgaacctcgaaggtcaagtctaaaccaaataactttggaagagattcctatagaccgggagtaccctgatgtgttccctgatgatttacctggtatgccgcctaaaagggatatagagttcagaatagatctggtgccaggaacaactccgatccataagcgaccatatagaatggcagccaacgaattggcagaagtcaagaggcaagtagatgatttgcttcagaaaggatacatcagaccgagttcatctccatggggagctcctgttatctttgtagaaaagaaagaccatacccagaggatgtgtgtggactatcgtgcacttaacgatgtgactatcaagaataagtatccactgcctagtattgatgatttgtttgatcaacttaaaggtgccaccgttttctccaagatagatcttcgatcagggtatcaccagttaaggattaaggagtatgggctatttgaatgtacagttatgtcttttggacttaccaatgcccctgctttcttcatgaacttgatgaacaaggtgttcatggaatacctggataagttcgtggttgtctttattgatgacattctcatatattcttaaactaaagaagagcatgaagaacatcttcgtcttgcattagagaagctgcgagaacatcagttgtatgccaagtttagcaaatgtgaattctggttgtctgaagtaaagttccttggtcacgtcatctcagcaggaggagttgccgttgatcctagtaatatggaatctgtaaccaactcgaaacaaccgaagacagttacagagattcgcagtttcctaggtctcgcaggatattaccggaggttcatagagaatttttccaagattgccaagcccatgacacgactgcttcagaaggatgtgaagtacaagcggttagaagaatgtgagcagagttttcaagagttgaaaagtcacttaatatcagctcccattttgattttgcctgatccaaagaagggtttccaagtgtactacgatgcatccaagcttggggtgcctaatgagtgagctaactcacattctgctgtaccagtgtagtcaattgcacgc

SEQ ID NO: 15669 - DNA, 3963 bp, Oryza sativa
  Clone ID: TFbOSC5376j.C1.o5.fg
atgggggtcgctggggagtccattgcctctggttttgagggggagattatgatccaggaacggtgcactgtgatgccgccccattcaccgagaaatttgatcaaggtgttaggattcgtcagggagctgaggttgatggcttttgagtatcatcctcacaagcctcatggtcaagattatggaacttacacctatcctgatggtgaggagagtgccactctgatgcaggcggtgcatatgcttagttctatgtatgcagtaagtgtggagcgagacaaagccgctcatgacagggaaaactggaatcgaggcaagatttgcaagttggagagtaaggtgtaccgtctacagaaggaattagctgagcttaaaggagagacgccgccgccaacacccaagcttcacctcaccgcaaggaagagaacctgtccaccacctcgtctccagttagcttcgaagcttcgcgtgatgggagatgctgtgccagatcgtgctgaacctgtcatccacgtcttaagtgatgaggaagaagaggaatacccagaagaaagaatggtgaacacgcgcactggaagtggaagtggagctgctaacaatggaggagattccacgctagctcagattttggcccaacaaacacaactgatcaatctgttagtgcagcaggcacagaatcagcaggcaaacaaccagaaccagaatcaacccccacctccccaaaacaagttggcagatttcttacgtctgcatggtcccgctgctgaatggtgggatcactttcgccaagccagggctgaaggagaacctatcacttggcaggaattcacggccgctttcaagaacacgcacataatgacaggtgttgtagctctgaagaagagagaatttagagcgctcaaccagggatctcgttcggtcactgagtacctccatgatttcaatcgtttagctcgctatgctccaaaatatgttcgcaccgatgaagaacgtcaggagaagtttttggagggactgaatgatgagttgtcttatgctttgatgtctacggatttccgggatttccagcagttagtggacaaggctattcgtcaggaagacaagtacaatcgaatagagcagaagaagcgcagggctgcccaatttaaggctcaacagggcagtaaccagaggtcgcgtctcgttacgggacctcaagctacatcataccctcaaggaggatcttcgtcagttgctcgccctcaacgccagttctacaacaacaatactggtaatcgtggcaatgacaaccgcaacgtggtcgctcgtcctgcagcaactccagctaagaaccagcctgtcaggaaggaacagggaagcaagccaggggtgtgcttcaattgtggtgatccagggcactatgctgataagtgtcctaagcctcggcgtgtgaagaacgctccagccccgaacaactctaatactccagcaccgaaggcacgtgttaatcatgttgtagcggcagaagctcagaatgcaccagatgtggttttgggtatgccacctaagagagacatagagttccggatagacttggtccctggaaccaaccctatccataagagaccttacagaatggcagctaatgagttagctgagataaagaggcaggtggatgatttgcttcagaaaggatatatcaggcccagtacttcgccgtggggagcaccagtcatctttgtggagaagaaagatcatactcagagagtgtttatggaatatctggataagtttgtcgtggtgtttattgatgacattcttatttactccaagacaaaagaagaacatgaagagcatcttcgtctagctttagagaaactacgtgagcatcagctctatgccaagttcagtaaatgtgaattttggttgtctgaagtgaagtttcttggtcatgtcatctcatccggaggagtggcagtagatccaagcaatgtggagtcagtgttaaattggaagcaacccaagacggtttcagaaattcgtagtttccttggacttgcggggtactaccgcaggtttattgagaacttctcaaagatcgccagaccaatgactcgtctgcttcagaaggatgtgaagtataagtggacagaagattgcgagcaaagtttccaagaactgaagaaaaggctagtgactgcgcctgtgttaattctgcctgattcaaggaaaggttttcatgtgtattgtgatgcatcccgactcggtttgggttgtgttttgatgcaagaaggaatggtggttgcctatgcatctaagcaattacgtcctcatgagaataactacccgacgcatgacctagagttggcagctgtagtgcatgcattgaagatttggcgtcattatcttttcggtaaccgtacagagatgtatacggatcataaaagtttgaaatggttagagttgattaaagattatgatatggaaatccattatcacccgggtaaagcaaatgttgtagccgatgccctcagcaggaaaagctattgtaatatgtcagaaggtcgacatctaccttgggagttatgccaagaatttgaaaagctgaatttggggatagtcagcaaaggttttgtggctgctttagaagctcaacctaccttgtttgatcaagttagagaagctcaagggaatgatcctgacatccaagaaatcaaaaagaacatgagaagaggaaaagccatcggttatgtagaagatgagcaaggaactgtgtggttaggagaaagaatttgcgtacctgataacaaggagttgaaggataccatcgtgaaagaagctcatgaaactttgtattccattcaccctagaagcactaagatgtaccaagacctaaagcaacaattctggtgggctagtatgcgacgtgagatagcagaatatgtggctctatgtgatgtatgtcagcgagtcaaggctgaacatcagaagccagccggtctgttgcaaccattgaagattccagagtggaagtgggaagaaatagagctatacatggccagagtggtatgtttgcatggagttcccaagaagatagtgtcagatagaggtagtcagtttacctcgaagttttggcagaagctacaagtagagatgggtacccgtttgaatttcagtaccgcttatcaccctcaaacagacggtcagacagaaagagtaaaccaaattttagaagacatgttgagaccatgtgttctagattttggtagaagttgggataagaatttgccgtacgcggaattctcatataacaacagttatcaagctagtttgcaaatggctccgtatgaagcattatatggccgaaagtgtcgtacgccgctcttgtgggatcaaaccggtgagcgtcaagtttttgggacagacatattgcgagaggcagaagaaaaagtgaagattatccaagaaaggttgcgcgttgctcagtcacgtcagaagagctatgccgacaatcgtcgcagagatttgactttcgaaggagattatgtgtaccttcgggttacgccgttacgaggtgttcatcgtttccagaccaaagggaaattggcaccgcgtttcgtgggaccttttaagatcgtaagtcgaagaggtgaagtagcttatcagctagagttgcctccgtcaatggcgggaatacacgacgtgttccacgtgtcacagttgaagaaatgtttgcgtgtacctacggaggaagcagatccggaacatatagagcttcaagaagatttaacctatgttgagaagccagtcagaatcttggaagtaagtgagaggaataccaggaatcgcgttatacggttctgtaaggttcagtggagcaatcattcagaagaagaagccacttgggagcgagaagatgaattaaagtcagctcaccctcatctcttcgccggttcttctgaatctcgaggacgagattccgtttaa

SEQ ID NO: 15670 - DNA, 4923 bp, Oryza sativa
  Clone ID: TFbOSC5848j.C1.o1.np
gtgacaagttggtaccagagccaccttgaccttaggacaagccaaatgacgccgccccatccgccggaaagcttgatcaatgcggtaggattcgtcagggagctgagaatgatggcatttgaagtaggctacgacgttgcccctgagtatcgccagattccctatgaccccaacgaggagaagtgtcgtgttcgcgtgacgttgactagtgatcgagaagaccttctgtcgataaagtttgaagctgggggaagaaagtatagtcatgcttgtcaggaggtagccttggtggccattggagagctacgtcatcgctttgatgaggagttagagtcatcagctttccagtatcatccacacaagcctcatggtcaagactatggagtttaccactgccctgaagatgaagatagcaccactctgaagcatgctgtgtatatgcttagcgccatggatgcagtaggcgtggagcgggagaaaacagctgatgacagggaaaactggaaccgtggcaggatttgcaagttggagagcaaggtgtaccgtctgcagaaggaactggccgagcttaagggagaagcaccaccgccagcacccaaacttcgcctcaccgcaaggaagagaacccgtccaccacctcgtatccagttggcttcgaagactcgtgtggtgggagatgttgtgcctgatcatgctgaacctatcatccatgtcttaagtaatgatgaagaggaggaagacccagaagaaagagagccagctactccagaggaagaagatccatctcttcgttccgatgcaaggcgcaccactaacccagtagaggcaggtgattggctgcatgctgttgaaaagaagttagatttgattctgcgcaccgagtaggagaaggtttcctttgctttgcatcagttgcatggtcctgctgctgagtggtgggatcacttttgtcaaacacagagctgcgggagagcctatcacttggcgggagtttactgctactttcaagaagacacatataccatcaggtgttgtggcacttaagaagagagatttcagagcactcaatcagggatcctgttctgtcacagagtacctccatgactttaatcgcctagctcattatgtcccagatgatgttcgcactgatgaagaacgtcaggagaagtttttagagggactgaatgatgagttgtcttatgcattgatggctatagaataccggaatttccagcagttggtggacaaggcgattcgccaagaagacaagtacaataggatggaacagaagaagcgtagggctgcttatttcaaggctcaatagggtaatagccagaggccgcgcattgctttgggacctcaagctgcaccatacccatagggaggatcctcttcagttgctcgccctcaacgccagttctacaacaacaacactggtaatcacagcaacgacaatcgtaatgtggtcactcgtcctgtagcagctccaactcaaaatcagcctgtcaggaaggaacagggaatcaagccaggggtgtgcttcaattgtggtgatccaggacattatgctgataagtgtccaaagcctcggcgtgtgaagaatgctcctgtccagaacaactccaatgctccagcaccgaaggctcgtgttaatcacgttgcagctgcagaagcctagaatgcacctgatgtggttttgggtacgtttcctgttaactctatacccgcaactgtgctttttgatttcggtgctacacattcctttttgtctaaaagttttgcgagcaatcatggaatggaagttattagtcttgggaggcctttactagttaataccccaggcaatcaagtatcctcaacgcagtactgtccttccattactacagaaatacaagaaattcctttcccatcacacttatcttgctagaatccaaagatcttgatgttatcttaggggtggattggctaacccatcacagaggagttatagattgtgctaaccgtaaggtgactttaacaagtagcaatgggtaaacagtgtctttctttgtgtcctcccctagatctcatggtttgacattaaatcaagttgctttgcaagagatcccaatagtacaagactatccagatgtgttcccagaggatttgccaggtatgccacctaagagagacatagagttccggataaacttagtacctggaaccaaccctatccataagagaccttacagaatggcagctattgagttagcagaggtaaagagacaggtggatgatttgcttcagaaaggatatatcagacccagtacttcgccgtggggagcaccagtcatctttgtggagaagaaagatcatacccaaagaatgtgtgtggattatcgagcgttgaatgaggtcactatcaagaataagtatcctctacctaggattgatgacttgtttgatcaattggaaggtgctacagtcttctccaagaaagatctttgttccggatatcaccaactttgaatccgtgaggaggatataccaaagatcgcctttacaacacggtatggtttgtttgaaagtaccgttatgtcgtttggactcactaatgccccggcctatttcatgaacttgatgaacaacgtgtttatggaatatctagataagtttgtcgtggtgtttattgatgacatccttatttactccaagacaaaagaagagcatgaagagcatcttcgtcttgctttagagaaactacgtgagcatcagctctatgccaagtttagtaaatgtgaatttggttgcccgaagtgaagttccttagtcatgtcatctcagctggaggagttgtcgtggatccaagcaatgtggagtgagtgctaaattggaagcaacctaagatggtctcagagattcgtagtttccttggtctgcggggtactaccgcaggtttattgagaacttctcaaagatcgctagaccaatgtctcgactgcttcagaaggatgtgaagtataagtggacggaagagtgtgagcagagttttcaagaattgaagaaaaggctagtgactgcgccaatgttagtcttgcctgatccaaggaaaggttttcaggtgtattgtgatgcatctagacatggtttgggttgtgttttgatgcaagatgggaaggtggttgcctatacatctaggcagttacgccctcatgagaataactatccaacacatgatgtagagttggcagctgtggttcatgaattgaagatttggcgtcattacctttttgataaccgtacggagatgtatacggatcataaatgtttaaagtacattttcactcaacctaatctgaacatgcgtcaacgaagatggttagagttgatcaaggattatgacatggaaattcattatcatccaggtaaagcaaatgttgtagcagatgctctcagcaggaaaagctactgtaatatgtcagaaggacgacacctaccttgggagttatgccaggaattggaaaagttgaacttgggaatagtcaataaaggttttgttgccgctttagaagctcaacctactctttttgatcaagttagagaggctcaagtgaatgatcttgatatctaagaaattgaaaagaacatgagaagaggaaaaaccatcggttatatagaagatgagcaaggaactgtgtggctaggagaaagaatttgcgtgcccgataataaggagttgaaggatactattatgaaagaagctcatgaaactttgtattccattcatcctgggagcactaagatgtatcaagacctgaagcaacaattctggtgggctagcatgcgatgagagatagcggaatatgtggctctatgtgatgtgtgtcagcgagtcaaggcggagcatcagaagccagcctgtcagctgcaaccgttgaagattctagagtggaaatgggaggaaataggaatggattatatcaccggtctacccagaacgtcggcaggacaagattctatttgggtagtggttgataggcttactaaagttgctcattttatacctgtcaaaacaacctactcgggaaataagcttgcagagttatatatggcaagagttgtatgtttacatggtgttcccaagaaaatagtgtcagacagaggtagtcagtttacttcgatgttttggcggaaactacaagaagagatgcgtactcgtttgaatttcagtactacttatcaccctcaaactgatggccagacaaaaagagtgaatcaaattttagaagacatgttgagagcctgtgttctagatttcggtggaagttgggataagaatatgccgtacgccgaattcggttatatcaacagttatcaagctagtcttcaaatggctccatatgaagcattgtatggtcgaaagtgtcgtacaccgctccatttgggatcaaaccggtgagcgtcaagtttttgggacagatatattgcgagaggcagaagaaaaagtgaagattatccaagaaaggttgcgtattgcccagtcacgttagaagagctatgcagacaatcgtcgtagggatttgactttcgaagaaggagattatgtatacctacgggttacgctgctgcggggagttcatcgttttcagaccaaagggaaattggcaccgcgatttgtgggaccttttaagattgtgagtcggagaggtgaagtagcttatcaactagagttgcctccgtcaatggcgggaatacatgacgtgttccatgtgtcgcagttgaagaaatgtttgcgtgtacctacggaggaagcagatcctgagcatatagagcttcaaaaagatttaacttatgttgagaagccagtccgaattcttgtgtttccgacgttccggaggagagcgtttacgttgaggaaggcgattgatcaatactaaaatgctt

SEQ ID NO: 15671 - DNA, 3426 bp, Oryza sativa
  Clone ID: TFbOSC900055j.C1.o25.gm
atggtgaacacgcgcaccggaagtggaagtggaagtggaagtggagctgctaacaatggaggagatcccacgctagctcagattctggcccaacaaacacaactgatcaatctgttagtgcagcaggcacagaatcagcaggcaaacaatcagaaccagaatccatccccacctccccaaaacaagctggcagatttcttacgtgtgagaccccctaccttttcaagcaccaccaatccagtagaagcaggagattggctgcatgcggtggagaagaagttggatttgatccagtgtactgagcaggagaaagtttcttttgcttcgcatcaattgcatggtcctgctgctgaatggtgggatcattttcgccaaggcagggctgaaggagagcctataacttggcaggaattcacggccgctttcaagaagacacacataccaacgggtgttgtagctctaaagaagagagaatttagagcactcaaccagggatctcgttcagtcaccgagtacctccatgatttcaaccgtttagctcgttatgctccggaagatgttcgcaccgatgaagagcgtcaggagaagttcttggagggactgaatgatgagttgtcttatgccttgatgtctacggatttccgggatttccagcagttggtggacaaggcgattcgtcaggaaaacaagtataaccggatggagcagaagaagcgcagggctgcccaattcaaggcacaacaaggcagtaaccagagaccgcgtctcgttacgggacctcaagctccatcgtaccctcaaggaggatcttcatcagttgtccgcccccaacgccagttctacaacaacaatactggtaatcgtggtaatgacaaccgtgacatggttgctcgtcctgcagcaactccagctcagaaccagcccgtcaggaaggaacagggaagcaagccaggggtgtgcttcaattgtggtgatccaggacattatgctgataagtgtcctaagcctcggcgcgtgaagaacgctccagccccaaacaactccaatgctccagtgccgaaggctcgtgttaatcatgttgcagcagcagaagctcaaaatgcaccagatgtggttttggacgtgtttcccgaggatttgccagctaatgagttagctgaggtgaagagacaggtggatgatttgcttcagaaaggatacatcagacccagtacttcgccatggggagcaccagtcatctttgtggagaagaaaaatcatactcagagaatgtgcgtggattatcgagcgttgaatgaggttactaccaagaataagtatcctctacccagaattgatgacctgtttgatcaactggaaggtgctacagttttctccaagatagatctccgttctggatatcatcaacttcgaatccgtgaggaagatataccaaagaccgccttcacaactcggtatggtttgttcgaatgtaccgttatgtcatttggactcactaatgccccagcctttttcatgaatctgatgaacaaggtgtttatggaatatctggataagtttgtcgtggtgtttattgatgacattcttatttactccaagacgaaggaagaacatgaagagcatcttcgtctagctttagagaaactacgtgagcatcagctttatgccaagttcagtaaatgtgaattttggttgtccgaagtgaagtttcttggtcatgtcatctcatctggaggagtggcagtagatccaagcaatgtggagtcagtgttaagttggaagcaacccaagacggtttcagaaattcgtagtttccttggacttgcggggtattaccgcaggtttattaagaacttttcaaagatcgccagaccaatgactcgtctgcttcagaaggaagtgaagtacaacaaaggttttgtggctactttggaagctcaacctactctgtttgatcaagttagagaagctcaagtgaatgatcctgatatccaagaaataaaaaagaacatgagaagaggaaaagccatcggttatgtagaagatgagcaaggaaccgtgtggttaggagaaagaatttgcgtcccagataataaggagttgaaggatactatcatgaaagaagctcatgaaactttgtattccattcaccctggaagcactaagatgtaccaagacctaaagcaacaattctggtgggccagtatgcgacgtgagatagcagaatatgtggctctatgtgatgtatatcagcgggtcaaggcaaaacatcagaagccagccgtgaagaaatgtttacgtgcacctacggaggaagcagatcctgatcgtatagagcttcaagaagatttaacttatgttgagaagccagtcagaatcttggaactcatcctcatctcttcgccagttcttctgaatctcgaggacgagattccgtttaagggggcctcgccgccgtcgccgcctagtccacgccgccgccggccgagctccatccggcgccgcgccgccgcctccaccatcaccgtcgcttgccgtcgccgccattgttttcgccaaggggtggggaagcccggtcgcacctccgccctcgccgccggccgtcggagccccgtcgccgccgccgaccatccaatctccggcgaggtcgccaacccgggccggccattgatgatactgagaagcggcgagaagtccgtgtgggtcgctggggagtccatgcctctagttgtagagggggtgattatgatccagatagaaattttgggcgtgacagcttctgagccatacacgaggaagaagggtctctccttgttggacgttgtcggtgtgcactatgccgtttgccctttcgacttgtccattgctctgagggtgagaaaccgaggcgaagcaaatcttgactcccaatccaatacagtaatcctggaagtcagcgctgatgaactgagagccgttgtctgttatgatgcggtgaggcaatccatatctgcagaatatccctttgacaaacttgatggcattatcggccttgatttctcctgtgggcgttgcctcaatccacttggtgaatttgtcgatggacacaaacaggaacttgtggccgccttgtcctcgtgggaatggtctgagtatgtcgagccccagcacgagaacggccaagaggagatgtttgccgtcgtcggacgagatgcatttgagaagtactccgtttggagcctttttgtacagatctttgccgatcatacagtagattttggcttgtcgggttatcttctcagcttctctgtcgtcttcgggcaactcatcactactcagcaacttaatgagcggggtccgccagtcttccgtggtcttgatatcggcaacgacgtgttccgcctctgtagcccccgaaatacatcctcgaaattgtgccgagaataa

SEQ ID NO: 15672 - DNA, 4695 bp, Oryza sativa
  Clone ID: TFbOSC900186j.C1.o15.fg
atggttgacctcgtcaaaatgattccgacgtttccggagagtccgttttcgcaggggaagattttgaagagttccaaggccagcaaggcaactcctggtttggaatggtatattcctggtttggagatagatctgtatagccggatgccgcgctacaagcctgagtacttgtttggtgttgagggatttgtccaagagttgcgtacgatgtcctttgccataggatttgggactgcccctttttatgcccagattcctcatgatcgtcacgaagagaagtgccgagtcaaagtcaccttgaacagtaatagtgaagatatcccctcagtgatgttcgaagctggaggaagaaactacatccatacatgtcaggaggtggcaaggatcgccataggggagctccgcgatcgctacagtgatcagttggccgacactgagtatcgctaccatcctcgtcaaccactgggaagtgaccgtggcagctaccttgagactaagggaattaagaatgatgctaccacaaggcatttggttaagatgctgtgggctatggatgaaacccgtgcggagactgtgttagcggctcaagatcgtgaagaccggaatcgtggcaagatttgcaagttagaggacaaagtggatcgtttggagaaggaactagctgcattgaagggagaagcaccaccgcagaaggccaggattcgtcttactgcaaggaagagagctctatttgtccctcgctaccaattggcaccaaaggtccgtgtggtggaaaaagaagttaccccagccctagcggatcctccggtcgtcaacatggtgctcactcgcaacaacgggaatgaccccaacaacaataataacaacagcaatggagagaatcccacacttgcccaagtcctggctcaacaggcacagcttatgaacatgatgatgcagcaactccagaaccagcagaaccagggaaataaccatgcacctccccagaacaagttagcagaatttcttcgtgtgaggccgcccactttctctagtaccactaatccagttgaagctggtgattggctgcatgccatagagaagaagttggatttgcttcagtgcgccgatcaggagaaggtctcatttgcatcacaccagctgcatggccctgcctctgaatggtgggatcactttcgccttaacaggactactgctgaacctatcacttggcttgaattcaccgctgctttccggaagacgcatataccatcgggagtggtgtctctcaagaagaaggaattcaggtcgctcactcaggggtctcgctctgttaccgagtatctgcacgagttcaatcgtctggctcgttatgctccggaagatgtgcgcactgatgaagagcgccaggagaagttcttggaaggacttaatgatgagctttcttatccactcatgactggggattatcctgatttccagaagttagtggataaggctattcgccaggaggacaagtacaatcacatggagcagaagaaacgccggattgctcacttcaaggcacaacaggggaatagtcagaggccgagtcttactttaggaccccagtccatgccacagggaggttcttcgtttgttgttcgtccgcagcatcagttcttcaacaacaatgctggcaacaacatccgcaatcaagctccacgccctgttgcagcttcgacacagcaacaacctgccaagaaggagcaaggcagcaagtccggggtgtgcttcaattgtggagacccaggacattacgctgacaagtgtccgaagccccgacgcgtgaaggttgtccctgcccagagcaactctaccgtaccagcatcaaaggcccgtgtcaatcatgttgctgctgcagaagctcaagatgctccagatgtgattttgggtacgtttcttgttaacttagttcctacaacagtgcttttcgattctggtgctacacattcattcttatctatgagttttgcgggaaatcatgggatggaagtagaagatcttagacatcctttgatggttagtaccccaagtaatcaggcactctctttgcaacgtagcccctctgtcagaatagaaattcagggagtaccatttctggccaatcttatcctgttagaatccaaagacattgatgtcatcttagggatagactggttagccagatataaaggtgtgatagactgtgccaacagaaaagtaactctcaccagcaatgatggtcgagttgtaactgttcatgcattgtcttctgagtctttaaggtcaagactgaaccaaataactttggaagagattcctgtagtccgggagtatcccgatgtgttcccagacgatttacctggtatgccgcctaaaagggatatagagttcagaatagatttggtaccaggaacaactccgatccataagagaccttatagaatggcagccaatgagttggcagaagtcaagaggcaagtagacgatttgcttcagaaaggatacatcagaccgagttcatctccatggggagctccagttatttttgtggaaaagaaagaccatacccagaggatgtgtgtggactatcgtgcactaaatgatgtgactatcaagaataagtatccgttgcccagaattgatgatttgtttgatcagcttaaaggtgccaccgttttctccaagatagatcttcgatcaggatatcaccagttgagaatcaaagaggaagatatacctaagacagcttttaccactaggtatggattgttcgaatgtactgttatgtcttttggacttaccaatgcccccgctttcttcatgaacttgatgaataaggtgtttatggaatacctagacaagttcgtggtggtctttattgatgacattcttatctactcccgaaccaaagaagagcatgaagaacatcttcgccttgcactagagaagctacgagaacatcaactgtatgctaagtttagcaagtgtgaattttggttgtctgaagtgaagttccttggtcacgtcatctcagcaggaggagttgccgtcgatcctagtaatgtggaatccgtaaccaactggaaacaaccaaagacagtttcagagattcgcagtttcctaggcctcgcaggatattatcggaggtttatagagaatttttccaagattgctaagcctatgacacggctgcttcagaaagatgtgaagtacaagtggtcagaagaatgtgagcagagttttcaagagttgaagaatcgtttaatatcagctcctattttgattttacctgatccaaagaagggtttccaagtgtattgcgatgcatccaaacttgggttaggttgtgttctgatgcaagatgggaaggtggttgcctatgcatctcgtcagttacgtccgcatgagaagaactaccctactcatgatcttgagttagctgcagtggttcatgcgttgaagatttggcgtcattatcttttcggtactcgtacagaggtgtataccgatcacaagagtttaaaatatatctttactcagccggatctgaacatgagacaacggagatggttggaattaattaaggattatgacatgggaattcattatcacccgggaaaggctaatgttgtagcagacgctcttagcaggaaaggctattgcaatgctacggaaggacgacagttgccattggagttatgcaaggaatttgaaagattaaatttgggaatggtcagaagaggtttcgttgcagccttagaagcaaagcccactctaattgatcaagttagagaagcccaaattaatgatcctgatattcaagaaatcaagaagaatatgagaagaggaaaagctatcggtttcttggaggatgagcaaggaactgtatggttgggtgagagaatctgcgtccccgacaacaaagatttaaaagatgcaattctgaaagaagctcatgatactttatactccattcaccctggtagtaccaaaatgtaccaggatcttaaggaaagattttggtgggcaagtatgaagcgtgaaatcgcggaacacgtagcagtatgtgatgtttgtcagcgagtcaaggcagaacatcagaaacccgccggtttgctgcagcctttgaagattcccgaatggaagtgggaggaaatcggtatggatttcatcactggtctacccagaacgtcatcaggtcatgactctatttgggtgatagtcgacagacttaccaaagtggctcatttcatcccagtaaagacaacttattctggaagtcggttggcggaattgtatatggcaaggattacagacggacaaaccaaaagggtaaatcagattttggaagacatgttgagagcttgtgctttagacttcggtggaagttgggataagaatctaccttatgcagaattttcgtacaacaacagttatcaagctagtcttcagatggctccttacgaagtactgtatggtcggaagtgccgcactccgcttttgtgggatcaaacgggagaacgtcaggttttcgggatggatatcctgagggaagcagaagaaaaggtgaaaatcattcaagaaagattgcgtgtggcccagtctcgtcataagagttatgccgacaatcgtcgtagagatctaagttttgacgaaggagattatgtgtaccttcgtgtcacgcctctttga

SEQ ID NO: 15673 - DNA, 2322 bp, Oryza sativa
  Clone ID: TFbOSC900399j.C1.o17.gm
atggtgctcactcgcagcaacgggaatggccccaacaacaacaacaacaacaacaatggagagaatcccacacttgcccaagtcctggctcaacaggcacagcttatgaacatgatgatgcagcaactccagaaccagcagaaccagggaaataaccatgcacctccccagaacaagttagcagaatttcttcgtgtgaggccgcccactttctctagtaccactaatcctgttgaagctggtgattggctgcatgccatagaaaagaagttggatttgcttcagtgcaccgatcaggagaaggtctcatttgcatcacatcagttgcatggccctgcctctgaatggtgggatcacttccgccttaacaggacaactgctgaacctatcacttggcttgaattcaccgctgctttccggaagacgcatataccatcgggagtggtgtctctcaaaaagaaggaattcaggtcgctcactcaggggtctcgctctgttaccgagtatctgcacgagttcaatcgtctggctcgttatgctccggaagatgtgcgcactgatgaagagcgtcaggagaagttcttggaaggacttaatgatgagctttcttacccactcatgactggggaacagaagaaatgccggattgctcacttcaaggcacaacaggggaatacttcgacaccgcaacaacctgccaagagggagcaaggcagcaagcccggggtgtgcttcaattgtggagacccaggacattacgctgacaagtgtccgaagccccgacgtgtgaaggttgtccctgaccagagcaactctaccgtaccagcatcaaaggcccgtgtcaatcatgttgttgctgcagaagctcaagatgctccagatgtgattttggaaaagaaagatcatacccagaggatgtgtgtggactatcgtgcactaaatgatgtgactatcaagaataagtatccgctgcccagaattgatgatttgtttgatcagcttaaagccgaggggagggggcgcgcggaccgggtccacgggagtggggcccacgcggcagcctcacggtccacggtggaccggccactcggcgcgcccgagggcggccaagccggcgcagccggcgggaggcggcgcgcctgtgccccgatggtcgccgccggctaccaccagcgcgacggagcggcgcccgagagaggggagggaaagggggaaacgaagcggcggtccacggctcaccacgggtcgacggcgacgatggaaacggcgaccggagcggaggaaggcggtggcgcggctcgggtcgacggggtcgacggcgttccggcggtcggcgagcgaaacggaggggtggacgaggtcggtgaggatgcggcgaagccgaaggaggcggcgtcgaggtgggaggtggtccggggcgacaacggcggcggaccggagctcggcagcgacggcggagagagagagcgacggcgcgagctcgattccggcggggagagagggcggcgagtggcggaaacggtggtggggagctcggggagggtttatatagggttgggagtgagagagggtggccggaggagggggaaatgggcgcgggagacccggccgccattaatggcgccggcgagcaagtgtgaattttggttgtctgaagtgaagttccttggtcacgtcatctcagcaggaggagttgccgtcgatcctagtaatgtggaatccgtaaccaactggaaacaaccaaagacagtttcagagattcgccgtttcctaggcctcgcaggatattatcggaggtttatagagaatttttccaagattgctaagcccatgacacgactgcttcagaaagatgtgaagtacaagtgcctcgcgacgccgtcgtcaccgttgctccagccgtgctccgccatcgctccagtcatcgccgtcgctcggggaggtcgccatcgtggtcgccgttgcgtcgccgtcctcgtccgccccttcgccgttgctgtcgaccgccggaacaccgccgccgtcgtcaagccgaaggtcgccgccgcttcttccttgacgccgtcgccgtccgttgatcttccgccgccgttttggtcaccggtgagttcgccgcgtcaccctctacgtgctggtgccctccgttcgcgtcgtcgcgccgtcgttcgccggcgagtttgcaagcccgagccgccgccggtggtgacgtcaccgctgacgtcatcgtcgtcgtctctcgtggtccggccgtggaccggagaagattttgaagagttccaaggccagcaaggcaagtcacacagatcccaaacaaccctttga

SEQ ID NO: 15674 - DNA, 4900 bp, Oryza sativa
  Clone ID: TFbOSC9428j.C1.o1.np
gtgacaagttggtatcagagccaccttgaccttaggataagccaaatgatgccgccccattcaccgagaaatttgttcaaggtgttaggattcgttagggagctgaggttgatggtttttgaggtaggctatgaagttgctcccgagtaccgccaaatttcccatgaccccgacgaggagaagtgtcgtgttcgtgtgacgttggctagtgatcgtgaagaccttccgtccattaagttcgaagctggaggaagatcgtacagccatgcttgtcaagaagcagctttggtggccattggagagttgcgtcaacgctttgaagaggagttggattcatcagctttccagtatcatcctcacaagcctcatggacaagactatggaacctatacctgtcctgatggtgaagagagtgccactctgatgcatgcggtgcatatgcttagtgctatggatgcagtaagtgtggagcgagacaaagcagctcatgacagggaaaactggaatcgaggcaagatttacaagttgaagagcaaggtgtaccgtctacagaaggaattagctgaacttaaaggagaaacgccgccgccaacacccaagcttcgcctcaccgcaagaaagagaacctgtccgccacctcgtctccagttagctttgaagattcgcgtgatgggtgaagctgtgcccgatcgtgctgaacctgtcattgacatcataagtgatgaggaagaggaggaagaccctgaagaaagagagccagctactccagaggaagaagatccatcgcttcgttccgacgcaaggcgcaccaccaatccagttgaagcaggagattggctgcatgcggtggagaagaagttggacttgatccagtgcactgagcaggagaaagtttcttttgcttcgcatcaactgcatggacctgctgctgaatggtgggatcattttcgccaaggcagggctgaaggagagcctattacgtggcaggaattcacggccgctttcaagaagacacatataccagcgggtgttgtagctctaaagaagagagaatttagagaactcaaccagggatctcgttcggtcaccaaatacctccatgatttcaaccgtttagctcgttatgctccggaagatgttcgcaccgatgaagagcgtcaggagaagttcttggagggactgaatgatgagttgtcttatgctttgatgtctacggatttccgggatttccagcagttggtagacaaggcgattcgtcaagaagacaagtataaccggatggagcagaagaagcgcagggctgcccaattcaagacacaacagggcagtaaccagaggccgcgtctcgttactggacctcaagttccatcgtatcctcaaggaggatcttcatcagttgtccgcccccaacgccagttctacaacaacaatactggtaatcgtggcaatgacaaccgcaacgtggttgctcgtcctgcagcaactccagctcagaaccagcccgtcaggaaggaacagggaagcaagccaggggtgtgtttcaattgtggtgatccaggacattatgctgataagtgtcctaagcctcggcgcgtgaagaacgctccagccccgaacaactccaatgctccagcaccaaaggcacgtgttaatcatgttgcagcagcagaagctcagagtgcaccagatgtgattttgggtacgtttcctgttaactctatacccgcaactgtgctttttgattccggtgctacacattcctttttgtctaaaagttttgcgagcaatcatgggatggaagttattagtcttgggagacctttactagttaataccctaggcaatcaagtattttcgacacaatattgtccttccgctactatagaaatagaagaagttcctttcccatcctcgcttatcttgctagaatccaaagatctagatgttatcttagggatggactggttatctcgtcacagaggagttatagattgtgccagtcgtaaggtgactttaaccaatagcattggggaaaccgtttctttccttgcgtcctctcctaaatctcatggtgtgatcttaaaccaagttgctctacaagagatccccatagtacaagactacccagacgtgtttcccgaggatttgctaggtatgccacctaagagagacatagagtttcggatagacttggtacctggaaccaaccctatccataagagaccgtacagaatggcagctaatgagttagctgaggtgaagagacaggtggatgatttgcttcagaaaggatacatcagacccagtacttcgccatggggagcaccagtcatctttgtggagaagaaagatcatactcagagaatgtgtgtggattatcgagcgttgaatgaggttactatcaagaataagtatcctctacccagaattgatgacctgtttgatcaactggaaggtgctacagttttctccaagatagatctccgttctggatatcatcaacttcgaatccgtgaggaagatataccaaagaccgccttcacaactcggtatggtttgttcgaatgtaccgttatgtcatttggactcactaatgccccagcctttttcatgaatctgatgaacaaggtgtttatggaatatctggataagtttgtcgtggtgtttattgacgacattcttatttactccaagacgaaggaagaacatgaagagcatcttcgtctagctttagagaaactacgtgagcatcagctttatgccaagttcagtaaatgtgaattttggttgtccgaagtgaagtttcttggtcatgtcatctcgtctggaggagtagcagtagatccaagcaatgtggagtcagtgttaagttggaagcaacccaagacggtttcagaaattcgtagtttccttggacttgcagggtattaccgcaggtttattgagaacttttcaaagatcgccagaccaatgactcgtctgcttcagaaggaagtgaagtacaagtggacggaggattgtgaacgaagtttccaagaactgaagaaaaggctagtgactgcgcctgtattaattttgcctgattcgaggaaaggtttccaagtgtattgtgatgcatcccgactcggtttgggttgtgtgttgatgcaagaaggaaaggtggttgcttatgcatctaggcaattacgtcctcatgagaataactacccaacgcatgacctagagttggcagctgtggtgcatgcattgaagatttggcgtcattatcttttcggtaaccgtacagagatatatacggatcataaaagtttgaagtacattttcactcaacctgatttgaacatgcgtcagcgaagatggttagagttgattaaagattatgatatggagatccactatcacccggggaaagcaaatgttgtagccgatgctcttagcaggaaaagctactgtaatatgtcagaaggtcgacgtttaccttgggagttatgccaagaatttgaaaaattgaacttgggaatagtcagcaatggttttgtggccgctttagaagctaaacctactctgtttgatcaagtcagagaagctcaagtgaatgatcctgatatccaagaaataaagaagaacatgagaagaggtaaagccatcggttatgtagaagatgagcaaggaactgtgtggttaggagaaagaatttgcgtcccagaaaataaggggttgaaggatactatcatgaaagaagctcatgaaactttgtattccattcaccctggaagcactaagatgtaccaagacttaaagcaacaattctggtgggccagtatgcgacgtgagatagcagaatatgtggctctatgtgatgtatgtcagcgggtcaaggcagaacatcagaagccagccggtctgttacaaccgttgaagattccagagtggaagtgggaagaaataggaatggattttataaccggtctacccagaacgtcggcaggacatgattctatttgggtagtggttgataggttgacaaaagtcgctcatttcataccggtcaaaaccacctacacggggaataagcttgcagagttatacatggccagagtggtatgtttgcatggtgttcctaagaagatagtgtcagatagaggtagccagtttacttcgaagttttggcagaagttacagttagagatgggtacccgtttgaatttcagtaccgcttatcatcctcaaacagatggacagacggaaagaataaaccaaattttagaagatatgttgagagcttgtgttctagattttggtggaagttgggataagaatttgccgtacgcggaattctcatataacaatagttatcaagctagtttgcaaatggctccgtatgaagcattatatggtcgaaagtgccgtacgccgctcctttgggatcaaaccggtgaacgtcaagtttttgggacagacattttgcgagaggcagaagaaaaagtgaagattatccaagaaaggttgcgcgttgctcagtcacgtcagaagagctatgccgacaatcgtcgcagagatttggctttcgaagaaggagattatgtataccttcgggttacgccgttacgaggtgttcatcgtttccagaccaaagggaaattggcaccgcgtttcgtgggaccttttaagattgtgagtcgaaggggtgaagtagcttatcagttagagttgcctccgtcaatggcgggaatacatgacgtgttccacgtatctcagttgaagaagtgtttacgtgtacctacggaggaagcagatcctgatcgtatagagcttcaagaagatttaacttatgttgagaagccagtcagaatcttggaatttccgacgttccggaggagagcgtttcctttgaggaagg

SEQ ID NO: 15675 - DNA, 3546 bp, Oryza sativa
  Clone ID: TFbOSC29927j.C1.o3.fg
atgtcggacttagtggaaaaaaacggggaaaatggaaatcaagatggagcgagcagcaagggaacttcaccacccaagggagctactataccttttgattacaacaaacttaccattccctctcacaacttcgtctccgtgccttccgggcgtgctcctcgatttgatgggacacattacgccgcttggaagcacaagatgaagttgcatctaatctctttgcatccaagtatttggaaagttgtttgtacaggtattgatgtacctcatgatgacatggagctcacttcggagcaagagcaactcatccaccgcaatgctcaagcttccaatgcaattctctccgcgttgagtccggaggagttcaacaaggttgatggacttgaggaggccaaggagatatgggatactttgcaattagctcatgagggatcacccgccgttcgtgaggccaagattgaattattggaaggaagggttggaagatttgtgatggatgacaaggagacaccacaagagatgtatgataggatgatgatccttgtcaacaagattaaaggacttgggagtgaggacatgacaaatcactttgttgtcaagagacttctccgtgcatttggtccaagaaatccctctcttgtatcaatgatacgggaaaggaaagacttcaagaggctcactccaagtgacattcttggaagaattgtgtctcatgagatgcaagaagaggaagctcgtcaagtgagccaaatagtgaagaatgtcgccatgatcaaaaatcaagaagtagctttgaaggcaaaacaagaagaagagtcaagttgtgaagaaagtgaagatgaagaaatggcttttattgtcaagagattcaagcactttcttcgcaagaggggctatggcaaagggaggaaggatgatgacaagggaaagaggcaatcaaagagagcttgcttcaattgtggcgaatatggccacttcattaacgattgtcccaatgatgaggaaagtgataatgaattagatgatgtgcttaagagctttagcaaacccgctatgcaacatttggctaagttaatgagagctttggatagtaaagaacaatcactcgaaaggcaagaagaattgtttattcttgagaagaaaagaaacattgccttagaggagagcctagctaaagaatgtgctaaaaatgaacaactagctaatgagcttaatttggctaatggttctctagctagccttagggatgtcaatgaaactcttcaagagaaatttgctaatttagacaaaactcttaagaaagagaatgagaggttgggcactttggtgaaatatggatgcatgaagacataccattcaaaggatgccatttacaagaccatcactgctcatcctaacaaggatggacacgggctcgggttttctagtggaagtcctgtgtctaagcgtgtgatgacatactcctccggtggctcaagttgggttgtggacagtggctgcaccaatcatatgacaggagagaggagtatgtttacaagtcttgatgaggagggtggaagtcgtgaaaatattgtctttggagatgatggtaagggaaaggtaatgggtctcggtaagattgccatttccaagaatcaatctctatctaatgtcctccttgtcaattcattaagctacaatttattatccgtgtttcaattgtataagttaggatttaattgcttgtttaccgatgtggatgtgaccgtttttaggcgagatgactcttccgtagcattcaagggtgtgttaaagggtgatctctatctcgttgatttcgacatagatagagtgaatccagaggcatgcttgattgctaaatcctctatgggttggctatggcaccgtaggctagcccatgttggaatgaggaatttggcatctcttctaaaaggggaacacattcttggtttatctaatgtttcttttgagaaggatcgtgtgtgtagtgcttgccaagccgggaagcaagttgggagtccgcatcctataaaaaacatcatgactacaacaagaccactcgagcttcttcatatggacttatttgggccagtggcctacataagcattggaggtaacaagtatggttttatcattgttgatgatttttcacgcttcacttgggtgtactttctccatgacaaaagcgaagctcaagatgtcttcaagcgcttcgcaaagcaagcccaaaacctctatgatctcactatcaagagggtgcgaagtgacaatggaggagagtttaagaacactcaagtggaggaatttcttgatgaagaaggaatcaagcacgagttctccgccccctatgatcctccccaaaatggcattgttgaaaggaagaaccgaaccctcattgaagccgcaagggcaatgattgatgagtacaagatttcggatttctcacctaaggtggatgagggattcttacttggctatgaatcaaatgcacatgcctatcgtgtcttcaacaaaacctccggtattgttgaagtcactagggatgtgacatttgatgaatctaatggcttccaaggagagcaagttgttgtacatgttgtaggtgatgtggatccaagtcaagctataggcccggaagttccaggttctacagtccggaacctccggaccagtggcagtgaagacgtgccaacggtgcaagtggatgggatcgatgctgcgagcactttagagcatactgatcaggctcagagacccaagcaaaatgtcatcggcaccaagtggatctttcgcaacaagcaagatgaacatggggtgattgtaaggaacaaagcccggttattccaaatggatgtcaagagtgcctttctcaatggacctatctcggagttagtctatgtggagcaaccaccggggttcgaggatccaaagttgccaaaccatgtgtacaagctccacaaggcgctctatgggctcaaacaagcccctagagcttgtagtatcatgactaaaaggttcgagatgtctatgatgggcgagttgaccttcttcctcgggctacaagtgaagcaagcactagagggcaccttcatctctcaaaccaagtacgtgaaagacatactcaagaagtttgggatggaggatgccaaacctatcaagacgcccatgcctactaatggacacctagacctcgaccataatggtaaatgtgtagaccaaaaggtatatcgctccatgagaggatctttgctttacttatgtgcatctcgtcccgatatcatgcttagtgtttgcatgtgtgcctgttttcaagcggagcctaaagagtgtcatttgattgccgtcaagagaattctaagatatttagttcatactcctaatctttgcttgtggtatcctaagggttgtggctttgagcttttgggctattctgattcggattatgccaagtgtaaggttgatagaaaaagcacaactgggacttgccaatttcttgggcggtcccttgttttttggtcctccaagaagcaaaattcctttggataa

SEQ ID NO: 15676 - DNA, 2079 bp, Oryza sativa
  Clone ID: TFbOSC400219j.C1.o70.gm
atgtcgaacgaggtgaaccatgtagggaaggctcatatgttaaatggcacaactactccacttggaaaattaaaatgctttgctatcaccggcacgcccttgacggagattgatcaccacaacctccaactcaatgcccaagccatgaatgccttgttcaactctttaagccaagaggagttcgatagggtgagcaaccttgagaccgcatatgagatttggaacaagttggcgaagatccatgagggtgcaagtgagtacaaggatgccaagcttcatttccttaagatccaatatgagacattctccatattgcctcatgagagtgtgaatgacatgtatgggaggctcaatgtcattgtgaatgatctcaagggacttggggcaacctacaccgatcttgaggatgcccaaaagatgcttagggctctaccagagaagtatgagacccttgtcaccatgctcatcaactccgacatgttaaggatgacacccgcaagcctcttggtgaagatcaacaccaatgacatatacaagttgaagaagaaggagatggaggaagcctcaccttccaagaagtgcattgctctccaagccgaagttgaagacaaagggaagaccaaggtgaatgtagccaatgaagacttggaggaagagattgcccttcttgctagaaggttcaatgatctcttgggaaaaagaaatgagagaggaaggggctccaactccaataggagaagaaatagaagacccaataagactctcaccaacttgaggtgctttgagtgtggtgagaagggacactttgcttccaagtgcccttccaaggatgatgatggagacaagtcatccaagaagaagagtggaggctacaagctcatgaagaagctcaagaaggaagggaagaagattgaggccgtcatcagggaatgggactcaaatgaggagagctccgcctcatccgggtccgaagaagaaggtggtgatgatgcaagctccaagaaaaagaagatggccgttgtagccatcaaggaggctccatcactctttgctccactttgtctcatggcaaagggctcttctaaggtaacatctcttagtgatagtgagagtgatgatgtttcctatcatgagcttgtgagtatgtttgaggagctccatgcttatagtgagaaggaaattgtcaagttcaaggctctaaagaaggatcatgcttctttggaggatcaccggtgtctcctctacccgccgccaccttcgccttcgtctctcgccgtcggaagcgccctagcgccgtgtgacctcgagccgccgtcgccgccgtcgctccagccgtgcgccgccgtcgctccagttgtcgtcgtcgctcggggaggtcgccatcgtggtcgccgtcgcgtcgccgtcctcgtccgccccttcgccgccgctgtagaccgccggagcaccgccgtcgtcgtcaagccgaagaccgccgccgcttcttcctcgtcgccgccgccgtccgttgcttttccgccgtggtcttgtgtttctatttgtgatgcctcacttgttgttgagaacaatgagcttaaggagcaagtggctaagctcaacaagagtttggagagatgcttcaagggtaagaacactcttgacaagattttgagtgagcaacggtgcatccttaacaagaagggacttggattcattccaaagaagggtaagaaaccttctcaccgtgccattcattttgtcaagagcaatggtaagtattgctccaagtgtcgtgatgttgggcatttggtaaatgattgccccggtggttatgcctcaaatagcaaggcataccatgtctacaacaagaacaaaggtattgtggaagaaaccgccgatgttcaatttgatgaaactaatggctcccaagaggggcacgagaatttggataatgtaggtgatgaaggcttgatgagagctatgaagaacatgtctattggagatgtcaagcctattgaagtggaagacaagccatccacctccactcaagatgagccatatcgacttccgctacgccaagtcaagctcaagttgaagtga

SEQ ID NO: 15677 - DNA, 1935 bp, Oryza sativa
  Clone ID: TFbOSC900079j.C1.o11.gm
atgaatgccttgttcaactctttaagccaagaggagttcgatagggtgagcaaccttgagaccgcatatgagatttggaacaagttggcgaagatccatgagggtgcaagtgagtacaaggatgccaagcttcatttccttaagatccaatatgagacattctccatattgcctcatgagagtgtgaatgacatgtatgggaggctcaatgtcattgtgaatgatctcaagggacttggggcaacctacaccgatcttgaggatgcccaaaagatgcttagggctctaccagagaagtatgagacccttgtcaccatgctcatcaactccgacatgttaaggatgacacccgcaagcctcttggtgaagatcaacaccaatgacatatacaagttgaagaagaaggagatggaggaagcctcaccttccaagaagtgcattgctctccaagccgaagttgaagacaaagggaagaccaaggtgaatgtagccaatgaagacttggaggaagagattgcccttcttgctagaaggttcaatgatctcttgggaaaaagaaatgagagaggaaggggctccaactccaataggagaagaaatagaagacccaataagactctcaccaacttgaggtgctttgagtgtggtgagaagggacactttgcttccaagtgcccttccaaggatgatgatggagacaagtcatccaagaagaagagtggaggctacaagctcatgaagaagctcaagaaggaagggaagaagattgaggccgtcatcagggaatgggactcaaatgaggagagctccgcctcatccgggtccgaagaagaaggtggtgatgatgcaagctccaagaaaaagaagatggccgttgtagccatcaaggaggctccatcactctttgctccactttgtctcatggcaaagggctcttctaaggtaacatctcttagtgatagtgagagtgatgatgtttcctatcatgagcttgtgagtatgtttgaggagctccatgcttatagtgagaaggaaattgtcaagttcaaggctctaaagaaggatcatgcttctttggaggatcaccggtgtctcctctacccgccgccaccttcgccttcgtctctcgccgtcggaagcgccctagcgccgtgtgacctcgagccgccgtcgccgccgtcgctccagccgtgcgccgccgtcgctccagttgtcgtcgtcgctcggggaggtcgccatcgtggtcgccgtcgcgtcgccgtcctcgtccgccccttcgccgccgctgtagaccgccggagcaccgccgtcgtcgtcaagccgaagaccgccgccgcttcttcctcgtcgccgccgccgtccgttgcttttccgccgtggtcttgtgtttctatttgtgatgcctcacttgttgttgagaacaatgagcttaaggagcaagtggctaagctcaacaagagtttggagagatgcttcaagggtaagaacactcttgacaagattttgagtgagcaacggtgcatccttaacaagaagggacttggattcattccaaagaagggtaagaaaccttctcaccgtgccattcattttgtcaagagcaatggtaagtattgctccaagtgtcgtgatgttgggcatttggtaaatgattgccccggtggttatgcctcaaatagcaaggcataccatgtctacaacaagaacaaaggtattgtggaagaaaccgccgatgttcaatttgatgaaactaatggctcccaagaggggcacgagaatttggataatgtaggtgatgaaggcttgatgagagctatgaagaacatgtctattggagatgtcaagcctattgaagtggaagacaagccatccacctccactcaagatgagccatatcgacttccgctacgccaagtcaagctcaagttgaagtga

SEQ ID NO: 15678 - DNA, 4407 bp, Oryza sativa
  Clone ID: TFbOSC402542j.C1.o9.fg
atggatgggctcgtccccttgatcttcaaggtgctcaagaagaagaaggccatgagggtttgcctcctactctgtactgcgccgtcgctcgtagactactccatcccgctcgccggcgtgcaccggcgatcgggagagcaggtctccggaacctctgccttcgacgtcctgcaccgggagaaggcggcaataagattaaatcattatatgtctataatctcaacaatccaaaaaccttattataggcactgtgattttactatggctggttttgccgatgcactgaggccggataaattcaccggtgtgcattttaagagatggcagatcagggtcactctgtggctgacagctatgaaatgcttctgggtgagtactggcaaacctgaaggagttcttactgctgaacagcagaagcaattcgaggaagccactactctctttgtgggatgcattcttagcgttcttggcgatcgtctggtcgaggtgtatatgcatatgaccgacgctaaggagttgtgggatgcactgaatactaaattcggtgctactgatgctagcaatgatctgtatatcatggagcagtttcatgactacaagatggctgacaaccgttctgtagtcgaacaggctcatgagatacaaaccatggctaaggaactcgaactccttaagtgtgtcttacccgacaaatttgtggccgggtgtattattgcaaaactacctccatcttggagaagtttcggtactgcactcaaacacaagagacaggaatactccgttgaggggttgatagcgtctcttgatgttgaggagaaagctcgggaaaaagatgccgcgtctaagggcgatggtgggcagtccagtgccaatgttgtgcacaaggcccagaacaagagcaaggggaaatacaaagctcagcagaccaccaacttcaagaagcagaagaagaacaacatcaatcctaatcaggatgagaggacttgctttgtgtgtggccaagttggtcatctggctaggaagtgtctacagtgcaaggggatgaaggcacctgcagggcagacttctaagtctgctaatgtgaccattggcaacactggagatggaagcgggtatggtaatttacctactgttttttcagttaatcaatctactaattggtgggttgatactggggccaatgtacatgtttgtgctgacatctcattgttttcttcttatcaggtcgcacggggttccaccgtcctaatggggaatgggtcacatgcttctgttcatggtgttggcacggtagatctgaagtttacttcgggaaagatcgtgcagctgaagaacgtgcagcatgtcccttctatcgataggaatcttgttagtggctcccgtctgactagagacggatttaagttggtttttgagtctaataaagtagtcgtgtctaaacatggatattttattggtaaaggttatgagtgcggaggcctgttccgcttttccctttctgatttctgcaataagtctgtgaaccatatttgtggcagtgtggatgatgaggctaatgtttggcattcacgtttatgtcatattaattttggcttgatgtctcggctttccagcatgtgtttaattcctaagttttccattgtcaaaggttctaagtgccatagttgtgtgcaatcgaagcaacctcgcaagcctcacaaggctgccgaggagagaaacttggcaccactagaactcctacattcagatctttgtgaaatgaatggggtgttgacgaagggtggaaaacgatatttcatgacattgattgatgatgctactagattttgctatgtgtacttgttgaaaacgaaagacgaggctctagactattttaaaatttataaggcagaagttgaaaatcaacttgacagaaagataaaaaggcttaggtctgatcgtggtggagagtttttctcgaacgagtttgacttattctgtgaggaacatggcatcatacatgagaggacgcctccctattctcccgagtctaatgggattgctgaaaggaagaaccgcacactgactgacttggtgaatgccatgttggacaccgcgggactgcctaagacatggtggggggaggcattgttgacctcaaatcatgtgttaaacagagttcctaacagaaataaggacaaaacaccatatgagatatggattggtagaaaaccatcactttcttatttacgcacatgggggtgcttggcgaaagtcaatgtaccaataacgaagaagcgcaaacttggacctaagactgtggactgtgtttttctgggatatgctcatcatagcattgcctatagatttttaatagttaaatccgaggtaccggacatgcatgttggtacaattatggagtctcgtgatgctaccttctttgagagctttttcccaatgaaggatacacatagtggttcgaaccaaccctctgaaataattcccaattcaatcacaccaccagaacaaactgaacatacacatgaacttgtctctgaggaggatgtcagtgaagctcctcgaaggagtaagagacaaaggacggctaagtcttttggtggtgatttcactgtgtacctcgtggatgacactcctaagtcaatttcagaagcatatgcatctcctgatgcagactactggaaggaggctgtccgtagtgaaatggattccattatcgctaacgggacttgggaggtgacagagcgaccctatgggtgtaaacctgtggggtgcaagtgggtgttcaagaagaagcttaggcctgacggtactattgaaaaatacaaggctcggcttgttgctaagggctatactcagaaagaaggcgaagatttctttgacacttactcacctgttgctagattgaccacaattcgtgtgctactttccctagcagcctcacatggtcttctcgttcatcaaatggacgttaagacagcttttcttaatggagagctggatgaggagatctatatgtatcaacctgatgggtttgtagttgaaggtcaagaaggcaaagtgtgcaaattgttgaagtctttgtatggtctgaaacaagctattaagcaatggcatgagaaatttgacaaaacattgacatctgcaggctttgcagtcaatgaggcagataaatgtgtgtactatcgctatggtgggggtgagggagttattttgtgcttgtatgttgacgacatactgatatttgggacaaaccttgaggtgataaatgaggttaaatcattcttgtctcaaaattttgatatgaaggatttgggagtagctgatgttatcttaaacattaagctaattagaggtgagaatgggattacactcttgcagtcccattatgtggagaagatcttgaatcgttttggctacattgatagtaagccttctccaacaccttatgatcctagcttgttgcttcgcaagaacaagagaattgctaggaatcaactggaatactcccaaatcattggctcgttgatgtacctggctagtgcaactaggcctgatatctcctttgctgtgagcaagttgagccgatttacctctaatccgggagatgatcactggcgtgcgcttgagcgagtaatgcgctatctgaaaggtactgtggaattggggcttcactatactgggtatcctgcggtactggagggttatagtgattctaactggatctctgatgtggatgagatcaaagccactagtggatatgttttcacactgggtggtggtgctgtttcatggaggtcttgcaaacagaccattttgacgaggtcaaccatggaagcagagctaacggtactggatactgctactgttgaggcagaatggctgcgtgatctattaatggatctgcctgttgttgaaaaaccggtgccggctattcttatgaactgtgacaatcaaacgacatgtgaaaagacgattgaagtctgtcaggaaattaagaaactccggagttataacgttggattacatccaaacagcgagaaacctggcagatcccttcacgaagggactatcacgaaatgtgatagacaatgcatcgaaggagatgggtttgagacccatattaaatcattatatgtctataatctcaacaccctctcctcatcgtcctccttctccggcaccggcggcccgccgcgcatcgacgatatcgtcgccgccgccacgatgacgacgccacgcgatcataagcttaaggtggtgaccaagcctggcggcggcgcgcagcgcgttgcggccatggagacgctgccgcgggagacgttctcgccgcgcttccgttgcggcggcggcgccgccgccgccgtggcgtcggccattgttggtagaagctaccttggtggtaaatga

SEQ ID NO: 15679 - DNA, 4788 bp, Oryza sativa
  Clone ID: TFbOSC101703j.C1.o1.gm
gttgtgtccttcaatggtgagaagaaagcgatagcaatgtaccgtaattttataaagaagtcatacaaggctactattgaggaaggcattatcactggttttggcatgggctctgtcatgtgcgtcgtatttggcagctatggattagccttctggtatggtggaaagctaatcattgagaaaggttacacaggaggaaaaatcatgactatcttgtttgccgtgttgaccggtgcatcctcattaggcaatgcaacacctgcagttgctgcagttgtggaaggtcaatctgcagcatacaatttgttcaaaacaattgagaggaaaccagagatagattccgatgataacaatggcatggttttagaagatatgaatggcgatattgagctaaaggatgtgtactttcgttaccctgcaagaccagagcagttgatattggatggattgtcgttacaagtagcgagtggaacaacaatggctatagtcggagagagtggaagcggaaagtcaactgttatcagcctagtcgaaagattctacgatccacagtctggcgaagttttaatagatggaattagcatcaagaaactgagacttgattggataagagggaagatcggtcttgttagccaagagcctctgctttttatggcctccattaaagataacataatatatggtaaaaaagatgcaacgcttgaagagatcaagagagcagcggagcttgcaaatgcagctaacttcattgacaagttaccaaatggttatgatactttagttggccagcgcggtactcagctctctggaggacaaaaacagagaattgcaattgcaagagccatcctcaaagatccaaaaatccttttgctcgatgaagcaacaagtgcacttgatgtggagtctgagaggatagttcaggaggcactaaatagaatgatggtagaaagaaccacactcgttgtcgctcatcgtttgagcactgtgaggaatgttgattgcatcacagtcgtccgcaaaggaaaaatagttgaacaaggtcctcatgatgcactggtgaaggatcccgatggagcttactcccagctaattaggctacaagagactcatcgtgatgaaaggcataaactaccagattccagatcaaaaagtactagtttgtcattcagacgatcaagaactaaagattttctcagcaagagcaacagtggggcacttggtacaaggctctcagtcgatgcgttgaatgtccgccgtttagtaggagataacctggcccttatagtccaggctgtagctacactaatcactggctttgccatagcttttgcggcagattggaggcttgcactgatcatcacttgtgtaattcctttagtgggtgcacagggctatgctcaagttaagttcttgaaggggttcagtgaagaatctaagaccatagcacttgttggagaaagcggtagtgggaagtccacgataattgctttattagagcgtttctatgatcctgattctggtaatatctcactagatggagttgaaattagaagcttaaaagtcagctggttgagggatcagatggggcttgtaggccaggagccagtgcttttcaacgacacaatccgtgccaacataacatacgggaaacacagtgaggtaacagaggaagagatcactgctgtggccaaggcagcaaacgcccatgagttcgtatcaagcctgccacaaggatacgacacagtggtaggtgagaaaggggtgcaactatctggtgggcaaaaacagagggtagcaattgcaagggccatcctaaaggaccctaagatactgctacttgatgaggcaaccagtgctctagatgcagaatcagaacgtgttgttcaagatgcattggatcgagtcatggtcaacaggactaccattgtagtggcacaccgcctctccacaatcaaaggggctgatatgattgcagtcctcaaggaaggaaaaattgcagaaaaaggaaagcatgaagcactattgcggatcaaggatggtgcatatgcttcacttgacgccgagctcgccgcagcagaagagcgcaggcgagcaacggctcagaccgctgcagcagcagcgagggcggccagactggcggcagcggagttggcagcagccagggcggaggcggaggcggaggcggcggaagatgcggcacgtgcggcggaggtagaggttgagaccttgcgcagcagcatcaacggctccatcgccggcgacatcaccgccgacagggagcttgaggagctggcaagaggaagggcacgggagcgagcagagcggtgggcagcagcccacctccacggcggcggcggcggcccaagggaccgcgcgcccgccgacgggaacccagacgggcgcaggcgtgccggcggcagcccggagctcgcacgcggccctcgcaggcagcacggctctctctcccctgaccggcgccatggtcaccacggtgtccagacggtggtcagggactttggtcccggcggtgggtggcctaccctcaccaaaaccaactacatcgagtgggccgcggtgatgagggtgaggctccaggtgcggcacatgtgggaggcagtccggtacggtgacgtcaactacgacgaggatcggcgggcactggatgccctcatcgctgcagtcccgcccgagatgcagttctcgctttcccagaagcggactgccaaggaggcctgggacgccatcgctgcggcacgcatcggcagcgaccgcgcccgcaagtccacactgcaggcactccgcaaggagtgggagaacctggccttcaagccaggtgaggatgttgatgactttgctctccgtctcaacactctcttgcagaaaatggtgcagtacggcgacgacacctacgacgaggagagagctgtcgagaagctcttccgctgcgtccctgagaagtacagacagatcgctcgctcgatcgaatctctgctggacctctccacgatgttgatcgaggaggcgttaggtcgcctcaaggtcgtcgatggtgatgagccacagcctttctcggggcccatcaccatcggcgggaagctccatctcactagggagcagtgggaggcctctcagggtgacgggaggaagggggagtcatcttccccgacaggcggccgtaagccgcgcaaggcgcggggaggtgtccagctacggtgggcgcgaagacgtgccgagggtggcgcccgcagaggcgcccagggcgttgccaccggcaaccacaagccggcacgagacgacgcctgccgcaactgtggcaagcttggccattgggccaaagactgtcgacagccacgacgcggccaggcccacgtcgcacgggtggaggaggaagagccggctctgctcctggctcacgcaagcatcgagctacctccagcggcaccggccgcagcggctttcctccaccttgatgagccgaaggtactcgtctccctctgcaacggctccagcaacgacaaggctgatgggtggtacctcgacaccggcgccacccatcacatgaccggccgacgggagttcttcaccgagttcgactccagcgtccgaggctccgtcaagttcggggacgcctccggcgtggagatcaagggtgttggctccgtcaccttcaccgccaagtccggtgagcacaggctgctcaccggagtctactacatccccgcgttgaggaattctatcatcagcgtgggacagctggatgagaacggctcacgcgtgttggtcgaggacggactcatgaggatttgggatcgccgtcgtcgccttcttgccaagtggcacgagcgcttcgggcacctccacttcgaggccctgaagcagctcagtgccaaggagatggtgcgaggcatgccgtgccttgaccacgtggagcagctctgcgacgtctgcgtggtgacgaagcagcggcggctcccctttccccagcagatgagcttccgagccaaggagcggctcgagctcgtgcacggggacttgtgtggcccagtgacaccggccacaccaggaggacgacgttacttcctgctgctcgtcgacgacctctcccgctacatgtgggtgacggtcctcggcagcaagggagaggctgcggacgccatcaggcatgcacaggctgctgcagaggcggagtgcggccgcaagctgcgcgtgctgcgcaccgacaacggcggcgaattcacagcggctgaattcgcgtcgtactgcgctgatgagggcattcagcgccactacaccacgccgtacagcccgcagcagaacggcgtcgtcgagcggcgcaaccagacggttgtggggatggctcgggccctcctcaagcagagggggatgccggccatcttctggggggaggcggtggtgacggcaacggcaacctcaacaatggcgtcggatggtcagggacaggggcggatgtggctaggggcagatgcggcggcgtgggaaggcagagaggagtgcaagcggcggcgccggatgcagccgggggtggaggtgatggtgtcggatgtggcggctcaaccgggggagccggatgaggcgggaaggagcgacgctggaatactcgccatggagctcgtgctagcggcggcggtcgtggcgggcgacgacgcggactgcagcggcggtcgcggcgggcgacggtgtggccgcggacggcggcggggctcgcggacgacggcggaggtcgcggtcagcgacgacacggatggcagcgacggtcgtggcgggtga

SEQ ID NO: 15680 - DNA, 4428 bp, Oryza sativa
  Clone ID: TFbOSC14030j.C1.o1.fg
atgtccgacgctcggtctcggagttcggtcgcctcgagcactcggcgtcagcaggacgccgagctcgctgcagcagaagagcgcaggcgagcaacggctcagaccgctgtagcagtagcgagggcggccagactggcggcagcggagttggcagcagccagggcggaggcggaggcggcggaagatgcggcacgtgcggcggaggtagaggttgagaccttgcgtagcagcatcaacggctccatcgccggtgacatcaccgccgacagggagcttgaggagctggcaagaggaagggcacgggagcgggcagagcggtgggcagcagcccacctccacggcggcggcggcggcccaagggaccgcgcgcccgccgacgggaacccagacgggcgcgggcgtgccagcggcagcccggagcccgcacgcgcccctcgcaggcagcgcggctctctctcccttgacctgcgccatggtcaccacggcgtccagacggtggtcagggactttggtcccggcggtgggtggcctaccctcaccaaaaccaactacatcgagtgggccgcggtgatgagggtgaggctccaggtgcggcacatgtgggaggcagtccgcaacgaccgcgcccgcaagtccacactgcaggcactccgcaaggagtgggagaacctggccttcaagccaggtgaggatattgatgactttgctctccgtctcaagactctcttgcagaaaatggtgcagtacggcgacgacacctactacgaggagagagctgtcgagaagctcttccgctgcgtccctgagaagtacaggcagatcgctcgctcgatcgaatctctgctggacctctccacgatgtcgctcgaggaggcgttaggtcgcctcaaggtcgtcgatggtaatgagccacagcctctctcggggcccatcaccattggcgggaagctccatctcactcgggagcagtgggaggcctctcagggtgacgggaggaagggggagtcatcttcctcgacaggcggccgtaagccgcgcaaggtgcgggaaggtgtccagctacggtgggcgcgaaaacgtgccgagggtggcgcccgcagaggcgcccagggcgttgccaccggcaaccacaagccggcacaagacgacgcctgccgcaactgtggcaagcttggccattgggccaaagactgtcgacagccacgacgcggccaggcccacgtcgcacgggtggaggagaaaaagccggctctgctcttggctcacgcaagcatcgaactacctccagcggcaccggccgcagcggctttcctccaccttgatgagccgaaggtactcgtctccctctgcaacggctccagcaacgacaaggctgatgggtggtacctcgacaccggcgccacccatcacatgaccggccgacgggagttcttcaccgagttcgactccagcgtccgaggctccgtcaagttcgggaacgcctccggcgtggagatcaagggtgttggctccgtcaccttcaccgccaagtccggtgagcataggctgctcaccggagtctactacatccccacgttgaggaattctatcatcagcgtgggacagctgaatgagaacggctcacgcgtgttggttgaggacggactcatgaggatttgggatcgccgtcgtcgccttcttgccaaggtaaccggaggcactaatcgactctacatcctcagcgcgcaggtcgcacaaccagtttgcctcgccgctcgtcgggacgacgaggcgtggcagtggcacgagcgcttcgggcacctccacttcgaggccctgaagcagctcagtgccaaggagatggtgcgaggcatgccgtgccttgaccatgtggagcagctctgcgacgtctgcgtggtgacgaagcagcggcggctcccctttccccagcagacgagcttccgagccaaggaacggctcgagctcatgcacggggacttgtgtggcccagtgacaccggccacaccaggaggacgatgttacttcctgctgctcgttgacgacctctcccgctacatgtgggtgatggtcctcggcagcaagggagaggctgcggacgccatcaggcatgcgcaggctgctgcagaggtggagtgcggccgcaagctgcgcgtgctgcgcaccgacaacggcggcgaattcacagcggctgaattcacgtcgtactgcgctgatgagggcattcagcgccactacaccatgccgtatagcccgcagcagaacggcgtcgtcgagcggcgcaaccagacggttgtggggatggctcgggccctcctcaagcagagggggatgccggccatcttctggggggagacggtggtgacggctgcctacatcctcaaccgctcgcctaccaaggccctcgatggtaggacaccgtacgaggtttggcatgggcgcaagccggcggtctcccacctacgggtcttcagctgcctcgcgttcgccaaggagcttggccacatcggcaagctcgacgacaggagcaccccaagggtgttcatcggctacgcgaagggctcgaaggccttccgcatcctcgacccggagacacagcgtgtgcgcactgcgcgcgatgttgtgttcgacgaagggcgagggtgggtatgggacaaggcggtggacgatggttcgactccgacgtacgacgacttcaccgtcgagtacgtctacttcgagggagctgggggagtaggtagctcttcttcaccgagcgtgtctaccccagcccccgaatccccaccgactccgacaccaacacaccctcgggccacgacttcgactacgacgagctcttcgttgacaccaccccagccagtgactccacatgctccagcaccaacagccactcctccaagcacgtctactccgacgccagctcgtgttgagcgcagcccggtggagttcgctactccgctctcccacgacggggagcgcatcgacgcgtaccacgacggcgagcagctacggtaccgtacgatggaggatcttctcggcgaccagccggtgccggtgcctcgcgacctagaggcgcagttgcaccttgcgtgcaacgacggtgagcctcggtcttttgcagaggccgagaaacacgcggcatggcgtgccgcgatgcagtcggagatggacgcggttcaggagaaccgcacctgggagcttgctgacctccctcgtggtcaccgcgcgatcacccttaagtgggtgttcaagctgaagagggatgaagccggagccatcgtcaagcacaaggctcgcttggtggcacgcggtttcgtgcagcaggaggggatcgactacgacgatgccttcgctcccgtggcacggatggagtccgaaggctggggcgtccatcacatggacgtcaagtcggcgtttctgaacgacaacttgaaggaggaggtctacgtgcaccagccgccgggatttgtgatccccggcaaggagggcaaggatgcagaggtcgcggcgttcaaggaggagatgaaggccaccttccagatgagtgatctggggcctctctccttctacctggggatcgaagtgcaccaggacgactccgagatcacgcttcgacagaccgcctacgccaagcgcgtcgttgagctggctgggctcaccgattgcaacccagctctcactccgatggaggagagactgaagctgagccgcgacagcacagcggaggaggtggatgctacacagtaccggtgtcttgtggggagccttcgctacctcacccacacacggccggacttggccttctccgtcggctacgtcagtcggttcatgcagcgaccgacgatggagcaccagcaggctgtgaagaggatcatccgctacattgcggggactctcgaccacggtctctactacccaaggtgtcctggcaaggcacacttcgtcgggtacagcgacaacgaccacgccggcgacatcgacaccaacaagagcacgagcaggattctcttcttcctcggcaagtgcctcgttagctggcagtcggacaagcagcaagtggtggccctgtccagctacaaggccgagtacatagcggcctccgccgcttcgacccaggcgctctggcttgctcgactgcttagtgatctccccggcagagacactggaacggtggagctcagggtggatagcaagtccgctctggccctggcaaagaaccccgtttttcacgaacggagcaagcacatccgggtgaggtaccacttcatccgaagctacttggaggaagggagcatcaaggcgagctacatcaataccaaggaccagcttgcggacttgctcaccaagcctcttgggaggatcaagttcctcgagctctgctccaggatcgggatggcccaacttgcccacaagacgacgcacaagacttag

SEQ ID NO: 15681 - DNA, 4803 bp, Oryza sativa
  Clone ID: TFbOSC23522j.C1.o7.fg
atgtccgacgctcggtctcggcgttcggtcgcctcgagcacttggcgtcagcaggacgccgagctcgccgcagcagaagagcgcaggcgagcaacagctcagaccgctgcagcagcagcgagggcggccagactggcgacagcggagttggcagcagccagggcggaggcggaggcggaggcggcggaagatgcggcacgtgcggcggaggtagaggttgagaccttgcgcagcagcatcaacggctccatcgccggcgacatcaccgccgacagggagcttgaggagctggcaagaggaagggcacgggagcgggcagagcggtgggcagcagcccacctccacggcggcggcggcggcccaagggaccgcgggcccgccaacgggaacccagatgggcgcgggcgtgccggcggcagcccggagcccgcacgcggccctcgcaggcagcgcggctctttctcccctgaccggcgccatggtcactacggtgtccagacggtggtcagggactttggtcccggcggtgggtggcctaccctcaccaaaaccaactacatcgagtgggccgcagtgacgagggtgaggctccaggtgcggcacatgtgggaggcagtccggtacggcgacgtcgactacgacgaggatcggcgagcactggatgccctcatcgctgcagtcccgcccgagatgcagttctcgctttcccagaagcggactgccaaggaggcctgggacgccatcgctgcggcacgcatcggcagcgaccgcgcccgcaagtccacactgcaggcactccgcaaggagtgggagaacctggccttcaagccaggtgaggatgttgatgactttgctctccgtctcaacactctcttgcagaaaatggtgcagtacggcgacgacacctatgacgaggagagagctgtcgagaagctcttccgctgcgtccctgagaagtacaggcagatcgctcgctcgattgaatctctgctggacctctccacgatgtcgatcgaggaggcgttaggtcgcctcaaggtcgtcgatggtgatgagccacagcctctctcggggcccatcaccatcggcgggaagctccatctcactcgggagcagtgggaggcctctcagggtgacgggaggaagggggagtcatcttccccgacaggcagccgtaagccgcgcaaggcgcggggaggtgtccagctacggtgggcgcgaagacgtgccgagggtggcgcccgcagaggcacccagggcgttgccaccggcaaccacaagccgggacgagacgacgcctgccgcaactgtggcaagcttggccattgggccaaagactgtcgacagccacgacgcggccaggcccacgtcgcacgggtggaggaggaagagccggctctgctcctagctcacgcaagcatcgagctacctccagcggcaccggccgcagcggctttcctccaccttgatgagccgaaggtactcgtctccctctgcgacggctccagcaacgacaaggctgatgggtggtacctcgacaccggcgccacccatcacatgaccggccgacgggagttcttcaccgagttcgactccagcgtccgaggctccgtcaagttcggggacgcctccggcgtgaagatcaagggtgttggctccgtgaccttcaccgccaagtccggtgagcacaggctgctcaccgaagtctactacatccccgcgttgaggaattctatcatcagcgtgggacagctggatgagaacggctcacgcgtgttggtcgaggacggactcatgaggatttgggatcgccgtcgtcgccttcttgccaaggtaaccagaggcactaatcgactctacatcctcagcgcgcaggtcgcacaaccagtttgcctcgccgctcgtcgggacgacgaggcatggcagtggcacgagcgcttcgggcacctccacttcgaggccctgaagcgcctcagtgccaaggagatggtgcgaggcatgccgtgccttgaccacgtggagcagctctgcgacgtctgcgtggtgacgaagcagcggcggctcccctttccccagcagacgagcttccgagccaaggagcggctcgagctcgtgcacggggacttgtgtggcccagtgacaccggccacaccaggaggacgacgctacttcctactgctcgtcgacgacctctctcgctacatgtgggtgatggtcctcggcagcaagggagaggctgcggatgccatcaggcgcgcgcaggccgctgcagaggcggagtgcggccgcaagctgcgcgtgctgcgcaccgacaacggcggcgaattcacggcggctgaattcgcgtcgtactgcgctgatgagggcattcagcgccactacaccgcgccgtacagcccacagcagaacggcgtcgtcgagcggcgcaaccagacggttgtggggatggctcgggctcttctcaagcagagggggatgccggccatcttctggggggaggcggtggtgacagccgtctacatcctcaatcgctcgcctaccaaggccctcgatggcaggacaccgtacgaggcctggcatgggcacaagccggcggtctcccacctacgggtcttcggctgcctcgcgttcgccaaggagctcggccacatcggtaagctcgacgacaggagcaccccaggggtgttcatcggctacgcggagggctcgaaggcctaccgcatcctcgacccggagacacagcgtgtgcgcactgcgcgcgatgttgtgttcgacgaagggcgagggtgggtatgggacaaggcggtggacgatggttcgactccgacgtacgacgacttcaccatcgagtacgtccacttcgagggagctgggggagtaggcagctcttcatctagcgtgtctaccccagcccccgaatctccaccgactccgacaccaacacaccctcgggccacgacttcgactacgacgagctcttcgtcgacaccaccccagccagtgactccacatgctccagcaccaacagccactcctccaagcacgtctactccgacgccagctcgtgttgagcgcagcccggtggagttcgctactccgctctcccacgacggggagcgcatcgacgcgtaccacgacggcgagcagctacggtaccgtacgatggaggatcttctcggcgaccagccggtgccgggactggtgcctcgcgacttagaggcgcagttgcaccttgcgtgcgacgacggtgagcctcggtcttttgcagaggccgagaaacacgcggcatggcgtgccgcgatgcagtcggagatggacgcggttcaggagaaccgcacctgggagcttgctgacctccctcgtggtcaccgcgcaatcacccttaagtgggtgttcaagctgaagagggatgaagccggagccatcgtcaagcacaaggctcgcttggtggcacgcggtttcgtgcagcaggaggggatcgactacgacgatgccttcgctcccgtggcacagatggagtccgtgcgactccttcttgcgctggctgctcaggaaggctggggcgtccatcacatggacgtcaagtcggcgtttctaaacggcgacttgaaggaggaggtctacgtgcaccagccgccgggatttgtgatccccggcaaggagggcaaggtgctacgcctgcacaaggccctctacggcttgcggcaggcaccgagggcgtggaatgccaagttggattccacgctcaaggggatgggcttcgagcaaagcccgcacgaggcggccatctaccggcggggcaatggaggaaatgccttgctggtgggtgtctacgtcgacgacttggtgatcaccgacaccaaggatgcggaggtcgcggcgttcaaggaggagatgaaggccactttccagatgagtgatctggggcctctctccttctacctggggatcgaagtgcaccaggacaactccgggatcacgcttcgacagaccgcctatgccaagcgcgtcgttgagctggctgggctcaccgattgcaacccagctctcactccgatggaggagagactgaagctgagccgcgacagcacggcggaggaggtggatgctacacagtaccgacgtcttgtggggagccttcgctacctcacccacacacggccggacttggccttctccgtcggctacgtcagtcggtttatgcagcgaccgacgacggagcaccagcaggctgtgaagaggatcatccgctacgttgcggggactctcgaccacggtctctactacccgaggtgtcctggcaaggcacacttcgtcgggtacagcgacagcgaccacgccggcgacattgacaccagcaagagcacgagcgggattctcttcttcctcggcgagtgcctcgttagctggcagtcaatcaagcagcaggtggtggccctgtccagctgcgaggccgagtacatggcggcatccgccgcttcgacccaggcgctctggcttgctcgactgcttagtgatctcctcggcagagatactggagcggtggagctcagggtggatagcaagtccgctctggccctggcaaagaaccccgtttttcacgaacggagcaagcacatccgggtgaggtaccatttcatccgaagctacttggaggaagggagcatcaaggcgagctacatcaacaccaaggaccagcttgcggatttgctcaccaaaccccttgggaggatcaagttccttgagctttgctcccggatcgggatggctcaactttcccacaagacggcgcacaagacttag

SEQ ID NO: 15682 - DNA, 4572 bp, Oryza sativa
  Clone ID: TFbOSC28294j.C1.o8.fg
atgtccgacgttcggtctcggcgttcggtcgtctcgagcactcggcgtcagcaggacgccgagctcgccgcagcagaagagcgcaggcgagcaacggctcagaccgctgcagcagcagcgagggcggccagactggcggcagcagagttggcagcagccagggcggaggcagaagcagaggcggcggaagatgcggcacgtgcggcggaggtagaggttgagaccttgcgcagcagcatcaacggctccatcgccggcgacatcaccgccgacagggagcttgaggagcttgcaagaggtagggcacgggagcgggcagagcggtgggcagcagcccacctccacggcggcggcggcggcccaagggaccgcgcgcccgccgacgggaacccagacgggcgcgggcgtgccggcggcagcccggagcccgcgcgcggccctcgcaggcagcgtggctctccctcccctgaccggcaccatggccaccacggcgtccagacggtggtcagggactttggtcccggcggtgggtggcctaccctcaccaaaaccaactacatcgagtgggccgcggtgatgagggtgaggctccaggtgcggcacatgtgggaggcagtccggtacggcgacgtcgactacgacgaggatcggcgggcactggatgccctcatcgctgcagtcccgcccgagatgcagttctcgctttcccagaagcggactgccaaggaggcctgggacgccatcgctgcggcacgcatcggcagcgatcgcgcccacaagtcaacactgcaggcactccgcaaggagtgggagaacctggccttcaagccaggtgaggatgttgatgactttgccctccgtctccacactcttttgcagaagatggtgcagtacggcgacgacacctacgacgaggagagagctgtcgagaagctctttcgctgcgtcccagagaagtacaagcagatcgctcgctcgattgagtctttgctggacctctccacgatgtcgatcgaggaggcgttaggtcgcctaaaggtcgtcgacggcgatgagccacagcctctctcggggcctatcaccattggcgggaagctccatctcactcgggagcagtgggaggccagccagagtaacgggaggaagggggagtcccctccctcgacaggcggccgcaagccgcgcaaggcgcgcggaggcgtccagctgcggtgggcgcgaagacgcgccgagggtggcgctcgcagaggtgcccagggcgacgccgctggcaaccacaagccggcacgagacgacgcctgccgcaactgtggcaagcttggccattgggccaaagactgtcgacagccacgacgcggccaggcccacgtcgcacaggtggaggaaaagccggctctgctcctagcacacgccagcatcgagctatcttcagcggcaccggccgcaacggctttcctccacctcgaggagccgaaggtacacgccttcctcggcaacagctccagcaacgacaaggctgatgggtggtacctcgacaccggcgccacccatcatatgactggccggcgggagttcttcaccgagcttgactccagcgtccgaggctccgtcaagtttggggatgcctccggcgtggagatcaagggcgtcggctccgtcaccttcaccaccaagtccggtgagcacaggctgctcaccggagtctactacatccccgcgttgagaaactctatcatcagcgtgggacagctggatgagaacggctcaagcgtgttggtcgagcacggagtcatgaggatttgggatcgccgccgtcgccttcttgccaaggtaaccagaggcactaatcgactctacatcctcagcgcgcaggtcgcacaaccagtttgcctcgccgctcgtcgagacggcgaggcgtggcagtggcacgagcgtttcgggcaccttcactttgaggccctgaagcggctcagcgccaaggagatggtgcgaggcctgccgtgccttgaccacgtggagcagctctgcgacgtctgcgtcctaacgaagcagaggcggctcccctttccccagcagacgagtttccgagccaaggagcggctcgagctcatgcacggggacttgtgtggcccagtgacaccggccacaccaggaggacgacgttacttcctgctgctcgtcgacgacctctcccgctacatgtgggtgatggtcctcggcagcaagggagaggctgcggacaccatccggcgcgcgcaggctgctgcagaggcggagtgcggccgcaagctacgcgtactgcgcaccgacaacggcggcgaattcacggcggctgaattcgcgtcgtactgcgctgatgagggcattcagcgccactacaccgcgccgtacagcccgcagcagaacggcgtcgtcgagcggcgcaaccagacggttgtggggatggctcgggctctcctcaagcagagggggatgccggccatcttctggggagaggcggtggtgacggccgtctacatcctcaaccgctcgcctaccaaggccctcgatggcaggacaccgtacgaggcttggcatgggcgcaagccaggggtctcccacctgcgggtcttcggctgcctcgcgttcgtcaaggagcttggccccatcagcaagctcgatgacaggagcaccccaggggtgttcatcggctacgcggagggctcgaaggcctatcgcatcctcgacccggagacacagcgtacggtggacgatggttcgactctgacgtacgacgacttcaccgtcgagtatgtccacttcgagagagctgggggagtaggcagctcttcttcaccaagcgtgtctaccccagtccccgagcctccatcgactccgacaccaacacaccctcgggccacggcttcgactgcgacgagctcttcgccgacaccaccacagccggcaaccccacgcgccccagcaccaacagccactcctccgagcacgtctactccgacgccagctcgtgttgagcgcagcccggtggagttcgctactccgctctcccacgacggggagcgcatcgacgcgtaccacgacggcgagcagctacggtaccgtacgatggaggatcttctcggtgaccagcccgtgccaggaatggtgcctcgcgacctggaggcgcagttgcaccttgcgtgcgacgacggtgagcctcggtctttcgcagaggccgagaaacacgcggcatggcgtgccgcgatgcagtcggagatggacgcggttcaggagaaccgcacctgggagcttgttgatctccctcgtggtcaccgcgcgatcacccttaagtgggtgttcaagttgaagagggataaagccggagccatcgtcaagcacaaggctcgcttggtggcacgcggtttcgtgcagcaggaggggatcgactacgacgatgccttcgctcccgtggcacggatggagtccgtgcgactccttgcgctggctgctcaggaaggctggggcgtccatcacatggacgtcaagtcggcgtttctgaacggcgacttgaaggaggaggcaccgagggcgtggaatgccaagttggattccacgctcaaggggatgggcttcgagcaaagcccgcacgaggcggccatctaccggcggggcaatggaggaaatgccttgctggtgggtgtctacgtcgacgacttggtgatcaccggcaccaaggatgcggaggtgtaccaggacgactccggaatcacgcttcggcagaccgcctacgccaagcgcgtcgttgagctggctgggctcaccgattgcaacccagctctcactccgatggaggagagactgaagctgagccgcgacagcacggcggaggaagtggatgctacacagtaccggcgtcttgtggggagccttcgctacctcacccacacacggccggacttggccttctccgtcggctacgtcagtcggttcatgcagcgaccgacgacggagcaccagcaggctgtgaagaggatcatccgctacgttgcggggactctcgaccacggtctctactacccgaggtgtcctggcaaggcacacttcgtcgggtacagcgacagcgaccacgccggcgacattgacaccagcaagagcacgagcgggattctcttcttcctcggcgagtgcctcgttagctggcagtcaatcaagcagcaggtggtggccctgtccagctgcgaggccgagtacatggtggcatccgccgcttcgacccaggcgctctggcttgctcgactgcttagtgatctcctcggcagagatactggagcggtggagctcagggtggatagccagtccgctctggccctggcaaagaaccccgtttttcacgaacggagcaagcacatccgggtgaggtaccatttcatccgaagctacttggaggaagggagcatcaaggcgagctacatcaacaccaaggaccagcttgcggatttgctcaccaaaccccttgggaggatcaagttccttgagctttgctcccggatcgggatggctcaactttcccacaagacgacgcacaagacttag

SEQ ID NO: 15683 - DNA, 843 bp, Oryza sativa
  Clone ID: TFbOSC30052j.C1.o1.fg
atgagggtgaggctccaggtgcggcacatgtgggaggcagtccggtacggcgacgttgactacgatgaggatcggcgggcactggatgccctcatcgctgcagtcccgctcgagatgcagttctcgctttcccataagtggactgccaaggaggcctgggatgccatcgctgtggcacgtatcggcagcgaccgcgcccgcaagtccacactgcaggcactccgcaaggagtgggagaacctggccttcaagccaggtgaggatgttgatgactttgccctccgtctcaacactcttttgcagaagatggtgcagtacggcgacgacacttacgacgaggagagagctgtcgagaagctctttcgttacgtccctgagaagtacaggcagatcgctcgctcgatcgaatctctgctggacctctccacgatgtcgatcgaggaggcgttaggtcgcctcaaggtcgtcgacggcgatgagccacagcctctctcggggcctatcaccattggcgggaagctccatctcactcgggagcagtgggaggccagccagggtgacgggaggaagggggagtcctctccctcgacaggcggccgcaagccgtgcaaggcgcgcggaggcgtccaactgcggtgggcgcgaagacgcgccgagggtggtgctcgcagaggcgcccagggcggcgccgccggcaaccacaagccggcacgagacgacgcttgccgcaactgtggcaagcttggccattgggccaaagactgtcgacagccacgacgcggcatcgagctatctccagcggcaccggccgcaacggctttcctccacctcgatgagccgaag

SEQ ID NO: 15684 - DNA, 6507 bp, Oryza sativa
  Clone ID: TFbOSC400397j.C1.o58.fg
atggcgcttcaggatgaggtcgcccaaaacctgagatggtctatggatagcgcacgcgatacagcctcatgcccatcgtacccctcagcaatggacggctggatgaaaactggggtaccgaaaggaggacgggagaaaatctcttgtcggggatttcactccagctttcgacccactgacagtggcctgtcactgaatgttgatgtatccacgacgatgatcgtcagacctggacctgtcatagagtttcttctcttcaaccagaatatcaagaaccctcatgaaattgactggggaaagttttaccttttccaggacagcatctacccttcagcatatttttcagttgctaggacaactgcgaccgctgcagcagcagcgagggcggccagactggcggcagcggagttggcagcagccagggcggaggcggaggcggcgaaagatgcggcacgtgcggcggaggtagaggttgagaccttgcgcagcagcatcaacggctccatcgccggcgacatcaccgccgacagggagcttgaggagctggcaagagcaagggcacgggagcgagcagagcggtgggcagcagcccacctccacggcggcggcggcggcccaagggaccgcgcgcccgccgacgggaacccagacgggctcgggcgtgccggcggcagcccggagcccgcacgtggccctcgcaggcagcacggctctctctcccctgaccggcaccatggtcaccacggcgtccagacagtggtcagggactttggtcccggcggtgggtggcctaccctcaccaaaaccaactacatcgagtgggccgcggtgatgagggcagtccggtacggtgacgtcgactacgacgaggatcggcgagcactggatgccctcatcgctgcagtcccgcccgagatgcagttctcgctttcccagaagcggactgccaaggaggcctgggacgccatcgctgcggcacgcatcggcagcgaccgcgcccgcaagtccacactgcaggcactccgcaaggagtgggagaacctggccttcaagccaggtgaggatgttgatgactttgctctccgtctcaacactctcttgcagaaaatggtgcagtacggcgacgacacctacgacgaggagagagctgtcgagaagctcttccgttgcgtccctgagaagtacaggcagatcgctcgctcgatcgaatctctgctggacctctccacgatgtcgatcgaggaggcgttaagtcgcctcaaggtcgtcgatggtgatgagccacagcctctctcggggcccatcaccatcggcgggaagctccatctcactcgggaacagtgggaggcctctcaaggtgacgggaggaagggggagtcatcttccccgataggcggccgtaagccgcgcaaggcacagggaggtgtccagctacggtgggcgcgaagacgtgccgagggtggcgcccgcagaggcgcccagggcgttgccaccggcaaccacaagccggcacgagacgacgcctgccgcaactgtggcaagcttggccattgggccaaagactgtcgacagccacgacgtggccaggcccacgtcgcacgggtggaggaagagccggctctgctcctggctcacgcaagcatcgagctacctccagcggcaccggccgcagcggctttcctccaccttgatgagccgaaggtactcgtctccctctgcaacggctccagcaacgacaaggctgatgggtggtacctcgacaccggcgccacccatcacatgaccagccgacgggagttcttcaccgagttcgactccagcgtccgaggctccgtcaagttcggggacgcctctggcgtggagatcaagggtgttggctccgtcaccttcaccgccaagtccggtgagcacaggctgctcaccggagtctactacatccccgcgttgaggaattctatcatcagcttgggacagctggatgagaacggctcacgcgtgttggtcgaggacggactcatgaggatttgggatcgccgtcgtcgccttcttgccaaggtaaccagaggcactaatcgactctacatcctcagcgcgcaggtcgcacaaccagtttgcctcgccgctcgtcgggatgacgaggcgtggcagtggcacgagcgcttcaggcacctccacttcgaggccctgaagcagctcagtgccaaggagatggtgcgaggcatgccgtgccttgaccacgtggagcagctctgtgacgtctgcgtggtgacgaagcagcggcggctcccctttccccagcagacgagcttccgagccaaggagcggctcgagctcgtgcacggggacttgtgtggcccagtgacaccggccacaccaggaggacgacgttacttcctactgctcgtcgacgacctctcctgctacatgtgggtgatggtcctcggcagcaagggagaggctgcggacgccatcaggcatgcgcaggctgctgcagaggcagagtgcggccgcaagctgcacgtgctgcgcaccgacaacggcggtgaattcacagcggctgaattcgcgtcgtactgcgctgatgagggcattcagcgacactacaccacgccttacagcccgcaacagaacgacgtcgtcgagcggcgcaaccagacggttgtggggatggctcgggccctcctcaagcagagggggatgccggccatcttctggggggaggcggtggtgacggccgcctacatcctcaaccgctcgcctaccaaggccctcgatggcaggacaccgtacgaggcttggcatgggcgcaagccggcggtctcccacctgcgggtcttcggctgcctcgcgttcgccaaggagcttggccacatcggcaagctcgacgacaggagcaccccaggggtgttcatcggctacgcggagggctcgaaggcctaccgcatcctcgacccggagacacagcgtgtgcgcactgcgcgcgacgttgtgtttgatgaagggcgagggtgggtatgggacaaggcggtggacgatggttcgactccgacgtacgacgacttcaccgtcgagtacgtccacttcgagggagctgggggagtaggcagctcttcttcacctagcgtgtctaccccagcccccaaatctccaccgactccaacaccaacacaccctcgggccacgacttcgactacgacgagctcttcgtcgactccacatgctccagcaccaacagccactcctccaagcacgtctactccgacgccagctcgtgttgagcgcagcccggtggagttcgctactccgctctcccacgacggggagcgcatcgacgtgtaccacgacggcgagcagctatggtaccgtacgatggaggatcttctcggcgaccagccggtgccgggactggtgcctcgcgacctagaggcgcagttgcaccttgcgtgcgatgacggtgagcctcggtcttttgcagaggccgagaaacacgcggcatggcgtgccgcgatgcagtcggagatggacgcggttcaggagaaccgcacctgggagcttgctgacctccctcgtggtcaccgcgcgatcacccttaagtgggtgttcaagctgaagagggatgaagccggagccatcgtcaagcacaaggctcgcttggtggcacgcggtttcgtgcagcaggaggggatcgactacgacgatgccttcgctcccgtggcacggatggagtccgtgcgactccttcttgcgctggctgctcaggaaggctggggcgtccatcacatggacgtcaagtcggcgtttctaaacggcgacttgaaggaggaggtctacgtgcaccagccgccgggatttgtgatccccggcaaggagggcaaggtgctacgcctgcacaaggccctctacggcttgcggcaggcatcgagggcgtggaatgccaagttggattctacgctcaaggggatgggcttcgagcaaagcccgcacgaggcggccatctaccggcggggcaatggaggaaatgccttgctggtgggtgtctacgtcgacgacttggtgatcaccggcaccaaggatgcggaggtcgcggcgttcaaggaggagatgaaggccaccttccaaatgagtgatctggggcctctctccttctacctggggattgaagtgcaccaggacaactccgggatcacgcttcgacagaccgcctacgccaagcgcgtcgttgagctggctgggctcaccgattgcaacccagctctcactccgatggaggagagactgaagctgagccgcgacagcacggcggaggaggtggatgctacacagtaccgacgtcttgtggggagccttcgctacctcacccacacacggccggacttggccttctccgtcggctacgtcagtcggttcatgcagcgaccaacgacggagcaccagcaggctgtgaagaggatcatccgctacgttgcggggactctcgaccacggtctctactacccgaagtgtcctggcaaggcacacttcgtcgggtacagcgacagcgaccacgccggtgacatcgacaccagcaagagcacgagcgggattctcttcttcctcggcaagtgcctcgttagctggcagtcagtcaagcagcaggtggtggccctgtccagctgcgaggccgagtacatggcggcctccgccgcttcgacccaggcgctctggcttgctcgactgcttagtgatctcctcggcagagacactggaaaggtggagctcagggtggatagcaagtccgctctagccctggcaaagaaccccgtttttcacgaacggaccaagcacatccgggtgaggtaccacttcatccgaagctacttggaggaatggagcatcaatgcgagctacatcaacaccaaggaccagcttgcggacttgctcaccaagcctcttgggaggatcaaactaggagggtgcagcaataggctagcagccagctatggctatatatatatgtatccaacctcccttggacaggccaagtgtgcactgaagaacctgaggataaaaacgactcacaccggctctgaatttaggatcatcggtttgtctgaagacacttgctattcgcagacgttccaaataaagagaaaaaatggcaacggtggctcggatacagtggaagaagtgacagtctttgaatactacaggaagaattggaaaatagatttgaagggatctgctcactttccctgtctaaatgttgggaagccaaagcggccaacatatatcccattggagctttgccatttggtgccattgcaaaggtacaaaaaggctttgtcgacgttacagcggtccacgttggttgagagatcaaggcagaatcctcaagagaggatgtttgtcttgtctggtgtgttgagggacagtgattataactctgtgccaatgctgagggagtgtggcatttctatagctcaagaatttacccaggttgctgctagagtccttccggcaccaaagctgaaatctggagatggcgaagatatttttgcgcgcaatgggaggtggaacttcaataaaaattgcaatgcccatcatcttgctcagcgtctcatccattgtgggaacttgaagggacttatcaacgatcagtacctgactaatgtgcttctaaagataaatgcaaagcttggagggttgaattcgctgctgcaaattgaaagaaaccaagccattcctctcttgtcgaagactccaaccattatcttaggcatggatgtttcccatggctcaccgggacgggatgatgtaccgtctgtcgctgcggttgttagttccctggagtggcctctcatatcaaaatataaagcctccgtatgcacccagtctcccaggctagaaatgatcgattccttgtttaagctagtggggaatgaggatcatgttatcattagagatggggttagtgaaggccagtttaatcaggtgctgaacattgagctagcccagataatcaaggcatgcgagtttcttgccaatgagaaaaatgacagtgaatggtctccaaagttcacggtgatagttgcgcagaagaaccatcacaccaaattttttcagacagatcgatcgaacaaagttgtcaatgttcctcctggtactgttgttgacaaaggaatctgtcatcccaggaactgtgatttctacatgtgtgctcatgctgggatgattgggactacaaggccgacgcattaccatgtgctgcatgatgagaacaatttcacccctgatgacttgcaggagcttgtgcacaacctctcatacgtgtaccagaggagcacgacggccatctcaggtgtcgctccgatctgctacgcgcacctggcggcggcgcaggtgtcgcagttcgtgagactcgacgacgcggcgtcggagggcagcggtgacggcggcgcgccgccgcggccggtgccggagctcccgcgcctgcacccggacgtcaggcagtccatgttcttctgctga

SEQ ID NO: 15685 - DNA, 1399 bp, Oryza sativa
  Clone ID: TFbOSC400397j.C1.o76.gp
ctctgcagcagcctgcgcatgcctgatggcgtccgcagcctctcccttgctgccgaggaccatcacccacatgtagcaggagaggtcgtcgacgagcagtaggaagtaacgtcgtcctcctggtgtggccggtgtcactgggccacacaagtccccgtgcacgagctcgagccgctccttggctcggaagctcgtctgctggggaaaggggagccgccgctgcttcgtcaccacgcagacgtcacagagctgctccacgtggtcaaggcacggcatgcctcgcaccatctccttggcactgagctgcttcagggcctcgaagtggaggtgcctgaagcgctcgtgccactgccacgcctcgtcatcccgacgagcggcgaggcaaactggttgtgcgacctgcgcgctgaggatgtagagtcgattagtgcctctggttaccttggcaagaaggcgacgacggcgatcccaaatcctcatgagtccgtcctcgaccaacacgcgtgagccgttctcatccagctgtcccaagctgatgatagaattcctcaacgcggggatgtagtagactccggtgagcagcctgtgctcaccggacttggcggtgaaggtgacggagccaacacccttgatctccacgccagaggcgtccccgaacttgacggagcctcggacgctggagtcgaactcggtgaagaactcccgtcggctggtcatgtgatgggtggcgccggtgtcgaggtaccacccatcagccttgtcgttgctggagccgttgcagagggagacgagtaccttcggctcatcaaggtggaggaaagccgctgcggccggtgccgctggaggtagctcgatgcttgcgtgagccaggagcagagccggctcttcctccacccgtgcgacgtgggcctggccacgtcgtggctgtcgacagtctttggcccaatggccaagcttgccacagttgcggcaggcgtcgtctcgtgccggcttgtggttgccggtggcaacgccctgggcgcctctgcgggcgccaccctcggcacgtcttcgcgcccaccgtagctggacacctccctgtgccttgcgcggcttacggccgcctatcggggaagatgactcccccttcctcccgtcaccttgagaggcctcccactgttcccgagtgagatggagcttcccgccgatggtgatgggccccgagagaggctgtggctcatcaccatcgacgaccttgaggcgacttaacgcctcctcgatcgacatcgtggagaggtccagcagagattcgatcgagcgagcgatctgcctgtacttctcagggacgcaacggaagagcttctcgacagctctctcctcgtcgtaggtgtcgtcgccgtactgcaccattttctgcaag

SEQ ID NO: 15686 - DNA, 5127 bp, Oryza sativa
  Clone ID: TFbOSC401340j.C1.o28.fg
atggccatcgcggtgaggtcggctgcggcggtggcgaggcactccctgcgccctccgctggccgcgcccggcagcatccgcggcgcctcgctcctgccgccgcagcgcgctcgcggcgtgggcccgtgtcgcgcccgcgctcgcgcggcgagctcctccgcgactggaggtggcgggcaccttcctccgctgttcagcgtggcgccgatgatggactggacggacaaccactaccggacgctcgcgcggctgatctcgaagcacgcgtggctctacacggagatggtggtcgcggagaccatcgtgcatcagaaagataacttggatagatttttagcgtttcctgctgaacagcatcctattgtgttgcaaattggtggaagtaatctggataacttagcgaaggcaactgaactggcaaatgcttattcgtacgatgagatcaacctaaactgtggctgccccagtggcaaagttgctggtcatggttgcttcggtgctcgcttaatgtttgatccagagtttgtaggggatgctatgtcagctattgctgccaattgtaatgtcccagtcagcgttaagtgcagaattggtgttgatgatcgtgactcctacgaagaactttgtgaatttgtagataaggttgtttcaaaatcaccaactaggcatttcattattcatgcccggaaggcattgctaagtggcctcagtcctgcagaaaatcggaacgttcctcctttaaaaaaaccagaaaattgccccatctcgagtgccatcctcttctcaatgagagtaaccattgaagttctaacatctgggagcttgaggagctggcaagaggaagggcacgggaacgggcagagcggcggcggcggcccaagggaccgcgcacccgccgacgggaacccagatgggcgcgggcgtgccggcggcagcccggagcccgcgcgcggccctcgcaggcagcgcggctctccctcccctgaccggtgccatggtcaccacggcgtccagacggtggtaagggactttggtctcggcggtgggtggcctaccctcaccaaaaccaactacatcgagcgggccgcggtgatgagggtgaggctccaggtgcggcacatgtgggaggcagtccggtacggcgacgttgactacgatgaggatcggcgggcactggatgccctcatcgctgcagtcccgctcgagatgcagttctcgctttcccataagtggactgccaaggaggcctgggatgccatcgctgtggcacgtatcggcagcgaccgcgcccgcaagtccacactgcaggcactccgcaaggagtgggagaacctggccttcaagccaggtgaggatgttgatgactttgccctccgtctcaacactcttttgcagaagatggtgcagtacggcgacgacacctacgacgaggagagagctgtcgagaagctctttcgttgcgtcccagagaagtacaggcagatcgctcgctcgatcgagtctctgctggacctctccacgatgtcgatcgaggaggcgttaggtcgcctcaaggtcgtggacggcgatgagccacagcctctctcggggcctatcaccattggcgggaagctccatctcactcgggagcagtgggaggccagccagggtgacgggaggaagggggagtcctctccctcgacaggcggccgcaagccgtgcaaggcgcgcggaggcgtccaactgcggtgggcgcgaagacgcgccgagggtggtgctcgcagaggcgcccagggcggcgccgccggcaaccacaagccggcacgagacgacgcttgccgcaactgtggcaagcttggccattgggccaaagactgtcgacagccacgacgcggcatcgagctatctccagcggcaccggccgcaacggctttcctccacctcgatgagccgaaggtacacgccttcctcggcaacagctccagcaacgacaaggctgatgggtggtacctcgacaccggcgccacccatcacatgactggccggcgggagttcttcaccgagcttgactctagcgtccgaggctccatcaagtttggggatgcctccggcatggagatcaagggcgtcggctccgtcaccttcaccgcaaagtccggtgagcacaggctgctcaccggagtctactacatccccgtgttgaggaactctatcatcagcgtgggacagctggatgagaacggctcacgcgtgttggtcgagcacggagtcatgacgatttgggatcgccgccgtcgccttcttgccaaggtaaccagaggcactaatcgactctacatcctcagcgcgcaggtcgcacaaccagtttgcctcgccgctcgtcgggacgacgaggcgtggcagtggcacgagcgtttcgggcacctccactttgaggccctaaagtggctcagcgccaaggagatggtgcgaggcctgccgtgccttgaccacgtggagcagctctgcgacgtctgcgtcctaacgaagcagaggcggctcccctttccccagcagacgagtttccgagccaaggagcagctcgagctcgtgcacggggacttgtgtggcccagtgacaccggccacaccaggaggacgacgttacttcctgctgctcgtcgacgacctctcccgctacatgtgggtgatggtcctcggcagcaaggcagaggctgcggacgccatccggcgcgcgcaggctgctgcagaggtggagtgcggccgcaagctgcgcgtgctgcgcaccgacaacggcggcgaattcacggcggctgaatttgcgtcgtactgcgctgatgagggcattcagcgccagtacaccgcgccgtacagcccgcaacagaacggtgtcaagcggcgcaaccagacggttgtagggatggctcgggctctcctcaagcagagggggatgccggccatattctggggagaggtggtggtgacggccgtctacatcctcaaccgctcgcctacgaaggccctcgatggcaggacaccgtacgaggcttggcatgagcgcaagccgggggtctcccacctgcgggtcttcggctgccttgcgttcgtcaaggagcttggccacatcggcaagctcgacgacaggagcaccccaggggtgttcatcggctacgcggagggctcgaaggcctatcgcatcctcaactcggagacacagcgtgtgcgcacagcgcgcgatgtagtgttcgacgaagggcgagggtgggtatgggacaaggcggtggacgatggttcgactccgaagtacgacgacttcaccgtcgagtacgtccacttcgagggagctgggggagtaggcaactcttcttcaccgagcgtgtctaccccagtccccgagcctccaccgactccgacaccaacacactctcgggccacgacttcgactacgacgagctcctcgcctacaccaccacagccggtgaccccacgcgctccagcaccaacagccactcctccgagcacgtctactccgacgccagctagtgttgagcgcaacccggtggagttcgctactccgctctcccacgacggggagcgcatcgacgcgtaccacgacggcgagcagctacggtaccgtacgatggaggatcttctcggcgaccagccggtgccgggactggtgcctcccgacctggaggcgcagttgcaccttgcgtgcgacgacggtgagcctcggtctttcgcagaggccgagaaacacgtggcatggcgtgccgcgatgcagtcggagatggacgcagttcaggagaaccgcacctgggagcttgctgaccttcctcgtggtcaccgcgcgatcacccttaagtgggtgttcaagctgaagagggatgaagccggagccatcgtcaagcacaaggctcgcttggtggcacgcggaaggctgggcgtccatcacatggacgtcaagtcggcgtttctaaacggcgacttgaaggaggaggtctacgtgcaccagccgccaggatttgtgatccccggcaaggagggcaaggtgctacgcctgcacaaggccctctacggcttgcggcaggcaccgagggcgtggaatgccaagttggattccacgctcaaggggatgggcttcgagcaaagcccgcacgaggcggccatctaccggcggggcaatggaggaaatgccttgctggtgggtgtctacgtcgacgacttggtgatcaccggcaccaaggatgcggaggtcgcggcgttcagggaggagatgaaggccaccttccatatgagtgatcaggggcctctctctttctacctggggattgaggtgcaccaggacgactccgggatcacgcttcgacagaccgcctacgccaagcgcgtcgttgagctggctaggctcaccgattgcaacccagctctcactccaatggaggagagactgaagctgagccgtgatagcacgacggaggaagtggatgctacacagtaccggcgtcttgtgggaagccttcgctacctcacccacacggctggacttggccttctccgtcggctacgtcagtcggctgtgaagaggatcatccgctacgttgcggggactctcgaccacggtctctactacccgaggtgtcctggcaaggcacacttcgtcgagtacagcaacagcaaccacgccggtgacatcgacaccagcaagagcacgagcgggattctcttcttcctcggcgagtgcctcgttagctggcagtcagtcaagcagcaggtggtggccctgtccagctgcgaggccgagtacatggcggcctccgccgcttcgacccaggcgctctggcttgctcgactgcttagtgatctcctcggcagagatactggagcggtggagctcagggtggatagcaagtccgctctggccctggcaaagaaccccgtttttcacgaatggagcaagcacatctgggtgaggtaccacttcatccgaagctacttggaggaagggagcatcaaggcgagctacatcaacaccaaggaccagcttgcggacctgctcaccaagcctcttgggaggattaagttcctcgagctctgcttcaggatcgggatggctcaacttccccacaagacgacgcacaagacttag

SEQ ID NO: 15687 - DNA, 7602 bp, Oryza sativa
  Clone ID: TFbOSC401545j.C1.o1.fg
atggcgctggagaggcggctcgcgtacgccgcgctcatcccgttcctccttctcgcgctccccatcctgccgtccgattccccgtccggcggcggcggcggtggcgcgggtgggggtgggggagggggagaaaccctagacccgcccgcggcgaagtacgtggtgcggttcgtcgagtaccggcccgccgacgagcaccgggagtacctggaggacggcctccgcggggccgcgcggcctccccccgccgcgtcgtggcggtgggtggagcggcggaaccccgccgccgcgttccccaccgacttcgccgtgctcgagatccgcgacgcgtgccgcgcggctgtcgtcgacgccgtcagtgcgctcggccgtgtccgggacgtgcacgccgatgcgagctactccaggggcgtcctgtctgcggatcggccgcggcagcaggggaagctgttcacagccatgtcgttcgagggggaggaaggagggggagatagggaggtcgggtgcagcactgatagtaataattcctcttctgctggttggaggcggaagcttctcgtgcagagatcacaagtaacgtctctttttggagctgaacgactatgggggagaggtttcactggtaggaaagtcaagatggccatttttgacactggtattcgagcagatcatccgcacttccgtaatattaaggagcgcactaattggacaaacgaagacacactaaatgataaccttggacatggaacatttgtagctggagttattgctggtcaagatgcagaatgccctggatttgcacctgacactgagatatatgcatttcgagtgttcacagatgctcagatatcctacacatcgtggttcttggatgcatttaattatgcaattgcaactggtatggatgtactgaatttgagtattggtggacctgattatctggatctcccctttgtggaaaaggacgccgagctcgccgcagcagaagagcgcaggcgagcaacagctcagaccgctgcagcagcagcgagggcggccagactggcggcagcggagttggcagcagccagggcggaggcggaggcggaggcggcgaaagatgcggcacgtgcggcggaggtagaggttgagaccttgcgcagcagcatcaacggctccatcgccggcgacatcaccgccgacagggagcttgaggagctggcaagaggaagggcacgggagcgggcagagcggtgggcagcagcccacctccacggcggcggcggcggtccaagggaccgcgggcccgccaacgggaacccagatgggcgcgggcgtgccggcggcagcccggagcccgcacgcggccctcgcaggcagcgcggctctttctcccctgaccggcgccatggtcaccacggcgtccagacggtggtcagggactttggtcccggcggtgggtggcctaccctcaccaaaaccaactacatcgagtgggccgcagtgatgagggtgaggctccaggtgcggcaaatgtgggaggcagtccggtacggcgacgtcgactacgacgaggatcggcgagcactggatgccctcatcgctgcagtcccgcccgagatgcagttctcgctttcccagaagcggactgccaaggaggcctgggacgccatcgctgcggcacgcatcggcagcgaccgcgcccgcaagtccacactgcaggcactccgcaaggagtgggagaacctggccttcaagccaggtgaggatgttgatgactttgctctccgtctcaacactctcttgcagaaaatggtgcagtacggcgacgacacctatgacgaggagagagctgtcgagaagctcttccgctgcgtccctgagaagtacaggcagatcgctcgctcgattgaatctctgctggacctctccacgatgtcgatcgaggaggcgttaggtcgcctcaaggtcgtcgatggtgatgagccacagcctctctcggggcccatcaccatcggcgggaagctccatctcactcgggagcagtgggaggcctctcagggtgacgggaggaagggggagtcatcttccccgacaggcggccgtaagccgcgcaaggcgcggggaggtgtccagctacggtgggcgcgaagacgtgccgagggtggcgcccgcagaggcgcccagggcattgccactggcaaccacaagccggcacgagacgacgcctgccgcaactgtggcaagcttggccattgggccaaagactgtcgacagccacgacgcggccaggcccacgtcgcacgggtggaggaggaagagccggctctgctcctagctcacgcaagcatcgagctacctccagcggcaccggccgcagcggctttcctccaccttgatgagccgaaggtactcgtctccctctgcgacggctccagcaacgacaaggctgatgggtggtacctcgacaccggcgccacccatcacatgacctgccgacgggagttcttcaccgagttcgactccagcgtccgaggctccgtcaagttcggggacgcctccggcgtggagatcaagggtgttggctccgtgaccttcaccgccaagtccggtgagcacaggctgctcaccggagtctactacatccccgcgttgaggaattctatcatcagcgtgggacagctggatgagaacggctcacgcgtgttggtcgaggacggactcatgaggatttgggatcgccgtcgtcgccttcttgccaaggtaaccagaggcactaatcgactctacatcctcagcgcgcaggtcgcacaaccagtttgcctcgccgctcgtcgggacgacgaggcatggcagtggcacgagcgcttcgggcatctccacttcgaggccctgaagcgcctcagtgccaaggagatggtgcgaggcatgccgtgccttgaccacgtggagcagctctgcgacgtctgcgtggtgacgaagcagcggcggctcccctttccccagcagacgagcttccgagccaaggagcggctcaagctcgtgcacggggacttgtgtggcccagtgacaccggccacaccaggaggacgacgctacttcctactgctcgtcgacgacctctctcgctacatgtgggtgatggtcctcggcagcaagggagaggctgcggatgccatcaggcgcgcgcaggccgctgcagaggcggagtgcggccgcaagctgcgcgtgctgcgcaccgacaacggcggcgaattcacggcggctgaattcgcgtcgtactgcgctgatgagggcattcagcgccactacaccgcgccgtacagcccacagcagaacggcgtcgtcgagcggcgcaaccagacggttgtggggatggctcgggctcttctcaagcagagggggatgccagccatcttctggggggaggcggtggtgacagccgtctacatcctcaatcgctcgcctaccaaggccctcgatggcaggacaccgtacgaggcctggcatgggcacaagccggcggtctcccacctacgggtcttcggctgcctcgcgttcgccaaggagctcggccacatcggtaagctcgacgacaggagcaccccaggggtgttcatcggctacgcggagggctcgaaggcctaccgcatcctcgacccggagacacagcgtgtgcgcactgcgcgcgatgttgtgttcgacgaagggcgagggtgggtatgggacaaggcggtggacgatggttcgactccgacgtacgacgacttcaccatcgagtacgtccacttcgagggagctgggggagtaggcagctcttcatctagcgtgtctaccccagcccccgaatctccaccgactccgacaccaacacaccctcgggccacgacttcgactacgacgagctcttcgtcgacaccaccccagccagtgactccacatgctccagctccaacagccactcctccaagcacgtctactccgacgccagctcgtgttgagcgcagcccggtggagttcgctactccgctctcccacgacggggagcgcatcgacgcgtaccacgacggcgagcagctacggtaccgtacgatggaggatcttctcggcgaccagttggtgccgggactggtgcctcgcgacttagaggcgcagttgcaccttgcgtgcgacgacggtgagcctcggtcttttgcagaggccgagaaacacgcggcatggcgtgccgcgatgcagtcggagatggacgcggttcaggagaaccgcacctgggagcttgctgacctccctcgtggtcaccgcgcaatcacccttaagtgggtgttcaagctgaagagggatgaagccggagccatcgtcaagcacaaggctcgcttggtagcacgcggtttcgtgcagcaggaggggatcgactacgacgatgccttcgctcccgtggcacggatggagtccgtgcgactcctttttgcgctggctgctcaggaaggctggggcgtccatcacatggacgtcaagtcggcgtttctaaacggcgacttgaaggaggaggtctacgtgcaccagccgccgggatttgtgatccccggcaaggagggcaaggtgctacgcctgcacaaggccctctacggcttgcggcaggcaccgagggcgtggaatgccaagttggattccacgctcaaggggatgggcttcgagcaaagcccgcacgaggcggccatctaccggcggggcattggaggaaatgccttgctggtgggtgtctacgtcgacgacttggtgatcaccggcaccaaggatgcggaggtcgcggcgttcaaggaggagatgaaggccactttccagatgagtgatctggggcctctctccttctacctggggatcgaagtgcaccaggacaactccgggatcacgcttcgacagaccgcctatgccaagcgcgtcgttgagctggctgggctcaccgattgcaacccagctctcactccgatggaggagagactgaagctgagccgcgacagcacggcggaggaggtggatgctacacagtaccgacgtcttgtggggagccttcgctacctcacccacacacggccggacttggccttctccgtcggctacgtcagtcggtttatgcagcgaccgacgacggagcaccagcaggccgtgaagaggatcatccgctacgttgcggggactctcgaccacggtctctactacccgaggtgtcctggcaaggcacacttcgtcgggtacagcgacagcgaccacgccggcgacattgacaccagcaagagcacgagcgggattctcttcttcctcggcgagtgcctcgttagctggcagtcaatcaagcagcaggtggtggccctgtccagctgcgaggccgagtacatggcggcatccgccgcttcgacccaggcgctctggcttgctcgactgcttagtgatctcctcggcagagatactggagcggtggagctcagggtggatagcaagtccgctctggccctggcaaagaaccccgtttttcacgaacggagcaagcacatccgggtttgggagctcacagcaaataacattattatggtatcagctattggaaatgatggccctctttatggcacgctaaataacccggctgatcagagtgacgtcattggtgttggtggtattgattacaataaccatatagcttcattttcctctcgaggcatgactacttgggagcttcctcatgggtatggccgtgttaaacctgatgttgttgcgtatagtcgtgatataatgggttcaaagatcagcacaggttgtaaaaccctttcaggcaccagtgttgcaagcccggtggttgctggtgtagtatgcttgcttgttagtgttataccagaggagcatcggaaatccatccttaaccctgcaacaatgaaacaagcccttgtagagggtgcttctaggctttcaggaccaaacatgtatgagcagggcgctggcaagattgacctctggcaatcatacgaaatcttgaaaagttaccaaccgcgtgcaagcatctttcctaatacccttgacttcactgattgtccctatttctggcctttttgccgccaacctctgtatgctggagctatgccagtggtcttcaatgctacaattctgaacgggatgggggtgattggttatgttaaggatcctcctgtatggcagccctctgaggatgtcggcaatattcttagtgttcacttcacctactcagatgtcatatggccttggacaggttatcttgccctgcacttacaagttaaagatgaaggatctcagttttcaggcataatcagtggcaaggtcacattgtcaatttacagcccagcagcccatggggaaagcagtccacgaagtagttcatgtgttctttacctgaaggtcaaggtggtgccaacacctgttaggtccagaagaatattgtgggaccaatttcataatatcaaatacccatctggttttgttccaagagattcacttaatgtgcataatgatatccttgactggcatggcgatcacttgcacacgaattttcatatactgttcaacatgctgagagatgcaggatactacattgagacccttggatctccacttacctgctttgatgctagcaattatgggacactgcttatggttgaccttgaggatgagtacttcagtgaggagattcagaaacttaaggatgatgttgtacacaaagggcttggcgttgttgtttttgcagagtggtatcatgtcgacacaatggttaagatgacattctttgatgaaaatacacgcagttggtggactccaattactgggggtgcaaatgttcctgcacttaatgaacttttggcaccatttggcattgcttttggggacaaagtactaagtggtgacttctcaatcaatggtgagcagacccactatgcttctgggactgatatagtgcaattcccagcaggaggttttttgcatagcttccaactccaggacaactctaaaatttctcaggataactcaagaagcgcagatacacaaaataccccagataaaagcaagtgcctcctagtctgtggctctgtgcacatgctctcttctattcttggaatgatggaagcaggcaaaggtcgggttgcagtctatggagattcaaattgccttgacagtagtcacatggtaacaaactgctattggcttttgagaaaacttgtggagttcactggcaatagaatcaaagatcctgttcttttctcagaatctgctcagttaaaatttccagtttttgagagcatccatcaactgtcacgtagaccagatgtgaacttctcaacatattcaactgtcgttggcaatgaattgatctgtcaccaggattcccgatttgaggtttggggaacgaaaggttatggtacccaacaaacaggcacaacaagaaagttgccagagtaccagaaaagtgaagcttacaacatttcaacaccaatagcttctgacagcacaccagatgaagctggcctgcaaagaaatatttcaacaccaatagcttctaagtttgataaaagaatggactattttggttttctcgggcacgaagag

SEQ ID NO: 15688 - DNA, 1409 bp, Oryza sativa
  Clone ID: TFbOSC401606j.C1.o6.gp
actccgcctctacagcagcctgcgcatgcctgatggcgtctgcagcctctcccttgctgccgaggaccatcacccacatgtagcgggagaggtcgtcgacgagcagcaagaagtaacgtcgtcctcctggtgtggccggtgtcattgggccacacaagtccccgtgcacgagctcgagccgctccttggctcggaagctcgtctgctggggaaaggggagccgccgctgcttcgtcaccacgcagacgtcgcagagctgctccacgtggtcaaggcacggcatgcctcgcaccatctccttggcactgagctgcttcagggcctcgaagtggaggtgcccgaagcgctcgtgccactgccacgcctcgtcgtcccgacgagcggcgaggcaaactggttgtgcgacctgcgcgctgaggatttagagtcgattagtgcctctggttaccttggcaagaaggcgacgacggcgatcccaaatcctcatgagtccgtcctcgaccaacacgcgtgagccgttctcatccagctgtcccacgctgatgatagaattcctcaacgcggggatgtagtagactccggtgagcagcctgtgctcaccggacttggcggtgaaggtgacggagccaacacccttgatctccacgccggaggcgtccccgaacttgacggagcctcggacgctggagttgaactcggtgaagaactcccgtcggccggtcatgtgatgggtggctccggtgtcgaggtaccacccatcagccttgtcgttgctggagccgttgcagagggagacgagtaccttcggctcatcaaggtggaggaaagccgctgcggccggtgccgctggaggtagctcgatgcttgcgtgagccaggagcagagccggctcttcctcctccacccgtgcgacgtgggcctggccgcgtcgtggctgtcgacagtctttggcccaatggccaagcttgccacagttgcggcaggcgtcgtctcgtgccggcttgtggttgccggtggcaacgccctgggcgcctttgcaggcgccaccctcggcacgtcttcgcacccaccgtagctggacacctccccgcgccttgcgcggcttacggccgcctgtcggggaagatgactcccccttcctcccgtcaccctgagaggcctcccactgcttccgagtgagatggagcttcccgccgatggtgatgggccctgagagaggctgtagctcatcaccatcgacgaccttgaggcgacctaacgcctcctcgatcgacatcgtggagaggtccagcagagattcgatcgagcgagcgatctgcctgtacttctcagggacgcagcggaagagcttctcgacagctctctcctcgtcgtaggtgtcgtcgccgtactgcaccattttctgcaag

SEQ ID NO: 15689 - DNA, 4380 bp, Oryza sativa
  Clone ID: TFbOSC401606j.C1.o8.fg
atgtccgacgctcggtctcggcgttcggtcgcctcgagcactcggcgtcagcaggacgccgagctcgccgcagcagaagagcgcaggcgagcaacgggtcagaccgctgcagcagcagcgagggcggccagactggcggcagccgagttggcagcagccagggcggaggcggaggcggaggcggcggaagatgcggcacgtgcggcggaggtagaggttgagaccttgcgcagcagcatcaacggctccatcgccggcgacatcaccgccgacagggagcttgaggagctggcaagaggaagggcacgggagcgggcagagcggtgggcagtagcccacctccacggcggcggcggcggcccaagggaccgcgcgcccgccgacgggaacccagacgggcgcgggcgtgccggcggcagcccggagcccgcacgcggccctcgcaggcagcgtggctctctctcccctgaccggcgtcatggtcaccacggcgtccagacggtggtcagggactttggtcccggcggtgggtggcctaccctcaacaaaaccaactacatcgagtgggccgcggtgatgagggtgaggctccaggtgcggcacatgtgggaggcagtccgaagcggactgccaaggaggcctgggacgccatcgctgcggcacgcatcggcagcgaccgcgccagcaagtccacactgcaggcactccgcaaggagtaggagaacctggccttcaagccagaaaatggtgcagtacggcgacgacacctacgacgaggagagagctgtcgagaagctcttccgctgcgtccctgagaagtacaggcagatcgctcgctcgatcgaatctctgctggacctctccacgatgtcgatcgaggaggcgttaggtcgcctcaaggtcgtcgatggtgatgagctacagcctctctcagggcccatcaccatcggcgggaagctccatctcactcggaagcagtgggaggcctctcagggtgacgggaggaagggggagtcatcttccccgacaggcggccgtaagccgcgcaaggcgcggggaggtgtccagctacggtgggtgcgaagacgtgccgagggtggcgcctgcaaaggcgcccagggcgttgccaccggcaaccacaagccggcacgagacgacgcctgccgcaactgtggcaagcttggccattgggccaaagactgtcgacagccacgacgcggccaggcccacgtcgcacgggtggaggaggaagagccggctctgctcctggctcacgcaagcatcgagctacctccagcggcaccggccgcagcggctttcctccaccttgatgagccgaaggtactcgtctccctctgcaacggctccagcaacgacaaggctgatgggtggtacctcgacaccggagccacccatcacatgaccggccgacgggagttcttcaccgagttcaactccagcgtccgaggctccgtcaagttcggggacgcctccggcgtggagatcaagggtgttggctccgtcaccttcaccgccaagtccggtgagcacaggctgctcaccggagtctactacatccccgcgttgaggaattctatcatcagcgtgggacagctggatgagaacggctcacgcgtgttggtcgaggacggactcatgaggatttgggatcgccgtcgtcgccttcttgccaaggtcgcacaaccagtttgcctcgccgctcgtcgggacgacgaggcgtggcagtggcacgagcgcttcgggcacctccacttcgaggccctgaagcagctcagtgccaaggagatggtgcgaggcatgccgtgccttgaccacgtggagcagctctgcgacgtctgcgtggtgacgaagcagcggcggctcccctttccccagcagacgagcttccgagccaaggagcggctcgagctcgtgcacggggacttgtgtggcccaatgacaccggccacaccaggaggacgacgttacttcttgctgctcgtcgacgacctctcccgctacatgtgggtgatggtcctcggcagcaagggagaggctgcagacgccatcaggcatgcgcaggctgctgtagaggcggagtgcggccgcaagctgcgcgtgctgcgcaccaacaacggcggcgaattcacagcggctgaattcgcgtcgtactgcgctgatgagggcattcaacgccactacacgccgtacagcccgcagcagaacgacgtcgtcgagtggcgcaaccagacggttgtggggatggctcaggccctcctcaagcagagggggatgccggccatcttctggggggaggcggtggtgacggccgcctacatcctcaaccgctcacctaccaaggccctcgatggcaggacaccgtacgaggcttggcatgggcgcaagccggcggtctcccacctgcgggtcttcggctgcctcgcgttcgccaaggagcttggccacatcggcaagctcgacgacaggagcaccccaggggtgttcatcggctacgcggagggctcgaaggcctaccgcatcctcgacccggagacacagcgtgtgcgcactgcgcgcgacgttgtgttcgacgaagggcgagggtgggtatgggacaaggcggtggacgatggttcgactccgacgtacgatgacttcaccgtcgagtacgtccactttgagggagctgggggagtaggcagctcttcttcaccaagcgtgtctaccgcagcccccgaatctccaccgactctgacaccaacacacccttgggccacgacttcgactacgacgagctcttcgtcgacaacaccccagccagtgactccacatgctccagcaccaacagccactcctccaagcacgtctactccgacgccagctcgtgttgagcgcagcccggtggagttcgctactccgctctcccacgacggggagcgcatcgacgcgtaccacgacggcgagcaactacagtaccaggccgagaaacacgcggcatggcgtgccgcgatgcagtcggagatggacgcggttcaggagaaccgcacctgggagcttgctgacctccctcgtggtcaccgcgcgatcacccttaagtgggtgttcaagctgaagagggatgaagccggagccatcgtcaagcacaagactcacttggtggcacgcggtttcgtgcagcaggaggggatcgactacgacgatgccttcgctcccgtggcacggatggagtccgtgcgactccttgcgctggctgctcaggaaggctggggcgtccatcacatggacgtcaagttggcgtttctgaacggcgacttgaaggaggaggtctacgtgcaccagccgccgggatttgtgatccccggcaaggagggcaaggtactacgcctgcacaaggccctctacggcttgcggcaggcactgagggcgtggaatgccaagttggattctacactcaaggggatgggcttcgagcaaagcccgcacgaggcagctatctaccggcggggcaatggaggaaatgccttgctagtgggtgtctacgtcgacgacttggtgatcaccggcaccaaggatgcggaggtcgcggcgttcaaggaggagatgaaggccaccttccagatgagtgatctggggcctctctccttctacctggggatcaaagtgcaccaggacgactctgggatcacgcttcgacagaccgcctacgccaagcgcgtcgttgagctggctgggctcaccgattgcaacccaactctcactccgatggaggagagactgaagctgagccgcgacagcatggcggaggaggctgtgaagaggatcatccgctacgttgcggggactctcgaccacggtctctactacccgaggtgtcctggcaaggcacacttcattgggtacagcgacagcgaccacgccggcgacatcgacaccagcaagagcacgagcgggattctcttcttcctcggcaagtgcctcgttagctggcagtcggtcaagcagcaggtggtggccctatccagctgcgaggccgagtacatggcggcctccgccgcttcgacccaggcgctctggcttgctcgactgcttagtgatctcctcggcagagacactggaacggtggagctcagggtggatagcaagtccgctctggccctggcaaagaaccccgtttttcacgaacggagcaagcacatctgggtgaggtaccactttatccgaagctacttggaggaagggagcatcaaggcgagctacatcaacaccaaggaccaacttgcggacttgctcaccaagcctcttgggaggatcaagttcctcgagctctgctccaggatcgggatggcccaacttccccacaagacgacgcacaagacttag

SEQ ID NO: 15690 - DNA, 3507 bp, Oryza sativa
  Clone ID: TFbOSC401785j.C1.o5.fg
atgtcgatcgaggaggcgttaggtcgcctcaaggtcgtcgatggtgatgagccacagcctctctcggggcccatcaccatcggcgggaagctccatctcactcgggagcagtgggaggcctctcagggtgacgggaggaagggggagtcatcttccccgacaggcggccgtaagccgcgcaaggcgcggggaggtgtccagctacggtgggcgcgaagacgtgccgagggtggcgcccgcagaggcgcccagggcgttgccaccggcaaccacaagccggcacgagacgacgcctgccgcaactgtggcaagcttggccattgggccaaagactgtcgacagccacgacgtggccaggcccacgtcgcacgggtggaggaagagccggctctgctcctggctcacgcaagcatcgagctacctccagcggcaccggccgcagcggctttcctccaccttgatgagccgaaggtactcgtctccctctgcaacggctccagcaacgacaaggctgatgggtggtacctcgacaccggcgccacccatcacatgaccggccgacgggagttcttcaccgagttcgactccagcgtccgaggctccgtcaagttcggggacgcctccggcgtggagatcaagggtgttggctccgtcaccttcaccgccaagtccggtgagcacaggctgctcaccggagtctactacatccctgcgttgaggaattctatcatcagcgtgggacagctggatgagaacggctcacgcgtgttggtcgaggacggactcatgaggatttgggatcgccgtcgtcgccttcttgccaaggtaaccagaggcactaatcgactcgacatcctcaacgtgcaggtcgcacaaccagtttgcctcgccgctcatcgggacgacgaggcgtggcagtggcacgagcgcttcgggcacctccacttcgaggccctgaagcagctcagtgccaaggagatggtgcgaggcatgccgtgtcttgaccacgtggagcagctctgcgacgtctgcgtggtgacgaagcagcggcggctcccctttccccagcagacgagcttccgagccaaggagcggctcgagctcgtgcacggggacttgtgtggcccagtgacaccagccacaccaggaggacgacgttacttcctgctgctcgtcgacgacctctcccgctacatgtgggtgatggtcctcggcagcaagggagaggctgcggacgccatcaggcatgcgcaggctgctgcaaaggcggagtgcggccgcaagctgcgcgtgctgcgcactgacaacggcggcgaattcacagcggctgaattcgcgtcgtactgcgctgatgagggcattcagcgccactacaccacgccgtacagcccgcagcagaacggcgtcgtcgagcggcgcaaccagacggttgtggggatggctcgggccctcctcaagcagagggggatgccggccatcttctgggggcaggcggtggtgacggccgcctacatcctcaaccgctcgcctaccaaggccctcgatggcaggacaccgtacgaggcttggcatgggcgcaagccggcggtctcccacctgcgggtcttcggctgcctcgcgttcgccaaggagcttggccacatcggcaagctcgacgacaggagcaccccaggggtgttcatcggctacgcggagggctcgaaggcctaccgcatcctcgacccggagacacagcgtgtgcgcactgcgcgcgacgttgtgttcgacgaagggcgagggtgggtatgggacaaggcggtggacgatggttcgactccgacgtacgacgacttcaccgtcgagtacgtccacttcgagggagctgggggagtaggcagctcttcttcacctagcgtgtctaccccagcccccgaatctccaccgactccgacaccaacacaccctcgggccacgacttcgactacgacgagctcttcgtcgacacaaccccagccagtgactccacatgctccagcaccaacagccactcctccaagcacgtctactccgacgccagctcgtgttgagcgcagcccggtggagttcgctactccgctctcccacgacggggagcgcatcgacgcgtaccacgacggcgagcagctacggtaccgtacgatggaggatcttctcggcgaccagccggtgccgggactggtgcctcgcgacctagaggcgcagttgcaccttgcgtgcgacgacggtgagcctcggtcttttgtagaggccgagaaacacgcggcatggcgtgccgcgatgcagtcggagatggacgcggttcaggagaaccgcacctgggagcttgctgacctccctcgtggtcaccgcgcgatcacccttaagtgggtgttcaagctgaagagggatgaagccggagccatcatcaagcacaaggctcgcttggtggcacgcggtttcgtgcagcaggaggggatcgactacgacgatgccttcgctcccgtggcacggatggagtctgtgcgactccttgcgctggctgctcgggaaggctggggcgtccatcacatggacgtcaagtcggcgtttctaaacggcgacttgaaggaggaggtctacgtgcaccagccgccgggatttgtgatccccggcaaggagggcaaggtgctacgcctgcacaaggccctctacggcttgcggcaggcaccgagggcgtggaatgccaagttggattccacgctcaaggggatgggcttcgagcaaagcccgcacgaggcggccatctaccggcggggcaatggaggaaatgccttgctagtgggtgtctacgtcgacgacttggtgatcaccggcaccaaggatgcggaggacaactccgggatcacgcttcgacagaccgcctacgccaagcgcgtcgttgagctggctgggctcaccgattgcaacccagctctcactccgatggaggagagactgaagctgagccgcgacagcacggcggaggaggtggatgctacacagtaccgacgtcttgtggggagccttcgctacctcacccacacacggccggacttggccttctccgtcggctacgtcagtcggttcatgcagcgaccgacgacggagcaccagcaggctgtgaagaggatcatccgctacgttgcggggactctcgaccacggtctctactacccgaggtgtcctggcaaggcacacttcgtcgggtacagcgacagcgaccacgccggcgacatcgacaccagcaagagcacgagcgggattctcttcttcctcggcaagtgcctcgttagctggcagtcggtcaagcagcaggtggtggccctgtccagctgcgaggccgagtacatggcggcctccgccgcttcgacccaggcgctctggcttgctcgactgcttagtgatctcctcggcagagacactagaacggtggagctcagggtggatagcaagtccgctctggccctggcaaagaaccccgtttttcactaa

SEQ ID NO: 15691 - DNA, 1408 bp, Oryza sativa
  Clone ID: TFbOSC401841j.C1.o11.gp
ctctgcctctgcagcagcctgcgcatgcctgatggcgtccgcagcctctcccttgctgccgaggaccatcacccacatgtagcaggagaggtcgtcgacgagtagcaggaagtaacgtcgtcctcctggtgtggccggtgtcactgggccacacaagtccccgtgcacgagctcgagccgctccttggctcggaagctcgtctgctagggaaaggggagccgccgctgcttcgtcaccacgcaaacgtcgcagagctgctccacgtggtcaaggcacggcatgcctcgcaccatctccttggcactgagctgcttcagggcctcgaagtggaggtgcccgaagcgctcgtgccactgccacgcctcgtcgtcccgacgagcggcgaggcaaactggttgtgctacctgcgcgctgaggatgtagagtcgattagtgcctctggttaccttggcaagaaggcgacgacggcgatcccaaatcctcatgaatccgtcctcgaccaacacgcgtgagccgttctcatccagctgtcccacgctgatgatagaattcctcaacgcggggatgtagtagactccggtgagcagcctatgctcaccggacttggcggtgaaggtgacggagccaacacccttgatctccacgccggaggcgtccccgaacttgacggagcctcggacgctggagtcgaactcggtgaagaactcccgtcggccggtcatgtgatgggtggcgccggtgtcgaggtaccacccatcagccttgtcgttgctggagccgttgcagagggagacgagtaccttcggctcatcaaggtggaggaaagccgctgcggccggtgccgctggaggtagctcgatgcttgcgtgagctaggagcagagccggctcttcctcctccacccgtgcgacgtgggcctggtcgcgtcgtggctgtcgacagtctttggcccaatggccaagcttgccacagttgcggcaggcgtcgtctcgtgccggcttgtggttgccggtggcaacgccctgggcgcctctgcgggcgccaccctcggcacgtcttcgcgcccaccgtagctggacacctccccgtgccttgcgcggcttacggccgcctgtcggggaagatgactcccccttcctcccgtcaccctgagaggcctcccactgctcccgagtgagatggagcttcccgccgatggtgatgggccccgagagaggctgtggctcatcaccatcgacgaccttgaagcgatctaacgcctcctcgatcgacatcgtggagaggtctagcagagattcgatcgagcgagcgatctgcctgtacttctcagggacgcagcggaagagcttctcgacagctctctcctcgtcgtaggtgtcgtcgccgtactgcaccattttctgtaag

SEQ ID NO: 15692 - DNA, 3879 bp, Oryza sativa
  Clone ID: TFbOSC401841j.C1.o8.fg
atgtccgacgctcggtctcggcgttctgtcgcctcgagcactcggcgtcagcaggacgctgagctcgccgcagcagaagagcgtaggcgagcaacggctcagaccgctgcagcagcagcaagggcggccagactggcggcagcggagttggcagcagccagggcggaggcggaggcgtcggaagatgcggcacgtgtgacggaggtagaggttgagaccttgcgcagcagcatcaacggctccatcgccggcgacatcaccgccgacagggagcttgaggagctggcaagaggaagggcacgggagcgggcagagcggtgggcagcagcccacctccacggcggtggcggcggcccaagggaccacgcgcccgccgacgggaacccagacgggcgcgggcgtgccggcggaagcccggagcccgcacgtggccctcgcaggcagcgcggctctctctcccctgaccggcgccatggtcaccacggcgtccagacggtggtcagggactttggtcccggcggtgggtggcctaccctcaccaaaaccaactacatcgagtgggccgcggtgatgagggtgaggctccaggtgcggcacatgtgggaggcagtccgcgaccgcgcccgcaagtccacattgcaggcactccgcaaggagtgggagaacctggccttcaagccaggtgaggatgttgatgactttgctctccgtctcaacactctcttacagaaaatggtgcagtacggcgacgacacctacgacgaggagagagctgtcgagaagctcttccgctgcgtccctgagaagtacaggcagatcgctcgctcgatcgaatctctgctagacctctccacgatgtcgatcgaggaggcgttagatcgcttcaaggtcgtcgatggtgatgagccacagcctctctcggggcccatcaccatcggcgggaagctccatctcactcgggagcagtgggaggcctctcagggtgacgggaggaagggggagtcatcttccccgacaggcggccgtaagccgcgcaaggcacggggaggtgtccagctacggtgggcgcgaagacgtgccgagggtggcgcccgcagaggcgcccagggcgttgccaccggcaaccacaagccggcacgagacgacgcctgccgcaactgtggcaagcttggccattgggccaaagactgtcgacagccacgacgcgaccaggcccacgtcgcacgggtggaggaggaagagccggctctgctcctagctcacgcaagcatcgagctacctccagcggcaccggccgcagcggctttcctccaccttgatgagccgaaggtactcgtctccctctgcaacggctccagcaacgacaaggctgatgggtggtacctcgacaccggcgccacccatcacatgaccggccgacgggagttcttcaccgagttcgactccagcgtccgaggctccgtcaagttcggggacgcctccggcgtggagatcaagggtgttggctccgtcaccttcaccgccaagtccggtgagcataggctgctcaccggagtctactacatccccgcgttgaggaattctatcatcagcgtgggacagctggatgagaacggctcacgcgtgttggtcgaggacggattcatgaggatttgggatcgccgtcgtcgccttcttgccaaggtaaccagaggcactaatcgactctacatcctcagcgcgcaggtagcacaaccagtttgcctcgccgctcgtcgggacgacgaggcgtggcagtggcacgagcgcttcgggcacctccacttcgaggccctgaagcagctcagtgccaaggagatggtgcgaggcatgccgtgccttgaccacgtggagcagctctgcgacgtttgcgtgggctcgaaggcctaccgcatcctccacctggagacacagcgtgtgcgcattgtgcgcgatgttgtgttcgacgaagggcgagggtgggtatgggacaaggcggtggacgatggttcgactccgacgtacgacgacttcaccgtcgagtacgtccacttcgagggagctgggggagtaggcagctcttcttcaccgagcgtgtctaccctagcccccgaatctccaccgactccgacaccaacacaccctcgggccacgacttcgactacgacgagctcttcgtcgacaccaccccagccagtgactccacatgctccagcaccaacagccactcctccaagcacgtctactccgacgccagctcgtgttgagcgcagcccggtggagttcgctactccgctctcccacgacggggagcgcatcgacgcgtaccacgacggcgagcagctacggtaccaggccgagaaacacgcggcatggcgtgccgcgatgcagtcggagatggacgcggttcaggagaaccgcacctgggagcttgctgacctccctcgtggtcaccgcgcgatcacccttaagtgggtgttcaagctgaagagggatgaagccggagccatcgtcaagcacaaggctcgcttggtggcacgcggtttcgtgcagcaggaggggatcgactacgatgatgccttcgctcccgtggcacggatggagtccgtgcgactccttgcgctggctgctcaggaaggctggggcgtcgatcacatggacgtcaagtcggcgtttctgaacagcgacttgaaggaggaggtctacgtgcaccagccgccgagatttgtgatccccggcaaggagggcaaggtgctacgcctgcacaaggccctctacggcttgcggcaggcaccgagggcgtggaatgccaagttggattccacgctcaaggggatgggcttcgagcaaagcccgcacgaggcggccatctaccggcggggcaatggaggaaatgccttgctggtgggtgtctacgtcgacgacttggtgatcaccggcaccaaggatgcggaggtcgcggcgttcaaggagatgaaggccaccttccagatgagtgatctggggcctctctccttctacctggggatcgaagtgcaccaggacgactccgggatcacgcttcgacagaccgcctacgccaagcgcgtcgttgagctggctgggctcaccgattgcaacccagctcttactccgatggaggagagactgaagctgagccgcgacagcacggcggaggaggtggatgctacacagtaccggcgtcttgtggggagccttcgctacctcacccacacacggccggacttggccttctccgtcggctacgtcagtcggttcatgcagcgaccgacgacggagcaccagcaggctgtgaagaggatcatccgctacgttgcggggactctcgaccacggtctctactacccgaggtgtcctggcaaggcacacttcgtcgggtacagcgacagcgaccacgccggcgacatcgacaccagcaagagcacgagcgggattctcttcttcctcggcaagtgcctcgttagctggcagtcggtcaagcagcaggtggtggccctgtccagctgcgaggccgagtacatggcggcctccgccgcttcgacccaggcgctctggcttgctcgactgcttagtgatctcctcggcagagacactggaacggtggagctcagggtggatagcaagtccactttggccctggcaaagaaccccgtttttctcgaacggagcaagcacatccgggtgaggtaccacttcatccgaagctacttggaggaagggagcatcaaggcgagctacatcaacaccaaggaccagcttgcgtacttgctcaccaagcctcttgggaggatcaagtttctcgagctctgctccaggatcgggatggcccaacttccccacaagacgacgcacaagacttag

SEQ ID NO: 15693 - DNA, 5448 bp, Oryza sativa
  Clone ID: TFbOSC401948j.C1.o6.gm
atggacgagtcaggcagaggaacaggtgatgatcatggccgggagacgaaggatgctgcggcggcggcgtcgtcgtcgtcggggaagaaggtgccgctgttcagcttgttccggtacgccgaccgcctcgacgtgctgctgatggttgtcggcacggtgggcgcgctcggcaacggcatctcgcagcccctcatgacggtcctcttcggcaacgtcatcaactccttcggcgcgaacaccagcggcagcgtcctccgcagcgtgaccaaggttgtcctcaacttcatatatctgggaattggaacttcagtagcttcctttcttcaggtatcatgctggactatggcaggagaaaggcagtctgcccgcatccgttctttatacctgaaagccgttctgaggcaggatattacattcttcgacacagagatgacaactggtgaagcagtttctagaatgtctagtgataccctcctaattcaaggtgctcttggtgagaaggttgtgtccttcaatggtgagaagaaagcgatagcaatgtaccgtaattttataaagaagtcatacaaggctactattgaggaaggcattatcactggttttggcatgggctctgtcatgtgcgtcgtatttggcagctatggattagccttctggtatggtggaaagctaatcattgagaaaggttacacaggaggaaaaatcatgactatcttgtttgccgtgttgaccggtgcatcctcattaggcaatgcaacacctgcagttgctgcagttgtggaaggtcaatctgcagcatacaatttgttcaaaacaattgagaggaaaccagagatagattccgatgataacaatggcatggttttagaagatatgaatggcgatattgagctaaaggatgtgtactttcgttaccctgcaagaccagagcagttgatattggatggattgtcgttacaagtagcgagtggaacaacaatggctatagtcggagagagtggaagcggaaagtcaactgttatcagcctagtcgaaagattctacgatccacagtctggcgaagttttaatagatggaattagcatcaagaaactgagacttgattggataagagggaagatcggtcttgttagccaagagcctctgctttttatggcctccattaaagataacataatatatggtaaaaaagatgcaacgcttgaagagatcaagagagcagcggagcttgcaaatgcagctaacttcattgacaagttaccaaatggttatgatactttagttggccagcgcggtactcagctctctggaggacaaaaacagagaattgcaattgcaagagccatcctcaaagatccaaaaatccttttgctcgatgaagcaacaagtgcacttgatgtggagtctgagaggatagttcaggaggcactaaatagaatgatggtagaaagaaccacactcgttgtcgctcatcgtttgagcactgtgaggaatgttgattgcatcacagtcgtccgcaaaggaaaaatagttgaacaaggtcctcatgatgcactggtgaaggatcccgatggagcttactcccagctaattaggctacaagagactcatcgtgatgaaaggcataaactaccagattccagatcaaaaagtactagtttgtcattcagacgatcaagaactaaagattttctcagcaagagcaacagtggggcacttggtacaaggctctcagtcgatgcgttgaatgtccgccgtttagtaggagataacctggcccttatagtccaggctgtagctacactaatcactggctttgccatagcttttgcggcagattggaggcttgcactgatcatcacttgtgtaattcctttagtgggtgcacagggctatgctcaagttaagttcttgaaggggttcagtgaagaatctaagaccatagcacttgttggagaaagcggtagtgggaagtccacgataattgctttattagagcgtttctatgatcctgattctggtaatatctcactagatggagttgaaattagaagcttaaaagtcagctggttgagggatcagatggggcttgtaggccaggagccagtgcttttcaacgacacaatccgtgccaacataacatacgggaaacacagtgaggtaacagaggaagagatcactgctgtggccaaggcagcaaacgcccatgagttcgtatcaagcctgccacaaggatacgacacagtggtaggtgagaaaggggtgcaactatctggtgggcaaaaacagagggtagcaattgcaagggccatcctaaaggaccctaagatactgctacttgatgaggcaaccagtgctctagatgcagaatcagaacgtgttgttcaagatgcattggatcgagtcatggtcaacaggactaccattgtagtggcacaccgcctctccacaatcaaaggggctgatatgattgcagtcctcaaggaaggaaaaattgcagaaaaaggaaagcatgaagcactattgcggatcaaggatggtgcatatgcttcacttgacgccgagctcgccgcagcagaagagcgcaggcgagcaacggctcagaccgctgcagcagcagcgagggcggccagactggcggcagcggagttggcagcagccagggcggaggcggaggcggaggcggcggaagatgcggcacgtgcggcggaggtagaggttgagaccttgcgcagcagcatcaacggctccatcgccggcgacatcaccgccgacagggagcttgaggagctggcaagaggaagggcacgggagcgagcagagcggtgggcagcagcccacctccacggcggcggcggcggcccaagggaccgcgcgcccgccgacgggaacccagacgggcgcaggcgtgccggcggcagcccggagctcgcacgcggccctcgcaggcagcacggctctctctcccctgaccggcgccatggtcaccacggtgtccagacggtggtcagggactttggtcccggcggtgggtggcctaccctcaccaaaaccaactacatcgagtgggccgcggtgatgagggtgaggctccaggtgcggcacatgtgggaggcagtccggtacggtgacgtcaactacgacgaggatcggcgggcactggatgccctcatcgctgcagtcccgcccgagatgcagttctcgctttcccagaagcggactgccaaggaggcctgggacgccatcgctgcggcacgcatcggcagcgaccgcgcccgcaagtccacactgcaggcactccgcaaggagtgggagaacctggccttcaagccaggtgaggatgttgatgactttgctctccgtctcaacactctcttgcagaaaatggtgcagtacggcgacgacacctacgacgaggagagagctgtcgagaagctcttccgctgcgtccctgagaagtacagacagatcgctcgctcgatcgaatctctgctggacctctccacgatgttgatcgaggaggcgttaggtcgcctcaaggtcgtcgatggtgatgagccacagcctttctcggggcccatcaccatcggcgggaagctccatctcactagggagcagtgggaggcctctcagggtgacgggaggaagggggagtcatcttccccgacaggcggccgtaagccgcgcaaggcgcggggaggtgtccagctacggtgggcgcgaagacgtgccgagggtggcgcccgcagaggcgcccagggcgttgccaccggcaaccacaagccggcacgagacgacgcctgccgcaactgtggcaagcttggccattgggccaaagactgtcgacagccacgacgcggccaggcccacgtcgcacgggtggaggaggaagagccggctctgctcctggctcacgcaagcatcgagctacctccagcggcaccggccgcagcggctttcctccaccttgatgagccgaaggtactcgtctccctctgcaacggctccagcaacgacaaggctgatgggtggtacctcgacaccggcgccacccatcacatgaccggccgacgggagttcttcaccgagttcgactccagcgtccgaggctccgtcaagttcggggacgcctccggcgtggagatcaagggtgttggctccgtcaccttcaccgccaagtccggtgagcacaggctgctcaccggagtctactacatccccgcgttgaggaattctatcatcagcgtgggacagctggatgagaacggctcacgcgtgttggtcgaggacggactcatgaggatttgggatcgccgtcgtcgccttcttgccaagtggcacgagcgcttcgggcacctccacttcgaggccctgaagcagctcagtgccaaggagatggtgcgaggcatgccgtgccttgaccacgtggagcagctctgcgacgtctgcgtggtgacgaagcagcggcggctcccctttccccagcagatgagcttccgagccaaggagcggctcgagctcgtgcacggggacttgtgtggcccagtgacaccggccacaccaggaggacgacgttacttcctgctgctcgtcgacgacctctcccgctacatgtgggtgacggtcctcggcagcaagggagaggctgcggacgccatcaggcatgcacaggctgctgcagaggcggagtgcggccgcaagctgcgcgtgctgcgcaccgacaacggcggcgaattcacagcggctgaattcgcgtcgtactgcgctgatgagggcattcagcgccactacaccacgccgtacagcccgcagcagaacggcgtcgtcgagcggcgcaaccagacggttgtggggatggctcgggccctcctcaagcagagggggatgccggccatcttctggggggaggcggtggtgacggcaacggcaacctcaacaatggcgtcggatggtcagggacaggggcggatgtggctaggggcagatgcggcggcgtgggaaggcagagaggagtgcaagcggcggcgccggatgcagccgggggtggaggtgatggtgtcggatgtggcggctcaaccgggggagccggatgaggcgggaaggagcgacgctggaatactcgccatggggtttggccagcgggatagcttggtcagcccgttagagaggctgttggaggacattttttttcatgtggttgctataatttggtttggagatgctctaacaattggattatatcacggtagatattacaagtttttagctctgaacattgagctaaaagagctcgtgctagcggcggcggtcgtggcgggcgacgacgcggactgcagcggcggtcgcggcgggcgacggtgtggccgcggacggcggcggggctcgcggacgacggcggaggtcgcggtcagcgacgacacggatggcagcgacggtcgtggcgggtga

SEQ ID NO: 15694 - DNA, 4668 bp, Oryza sativa
  Clone ID: TFbOSC410155j.C1.o3.fg
atgtccgacgctcggtctcggcgttcggtcgcctcgagcactcggcgtcagcaggacgccgagctcgctgcagcagaagagcgcaagcgagcaacagctcagaccgctgcagcagcagcgagggcggccagactggcggcagcggagttggcagcagccagggaggaggcggaggcagaggcggcggaagatgcggcacatgcggcggaggtagaggttgagaccttgcgcagcagcatcaacggctccatcgccggcgacatcaccgccgacagggagcttgaggagctggcaagaggaagggcacgggagcgggcagagcggtgggcagcagcccacctccacggcggcggcggcggcccaagggaccgcgcgcccgccaacgggaacccagatgggcgcgggcgtgccggcggcagcccggagcccgcacgcggcccttgcaggcagcgcggctctctctcccctgaccggcgccatggtcaccacggcgtccagacggtggtcagggactttggtcccggcggtgggtggcctaccctcaccaaaaccaactacatcgagtgggccgcagtgatgagggtgaggctccaggtgcggcacatgtgggaggcagtccggtacggcgacgtcgactacgacgaggatcggcgggcactggatgccctcatcgctgcagtcccgcccgagatgcagttctcgctttcccagaagcggactgccaaggaggcctgggacgccatcgctgcggcacgcatcggcagcgaccgcgcccgcaagtccacactgcaggcactccgcaaggagtgggagaacctggccttcaagccaggtgaggatgttgatgactttgctctccgtctcaacactctcttgcagaaaatggtgcagtacggcaacgacacctacgacgaggagagagctgtcgagaagctcttccgctgcgtccctgagaagtacagacagatcgctcgctcgatcgaatctctgctggacctctccacgatgtcgatcgaggaggcgttaggtcgcctcaaggtcgtcgatggtgatgagccacagcctctctcggggcccatcaccatcggcgggaagctccatctcactcgggagcagtgggaggcctctcagggtgacgggaggaagggggagtcatcttccccgacaggcggccgtaagccgcgcaaggcgcggggaggtgtccagctacggtgggcgcgaagacgtgccaagggtggcgcccgcagaggcgcccagggcgttgccaccggcaaccacaagccggcacgagacgatgcctgccgcaactgtggcaagcttggccattgggccaaagactgtcgacagccacgacgcggccaggcccacgtcgcacgggtggaggaggaagagccggctctgctcctagctcacgcaagcatcgagctacctccagcggcaccggccgcagcggctttcctccaccttgatgagccgaaggtactcgtctccctctgcaacggctccagcaacgacaaggctgatgggtggtacctcgacaccggcgccacccatcacatgaccggccgacgggagttcttcaccgagttcgactccagcgtccgaggctccgtcaagttcggggacgcctccggcgtggagatcaagggtgttggctccgtcaccttcaccgccaagtccggtgagcacaggctgctcaccggagtctactacatccccgcgttgaggaattctatcatcagcgtgagacagctggatgagaatggctcacgcgtgttggtcgaggacggactcatgaggatttgggatcgccgtcgtcgccttcttgccaaggtaaccagaggcactaatcgactctacatcctcagcgcgcaggtcgcacaaccagtttgcctcgccgctcgtcgggacgacgaggcatggcagtggcacgagcgcttcgggcacctccacttcgaggccctgaagcgcctcagtgccaaggagatggtgcgaggcatgccgtgccttgaccacatggagcagctttgcgacgtctgcgtggtaacgaagcagcggcggctcccctttcctccgcagatgagcttccgagccaaggagcggctcgagctcatgcacggggacttgtgtggcccagtgacaccggccacaccaggaggacgacgttacttcctgctgctcgtcgacgacctctcccgctacatgtgggtgatggtcctcggcagcaagggagaggctgcggatgccatcaggcgcgcgcaggccgctgcagaggcggagtgcggccgcaagctgcgcgtgctgcgcaccgacaacggcggcgatgagggcatccagcgccactacaccgcgtcgtacagcccacagcagaacggcgtcgtcgagcggcgcaaccagacgggggaggcggtggtgacagccgtctacatcctcaatcgctcgcctaccaaggccctcgatggcaggacaccgtacgaggcttggcatgggcacaagccggcggtctcccacctacgggtcttcggctgcctcgcgtttgccaaggagcttggccacatcggtaagctcgacgacaggagcaccccaggggtgttcatcggctacgcggagggctcaaaggcctaccgcatcctcgacccggagacacagcgtgtgcgcacagtgcgcgacgtagtgttcgacgaagggcgagggtgggtatgggacaaggcggtggatgatggttcgactccgacgtacgacgacttcaccatcgagtacgtccacttcgagggagctgggggagtaggcagctcttcttcaccgagtgtgtctaccccagtccccgagcctccaccgactccaacaccaacacaccctcgggccacgacttcgactacgacgagctcttcgtcgacaccaccccagccggtgtccccacgcgctccagcaccaacagccactcctccgggcacgtctactccgacgccagctcgtgttgagcgcagcccggtggagttcgttactccgctctcccacgacggggagcgcatcgacgcgtaccacgacggcgagcagctacggtaccgtacgatggatgatcttctcggcgaccagccggtgccgggactggtgcctcgcaacctggaggcgcagttgcaccttgcgtgcgacgacggtgagcctcggtcttttgcagaggccgagaaacacgcggcatggcgtgccgcgatgcagttggagatggacgcggttcaggagaaccgcacctgggagcttgctgacctccctcgtggtcaccgcgcaatcacccttaagtgggtgttcaagctgaagagggatgaagccggagccatcgtcaagcacaaggctcgcttggtagcacgcgacttcgtgcagcaagaggggatcgactacgacgatgccttcgctcccgtggcacggatggagtccgtgcgactccttgcgctggctgctcaggaaggctggggtgtccatcacatggacgtcaagtcggcgtttctgaacggcgacttgaaggaggaggtctacgtgcaccagccgccgggattcgtgctccccggcaaggagggcaaggtgctacgcctgcacaaggccctctacggcttgcggcaggcaccgagggcgtggaatgccaagttggattccacgctcaaggggatgggcttcgagcaaagcccgcacgaggcggccatctaccggcggggcaatggaggaaaatgccttgctgatgcggaggtggcgacgttcaagaaggagatgaaggccaccttccagatgagtgatctggggcctctctccttctacctggggatcgaagtgcaccaggacgactccggaatcacgcttcgacagaccgcctacgctaagcgcgtcgttgagctggctgggctcaccgattgcaacccagctctcactccgatggaggagagactgaagctgagccgtgacagcacggcggaggaggtggatgctacacagtaccggcgtcttgtggggagccttcgctacctcacccacacacgatcggacttggccttctccgtcggctacgtcagtcgattcatgcagcaaccgacgacggagcaccagcaggctgtgaagaggatcatccgctacgttgcggggactctcgaccacggtctctactacccgaggtgtcctggcaaggcacacttcgtcgggtacagcgacagcgaccacgccggcgacatcgacaccagcaagagcacgagcgggattctcttcttcctcggcgagtgcctcgttagctggcagtcggtcaaacaacaggtggtggccctgtccagctgcgaggccgagtacatggcggcatccgccgcttcgacccaggcgctctggcttgctcgactgcttggtgatctcctcggcagagacactggagcagtagagctcagggtggacagcaagtccgctctggccctggcaaagaaccccgttttccacgaacggagcaagcacatccgggtgaggtaccactttatccgaaactacttggaggaagggagcatcaaggcgagctacatcaacaccaaggaccagcttgcggacttgctcaccaagcctcttgggaggatcaagttcctcgagctctgctccaggatcgggatggcccaactttcccacaagacgacacacaagacttag

SEQ ID NO: 15695 - DNA, 4056 bp, Oryza sativa
  Clone ID: TFbOSC420547j.C1.o5.fg
atgagggtgaggctccaggtgcggcacatgtgggaggcagtccggtacggtgacgtcgactacgatgaggatcggcgggcactggatgccctcatcgctgcaatcccgcccgagatgcagttctcgctttcccaaaagcggactgccaaggaggcctgggacgccatcgctgcggcacgcatcggcagcgaccgcgcccgcaagtccacactgcaggcactccgcaaggagtgggagaacctggccttcaagccaggtgaggatgttgatgactttgctctccgtctcaacactctcttgcagaaaatggtgcagtacggcgacgacacctacgacgaggagagagctgtcgagaagctcttccgctgcgtccctgagaagtacaggcagatcgctcgctcgatcgaatctctgctggacctctccacgatgacgatcgaggaggcgttaggtcgcctcaaggtcgtcgatagtgatgagccacagcctctctcggggcccatcaccatcggcgggaagctccatctcactcgggagcagtgggaggcctctcaaggtgacggaaggaagggggagtcatcttccccgacaggcggctgtaagccgcgcaaggcgcggggaggtgtccagctacggtgggtgcgaagacgtgccgagggtggcgcccgcagaggcgcccagggcgttgccaccggcaaccacaagccggcacgagacgacgcctgccgcaactgtggcaagcttggccattgggccaaagactgtcgacagccacgacgtggccaggcccacgtcgcacgggtggaggaagagccggctctgctcctggctcacgcaagcatcgagctacctccagcggcaccggccgcaacggctttcctccaccttgatgagccgaaggtactcgtctccctctgcaacggctccagcaacgacaaggctgatgggtggtacctcgacaccggcgccacccatcacatgaccggccgacgggagttcttcatcgagttcgactccagcgtccgaggctccgtcaagttcggggacgcctccggcgtggagatcaagggtgttggctccgtcaccttcaccgccaagtccgcgtgggacagctggatgagaacggctcacgcgtgttggtcgaggacggacactaatcgactctacatcctcagcgcacaggtcgcacaaccagtttgcctcaccgctcgtcgggacgacgaggcgtggcagtggcatgagcgcttcgggcacctccacttcgaggccctgaagcagctcggtgccaaggagatggtgcgaggcatgccgtgccttgaccacatggagcagctctgcgacgtttgcgtggtgacgaagcagtggcggctcccctttccccagcagacgagcttccgagccaaggagcggctcgagctcgtgcacggggacttgtgtggcccagtgacaccggccacaccaggagggcgacgttacttcttactgctcgtcgacgacctctcccgctacatgtgggtgatggtcctcggcagcaagggagaggctgcggacgccatcaggcatgcgcaggctgctgcagaggcagagtgcggccgcaagctgcacgtgctgcgcaccgacaacagcggcgaattcacagcggctgaatttgcgtcgtactgcgctgatgagggcattcagcgccactacaccacgccgtacagcccgcagcagaacggcgtcgttgagcggcgcaaccagacggttgtggggatggctcgggccctcctcaagcagagggggatgccggccatcttctggggggaggcggtggtgacggccgcctacatcctcaaccgctcgcctaccaaggccctcgatggcaggacaccgtacgaggcttggcatgggcgcaagccggcggtctcccacctgcgggtcttcggctgcctcgcgttcgccaaggagcttggccacattggcaagctcgatgacaggagcaccccaggggtgttcatcggctacgcggagggctcgaaggcctaccgcatcctcgacccggagacacagcgtgcggtggacgatggttcgactccgacgtacgacgacttcaccgtcgagtacgtccacttcgagggagctgggggagtaggcagctcttcttcacctagcgtgtctaccccagcccccgaatctccaccgactccaacaccaacacaccctcgggccacgacttcgactacgacgagctcttcgtcgacaccaccccagccagtgactccacatgctccagcaccaacagccactcctccaagcacgtctactccgatgccagctcgtgttgagcgcagcccggtggagttcgctactccgctctcccacgacggggagcgcatcgacgcgtaccacgacggcgagcagctacggtaccgtacgatggaggatcttctcggcgaccagccggtgccgggactggtgcctcgcgacctagaggcgcagttgcaccttgcgtgcgacgacggtgagcctcggtcttttgtagaggccgagaaacacgcggcatggcgtgccgcgatgcagtcggagatggacgcggttcaggagaaccgcacctgggagcttgctgacctccctcatggtcaccgcgcgatcacccttaagtgggtgttcaagctgaagagggatgaagccgaagccatcgtcaagcacaaggctcgcttggtggcacgcggtttcgtgcagcaggaggggatcgactacgacgatgccttcgctcccgtggcacggatggagtccgtgcgactccttcttgcgctggctgctcaggaaggctggggcgtccatcacatagacgtcaagtcggcgtttctaaacggcgacttgaaggaggaggtctacgtgcaccagccgccgggatttgtgatccccggcaaggagggcaaggtgctacgcctgcacaaggccctctacggcttgcggcaggcaccgagggcgtggaatgccaagttggattccacgctcaaggggatgggcttcgagcaaagcccgcacgaggcggccatctaccggcggggcaatggaggaaatgccttgctggtgggtgtctacgtcgacgacttggtgatcactggcaccaaggatgcggaggtcgcggcgttcaaggaggagatgaaggccaccttccagatgagtgatctggggcctctctccttctacctggggatcgaagtgcaccaggacaactccgggatcatgcttcaacagaccgcctacgccaagcgcgtcgttgagctggctgggctcaccgattgcaacccagctctcactccgatggaggagagactgaagctgagccgcgacagcacggcggaggaggtggatgctacacagtaccgacgtcttgtggggagccttcgctacctcacccacacacggccggacttggccttctccgtcggctacgtcagtcggttcatgcagcgaccgacgacggagcaccagcaggctgtgaagaggatcatccgctacgttgcggggactctcgaccacggtctctactacccgaggtgtcctggcaaggcacactttgtcgggtacagcgacagcgaccacgccggcgacatcgacaccagcaagagcacgagcgggattctcttcttcctcggcaagtgcctcgttagttggcagtcggtcaagcagcaggtggtggccctgtccagctgcgaggccgagtacatggcggcctccgccgcttcgacccaggcgctctggcttgctcgactgcttagtgatctcctcggcagagacactggaacggtggagctcagggtggatagcaagtccgctctggccctggcaatgaaccccgtttttcacgaacggagcaagcacatccgagtgaggtaccacttcatccgaagctacttggaggaagggagcatcaaggcgagctacatcaacaccaaggaccagcttgcggacttgctcaccaagcctcttgggaggatcaagttcctcgagctctgctccaggatcgggatggcccaacttccccacaagacgacgcacaagacttag

SEQ ID NO: 15696 - DNA, 3507 bp, Oryza sativa
  Clone ID: TFbOSC422293j.C1.o3.fg
atgtcgatcgaggaggcgttaggtcgcctcaaggtcgtcgatggtgatgagccacagcctctctcggggcccatcaccatcggcgggaagctccatctcactcgggagcagtgggaggcctctcagggtgacgggaggaagggggagtcatcttccccgacagccggccgtaagccgcgcaaggcgcggggaggtgtccagctacggtgggcgcgaagacgtgccgagggtggcgcccgcagaggcgcccagggcgttgccaccggcaaccacaagccggcacgagacgacgcctgccgcaactgtggcaagcttggccattgggccaaagactgtcgacagccacgacgtggccaggcccacgtcgcacgggtggaggaagagccggctctgctcctggctcacgcaagcatcgagctacctccagcggcaccggccgcagcggctttcctccaccttgatgagccgaaggtactcgtctccctctgcaacggctccagcaacgacaaggctgatgggtggtacctcgacaccggcgccacccatcacatgaccggccgacgggagttcttcaccgagttcgactccagcgtccgaggctccgtcaagttcggggacgcctccggcgtggagatcaagggtgttggctccgtcaccttcaccgccaagtccggtgagcacaggctgctcaccggagtctactacatccctgcgttgaggaattctatcatcagcgtgggacagctggatgagaacggctcacgcgtgttggtcgaggacggactcatgaggatttgggatcgccgtcgtcgccttcttgccaaggtaaccagaggcactaatcgactcgacatcctcaacgtgcaggtcgcacaaccagtttgcctcgccgctcatcgggacgacgaggcgtggcagtggcacgagcgcttcgggcacctccacttcgaggccctgaagcagctcagtgccaaggagatggtgcgaggcatgccgtgtcttgaccacgtggagcagctctgcgacgtctgcgtggtgacgaagcagcggcggctcccctttccccagcagacgagcttccgagccaaggagcggctcgagctcgtgcacggggacttgtgtggcccagtgacaccagccacaccaggaggacgacgttacttcctgctgctcgtcgacgacctctcccgctacatgtgggtgatggtcctcggcagcaagggagaggctgcggacgccatcaggcatgcgcaggctgctgcaaaggcggagtgcggccgcaagctgcgcgtgctgcgcactgacaacggcggcgaattcacagcggctgaattcgcgtcgtactgcgctgatgagggcattcagcgccactacaccacgccgtacagcccgcagcagaacggcgtcgtcgagcggcgcaacccgacggttgtggggatggctcgggccctcctcaagcagagggggatgccggccatcttctgggggcaggcggtggtgacggccgcctacatcctcaaccgctcgcctaccaaggccctcgatggcaggacaccgtacgaggcttggcatgggcgcaagccggcggtctcccacctgcgggtcttcggctgcctcgcgttcgccaaggagcttggccacatcggcaagctcgacgacaggagcaccccaggggtgttcatcggctacgcggagggctcgaaggcctaccgcatcctcgacccggagacacagcgtgtgcgcactgcgcgcgacgttgtgttcgacgaagggcgagggtgggtatgggacaaggcggtggacgatggttcgactccgacgtacgacgacttcaccgtcgagtacgtccacttcgagggagctgggggagtaggcagctcttcttcacctagcgtgtctaccccagcccccgaatctccaccgactccgacaccaacacaccctcgggccacgacttcgactacgacgagctcttcgtcgacacaaccccagccagtgactccacatgctccagcaccaacagccactcctccaagcacgtctactccgacgccagctcgtgttgagcgcagcccggtggagttcgctactccgctctcccacgacggggagcgcatcgacgcgtaccacgacggcgagcagctacggtaccgtacgatggaggatcttctcggcgaccagccggtgccgggactggtgcctcgcgacctagaggcgcagttgcaccttgcgtgcgacgacggtgagcctcggtcttttgtagaggccgagaaacacgcggcatggcgtgccgcgatgcagtcggagatggacgcggttcaggagaaccgcacctgggagcttgctgacctccctcgtggtcaccgcgcgatcacccttaagtgggtgttcaagctgaagagggatgaagccggagccatcatcaagcacaaggctcgcttggtggcacgcggtttcgtgcagcaggaggggatcgactacgacgatgccttcgctcccgtggcacggatggagtctgtgcgactccttgcgctggctgctcgggaaggctggggcgtccatcacatggacgtcaagtcggcgtttttaaactgcgacttgaaggaggaggtctacgtgcaccagccgccgggatttgtgatccccggcaaggaggccaaggtgctacgcctgcacaaggccctttacggcttgcggcaggcaccgagggcgtggaatgccaagttggattccacgctcaaggggatgggcttcgagcaaagcccgcacgaggcggccatctaccggcggggcaatggaggaaatgccttgctagtgggtgtctacgtcgacgacttggtgatcaccggcaccaaggatgcggaggacaactccgggatcacgcttcgacagaccgcctacgccaagcgcgtcgttgagctggctgggctcaccgattgcaacccagctctcactccgatggaggagagactgaagctgagccgcgacagcacggcggaggaggtggatgctacacagtaccgacgtcttgtggggagccttcgctacctcacccacacacggccggacttggccttctccgtcggctacgtcagtcggttcatgcagcgaccgacgacggagcaccagcaggctgtgaagaggatcatccgttacgttgcggggactctcgaccacggtctctactacccgaggtgtcctggcaaggcacacttcgtcgggtacagcgacagcgaccacgccggcgacatcgacaccagcaagagcacgagcgggattctcttcttcctcggcaagtgcctcgttagctggcagtcggtcaagcagcaggtggtggccctgtccagctgcgaggccgagtacatggcggcctccgccgcttcgacccaggcgctctggcttgctcgactgcttagtgatctcctcggcagagacactagaacggtggagctcagggtggatagcaagtccgctctggccctggcaaagaaccccgtttttcactaa

SEQ ID NO: 15697 - DNA, 3762 bp, Oryza sativa
  Clone ID: TFbOSC900377j.C1.o6.fg
atggtgcagtacggcgacgacacctacgacgaggagagagctgtcgagaagctcttccgctgcgtccctgagaagtacaggcagatcgctcgctcgatcgaatctctgctggacctctccacgatgtcgatcgaggaggcgttaggtcgcctcaaggtcgtcgatggtgatgagccacagcctctctcggggcccatcaccatcggcgggaagctccatctcactcgggagcagtgggaggcctctcagggtgacgggaggaagggggagtcatcttcctcgacaggcggccgtaagccgcgcaaggtgcggggaggtgtccagctacggtgggcgcgaagacgtgccgagggtggcgcccgcagaggcgcccagggcgttgccaccggcaaccacaagccggcacgagacgacgcctgccgcaactgtggcaagcttggccattgggccaaagactgtcgacagccacgacgcggccaggcccacgtcgcacgggtggaggaggaagagccggctctgctcctggctcacgcaagcatcgaactacctccagcggcaccggccgcagcggctttcctccaccttgatgagccgaaggtactcgtctccctctgcaacggctccagcaacgacaaggctgatgggtggtacctcgacaccggcgccacccatcacatgaccggccgacgggagttcttcaccgagttcgactccagcgtccgaggctccgtcaagttcggggacgcctccggcgtggagatcaagggtgttggctccgtcaccttcaccgccaagtccggtgagcataggctgctcaccggagtctactacatccccacgttgaggaattctatcatcagcgtgggacagctggatgagaacggctcacgcgtgttggttgaggacggactcatgaggatttgggatcgccgtcgtcaaaaaaatgccaaggtaaccggaggcactaatcgactctacatcctcagcgcgcaggtcgcacaaccagtttgcctcgccgctcgtcgggacgacgaggcgtggcagtggcacgagcgcttcgggcacctccacttcgaggccctgaagcagctcagtgccaaggagatggtgcgaggcatgccgtgccttgaccatgtggagcagctctgcgacgtctgcgtggtgacgaagcagcggcggctcccctttccccagcagacgagcttccgagccaaggaacggctcgagctcatgcacggggacttgtgtggcccagtgacaccggccacaccaggaggacgatgttacttcctgctgctcgttgacgacctctcccgctacatgtgggtgatggtcctcggcagcaagggagaggctgcggacgccatcaggcatgcgcaggctgctgcagaggtggagtgcggccgcaagctgcgcgtgctgcgcaccgacaacggcggcgaattcacagcggctgaattcacgtcgtactgcgctgatgagggcattcagcgccactacaccatgccgtatagcccgcagcagaacggcgtcgtcgagcggcgcaaccagacggttgtggggatggctcgggccctcctcaagcagagggggatgccggccatcttctggggggagacggtggtgacggctgcctacatcctcaaccgctcgcctaccaaggccctcgatggtaggacaccgtacgaggtttggcatgggcgcaagccggcggtctcccacctacgggtcttcagctgcctcgcgttcgccaaggagcttggccacatcggcaagctcgacgacaggagcaccccaagggtgttcatcggctacgcgaagggctcgaaggccttccgcatcctcgacccggagacacagcgtgtgcgcactgcgcgcgatgttgtgttcgacgaagggcgagggtgggtatgggacaaggcggtggacgatggttcgactccgacgtacgacgacttcaccgtcgagtacgtctacttcgagggagctgggggagtaggtagctcttcttcaccgagcgtgtctaccccagcccccgaatctccaccgactccgacaccaacacaccctcgggccacgacttcgactacgacgagctcttcgttgacaccaccccagccagtgactccacatgctccagcaccaacagccactcctccaagcacgtctactccgacgccagctcgtgttgagcgcagcccggtggagttcgctactccgctctcccacgacggggagcgcatcgacgcgtaccacgacggcgagcagctacggtaccgtacgatggaggatcttctcggcgaccagccggtgccggtgcctcgcgacctagaggcgcagttgcaccttgcgtgcaacgacggtgagcctcggtcttttgcagaggccgagaaacacgcggcatggcgtgccgcgatgcagtcggagatggacgcggttcaggagaaccgcacctgggagcttgctgacctccctcgtggtcaccgcgcgatcacccttaagtgggtgttcaagctgaagagggatgaagccggagccatcgtcaagcacaaggctcgcttggtggcacgcggtttcgtgcagcaggaggggatcgactacgacgatgccttcgctcccgtggcacggatggagtccgaaggctggggcgtccatcacatggacgtcaagtcggcgtttctgaacgacaacttgaaggaggaggtctacgtgcaccagccgccgggatttgtgatccccggcaaggagggcaagcggggcaatggaggaaatgccttgctggtgggtgtctacgtcgacgacttggtgatcgccggcaccaaggatgcagaggtcgcggcgttcaaggaggagatgaaggccaccttccagatgagtgatctggggcctctctccttctacctggggatcgaagtgcaccaggacgactccgagatcacgcttcgacagaccgcctacgccaagcgcgtcgttgagctggctgggctcaccgattgcaacccagctctcactccgatggaggagagactgaagctgagccgcgacagcacagcggaggaggtggatgctacacagtaccggtgtcttgtggggagccttcgctacctcacccacacacggccggacttggccttctccgtcggctacgtcagtcggttcatgcagcgaccgacgatggagcaccagcaggctgtgaagaggatcatccgctacattgcggggactctcgaccacggtctctactacccgaggtgtcctggcaaggcacacttcgtcgggtacagcgacaacgaccacgccggcgacatcgacaccaacaagagcacgagcaggattctcttcttcctcggcaagtgcctcgttagctggcagtcggacaagcagcaagtggtggccctgtccagctacgaggccgagtacatagcggcctccgccgcttcgacccaggcgctctggcttgctcgactgcttagtgatctcctcggcagagacactggaacggtggagctcagggtggatagcaagtccgctctggccctggcaaagaaccccgtttttcacgaacggagcaagcacatccgggtgaggtaccacttcatccgaagctacttggaggaagggagcatcaaggcgagctacatcaataccaaggaccagcttgcggacttgctcaccaagcctcttgggaggatcaagttcctcgagctctgctccaggatcgggatggcccaacttgcccacaagacgacgcacaagacttag

SEQ ID NO: 15698 - DNA, 5951 bp, Oryza sativa
  unsure (1)..(5951): unsure at all n locations
  Clone ID: TFbOSC34299j.C1.o1.np
atgcttaaattggtaataatttgattagctcctggtttggaatggtatattcctggtttggagatagaactgtgcagccgatgccgcgctacaagcctgagtacttgtttggtgttgagggttttgtccaggagttgcgtactatgtcctttgtcattggatttgggactgcccctttttatgcctagattcgtcatgatcgtcatgaagagaagtgccgagtcaaagttaccttgaacagtaacagtgaagatatcccatcagtgatgttcgaagctggaggaaggaactacatccatgcatgtcaggaagtggcaaggatcgccataggagagctccgtgatcgctacagtgatcagttggccgacactgagtatcgttaccatcctcgtcaaccgcagggaagtgaccgtggcagttaccttgagactgaaggaattgagaatgatgctaccacaagacatttggttgagatgctatgggctatggatgaaagtcgtgcggagactgtgttagcagctcaagatcgtgaagatcggaatcgtggtaagatttgcgagctagaagacaaggtggatcgtttggagaaggaactagccgcattgaagggagaagcaccgccgcagaaggccaggattcgtcttaccgcaaggaagagagctctatttgtccctcgctatcaattggcgccaaaggtccgtgtggtggagaaagaagttgccccagcagatcctccgatcatcatcataagtagtgatgaagaagaagaatccaagcgcaaccattccaagattgagtgggtagcaactcaagatgatgaagacgagccgaacgagccttcaatcgaccttcgatgctcggaagaacaagacaacaggaatggtcccaatctcaacaaccccaataacaataacaatggagagaatccaacccttgctcaagttcttgctcaacagactcagcttatgaacatgatgatgcagcaacttcagaaccagcagaaccaaggaaataaccatgcaccccctcagaataagttagcagaatttcttcgtgtaaggccgcctgttttctctagtaccactaatcctgttgaagctggcgattggttgcatgccatagagaagaagttggatttgcttcagtgcactgatcaggagaaggtctcatttgcatcacatcagttgcatggccctgcctctgaatggtgggatcacttccgcctgaataggactactgctgaacctatcacttggcttgaattcaccgctgctttccggaagacacatataccatcgggagtggtgtctctcaagaagaaggagttcaggtcgctcactcaaggatctcgctctgttacggagtatttgcacgagttcaatcgtctagctcgttatgctccggaagatgtacgcaatgatgaagagcgtcaagagaagttcttggaaggacttaatgatgagctttcttacccactcatgactggagattatcatgatttccagaagttagtggataaggctattcgtcaggaggacaagtataaccgcatggagcagaagaaacgccggattgctcacttcaaggcacaacaggggagtnnnnnnnnnnnnnnnnnnnntttaggaccccagtccatgccacaaggaggttcttcgtctgttgttcgtccgcagcgttagttcttcaacaacaatgctggcaataacatccgcaatcaagctccacgtcctgttgcagcttcgacacagcaacaacctgccaagagggagcaaggcagcaagcctatggtatgcttcaactgtggagacccaggacattatgctgacaagtgtccgaagccccgacgcgtgaaggttgtccctgcccagagcaactctgctgtaccagcatcaaaggcccgtgtcaatcatgttgcagctgcagaagctcaagatgctccagatgtgattttgggtacgttccttgttaactcagttcctgcaacagtacttttcgattctggtgctacacattcatttctatctatgagttttgcgggaaatcatgggatggaagtagaagatcttagacgtcctttgatggttagtaccccaagcaatcaagcactctctttgcaacgtagcccctatgtcagaatagaaattcaaggggtaccatttctggccaatcttatattgttagaatccaaagaccttgatgtcattctagggatggactggttagctagacataaaggtgtgatagactgtgctaacagaaaagtaactctcaccagcaatgatggtcgagttgtaactgttcatgcattgtcttctgagtttttaaggtcaagactgaaccagataactttggaagagattcctatagtccgggagtatcctgatgtgttcccagatgatttacctggtatgccgcctaaaagggatatagagttcagaatagatttggtacctggaacaactccgatccataagagaccttatagaatggtagccaatgagttggcagaagtcaagaggcaagtagatgatttgcttcagaaaggatacatcagaccgagttcatctccatggggagctccggttattttttgtggaaaagaaagatcatacccagaggatgtgtgtggactatcgtgcattaaatgatgtgactattaagaataagtacccgctacccagaattgatgatttgtttgatcagcttaaaggtgccaccgttttctccaagatagatcttcgatcagggtatcaccagttgaggatcaaagagtacaggttgttcgaatgtactgttatgtcttttggacttaccaatgcccccgctttcttcatgaacttgatgaataaagtgtttatggaatacctagacaagtttgtggtggtctttattgatgacattcttatctactctaagaccaaagaagagcatgaagaacatcttcgccttgcattggaaaagttatgagaacatcaactgtatgctaagtttagcaagtgtgaattttggttgtctgaagtgaagttccttggtcacgtcatctcagcaggaggagttgccgttgatcctagtaatgtggaatccgtaaccaactggaaacaaccaaagacagtttcagagatccgcagtttcctaggcctcggcaggatattatcggaggtttatagagaatttttccaagattgctaagcccatgacacgactgcttcagaaagatgtgaagtacaagtggtcagaagaatgtgagcagagttttcaagagttgaaaagtcgcttgatatcagctcctattttgattttgcctgatccaaatgagggtggccaactgtattgcgatgcatccaaactggggttacgttgtgttctgatgcaagatgggaaggtggttgcctatgcatctcgtcagttacgtccgcatgagaaaaactaccctactcatgatcttgaattggctgcagtagttcatgcgttgaagatttggcgtcattatcttttcggtactcgtacagaggaatttgaaagattgaatttgggaattgtcagtataggtttcgttgcagccttagaagcgaagcccactctaattgatcaagttagagaagctcaaactaatgatcctgatatccaagaaattaagaagaatatgagaagaggaaaagctattggtttcttggaggatgagcacggaactgtatggttgggtgaaagaatctgtgtccccgacaacaaagatttaaaagatgcaattctgaaagaagctcatgatactttatactccatacaccctggtagtactaagatgtactaggatctcaaggaaaggttttggtgggcaagtatgaagcgtgaaatcgcagaatacgtagcagtatgtgatgtttgtcagcgagtcaaggcagaacatcagaaacccgccggtttgttgcagccttcaaagattcctgaatggaaatgggaagaaatcggtatggattttatcactggtttgcccagaacgtcattaggccaggactctatttgggtgatagtcgatagacttactaaagtggcacacttcattccggtaaagacaacttattccggaagtcgcttagcggaattgtatatggcaaggattgtgtgtttgcatggcgttcctaagaagatagtgtctgatcgaggtagtcaatttacttcaaatttttggaagaaacttcaggaagagatgggttctaagctgaactttagtactgcttatcatccgcagacagacggacaaactgaaagggtgaatcagattttggaagacatgttgagagcttgtgctttagatttcggtggaagttgggataagaatctaccttatgcagaattttcatacaacaacagttatcaagctagtcttcagatggctccttacgaagcactgtatggtcggaagtgccgcactccgcttttgtgggatcaaacgggagaacgtcaggttttcgggacggatatcgtaagggaagcagaagaaaaggtaaagatcattcaagaaagattgcgtgtggctcagtcgcgtcataagagttatgccgacaatcgccgcagagatttgagttttgaagaaggagattatgtgtatcttcgtgtcacgcctctacggggagttcatcgttttcataccaaaggaaaattggcactgcgttttgtgggaccttataagattgtcagtagaagaggagaggttgcttatcagttagagttacctcaatctttggcaggagtccataatgtgttccatgtgtcgcaattgaaaaagtgtttaagggtacctaccgaagaagctaatcttgaacagatagaagtccaagaggatctgacctatgtggagaaaccaatccgtatcttggaaacaaatgagagaaaaaccaggaatcgagttatccgtttttgcaaagtccagtggagtaatcactcggaagaagagtcaacttgggaacgagaagatgaattgaatcgtggaatcgagttcgattcggatcggcctctttccttcaagcccgagctttccttcctcgtcgccggcagccatgggccttcgccttcgcctccgagcccctttaaaagcctccccagtgtctcctccacccgccgccaccctcgccttcgcctctcgtcgtcagagtcgctctagcgccccgtgtgccgccgtcgattcagccgtcgccgtcgctcgggaaggacgtcatcgtggtcgccaagtcgtcgccgtcctcgtccgccgcttcgccatcgtcggagaccgccggagcatcgtcgccgtcgtcaagccgaagaactccgccgtttcctcttcgtcgccggcgccgtccgttgcttctccgccgtcgttttggtcgtcgcgccgccgttcgccggcgagcgtgcgccgcccgagccgtccgctccgccgagccgccgccgccgtcggtgacgtcattgctgacgtcatcaaggtcgtccgccattccgtcgtttccggagagtccgttttcgccggagaagagtttgaagagttccaaggccagcaaggcaagtcacacagatcccaaacaacccgtgatgtgtgccagcgtgtcaaggcagagcaccaacgaccggccggacttctccaacctctccaagtaccagaatggaaatgggatgaaattgggatggatttcatcaccggacttccaaaaacccaaggtggatatgattctatatgggtagttgtggatcggttaaccaaggtagctcgatttattcctgtgaagaccacctatggagggaacaaattagccgagctctacttcgctaggatcacggatggacagaccgagtgtctaaatcagatcctagaagatatgcttcgcgcatgtgtcctagatttcgggaagacctgggataagagtctcccctacgccgagttctcctacaataactgtcgcgtcccaaaacgactc

SEQ ID NO: 15699 - DNA, 2400 bp, Oryza sativa
  Clone ID: TFbOSC400724j.C1.o1.gm
atggtgaacactcgcagcaacaggaatggtcccaatctcaacaaccccaataacaataacaatggagagaatccaacccttgctcaagttcttgctcaacagactcagcttatgaacatgatgatgcagcaacttcagaaccagcagaaccaaggaaataaccatgcaccccctcagaataagttagcagaatttcttcgtgtaaggccgcctgttttctctagtaccactaatcctgttgaagctggcgattggttgcatgccatagagaagaagttggatttgcttcagtgcactgatcaggagaaggtctcatttgcatcacatcagttgcatggccctgcctctgaatggtgggatcacttccgcctgaataggactactgctgaacctatcacttggcttgaattcaccgctgctttccggaagacacatataccatcgggagtggtgtctctcaagaagaaggagttcaggtcgctcactcaaggatctcgctctgttacggagtatttgcacgagttcaatcgtctagctcgttatgctccggaagatgtacgcaatgatgaagagcgtcaagagaagttcttggaaggacttaatgatgagctttcttacccactcatgactggagattatcatgatttccagaagttagtggataaggctattcgtcaggaggacaagtataaccgcatggagcagaagaaacgccggattgctcacttcaaggcacaacaggggagtagtcagaagccgcgtcttactttaggaccccagtccatgccacaaggagcttcgacacagcaacaacctgccaagagggagcaaggcagcaagcctatggtatgcttcaactgtggagacccaggacattatgctgacaagtgtccgaagccccgacgcgtgaaggttgtccctgcccagagcaactctgctgtaccagcatcaaaggcccgtgtcaatcatgttgcagctgcagaagctcaagatgctccagatgtgattttggtccgggagtatcctgatgtgttcccagatgatttacctgaaaggatacatcagaccgagttcatctccatggggagctccgtgaagttccttggtcacgtcatctcagcaggaggagttgccgttgatcctagtaatgtggaatccgtaaccaactggaaacaaccaaagacagtttcagagatccgcagtttcctaggcctcgcaggatattatcggaggtttatagagaatttttccaagattgctaagcccatgacacgactgcttcagaaagatgtgaagtacaagtggtcagaagaatccgtcgccgtcgctcgggaaggacgtcatcgtggtcgccaagtcgtcgccgtcctcgtccgccgcttcgccatcgtcggagaccgccggagcatcgtcgccgtcgtcaagccgaagaactccgccgtttcctcttcgtcgccggcgccgtccgttgcttctccgccgtcgttttggtcgtcgcgccgccgttcgccggcgagcgtgcgccgcccgagccgtccgctccgccaagccgccgccgccgtcggtgacgtcattgctgacgtcatcaagatggccggcagcgtcagccgtcgtggtttggacatgactggcttcgtcttggagctacggggcatgtgcgttgtcctggggtatccgcctggagtggactaccaggccaggccgcttccggagcaggagggtgacgatgcagagccccacgctgcgtgggaggttactgcagtgatcctcactggctctcccgagcggacttcgctggcagtcaccgcgggtggagattccttccccgccgcttgccagaacgccgctctcctcgccatcggcactcttcaccagcgctacccggacgagttgcagcactcgccctaccgctaccaccctcgctgcggaggagcccgcgacttcgccaccttccgggatgctagctcggaggatgacgctaccatcgtgcacctggcgcgcatggtggaggcgtacgacgcggctcgtatcgacttccaacagatggtgcgccgtgggatggtcgagaacaacatgaagatcctggagctgcgtcaggagaatctgcagctgaagaaggacctacacgcgttggaggcgcagctgtgtcagcttaaggtcgcccagggtgaggtctgtcgtcccaagcgccgccgcgtctgccgcagccagaagatcaccgcccgcaagagcacctccaggcccgagcttgttcgtcagtccctggcgtggacctgcttcgtggagacccctcgtgccgagcccgcgcccgtggttccccaggagggggaagcctccggcgttggtagcacggaggatgcgctgttgctcaccttccgtcctggcccgtcgcagcgatag

SEQ ID NO: 15700 - DNA, 4785 bp, Oryza sativa
  Clone ID: TFbOSC401061j.C1.o17.fg
atggtgcgctgcggtggattgtgttgtgcgaggggtactgtcacagctcctttccgagctcctggtttggaatggtatattcctggtttggagatagatctgtacagccggatgccgcgctacaagcctgagtacttgtttggagttgagggatttgtccaggagttgcgtacgatgtcctttgtcaaaggatttgggactgcccctttttatgcccagattcctcatgatcgtcatgaagagaagtgccgtgtcaaagtcaccttgaacagtaatagtgaagatatcccctcagtgatgttcgaagctggaggaagaagctacatccatacatgtcaggaggtggcaaggatcgccataggagagcttcacgatcgctacagtgatcagttggccgacactgagtatcgctaccatcctcgccaaccccagggaagtgaccgtggcagctaccttgagactgaaggaattgagatcgatgctaccacaaggcatttggttgagatgctgtgggctatggatgaaacccgtgcggagactgtgttagcagctcaagatcgtgaagaccggaatcgtggtaagatttgcaagttagaggacaaggtggatcgtttggagaaggaactagccgcattgaagggagaagcaccaccgcagaaggccagaattcgtcttaccgcaaggaagagagctctatttgtccctcgctaccaattggcgccaaaggtccgtgtggtggaaaaagaagttaccccagccccagcggatcctccagtcgtcaatatggtgctcactcacagcaacgggaatggccccaacaacaacaacaataacaacaacaatggagagaatcctacacttgcccaagttctggctcaacaggcacagctcatgaacatgatgatgcagcaactccagaaccagcagaaccagggaaataaccatgcacctccccagaacaagttagcagaatttcttcgtgtgaggccgcctactttttctagcaccactaatcctgttgaagctggtgattggctgcatgccatagagaagaagttggatttgcttcaatgcactgatcaggagaaggtctcatttgcatcacaccagctgcatggccctgcctctgaatggtgggatcacttccgcctgaataggactactgctgaacctatcacttggcttgagttcaccgctgctttccggaagacgcatataccatcgggagtggtgtctctcaagaagaaggaattcaggtcgctcacccagaggtctcgctctgttacggagtatctgcacgagttcaatcgtttggctcgttatgctccggaagatgtacgcactgatgaagagcgccaggagaagttcttggaaggacttaatgatgagctttcttactcactcatgactggggattatcatgatttccagaagttagtggataaggctattcgtcaagaggacaagtacaaccgcatggagcagaagaaacgccggattgctcaattcaaggcacaacaggggaatagtcaaaggccgcgtcttactttaggaccccagtccatgccacagggaggttcttcgtctgttgttcgtccgcaacgtcagttcttcaacaacaatgcgggcaacaacatccgcaatcaagctccacgccatgttgcagcttcgacacagcaacaacctgccaagaaggagcaaggcagcaagcccatggtgtgtttcaactgtggagacccaggacattacgctgacaagtgtccgaagccccgacgcgtgaaggttgtccctacccagagcaactctaccgtaccagcatcaaaggcccatgtcaatcatgttgctgctgcagaagctcaaggtgctccagatgtgattttgggtacgtttcttgttaactcagttcctgcaacagtgcttttcgattctggtgctacacattcattcttatctatgagttttgcgggaaatcatgggatggaagtagaagatcttagacgtcctttgatggttagtaccccaagtaatcaagtactctctttgcgacgtagcccctccgtcagaatagaaattcaaggagtaccatttctggccaatcttatcttgttagaatccaaagaccttgatgtcatcctagggatggactggttagccagatataaaggtgtgataaactgtgctaacagaaaagtaactctcactagtaatgatggtcgagttgtaactgttcatgcatcgtcttccgagtctttaaggtcaagactgaaccaaataactttggaagagattcctgtagtccgggagtatcgtgatgtgttcccagacgatttacctggtatgccgcctaaaagggatatagagttcagaatagatttggtaccaggaataactccgatccataagagaccttatagaatggcagccaatgagttggcagaagtcaagaggcaagtggacgatttgcttcagaaaggatacatcagaccgagttcatctccatggggagctccagttatttttgtggaaaagaaagatcatatccagaggatgtgtgtggactatcgtgcactaaatgatgtgactatcaagaataagtacccgctacccagaattgatgatttgtttgatcagcttaaaagtgccactgttttctccaagatagatcttcgatcagggtatcaccagttgagaatcaaagaggaagatatacctaaaacagcttttaccactaggtatgggttgtttgaatgtactgttatgtcttttggacttaccaatgcccccgctttcttcatgaacttgatgaataaggtgtttatggaatacctagacaagtttgtggtggtctttattgatgacattcttatctactcccgaaccaaagaagagcatgaagaacatcttcgtcttgcactagagaagctacgagaacatcaactgtatactaagtttagcaagtgtgaattttggttgtctgaagtgaagttccttggtcacgtcatctcagcaggaggagttgccgttgatcctagtaatgtggaatccgtaaccaactggaaacaaccaaagacagtttcagagatccgcagtttcctaggcctcacaggttattatcggagatttatagagaatttctccaagattgctaagcccatgacacgactgcttcagaaagatgtaaagtacaagtggtcagaagaatgtgagcagagttttcaagagttgaaaagtcgcttaatatcagcacccatcttgattttgcctgatccaaagaagggtttccaagtgtattgcgatgcatctaagcttgggttaggatgtgttctgatgcaagatgggaaggtggttgcctacgcatctcatcagttacgtccgcatgagaagaactaccctactcatgatcttgaattagctgcagtggttcatgcgttgaagatttggcgtcattatcttttcggtactcgtacagaggtgtacaccgatcacaagagtttaaaatatatctttactcagccggatctgaacatgagacaaaggagatggttggaattaattaaggattatgacatgggaattcattatcacccgggaaaggctaatgttgtagcagatgctcttagcaggaaaggctattgcaatgctacggaaggacgacagttaccattggaattatgcaaggaatttgaaagattaaatttgggaattgtcagtagaggttttgttgcagccttagaagcgaagcccactctaattgatcaagttagagaagcccaaattaatgatcctgatattcaagaaatcaagaagaatataagaagaggaaaagctatcggtttcttggaagatgagcaaggaactgtatggttgggtgagagaatctgcgtccccgacaacaaagatttaaaagatgcaattctgaaagaagctcatgatactttatactccattcaccctggtagtaccaagatgtaccaggatctcaaggaaagattttggtgggcaagtatgaagcgtgaaatcgcagaatacgtagcagtatgtgatgtttgtcagcgagtcaaggcagaacatcagaaacccgtaggtttgctgcagcctttgaagattcctgaatggaaatgggaggaaatcggaatggatttcatcactggtctacccagaacgtcatcaggccatgactctatttgggtgatagtcgacagacttaccaaagtggctcatttcatcccagtaaagacaacttattctggaagtcggttggcggaattgtatatggcaaggattgtgtgtttgcatggcgtccctaagaaaatagtgtctgatcgaggtagtcagtttacttcaaatttttggaagaagcttcaggaagagatgggttctaagctgaactttagtactgcttatcatctgcagacagacggacaaaccgaaagggtaaatcagattttggaagacatgttgagagcttgtgctttagacttcggtggaagttgggataagaatctaccttatgcagaattttcgtacaacaacagttatcaagctagtcttcagatggcttcttacgaagcactgtatggtcggaagtgccgcactccgcttttgtgggatcaaacgggagaacgtcaagttttcgggacggatatcctaagggaagcagaagaaaagattccgacgttttcggagagtccgttttcgcaggagaagaatttgaagagttccaaggccagcaaggcaagtcacacagatcccaaacaaccctttaagcatgttgatcccatttaa

SEQ ID NO: 15701 - DNA, 4797 bp, Oryza sativa
  unsure (1)..(4797): unsure at all n locations
  Clone ID: TFbOSC4272j.C1.o3.fg
aaattccatgataagctgtcaaacatgagattggtcgacnggnccgggcggccgcaaggggttcgcgttggccgattcattaatgcagctggcacgacaggtttcccgactggaaagcgggcaatgccgcgctacaagcctgagtacttgtttggagttgagggatttgtccaggagttgcgtacgatgtcctttgtcaaaggatttgggactgcccctttttatgcccagattcctcatgatcgtcatgaagagaagtgccgtgtcaaagtcaccttgaacagtaatagtgaagatatcccctcagtgatgttcgaagctggaggaagaagctacatccatacatgtcaggaggtggcaaggatcgccataggagagcttcacgatcgctacagtgatcagttggccgacactgagtatcgctaccatcctcgccaaccccagggaagtgaccgtggcagctaccttgagactgaaggaattgagatcgatgctaccacaaggcatttggttgagatgctgtgggctatggatgaaacccgtgcggagactgtgttagcagctcaagatcgtgaagaccggaatcgtggtaagatttgcaagttagaggacaaggtggatcgtttggagaaggaactagccgcattgaagggagaagcaccaccgcagaaggccagaattcgtcttaccgcaaggaagagagctctatttgtccctcgctaccaattggcgccaaaggtccgtgtggtggaaaaagaagttaccccagccccagcggatcccccagtcgtcaatatggtgctcactcacagcaacgggaatggccccaacaacaacaacaataacaacaacaatggagagaatcctacacttgcccaagttctggctcaacaggcacagctcatgaacatgatgatgcagcaactccagaaccagcagaaccagggaaataaccatgcacctccccagaacaagttagcagaatttcttcgtgtgaggccgcctactttttctagcaccactaatcctgttgaagctggtgattggctgcatgccatagagaagaagttggatttgcttcaatgcactgatcaggagaaggtctcatttgcatcacaccagctgcatggccctgcctctgaatggtgggatcacttccgcctgaataggactactgctgaacctatcacttggcttgagttcaccgctgctttccggaagacgcatataccatcgggagtggtgtctctcaagaagaaggaattcaggtcgctcacccagaggtctcgctctgttacggagtatctgcacgagttcaatcgtttggctcgttatgctccggaagatgtacgcactgatgaagagcgccaggagaagttcttggaaggacttaatgatgagctttcttactcactcatgactggggattatcatgatttccagaagttagtggataaggctattcgtcaagaggacaagtacaaccgcatggagcagaagaaacgccggattgctcaattcaaggcacaacaggggaatagtcaaaggccgcgtcttactttaggaccccagtccatgccacagggaggttcttcgtctgttgttcgtccgcaacgtcagttcttcaacaacaatgcgggcaacaacatccgcaatcaagctccacgccatgttgcagcttcgacacagcaacaacctgccaagaaggagcaaggcagcaagcccatggtgtgtttcaactgtggagacccaggacattacgctgacaagtgtccgaagccccgacgcgtgaaggttgtccctacccagagcaactctaccgtaccagcatcaaaggcccatgtcaatcatgttgctgctgcagaagctcaaggtgctccagatgtgattttgggtacgtttcttgttaactcagttcctgcaacagtgcttttcgattctggtgctacacattcattcttatctatgagttttgcgggaaatcatgggatggaagtagaagatcttagacgtcctttgatggttagtaccccaagtaatcaagtactctctttgcgacgtagcccctccgtcagaatagaaattcaaggagtaccatttctggccaatcttatcttgttagaatccaaagaccttgatgtcatcctagggatggactggttagccagatataaaggtgtgataaactgtgctaacagaaaagtaactctcactagtaatgatggtcgagttgtaactgttcatgcatcgtcttccgagtctttaaggtcaagactgaaccaaataactttggaagagattcctgtagtccgggagtatcgtgatgtgttcccagacgatttacctggtatgccgcctaaaagggatatagagttcagaatagatttggtaccaggaataactccgatccataagagaccttatagaatggcagccaatgagttggcagaagtcaagaggcaagtggacgatttgcttcagaaaggatacatcagaccgagttcatctccatggggagctccagttatttttgtggaaaagaaagatcatatccagaggatgtgtgtggactatcgtgcactaaatgatgtgactatcaagaataagtacccgctacccagaattgatgatttgtttgatcagcttaaaagtgccactgttttctccaagatagatcttcgatcagggtatcaccagttgagaatcaaagaggaagatatacctaaaacagcttttaccactaggtatgggttgtttgaatgtactgttatgtcttttggacttaccaatgcccccgctttcttcatgaacttgatgaataaggtgtttatggaatacctagacaagtttgtggtggtctttattgatgacattcttatctactcccgaaccaaagaagagcatgaagaacatcttcgtcttgcactagagaagctacgagaacatcaactgtatactaagtttagcaagtgtgaattttggttgtctgaagtgaagttccttggtcacgtcatctcagcaggaggagttgccgttgatcctagtaatgtggaatccgtaaccaactggaaacaaccaaagacagtttcagagatccgcagtttcctaggcctcacaggttattatcggagatttatagagaatttctccaagattgctaagcccatgacacgactgcttcagaaagatgtaaagtacaagtggtcagaagaatgtgagcagagttttcaagagttgaaaagtcgcttaatatcagcacccatcttgattttgcctgatccaaagaagggtttccaagtgtattgcgatgcatctaagcttgggttaggatgtgttctgatgcaagatgggaaggtggttgcctacgcatctcatcagttacgtccgcatgagaagaactaccctactcatgatcttgaattagctgcagtggttcatgcgttgaagatttggcgtcattatcttttcggtactcgtacagaggtgtacaccgatcacaagagtttaaaatatatctttactcagccggatctgaacatgagacaaaggagatggttggaattaattaaggattatgacatgggaattcattatcacccgggaaaggctaatgttgtagcagatgctcttagcaggaaaggctattgcaatgctacggaaggacgacagttaccattggaattatgcaaggaatttgaaagattaaatttgggaattgtcagtagaggttttgttgcagccttagaagcgaagcccactctaattgatcaagttagagaagcccaaattaatgatcctgatattcaagaaatcaagaagaatataagaagaggaaaagctatcggtttcttggaagatgagcaaggaactgtatggttgggtgagagaatctgcgtccccgacaacaaagatttaaaagatgcaattctgaaagaagctcatgatactttatactccattcaccctggtagtaccaagatgtaccaggatctcaaggaaagattttggtgggcaagtatgaagcgtgaaatcgcagaatacgtagcagtatgtgatgtttgtcagcgagtcaaggcagaacatcagaaacccgtaggtttgctgcagcctttgaagattcctgaatggaaatgggaggaaatcggaatggatttcatcactggtctacccagaacgtcatcaggccatgactctatttgggtgatagtcgacagacttaccaaagtggctcatttcatcccagtaaagacaacttattctggaagtcggttggcggaattgtatatggcaaggattgtgtgtttgcatggcgtccctaagaaaatagtgtctgatcgaggtagtcagtttacttcaaatttttggaagaagcttcaggaagagatgggttctaagctgaactttagtactgcttatcatctgcagacagacggacaaaccgaaagggtaaatcagattttggaagacatgttgagagcttgtgctttagacttcggtggaagttgggataagaatctaccttatgcagaattttcgtacaacaacagttatcaagctagtcttcagatggcttcttacgaagcactgtatggtcggaagtgccgcactccgcttttgtgggatcaaacgggagaacgtcaagttttcgggacggatatcctaagggaagcagaagaaaagattccgacgttttcggagagtccgttttcgcaggagaagaatttgaagagttccaaggccagcaaggcaagtcacacagatcccaaacaaccctttaagcatgttgatcccatttaa

SEQ ID NO: 15702 - DNA, 5190 bp, Oryza sativa
  Clone ID: TFbOSC900176j.C1.o15.fg
atgggccttcgccttcgcctccgagcccctttaaaagcctccccagtgtctcctccacccgccgccaccctcgccttcgcctctcgtcgtcagagtcgctctagcgccgtgcaaccttgcgccgctgccgccgccgccgctccagccgtgtgccgccgtcgattcagccgtcgccgtcgctcgggaaggacgtcatcgtggtcgccaagtcgtcgccgtcctcgtccgccgcttcgccatcgtcggagaccgccggagcatcgtcgccgtcgtcaagccgaagaactccgccgtttcctcttcgtcgccggcgccgtccgttgcttctccgccgtcgttttggtcgtcgctcctggtttggaatggtatattcctggtttggagatagaactgtgcagccgggatggttgttcagaatggttgggcctatgcaacaggattcgtcatgatcgtcatgaagagaagtgccgagtcaaagttaccttgaacagtaacagtgaagatatcccatcagtgatgttcgaagctggaggaaggaactacatccatgcatgtcaggaagtggcaaggatcgccataggagagctccgtgatcgctacagtgatcagttggccgacactgagtatcgttaccatcctcgtcaaccgcagggaagtgaccgtggcagttaccttgagactgaaggaattgagaatgatgctaccacaagacatttggttgagatgctatgggctatggatgaaagtcgtgcggagactgtgttagcagctcaagatcgtgaagatcggaatcgtggtaagatttgcgagctagaagacaaggtggatcgtttggagaaggaactagccgcattgaagggagaagcaccgccgcagaaggccaggattcgtcttaccgcaaggaagagagctctatttgtccctcgctatcaattggcgccaaaggtccgtgtggtggagaaagaagttgccccagcagatcctccgatcatcatcataagtagtgatgaagaagaagaatccaagcgcaaccattccaagattgagtgggtagcaactcaagatgatgaagacgagccgaacgagccttcaatcgaccttcgatgctcggaagaacaagattttcccccggtttctcttcttgtgccctatccatgccagatggtgaacactcgcagcaacaggaatggtcccaatctcaacaaccccaataacaataacaatggagagaatccaacccttgctcaagttcttgctcaacagactcagcttatgaacatgatgatgcagcaacttcagaaccagcagaaccaaggaaataaccatgcaccccctcagaataagttagcagaatttcttcgtgtaaggccgcctgttttctctagtaccactaatcctgttgaagctggcgattggttgcatgccatagagaagaagttggatttgcttcagtgcactgatcaggagaaggtctcatttgcatcacatcagttgcatggccctgcctctgaatggtgggatcacttccgcctgaataggactactgctgaacctatcacttggcttgaattcaccgctgctttccggaagacacatataccatcgggagtggtgtctctcaagaagaaggagttcaggtcgctcactcaaggatctcgctctgttacggagtatttgcacgagttcaatcgtctagctcgttatgctccggaagatgtacgcaatgatgaagagcgtcaagagaagttcttggaaggacttaatgatgagctttcttacccactcatgactggagattatcatgatttccagaagttagtggataaggctattcgtcaggaggacaagtataaccgcatggagcagaagaaacgccggattgctcacttcaaggcacaacaggggagtagtcagaagccgcgtcttactttaggaccccagtccatgccacaaggagcttcgacacagcaacaacctgccaagagggagcaaggcagcaagcctatggtatgcttcaactgtggagacccaggacattatgctgacaagtgtccgaagccccgacgcgtgaaggttgtccctgcccagagcaactctgctgtaccagcatcaaaggcccgtgtcaatcatgttgcagctgcagaagctcaagatgctccagatgtgattttgggtacgttccttgttaactcagttcctgcaacagtacttttcgattctggtgctacacattcatttctatctatgagttttgcgggaaatcatgggatggaagtagaagatcttagacgtcctttgatggttagtaccccaagcaatcaagcactctctttgcaacgtagcccctatgtcagaatagaaattcaaggggtaccatttctggccaatcttatattgttagaatccaaagaccttgatgtcattctagggatggactggttagctagacataaaggtgtgatagactgtgctaacagaaaagtaactctcaccagcaatgatggtcgagttgtaactgttcatgcattgtcttctgagtttttaaggtcaagactgaaccagataactttggaagagattcctatagtccgggagtatcctgatgtgttcccagatgatttacctggtatgccgcctaaaagggatatagagttcagaatagatttggtacctggaacaactccgatccataagagaccttatagaatggtagccaatgagttggcagaagtcaagaggcaagtagatgatttgcttcagaaaggatacatcagaccgagttcatctccatggggagctccggttattttttgtggaaaagaaagatcatacccagaggatcttaaaggtgccaccgttttctccaagatagatcttcgatcagggtatcaccagttgaggatcaaagaggaagatatacctaagacagcttttaccactaggtacaggttgttcgaatgtactgttatgtcttttggacttaccaatgcccccgctttcttcatgaacttgatgaataaagtgtttatggaatacctagacaagtttgtggtggtctttattgatgacattcttatctactctaagaccaaagaagagcatgaagaacatcttcgccttgcattggaaaacaagtgtgaattttggttgtctgaagtgaagttccttggtcacgtcatctcagcaggaggagttgccgttgatcctagtaatgtggaatccgtaaccaactggaaacaaccaaagacagtttcagagatccgcagtttcctaggcctcgcaggatattatcggaggtttatagagaatttttccaagattgctaagcccatgacacgactgcttcagaaagatgtgaagtacaagtggtcagaagaatgtgagcagagttttcaagagttgaaaagtcgcttgatatcagctcctattttgattttgcctgatccaaagaagggtttccaagtgtattgcgatgcatccaaacttgggttaggttgtgttctgatgcaagatgggaaggtggttgcctatgcatctcgtcagttacgtccgcatgagaaaaactaccctactcatgatcttgaattggctgcagtagttcatgcgttgaagatttggcgtcattatcttttcggtactcgtacagaggtatatatcgatcacaagagcttaaagtatatctttactcagtcggatctgaacatgagacaaaggagatggttggaattaattaaggattatgacatgggaattcattatcacccgggaaaggctaatgtagtagcagacgctcttagcaggaaaggctattgcaatgctacggaaggacgacagttgccattggaattatgcaaggaatttgaaagattgaatttgggaattgtcagtataggtttcgttgcagccttagaagcgaagcccactctaattgatcaagttagagaagctcaaactaatgatcctgatatccaagaaattaagaagaatatgagaagaggaaaagctattggtttcttggaggatgagcacggaactcgagtcaaggcagaacatcagaaacccgccggtttgttgcagccttcaaagattcctgaatggaaatgggaagaaatcggtatggattttatcactggtttgcccagaacgtcattaggccaggactctatttgggtgatagtcgatagacttactaaagtggcacacttcattccggtaaagacaacttattccggaagtcgcttagcggaattgtatatggcaaggattgtgtgtttgcatggcgttcctaagaagatagtgtctgatcgaggtagtcaatttacttcaaatttttggaagaaacttcaggaagagatgggttctaagctgaactttagtactgcttatcatccgcagacagacggacaaactgaaagggtgaatcagattttggaagacatgttgagagcttgtgctttagatttcggtggaagttgggataagaatctaccttatgcagaattttcatacaacaacagttatcaagctagtcttcagatggctccttacgaagcactgtatggtcggaagtgccgcactccgcttttgtgggatcaaacgggagaacgtcaggttttcgggacggatatcgtaagggaagcagaagaaaaggtaaagatcattcaagaaagattgcgtgtggctcagtcgcgtcataagagttatgccgacaatcgccgcagagatttgagttttgaagaaggagattatgtgtatcttcgtgtcacgcctctacggggagttcatcgttttcataccaaaggaaaattggcactgcgttttgtgggaccttataagattgtcagtagaagaggagaggttgcttatcagttagagttacctcaatctttggcaggagtccataatgtgttccatgtgtcgcaattgaaaaagtgtttaagggtacctaccgaagaagctaatcttgaacagatagaagtccaagaggatctgacctatgtggagaaaccaatccgtatcttggaaacaaatgagagaaaaaccaggaatcgagttatccgtttttgcaaagtccagtggagtaatcactcggaagaagagtcaacttgggaacgagaagatgaattgaagtcagctcatccgtatctgttcgccagttcttccgaatctcgaggacgagattctgtttaa

SEQ ID NO: 15703 - DNA, 2527 bp, Oryza sativa
  Clone ID: TFbOSC400155j.C1.o1.np
ccggttcggtttacgcgggcgccctgatcaggcgatcgtctggtcgaggtgtatatgcatatgaccgatgctaaggagttgtgggatgtactgaatactaaattcggtgctactgatgctagcaatgatctatatatcatggagcagtttcatgactacaagatgactgacaaccgttctgtagtcgaacaggctcatgagatataaaccatggctaaggaactcgaactccttaagtgtgtcttacccgacaaatttgtggccgggtacattattgcgaaactacctccatcatggagaagtttcggtactgcactcaaacacaagagacaggaatactccgttaaggggttgatagcatctcttgatgttgaggagaaagctcgggaaaaagacgtcgtgtctaagggcgatggtgggcagtccaatgccaatgttgtgcacaaggcccagaacaagagcaaggggaaatacaaagctcaacagaccaccaacttcaagaagcagaagaagaaaaacaacaatcctaaccaggatgagaggacttgctttgtgtatgggcaacctggtcatctggctagaaagtgtccacagcgtaaggggatgaaggcaccttcagggcagacttctaagtctgctaatgtgaccattggcaacactggagatggaagcgggtatggtaatttacctactgttttttttgttaatcagtctactaattggtgggttgatactggggctaatgtacatgtttgtgctggcatctcattgttttcttcttatcaggtcgcacggggttccaccatcctaatggggaatggtgttggcacggtagatctgaagtttacttcgggaaagatcgtgcagctgaagaacgtgcagcatgtcccttctatcgacaggaatcttgttagtggctcccgtctgactagagacggatttaagttggtttttgagtctaataaaatagtcgtgtctaaacatggatattttattggtaaaggttatgagtgcggagacctgttccgcttttccgtttctgatttctgcaataaatctgtgaaccatatttgtgctagtgtggatgatgaggctaatgtttgacactcacgtttatgtcatattaattttggcttgatgtcttggctttccagcatgtgtttaattcctaagttttccattgtcaaaggttctaagtgccatagttgtgtgcaatcgaagcaacctcgcaagcctcacaaggttgccgaggagataaacttggcaccagtagaactcctacattcagatctttgtgaaatgaatggggtgttgacgaagggtggaaaacgatatttcatgacattgattgatgatgctactagattttgctatgtgtacttgttgaaaatgaaagacgagactctagactattttaaaatttataaggcagaagttgaaaatcaacttgacagaaagataaaaaggcttaggtctaatcgtggtggagagtttttctcgaacgagtttgacttattttgtgaggaacatggcatcatacatgagaggacgcctccctattctcccgaatctaatgggattgttgaaaggaagaaccgcacactgactgacttggtgaatgccatgttagacaccgcgggactacctaaggcatggtggggggagggattgttgatctcgaatcatatgttaaacagagttcctaacagaaatagagaccaaacaccatatgagatatggattgggagaaaaccatcactttcttatttgcgcacatgggggtgtttggcgaaagtcaatgtaccaataacgaagaagcgcaaacttggacctaagactgtggactgtgtctttctgaaatatgctcatcacaacattgcctatagatttttaatagttaaatccgaggtacctgacatgcatgttggtacaattatggagtctcgtgatgctaccttctttgagagctttttcccaatgaaggatacacatagtggttcgagccaaccctctgaaataattcccagttcaatcacaccaccagaacaaattgaacatacacatgaacatgtctctgaggaggatgttagtgaagctcctcgaaggagtaagagacaaaggacggctaagtcctttggtgatgatttcactgtgtacctcgtggataacactcctaagtcaatttcagaagcatatgcatctcctgatgcagactactggaacgaggctgtccgtagtgaaacgggacttgggaggtgacagagcgaccctatgggtgtaaacctgtggggtgcaagtgggtgttcaagaagaagtttaggcctgacggtactactaaaaagtacaaggctcggcttgttgctaagggctatactcagaaagaaggcgaatatttctttgacacttactcacctgttgctagattgaccacaattcgtgtgctactttccctagcagcctcatattgtcttcttgttcatcaaatggacgttaagacagcttttcttaatggagagctggatgagga

SEQ ID NO: 15704 - DNA, 864 bp, Oryza sativa
  Clone ID: TFbOSC12955j.C1.o6.fg
atggctggttttgccgatgcactgaggccggataaatttaccggtgtgcactttaagagatggcagatctgggtcattctgtggctgacagctatgaaatgcttctgggtgagtactggcaagtctatgggcgttcttaatgctgaccagcagaaaaaattcgatgaggccactactctctttatgggatgcattcttagcgtgcttggcgatcgtcttgtcgaggtgtatatgcatatgaccgacgctaaggaattgtgggatgcactgaatactaaatttggtgctactgatgctagcaatgatctgtatatcatggagcagtttcatgactacaagatggctaacaaccgttctgtagtcgaacaggctcatgagatacaaaccatagctaaggaactcgaactccttaagagaaagcattgggaaaaagatgccgcgtctaagggcgatggtgggcagtccactgccaatgttgtgcacaaggcccagaacaagagcaaggggaaatacaaagctcagcagaccaccaacttcaagaagaataagaacaacaacaatcctaatcaggataagaggacttgctttgtgtgtggtcaacctggccatctggccaggaagtgtccacaacgcaaggggatgaaggcacctgcagggcagacctctaattctgctaatgtgaccattggcaacactagagatggaagcgggtatggtcgcacggggttccatcgtcctactggggaatgggtcacatgcttctgttcatggtgttggtacggtagatatgaagtttacttcgggaaagatcgtgcagctgaagaacgtgcagcatgtcccttctatcgacaggaatcttgttag

SEQ ID NO: 15705 - DNA, 4068 bp, Oryza sativa
  Clone ID: TFbOSC24526j.C1.o2.fg
atggctggttttgccgatacattgaggccggataaattcaccggtgtgcactttaagagatggcagatcagggtgagtactggcaaacctgaaggagttcttactgctgaacagcagaagcaattcgaggaagccactactctctttgtgggatgcattcttagcgttcttggcgatcgtctggtcgaggtgtatatgcatatgaccgacgctaaggagttgtgggatgcactgaatactaaattcggtgctactgatgctagcaatgatctgtatatcatggagcaatttcatgactacaagatggctgacaaccgttctgtagtcgaacaggctcatgagatacaaaccatagctaaggaactcgaactccttaagtgtgtcttacccgacaaatttgtggccgggtgcattattgcgaaatttcctccatcttggagaagtttcaatactgcactcaaacacaagagacaggaatactctgttgaagagttgatagcgtctcttgatgttgaggagaaagctcgggaaaaagatgctgcgtctaagggcgatgatgggcagtccagtgccaatgttgtgcacaaggcccagaacaagagcaaggggaaatacaaagctcagcagaccaccaacttcaagaagcagaagaacaacaacaacaatcctaatcaggatgagaggacttgctttgtgtgtggccaacctggtcatctggctaggaagtgtccacagcgtaaggggatgaaggcacctgcagggcagacttctaagtctgctaatgtgaccattggcaacactggagatggaaacgggtatagtaatttacctactgttttttcagttaatcagtctaataattggtgggttgatactggggccaatgtcgcacggggttccaccgtcctaatggggaatgggtcgcatgcttctgttcatggtgttggcacgttttccattgtcaaaggttctaagtgccatagttgtgtgcaatcaaagcaacctcgcaagcctcacaaggctgctgaggagagaaacttggcacatctagaactcctacattcagatctttgtgaaatgaatggggtgttgacgaagggtggaaaacgatatttcatgacgttgattgatgatgctactagattttgctatgtgtacttgttgaaaacgaaagacgaggctctagactattttaaaatttataaggcagaagttgaaaatcaacttgacagaaacataaaaagacttaggtctgatcgtggtggagagtttttcttatacgagtttgacttattctgtgaggaatatggcattatacatgagaggacgcctccctattctcccgagtctaatgggattgccgaaaggaagaaccgcacactgactgacttggtgaatgccatgttggacaccgcgggactacctaaggcatggtggggggagtcaatttcagaagcatatgcatctcctgatgcagactactggaaggaggctgtccgtagtgaaatggattccattatcgctaacggaacttgggaggtgacagagcgaccctatgggtgtaaacctgtggggtgcaagtgggtgttcaaaaagaagctgaggcctgacagtaccattgaaaagtacaaggctcggcttgttgctaagggctatactcaaaaagaaggtgaagatttctttgacacttactcacctgttgccagattgaccacaatttgtgtgctactttccctagcagcctcacatggtattctcgttcatcaaatggacgttaagacagcttttcttaatggagagctggatgaggagatctatatggatcaacctgatgggtttgtagttgaaggtcaagaagccaaggtgtgcaaattgttgaagtctttgtatagtctgaaacaagctcctaagcaatggcatgagaaatttgatagaacattgacatctgcatgcttcgcagtcaatgagacagataaatgtgtatactatcgccatggtgggggtgagggagttattttgtgcttgtatgttgatgacatactgatatttaggacaaatcttgaggtgataaatgaggttaaatcattcttgtctcaaaaatttgatatgaaggatttgggagtagctgatgttatcctaaacatcaagctaattagaggtaagaatgggattacactcttgcagtcccattatgtggagaagatcttgaatcactttggctacattgatagtaagccttctccaacgccttatgatcctaacttattgcttcgcaagaacaagagaattgctaggaatcaactggaatactcccaaatcattggctcgctgatgtacctggctagtgcaactaggcctgatatctcctttgctgtgagcaagttgagccggtttacctctaatccaggagatgatcactggcgtgcgcttgagcgagtaatgcgctatctgaaaggtactatggaattggggcttcactattctgggtaccctgcggtactggaaggatatagtgattctaactggatctctgatgtggacgagatcaaagccactagtgggtatgtcttcacactaggtggtagtgctgtttcgtggaggtcttgcaaacagaccattttgacaaggtcaaccatggaagcagagttaacggcactggatactgctactgttgaggcagaatggctgcgtgatctattaatggatctgcctattgttgaaaaaccggtgccggctatccttatgaactgtgacaatcaaacggtaattgtcaaagtgaatagttctaaggataatatgaaatcgtctagacatgtgaaaagacgattgaagtctgtcaggaagttgagaaactccggagttataacgttggattacatccaaacaactagaaacctggcagatcctttcacgaagggactatcacgaaatgtgatagacaatgcatcgaaggaaatgggtttgagacccatgactgcggtcactgcgggcgggcgttggcggcacacgcggcagatcattccaaaagaatttgtgcagcgtttaaagggtgacatccctggagaaatccaactggaaacacgtaacagaaacagtcacactgttagagttgacaagacccaagaaaaggttatctttacagagggatgggcacaattcgtcaaaacctttgatctgcagatgggtgactccatgatgttcagattcaatggaaattctcagtttgatgtcattatagttgatcaaattggccgcgagaaagcatgttctgctgttgtggatgattctcagaatcctaatgtgcaagaaaggcgtgtagatgctactgaaacattgaacagttcgcgcgctcattctcagcccatgccaatgcagtcaactactgaaactgtgaaccattcacatgctcgtccttgtcccatgcatactgctgttgattgcatgcccctttctcatgctcatcctcaacccatgccgatgcaattccctaccgaaactgtgaaccattgtcatgctcctactggtcccatggaaatgccacttgaaaacgttgccctttctcatgctcatgctaggcccttgcaaatgcagtcacaaccaacggatagattgacacaggtgcaaagaggatattctttgtcctctaaagatcaggattgcagagtaggtgttatacctgatcccatcatcgggcaaaagaccatactaagtcgagttcaggtgaatgtggtgaagcgcaagatccaaaatattggttctcaaattccaatctttgtatctgtcattggaaagaacaacgcctctggaagaatatcctctctaagtatcgccaaccgatatgttgataattaccttcaagacgagaaaactatccgtctttcgcgtcttggggacaagtggaacatcaggctttctgattcgagtggtaacagaaggatggttggtggatgccgaaagtttgcggaagacaatgatgttggagtgggtgatatctgcctgttcgagctgttgaagaatcataaatgcacaatgaaagttcatatcatcagggcaaaggatatctgttaa

SEQ ID NO: 15706 - DNA, 299 bp, Oryza sativa
  Clone ID: TFbOSC32480j.C1.o1.hg
aagaacaacaacaatcctaaccaggatgagaggacttgctttgtgtgtgggcaacctggtcatctggctaggaagtgtccacaacgcaaggggatgaaggcacctgtagggcagacttctaagtctgctaatgtgaccattggcaacactggagatggaagcgggtatggtcgcacggggttccaccgtcctaatgggctaggtcacatgcttctgttcatgctgaagaacgtgcagcatgtcccttctatcgacaggaatcttgttagtggctcccgtctgactagagacggatttaa

SEQ ID NO: 15707 - DNA, 8214 bp, Oryza sativa
  Clone ID: TFbOSC400022j.C1.o2.fg
atggctggttttgccgatgcactgaggccggataaatttaccggtgtgcactttaagagatggcagatcaagatcactctgtggctgatagctatgaaatgcttctgggtgagtactggcaagcctatgggcgttcttaatgctgatcagcagaaagaattcgatgaggccactactctctttgtgggatgcattcttagcgtgcttggcgatcgtctggtcgaggtgtatatgcatatcaccgatgctaaggagttgtgggatgcactgaatactaaattcggtgctactgatgctagcaatgatctgtatatcatggagcagtttcatgactacaagatggctgacaaccgttctgtagtcgaacatgctcatgagatacaaaccatggctaaggaactcgaactccttaagtttcggtactgcactcaaacacaagagacaggaatacgatccgttgaggggttgatagcgtctcttgatgttgaggagaaagctcgggaaaaagatgtcgcgtctaagggcgatggtgggcagtccactgccaatgttgtgcacaaggcccagaacaagagcaaggggaaatacaaagctcagcagaccaccaacttcaagaagaaaaacaacaacaacaattctaatcaggatgagaggacttgttttgtgtgtggtcaacctggccatctggccaggaagtgtccacaacgcaaggggatgaaggcacctgcagggcagacctctaagtctgctaatgtgaccattggcaacactggagatggaagcgggtatggtaatttacctactgttttttcagttaatcagtctactaattggtgggttaatacaggggccaatgtcgcacggggttccaccgtactaatggggaatgggtcacatgcttctgttcatggtgttggcacggtagatctgaagtttacttcgggaaagatcgtgcagctgaagaacgtgcaacatgtcccttctatcgacaggaatcttgttagtggctcccgtctgactagagacggatttaagttggtttttgagtctaataaagtagtcgtgtctaaacatggatattttatttgtcaaggtcatgagtacagaggcctgttccgcttttccctttctgatttctgcaataagtctgtgaaccatatttttggcagtgtggatgatgaggctaatgcagaagttgaaaatcaacttcacagaaagataaaaagacttaggtctaatcgtggtggagagtttttctcaaacgagtttgacttattctgtgaggaacatggcattatacatgagaggacgcctccctattctcccgagtctaatgggattgctgaaaggaagaaccgtacactgatcgacttggtgaatgccatgttggacaccgcgggattacctaaggcatggtggggggaggcattgttgacctcgaatcatgtgttaaacagagttcctaacagaaataaggacaaaacaccatatgagatatggattgggagaaaaccatcactttcttacttgcgcacatgggggtgcttggcgaaagtcaatgtaccaataacgaagaagtgcaaacttggacctaagactgtggactgtgtctttctgggatatgctcaccacagcattgcctatagatttttaatagttaatctgagttcaatcacaccaccagaacaaactgaacatacacatgaacatgttacagaggaggatgacagtgaagctcctcgaaggagcaaaagacaaaggacggctaagtcttttggtgatgatttcactgtgtaccttgtggatgacactcctaagtcaatttcagaagcatacgcatctcctgatgcagactactggaaggaggctgtccgtagtgaaatggattccattatcgctaacgggacttgggaggtgaaaacctgtggggtgcaagtggcctcacatggtcttctcgtttatcaaatggacgttaagatagcttttcttaatggagagctggatgaggagatctatatggatcaacctgattggtttgtagttgaaggtcaagaaggcaaagtgtgcaaattgttgaagtctttgtatggtctgaaacaagctcctaagcaatggcatgagaaatttgacaaaacattgacatttgcaggctttgcagtcaatgagacaaataaatgtgtatactatcgccatggtgggggtgagggagttattctgtgcttatatgttgatgacatactgatatttgggacaaaccttgaggtgataaatgaggttaaatcattattgtctcaaaattttgatatgaaggatttgggagtagctaatgttatcttaaacattaagctaattagaggtgagaatgggattacactcttgcagtcccattatgtggagaagatcttgaatcgctttggctacattgatagtaagccttctccaacaccttatgatcctaacttgttgcttcgcaagaataagagaattactaggaatcaactagaatactcccaaatcattggctcgctgatatatctggctagtgcaactaggcctgatatctcctttgctggatatagtgattctaactggatctctgatgtggatgagatcaaagccactagtggatatgtctttacactgggtggtggtgctgtttcgtggaggtcttgcaaacagactattttgacgaggtcaaccatggaagcagaactgacggcactggatactgctactgttgaggcagaatggctgcgtgatctattaatggatctgcctattgttgaaaaaccggtgccggctatccttatgaactgtgacaatcaaacggaaaattcggatttgtttagttttggaaacattccgaaaaatccgatggatcggcaatggatgtacgctgaccggcggtccaaagagtttattgacggcgtgcactattttttgagagtggccgaagctaacaggcaaaggggttttatttgttgtccatgcaataagtgtaagaatcagaaggagtattctgcatccaggactatttatttccacttgtttgagtcggggttcatgccaagctataattgttggacatcccacggagagcaaggtgttgaaatggaagaagatgaagtggaagacgacaatattccggactttgctcagtatgatggatttgaagaaaatcaaacgggcgaggaggaaatagctgctgatggtaacgacattgcggatgatcttggtcagatgttgcaggacgccagggaggactgcgaaagtgaaaaggaggcccataaattggacaagatgttggaggaccacagaacttcgttgtacccaggttgcgagcaggggcacaaaaagttggataccactctggagttcttgcaatggaaggcaaaaaatggggttagtgccaaggcatttggcgatttattgaaactcgtcaagaacattcttccggggggaaacaaattgcccgagacaacgtacgaggctaagatagtctgcccgttaggactggaagttcataagattcacgcatgtccgaacgattgtatcctatatcgcggtgaggagtatgagaacctagaagcatgccctgtttgcaaagcactacgatacaagattagacgagacgatccaggagaagttgacgggcagctaacaaagaagagaattcctgctaagtggcgaaacatcgacagaaaatttaaagaatttggaaaggatgcacgaaacatacggtttggtttgagtacggatggcatgaatccttttggagagatgagcagcggccatagcacttggcccgttacgatgtgtatctacaacctctccccctggctatgcatgaagaggaagtacataatgatgccgattattattcaaggccccaagcaacctggtaacgacatcgatgtgtacctaagaccactggtcgaagatcttaaacagttgtggaagaaggaaggtgtccccgtgtgggacgaggacaaacaggaggagtttaacctacgagcgctgctgttcgtaaccatcaacgattggcctgcacttagcaacctatccggacagtccaacaaggggtacaaggcttgcactcactgtatggatgaaacagaaagtacgtatcttaagcactgtaggaaggttgtatacatgggtcatcgtcgattccttgcagcaaaccacccggtacggaagaaaggcaagcacttcaaacataaggccgaccaccgtatgaagcctaaacatcacagcgggaaaacagtgtttgctatgattaaagatcttaaagtagtgttcggaaaggggcctggaagccagcctatagagagcgaagatagtcacgcggcgatgtggaaaaagaactctatattttgggagttaccatatcgggaattcttggacgtacgccacgcaatcgacgtgatgcacctcactaagaacctttgcgtaaaccttcttggcttcctaggtgtatacggaaagtcaaaagatacactggaagcacgtaatgatctgaagcatatggaacaacgcggcgaccttcacccggaaccaaaggagaaaggaagccattacttgagtccagccagctacactctaagcaaggcagagaaggaaagtatatttgaatacttggagagcataaaggtaccgtctggatactccacgaatatcaagcgaataataagcatgaaggagaagaagttcacaaacctaaaatctcatgactgtcacgtgttgatgacacaactgctaccagttgtaataaggggtatccttccagaaaatgtccgggcaacaataacaaagctatgtgcattcatgaacgcaatttcgcagaaggtcatcgatccggatagattagaagcccttcagaatgaagtggtgcaatgtctcgtcagttttgagttgatatttctaccttcatttttcaatataatgacgcatctgctttgtcaccttgtgaaagagatccgtattctcaggcctgtgtacctacacaacatgtttcctttcgagaggtacatgggcgttctgaagaagtatgttcgtaaccgtgctcgtccagaggcaagcatcgccaagggttatggaacagaggaggtcatcgaattttgcgcagaatttatcgaagaccttcgcccaatcggggtacctgaatcacgccatgaagggagactacggggaaagggaactctcggaaggaaaagcaataatgacgctccttacatcgaggagcacttggctctagttcgcgccaggaacatcggtaagtccgatgcatggattacatggcatcacattgatactttccccacgtggctacgacaacatctcatgggtaacgagtcaatcaaccaacaacttgccttcctggcgaggggaccgtctgggtcgatcgcgacattccagggatatgagatcaatgggtacacattctacacgagagcccaagacatgaagagcacgaaccaaaacagcgctgttcgtgtcgatgccatgggacacgatgcaacaactgccacgtattacggtgccatcgaggatatatgggaacttgactatggtcctctcaaggttcctttgttctggtgccaacgggttaggttgactggtggaggcataatgattgatgacagtggtatgacaactgttgaccttaacaaggttggatactcggacgaaccttttgtccttgccaatgatgtaacgcaagtctttttcgtgaaggacatgtctagcaaaggaaagaagggcagagggcctaatgagcctaagcgtcaagtggttctcccaggcaaaagaaaaatcgtcggagctgaggacaagactgacgaggattacgatcagttggataggcaaccccctttcacggtgacgattgaccctagcatcctcctatcaaatgaagacaccccttactcacgcagcgatcacaaggagggaacaataatggctgaccgcgatgaggaacagatattgtacgatacaatcgcggagggaagcagccagtactggaatgaagaagaggggaacgaggatccaaatcagtacttgaacgagaaagggaacgtggagagggatgcggaggggaaccagcaggggcacgtggaaagggatgtggaggggaaccaggaggaggaggctagtggtagtcaaccctccgttggacagaagagggcacgcgggcaacgaggtgcagcgaagaagcttgagggtcggcacatcataatggaagtggaagaagatggacgtcctagtgccccggccgtagccgccaagaactatgtacgtcacagcggttgggttgtgcgggataacgtgcctgtcagtacggtgtactggcgaagaacaaggacacgcggagatcatgagagctttgtcctagattcggagaaagagatgctgtggaccataatgctcgagacattcacccttcccgcgggtacagaggacaaagtgaaaaggtggactctgaagaaaatggcagaacagtttcagagcttcaagggagagctgtacaagaaatatatcctgaaggggcagacaccgaacttcgacacattcccaaagctaagggatcactgggacgagttcgttgcatataagacaggtgaacaagggcaggcgatgatggaaagaaacaaagaaaatgccgccaagaagaagtaccatcactacttggggtcaggaggctatagcgtcacgatgccgaagtgggaggagatggaggctatcttgattgagaggggtatcgaaccggcaaccgccaattggccggaacgatcgaagttctggtactatgctcatggtggaacgctcaacccagctgatggctcactggtcttcggcgatcagatacgagaggctgcgcgacgactaacagatgcagtggaagcctcctctcagggcacgttccgatcggacagatatagggacgagctgacactcgccctgagtcggatgaggagtaagagagataccgaggcgaagattgcagatctagagttccgggtatcgagctacgaactcagcatgcaagaggaggtgacaaggaaggttgatgaacgcatagccgcacatcggtcccatgatccccagccgaccattcctcctgcaatgatgagcccgtcaggaaaccgtagcagctgtgccttaacggggcaggtaggattacagagcatggacgccattcaaacacaggacgaatcgacctgtcccgttgatgacatcactcagcagacaccatctgagctgcatattccttacaagaacttatcaataaaggtggcgtcgggcatggccatcccaacggacccttcaggtacttaccactgcaggccgattccagcaggatactcgaaggtcgaagttgagttggtcgaaggcgcatacgaggacctcgagctggattaccctggaggagacggctccagcaccgactcctcctcaggatcctgcaccgactcctcctcgggctcctacacctactcctccgcaagctcctcttccggcaccttcaaagtcaagggcccccccccagctccaccgcctgcccacacaagggcaacgaagaaggcgaaagttgacgccgccaagaacaaggacccggggtacgattgcacgcaagaggagcttgacgcttacgttgcatcagaagtcaagagacaattcaagcctcgaagtccagaaaagaagattcctatagaccctagtgtcaggaacttcttcaggggtatgtctgcatctgtcaaggaggccatcaagctatcggactatgagcgaacgctgaagaaagcatcttctggaaagtccaaaccagtccctcagcttggagagcgaccaaaccaggagatcgagccgttggtgaccggtaaagaaatgatgatagaacaatttattactgacaccggtctaactacggatcaattgctaggagtcgcaccaatcgaaaagacggaagtgaaatacatgtacgaactcggtaaaccgcttgtcaagcctgagctgctgcagtccctacccacacaaatgtacaagttccatcagctgtacatggagatgagcgccaccggtagagagatgatcggagcgaggatcagggacacggacttcttgcaaggagatgacattctctggatcaatttcaggggaatcaacgaactataccagctggacgccctcgacatctctattatgagttgctaa

SEQ ID NO: 15708 - DNA, 3399 bp, Oryza sativa
  Clone ID: TFbOSC400667j.C1.o2.fg
atggctcgtcttcctctccgctcgcgtgcgactctccttcgtcgacgcccgcaactgcgagtagttcctgcggagcaaccggtctttccggcacctcggtgctgtgattttactatggctggttttgccgatgcactgaggccggataaattcaccggtgtgcactttaagagatggcatatcagggtcactctatggctgacagctatgaaatgcttctggcagaagcaatttgaggaagccactactctctttgtggaatgcattcttagcgttcttggcgatcgtctggtcgaggtgtatatgcatatgaccgacgctaaggagttgtgggatgcactgaatactaaattcggtgctactgatgctagcaatgatctgtatatcatggagcagtttcatgactacaagatggctgacaaccgttctgtagttgaacaggctcatgagatacaaaccatggctaaggaactcgaactccttaagtgtgtcttacccgacaaatttgtggtcgggtgcattattgcgaaactacctccatcttggagaagtttcggcccagaacaagagaaggggaaatacaaagctcaacagaccaccaacttcaagaagcagaagaagaacaacaataatcctaatcaggatgagaggacttgctttgtgtgtggccaacctggtcatctggctaggaagtgtccacagcgcaaggggatgaagacacctacaagccagacttctaagtctgctaatgtgaccattggcaacactggagatcgaagcgggtatggtcgcacggggttccaccgtcctagtggggaatgggtcacatgcttctattcatggtgttggcacggtagatatgaagtttacttcgggaaagatcgtgcagctgaagaacgtgcaacatgtcccttctatcgacaggaatcttgttatgagtgcggaggcctgttccgcttttccctttctgatttctgcaataaatctgtgaaccatatttgtggcagtgtggatgatgaggctaatgtttggcactcacgtttatgtcatatcaattttggcttgatgtctcggctttccagcatgtttttaattcctaagttttccattgtcaaaggttctaagtgccatagttgtgtgcaatcgaagcaacctcgcaagcctcacaaggctgccgaggagagaaacttggcaccactagaactcctacattcagatctttgtgaaatgaatggggtgttgacgaagggtggaaaacgatatttcatgatgttgattgatgatgctactagattttgctatttgtacttgttaaaaacgaaagacgaggcactagactattttaaaatttataaggcagaagttgaaaatcaacttgatagaaagataaaaaggcttaggtttgatcgtggtggagagtttttctcaaacgagtttgacttattctgtgaggaacatggcatcatacatgagaggacgcctccctattctcccgagtctaatgggattgctaaaaggaagaaccgcacactgactgacttggtgaatgccatgttggacaccgcgggactacctaaggcacggtgggcggaggcattgttgacctcgaatcatgtgttaaacagagttcctaacagaaataaggacaaaacaccatatgagatatggattaggagaaaaccatcactttcttatttgcgcacatgggggtgcttggcgaaagtcaatataccaataacgaagaagcgcaaactgggacctaagtctgtggactgtgtctttctaggatatgctcatcacaacattgcctatagatttttaatagttaaatctgaggtacctgacatgcatgttggtacaattatggagtctcgtgatgctaccttctttgagaactttttcccaatgaaggatgcacatagtagtttgagccaaccctctgaagtaattcccagtccaatcacaccaccagaacaaactgaacatacacatgaacatgtcactgaggaggatgtcagtgaagctcctcgaaggagtaagagacaaaggacggctaagtcctctggtgatgatttcactgtgtacctcatggatgacactcctaagtcaattttagaagcatatgcatctcctgatgcagactactggaaggaggctatccgtagtgaaatggattccattattgctaacaggactttggaggtgacagagcgaccctatgggtgtaaacctgtggggtgcaagtgggtgttcaagaagaagcttaggcctgacggtactattgaaaagtacaaggctcggcttgttgctaaaggctatactcagaaagaaggcgaagatttctttgacacttactcacctgttgctagattgaccacaattcgtgtgctactttccctagcagcctcacatggtcttctcgttcatcaaatggacgttaagacagcttttcttaatggagagttggatgaggagatctatatggatcaacctgatgggtttgtagttgaaggtcaagaaggcaaagtgtgcaaattgttgaagtctttgtatggtctgaaacaggctcctaagcaatggcatgagaaatttgacaaaacattgacatctacaggctttgcagtcaatgaggcagataaatgtgtgtactatcgccatggtgggggagagggagttattctgtgcttgtatgttgatgacatactgatatttgggacaaaccttgaggtgataaatgagttctattatgtggagaagatcttgaatcgctttggctacattgatagtaagccttctccaacaccttatgatcctagcttgttgcttcgcaagaacaagagaattgctaggaaccaactggaatactcccaaatcattggctcgctgatgtacctggctagtgcaactaggcctgatatctcctttgttggatatagtgattctaactggatctctaatgtggatgagatcaaagccactagtggatatgtcttcacactgggtggtggtgctatttcgtggaggtcttgcaaacagatcattttgacgaggtcaaccatggaagcagagctgacggcactggatactgctactgttgaggcagaatggctgcgtgatctattaatggatctgcctattgttgaaaaaccggtgccgggtatccttatgaattgtgacaatcaaacggtaattgtcaaagtgaatagttctaaggataatatgaaatcgtctagacatgtgaaaagacgattgaggtctgtcaggaaattgagaaactccggagttataacgttggattacatccaaacagctagaaacctggcagatcccttcacgaagggactatcacgaaatgtgatagacaatgcatcgaaggagatgggtttgagacccatgtga

SEQ ID NO: 15709 - DNA, 3922 bp, Oryza sativa
  Clone ID: TFbOSC400820j.C1.o1.np
atggctggttttgccgatgcactgaggccggataaattcaccggtgcattttaagagatggcagatcagagtcactctgtggctgacagctatgaaatgcttctgggtgagtactggcaaacctgaaggagttcttactgctgaacagcagaagcaattcgaggaagccactactctctttgtgggatgcattcttagcgttcttggcgatcatctggtcgaggtgtatatgcatatgaccgacgctaaggagttgtgggatgcactgaatactaaattcggtgctactgatgctagcaatgatctgtatatcatggagcaatttcatgactacaagatggctgacaaccgttctatagtcgaacaggctcatgatatacaaaccatggctaaggaactcgaactccttaagtgtgtcttacccgacaaatttgtggtcgggtgtattattgcgaaactacctccatcttggagaagtttcggtactgcactcaaacacaagagacaggaatactccgttgaggggttgatagcgtctcttgatgttgaggagaaagctcgggaaaaagatgctgcgtctaagggcgatggtgggcagtccagtgccaatgttgtgcacaaggcccagaacaagagcaaggggaaatacaaagctcagcagaccaccaacttcaagaagcagaagaagaacaacaataatcctaatcaggatgagaggacttgctttgtgtgtggtcaacctggtcatctggctaggaagtgtccacagcgcaaggggatgaaggcacctgcagggcagatttctaagtctgctaatgtgaccattggcaacactggagatggaagcgggtatggtaatttacctactgttttttcagttaatcagtctactaattggtgggttgatactggggccaatgtacatgtttgtgctgatatctcattgttttcttcttattaggtcgcacggggttccaccgtcctaatgaggaatgggtcacatgcttctgttcatggtgttggcatggtagatctgaagtttacttcgggaaagatcgtgcagctgaagaacgtgcagcatgtcccttctatcgacaggaatcttgttagtggctcccgtctgactagagacggatttaagttggtttttgagtctaataaagtagtcgtgtctaaacatggatattttattggtaaaggttatgagtgcggaggcctgttccgcttttccctttctgatttctgcaataagtctgtgaaccatatttgtggcagtgtggatgatgaggctaatgtttggcactcacgtttatgtcatattaattttggcttgatgtttcggctttccagcatgtgtttaattcctaagttttccattgtcaaaggttctaagtgccatagttgtgtgcaatcgaagcaacctcgcaagcctcacaaagctgccgaggaaagaaacttggcaccactagaactcctacattcagatctttgtgaaatgaaatgggtgttgacaaagggtggaaaacgatatttcatgactttgattgatgatgctactagattttgctatgtgtacttgttgaaaacgaaagacgaggctctagactattttaaaatttataaggcagaagttgaaaatcaacttgacagaaagataaaaagacttaggtccgatcgtggtggagagtttttctcaaacgagtttgacttattctgtgaagaacatggcatcatacatgagaggacgcctccctattctcccgagtctaatgggattgctgaaaggaagaaccgcacactgactgacttggtgaatgccatgttggacactgcgggactacctaaggcgtggtgaggggaggcattgttgatctcgaatcatgtgttaaacagagttcctaacagaaataaggacgaaaccccatatgagatatggattgggagaaaaccatcactttcttatttgcgcacatgggggtgcttggcgaaagtcaatgtaccagtaacgaagaagcgcaaactgggacctaagactgtggactgtgtctttctgggatatgctcatcacagcattgcctatagatttttaatagtcaaatctgaggtacctgacatgcatgttggtacaattatggagtctcgtgatgctaccttctttgaaagctttttcccaatgaaggatacacatagtagttcgagccaaccatctgaaataattcccggttcaatcacaccaccagaacaaactgaacatacacatgaacatgtcactaaggaggatgacagtgaagctcctcgaaggagtaagagacaaaggacggctaagtcctttggtgatgatttcactgtgtacctcgtggatgacactcctaagtcaatttcagaagcatatgcatctcctgatgcaaactactggaaggaggctgtccgtagtgaaatggattccattatcgctaacgggacttgggaggtgacagagcgaccctatgggtgtaaacctgtgggatgcaagtgggtgttcaagaagaagcttagacctgacggtactattgaaaagtacaaggctcggcttgtcgctaagggctacactcagaaagaaggcgaagatttctttgacacttactcacctgttgctagattgaccacaattcgtgtgctactttccctagcagcctcacatggtcttctcgttcatcaaatggacgttaagacagcttttcttaatggagagctggatgaggagatctatatggatcagcctgatgggtttgtagttgaaggtcaagaaggcaaggtgtgcaaattgttgaagtctttgtatggtctgaaacaagctcctaagcaatggcatgagaaatttgacaagacattgacatctgcaggcttcgcagtcaatgaggcagataaatgtgtgtactatcgccatggtgggggtgagggagttattttatgcttgtatgttgatgacatactgatatttgggacaaaccttgaggtgataaatgaggttaaatcatttttgtctcaaaattttgatatgaaggatttgggagtagctgatgttatcttaaacattaagctaattagaggtgagaatgtgattacactcttgcagtcccattatgtggagaagatcttgaatcgctttggctacattgatagtaagccttctccaacaccttatgatcctagcttgttgcttcgcaagaacaagagaattgctaggaatcaactggaatactcccaaatcattggctcgttgatgtacctggctagtgcaactaggcctgatatctcctttgctgtgagcaagttgagccgatttacctctaatccgggagatgatcactggcgcgcgcttgagcgagtaatgcgctatctgaaaggtactgtggaattggggcttcactatactgggtatcctgcagtactggagggttatagtgattctaactggatctctgatgtggatgagatcaaagccactagtggatatgtcttcacactgggtggtggtgctgtttcatgaagatcttgcaaacagaccattttgacgaggtcaactatggaagcagagctgacggcactggatactgctactgttgaggcagaatggctgcatgatctattaatggatctgcctattgttgaaaaaccgacatgtgaaaagacgattgaagtttgtcaggaaattaagaaactctggagttataacgttggattacatccaaacagctagaaacctggcagatcccttcacgaagggactatcacgaaatgtgatagacaatgcatcgaaggagatgggtttgagacccatagcattcttgaaagaactcacctttgtgagcttgattgttggtcgcagtctatggagattttgggtgaatcttctaggaagcttactaaagacctaggagta

SEQ ID NO: 15710 - DNA, 1095 bp, Oryza sativa
  Clone ID: TFbOSC400991j.C1.o14.fg
atggctgacaaccgttctgtagtcgaacatgctcatgagatacaaaccatggctaaggaactcgaactccttaagtgtgtcttacccgacaaatttgtggccgagtgcattattgcaaaactacctccatcttggagaggtttcggtactgcactcaaacacaagagacaggaatactccgttgaggggttgatagcatctcttgatgttgaggagaaagctcgggaaaaagatgccgcgtctaagggcgatggtggacagtccactgccaatgttgtgcacaaggcccagaacaagagtaaggggaaatacaaagctcagcagaccaccaacttcaagaagaagaagaacaacaacaatcctaatcaggatgagaggacttgctttgtgtgtggtcaacctggtcatctggccaggaagtgtccacaacgcaaggggatgaaggcacctgcagggcagacctctaagtctgctaatgtgaccattggcaacactggagatggaagcgggtatgggggcaatgtcgcgcggggttccaccgtcctaatggggaatgggtcatatgcttctattcatggtgttggcacggtaggtcgagccgaaccaactaactgctacagccaaaaatgcaagggcaatttcacattacgaaaatgcagcctccgcctagccgccgaggatgagatccatgccctcctcgccatcatggagctcggcgcattccttcactcactcctcctccgcccggctgccagggatgagatcaatgccttcatgtcggcatggagttcggcgcgctcctccgcttactcggcccctgtctggcaaagcccacttctaataccatcgagttcgacgtgggttccgtcgagtttgatcgacgtgctcgcctccatactcacagaactcatcgtcgggccttgctgccccatcatcaccctcgaccaggcggaggtcaccgaggccttcagggcctttgactgcaagggcaacggcttcatctctgccattgagctcacacgctccatagctgacacggcgacaccgacagcctcatcatccttttatttgactgtgggtcccatcacccactga

SEQ ID NO: 15711 - DNA, 3108 bp, Oryza sativa
  Clone ID: TFbOSC401117j.C1.o5.fg
atggctggttttgccgatgcactgaggccggataaatttaccagtgtgcactttaagagatggcagatcagggtcaatctgtggctgacagctatgaaatgcttctgggtaagtactggcaagcctatgggcgttcttaatgctgatcagcagaaagaattcgatgaggccactactctttttgtgggatgcattcttagcgtgcttggcgatcgtctggtcgaggtgtatatgcatatgaccgacgctacggagttgtgggatgcactgaatactaaatttggtgctactgatgctagtaatgatctgtatatcatggagcagtttcatgtctacaagatggctgacaaccgttctgtagtcgaacaggctcataagatacaaaccatggctaaggaactcaaactccttaagtgtgtcttacctgacaaatttgtggccgggtgcattattgcgaaactatctccatcttggagaggtttcggtactgcactcaaacacaagagacaggaatacttcgttgaggggttgatagcgtctcttgatgttgaggagaaagctcgggaaaaagatgtcgcgtctaagggcgatggtgggcagtccagtaccaatgttgtgcacaaggcccaaaacaagagcaaggggaaatacaaagctcagcagaccaccaacttcaataagaagaagaaaaacaacaatcctaatcaggatgagaggacttgctttgtgtgtggtcaacctggccatctggccaggaagtgtccacaacgcaaggggatgaaggcacctgcaggacagacctctaagtctgctaatgtgaccattggcaacactggagatggaagcgggtatggtcgcacggggttccaccgtcctaatggggaatgggtcacatgcttctgttcatggtgttggcacggtagatctgaagtttacttcgggaaagatcgtgcagctgaagaacgtgtagcatactactggaaggaggatgtccgtagtgaaatggattccattatcgctaacgggacttgggaggtgacagagcgaccctatgggtgtaaacctgtggggtgcaagtgggtgttcaagaagaagctcaggcctgacggtactattgaaaagtacaaggctcggcttgttgctaagggctatactcagaaagaaggcgaagatttctttgacacttactcacctgttgctagattgaccacaattcgtgtgctactttccctagcagcctcacatggtcttctcattcatcaaatggacgttaagacaacttttcttaatgaagagctggatgaggagatctatatggatcaacctgatgggtttgtagttgaaggtcaagaagacaaagtgtgtaaattgttgaagtctttgtatggtctgaaacaagctcctaagcaatggcatgagaaatttgacaaaacattgacatctgcaggctttgcagtcaatgaggcagataaatatgtgtactatcgccatggtgggggtgagggagttattctgtgcttgtatgttgatgacatactgatatttaggacaaaccttgaggtgataaatgaggttaaatcattcttgtctcaaaattttgatatgaaggatttgggagtagctgatgttatcttaaacattaagctaattagaggtgagaatgggattacactcttgcagtcccattatgtggagaagatcttgaatcgctttgactacattgatagtactatggaattggggcttcactattctgggtatcctgcggtactggaggaatatagtggttctaactggatctctgatgtggatgagatcaaagccactagtggatatgtcttcacactgggtggtggtgctgtttcgtggaggtcttgcaaacagactattttgatgaggtcaatcatggaagcagaactgacggcactggatactgctactgttgaggcagaatggctgcgtgatctattaatggatctgcctattgttgaaaaaccggtgccggctatccttatgaactgtgacaatcaaacgataattgtcaaaatgaatagttctaaggataatatgaaatcgtctagacatgtgaaaagacgattgaagtttgtcaggaaattgagaaactccggagttataacgttggattatatccaaacagctagaaacctggcaaatcccttcacgaagggactatcacgaaatgtgatagataatgcatcgaaggagatgggtttgagacccatatctaatgatacgttaatgctattatatatctgtaatgtcatgatttatttatggaatatattaaatcattatatgcctatattctcaacattcaaaagacacgagatagaagcttatgaaaagttcaaaagaagtgcagtggggactgcattgtacattcatccctgcctgtcagaaatttcagagggtgatgctgcagatagggcgagcaacttgacagatgccactgttgacagcttgattgagtctatcatcattaaagatggggtgaaagccaagtttttctttaacattatgtctcttgctaactctgcaggagagaagttgcttgccttcagtcaatatatacttcccatgaaatttttggaaaggttgttggttaagaggctgggctggcatgtagggaaggagattttcatgatatctggtgatactagtgcagacgacagagaagtggcgatggatcagtttaacaactctgccgatgcaaaagttttgtttggttccatcaaggcctgtggagagggaatctcccttgttggtgcatctcgagtcatcattctagatgttcatttgaacccatctgtcacccgtcaagcaatcggacgtgcattcaggcccggacagcagaagaaagtgtttgtgtacaggcttgttgctgctgattctccagaggtgaagttccatgaaactgcattcaagaaagaagttatcccaaagctatggtttgaatggagtgagctctgcactactgaagacttcaaactgaatcaagttgatattgatgactctgaagatgaactattggaggctaatgctattcgccaggatatcaaggctttgtatagaaggatgttacagtag

SEQ ID NO: 15712 - DNA, 3925 bp, Oryza sativa
  Clone ID: TFbOSC401276j.C1.o11.np
atggctggttttgccgatgcactgaggccgaataaattcaccggtgtgcactttaagagatggcagatcagggtcactctgtggctgatggttatgaaatgcttctgggtgagtactggcaaacctgaaggaattcttactgctgatcaccagaagcaatttgaggaagccactactctctttgtgggatgcattcttagcgttcttggcgatcgtctggtcaaggtgtatatgcatatgaccgacgctaaggagttgtgggatgcactgaatactaaattcggtgctactgatgctagcaatgatctgtatatcatggagcagtttcatgactacaagatggctgacaaccgttctgtagtcgaacaggctcatgagatacaaaccatggctaaggaactcgaactccttaagtgtgtcttacccgacaaatttgtggccgggtgcattattgcgaaactacctccatcatggagaagtttcggtactgcactcaaacacaagagacaggaatactccgttgaggggttgatagcgtctcttgatgttgaggagaaagctcgggaaaaagacgccgcgtctaagggcgatggtgggcagtccagtgccaatgttgtgcacaaggtccagaacaagagcaaggggaaatacaaagctcaacagaccaccaacttcaagaagcagaagaagaacaacaacaatcctaaccaggatgagaggacttgctttgtgtgtgggcaacctggtcatctggctaggaagtgtccacaacgcaaggggatgaaggcacctgcagggcagacttctaagtctgctaatgtgaccattggcaacactggagatggaagcgggtatggtaatttacctactattttttcagttaatcagtctactaattggtgggttgatactggggccaatgtacatgtttgtgctgacatctcattgttttcttcttatcaggtcgcacggggttccaccgtcctaatggggaatggatcacatgcttctgttcatgtagttggcacggtagatctgaagtttacttcgggaaagatcgtgcagctgaagaacgtgcaacatgtcccttctatcgacaggaatcttgttagtggctcccgtctgactagagacggatttaagttagtttttgagtctaataaagtagtcgtgtctaaacatggatattttattggtaaaggttatgagtgcggaggcctgttccgcttttccctttctgatttctgcaataagtctgtgaactatatttgtgccagtgtggatgatgaggctaatgtttggcactcacgtttatgtcatattaattttggcttgatgtctcggctttccagcatgtgtttaattcctatgttttccattgtcaaaggttctaagtgccatagttgtgtgcaatcaaagcaatctctcaagcctcacaaggctgccgaggagagaaacttggcaccactagaactcctacattcagatctttgtgaaatgaatggggtgttgacgaagggtggaaaacgatattttatgacgttgattgatgatgctactagattttgctatgtgtacttgttgaaaacgaaagacgaggctctagactattttaaaatttataaggcagaagttgaaaatcaacttgacagaaaaataaaaaggcttaggtctgatcatggtggagagtttttctcgaacgagtttgacttattctgtgaggaacatggcatcatacatgagaggacgcctccctattctcccgagtctaatgggattgctgaaaggaagaaccgcacactgactgacttggtgaatgccatgttggacaccgcgggactacctaacgcatggtggggagaggcattgttgacctcgaatcatgtgttaaacagagttcctaacagaaataaggacaaaataccatatgagatatggattgggagaaaaccatcactttcttatttgcgcacatgggggtgcttggcgaaagtcaatgtaccaataacgaaaaagcgcaaacttggacctaagactgtggactgtgtctttctgggatatgatcatcacagcattgcctatagatttttaatagttaaatccgaggtacctgacatgcatgttggtacaattatggagtctcgtgatgctaccttctttgagagctttttcccaatgaaggatacacatagtggttcgagccaaccttctgaaataattcccagttcaatcacaccaccagaacaaactgaacatacacatgaacatgtctctgaggaggatgtcagtgaagctcctcgaagaagtaagagacaaatgacggctaagtcctttggtggtgatttcactgtgtacctcatggatgacactcctaagtcaatttcagaagcatatgcatctcctgatgcagactactggaaggaggctgtccgtagtgaaatggattccattatcgctaatgggacttgggaggtgacagagcgaccctatgggtgtaaacccctggggtgaaagtgggtgttcaagaagaagcttaggcctgagggtactattgaaaagtacaaggctcggcttgttgctaagggctatactcagaaagaaggcgaagatttctttgacacttactcacctgttgctcgattgatcatattttgtgtgctactttccctagcagcctcacatggtcttctcgttcatcaaatggacgttaagacagcttttcttaatggagagctggatgaggagatctatatggatcaacctgatgggtttgtagttgaaggtcaagaaggcaaagtgtgcaaattgttgaagtctttgtatggtctgaaacaagctcctaagcaatggcatgagaaatttgacaaaacattgacatctgccggctttgcagtcaatgaggcagataaatgtgtgtactatcgccatggtgggggtgagggagttattctgtgcttgtatgttgatgacatactgatatttgggacaaacccttgaggtgataaatgaggttaaatcattcttgtctcaaaattttgatatgaaggatttgggtgtagctgatgttatcttaaacattaagctaattagaggtgagaatgagattacactcttgcagtcccattatgtggagaagatcttgaatcgctttggctacagtgatagtaagccttctctaacaccttatgatcctagcttgttgcttcgcaagaacaaaagaattgctaggaatcaactggaatactcccaaatcattggctcgctgatgtacctggctagtgcaactaggtctgatatctcctttgctgtgagcaagttgagccggtttacctctaatccgggagatgatcactggcgtgcgcttgagcgagtaatgcgctatctgaaaggtaatatggaattggggcttcactatactgggtatcctgcggtactggagggttatagtgattctaactggatctctgatgtggatgagatcaaagccactagtggatatgtcttcatactgggtggtggtgctgtttcgtggaggtcttgcaaacagaccattttgacgaggtcaactatggaagcagaactgacggcactggatactgctactgttgaggcagaatggctgcgtgatctattaatggatctgcctattgttgaaaaaccgacatgtgaaaagacgattgaagtctgtcaggaaattgagaaactctggagttataacgttggattacatccaaacagctagaaacctggcagatcccttcacgaagggactatcacgaaatgtgatagataatgcatcgaaggagatgggtttgagacccatagcattcttgaaagaactcacctttgtaagcttgactgttggttgcagtctatggagattttgggtgaatcttctaggaagcttactaaagacctaggagta

SEQ ID NO: 15713 - DNA, 3120 bp, Oryza sativa
  Clone ID: TFbOSC401339j.C1.o49.fg
atggggagagcaggtctccggaacctctgccttcgacgtcctgcaccgggagaaggcgctgtgatttttactatggctggttttaccgatgcactgaggctggataaattcaccggtgtgcacttcaagagatggcagatcagggtcactctgtggttgatagctatgaaatgtttctgggtgagtactggcaagcctatgggcgttcttaatgctgatcagcagaaagaattctatgaggccactactctctttgtgggatgcattcttagcattcttggcgatcgtctggtcgaggtgtatatgcatatgaccgacgctaaggagttgtgggatgcattgaatactaaattcggtgctactgatgctagcaatgatctgtatatcatggagcagtttcatgactacaagatggctaacaaccattctgtagtcgaacaggctcatgagatacaaaccatggctaaggaactcgaactccttaagtgtgtcttacccgacaaatttgtgcccgggtgcattattgcgaaactacctccatcttggagaggtttcggtactgcactcaaacacaagagacgggaatactccattgaggggttgatagtgtctcttgatgttgaggagaaagcttgggaaaaatatgccgcgtctaagggcgatgctcaacagacaaccaacttcaagaagcagaagaagaacaacaacaatcctaaccaggatgagaggacttgctttgtgtgtgggcaacctggtcatctggctaggaagtgtccacagcgcaaggggatgaaggcacctgcagggcagacttctaagtctgctaatgtgaccattggcaacactggagatggaagcgggtatggtaatttacctactgttttttcagttaatcagtctactaattggtgggttgatactggggccaatgtcgcacggggttccaccatcctaatggggaatgggtcacatgcttctgttcatggtgttggcacggtagatctgaagtttacttcaggaaagatcgtgcagctgaagaacgtgcagcatgtcctttctatcgacaggaatcttgttagtggctcccgtctgactagagacagatttaagttggtttttgagtctaataaagtagtcgtgtctaaacatggatattttattggtaaaggttatgagtgcggaggcctgttccgctttttcctttctgatttctgcaataagtctgtgaaccatatttgtggcagtgtggatgatgaggctaatgtttggcactcacgtttatgtcatattaattttggcttgatgtctcggctttccagcatagttcctaacagaaataaggacaaaacaccatatgagatatggattgggagaaaaccatcactttcttatttgcgcacatgggggtgcttggcaaaagtcaatgtaccaataacgaagaagcgcaaacttggacctaagactgtggactgtgtctttctgggatatgctcatcacagcattgcctatagatttttaatagttaaatccgaggtacctgacatgcatgttggtacaattatggagtctcgtgatgctaccttctttgagagctttttcccaatgaaggatacacatagtggttcgagccaaccctctgaaataattcccagttcaatcacaccaccagaacaaactgaacatacacatgaacatgtctctgaggaggatgtcagtgaagctcctcgaaggagtaaaagacaaaggacggctaagtcttttggtgatgatttcactgtgtacctcgtggatgacactcctaagtcaatttcagaagcatacgcatctcctgatgcagactactggaaggaggatgttcgtagtgaaatggattccattatcactaacgggacttgggaggtgacagagcgaccctatgggtgtaaacctgtggggtgcaagtgggtgttcaagaagaagctcaggcctgacggtactattgaaaagtgcaaggctcggcttgttgctaagggctatactcagaaagaaggcgaagatttctttgacacttactcacctgttgctagattgaccacaattcgtgtgctactttccctagcagcctcacatggtcttctcgttcatcaaatggacgttaagacagcttttcttaatggagagctggatgaggagatctatatggatcaacctaatgggacaaaccttgaggtgataaatgaggttaaatcattcttgtctcaaaattttgatatgaaggatttgggaatagctgatgttatcttaaacattaagctaattagaggtgagaatgagattacactattgcagtcccattatgtggagaagatcttgaatcgctttggctacattgatagtaagccttctccaacaccttatgatcctagcttgttgcttcgcaagaataaaagaattgctaggaatcaactggaatactcccaaatcattggctcgctgatgtacctggctagtgcaactaggcctgatatctcctttgctgtgagcaagttgagccggtttacctctaatccgggagatgatcactggcgtgcgcttgagcgagtaatgcactatctgaaaggtactatggaattagggcttcactatactgggtatcctgcggtacttaagggttatagtgattctaactggatctctgatgtggatgagattaaagccactagtagatatgtcttcacactgggtggtggtgctgtttcgtggaggtcttgcaaacagaccattttgacgaggtcaaccatggaagcagaactgacggcactggatactgctactgttgaggcaggatggctgtgtgatctattaatggatctgcctattgttgaaaaaccagtgccggctatccttatgaactatgacaatcaaacggtaattgtcaaagtgaatagttctaaggataatatgaaatcgtctagacatgtgaaaagacgattgaagtctatcaggaaattgagaaactccggagttataacgttggattacatccaaacagctagaaacctggcagatcccttcacaaagggactatcacgaaatgtgatagacaatgcatcgaaggagatgggtttgagacccatgtga

SEQ ID NO: 15714 - DNA, 2046 bp, Oryza sativa
  Clone ID: TFbOSC401388j.C1.o3.gm
atggggctgccggtggatgggggaggggaaacgtgcttgagctccaccatgttgtcacaggcatcgctgcggctaggcttcaggaagggaaaaagagggcagcggtcttcggattcggtgcgggctaggcgaggtggcacgcgcgaaggagctgtagggagggtgcgaggtggtcgcagggaggaagaggaggcggcggcggtagagaagcaacatgaggtgcaacgctccgcaggaggagtcggtggacgcctcggcatcacgggagcgaatggtccttttgagtgcgccagagaggctggcaccatcctccaacatgacagagtcagccaccctggcgccgtcaccatgccaccgcggcagaaaggcaaacgtggatgggctaacgtggcaatgggggacgtcgtcccacataccacggcgccagccatgcttctcctctccctactcattttcgcccaatcccagcacgcagagaagccctcagtgacgacgccagggtggctggcgctgccattccagtgccaatgttgtgcacaaggcccagaacaagagcaaggaaaatacaaagctcaacagaccaccaacttcaagaggcagaagaagaacaacaataatcctaaccaggatgagaggacttgctttgtgtgtgggcaacctggtcatctggctaggaagtgtccacagtgcaaggggatgaaggcacctgcagggcagacttctcagtctgctaatgtgaccattggcaacactggagatggaagcgggtatgataatttacctactgtcgcacggggttccaccgtcctaatggggaatgggtcacatgcttctgttcatggtgttggcacggtagatctgaagtttacttcgggaaagatcgtgcagctgaagaacgtacagcatgtctcttctatcgacaggaatcttgttagtggctcccgtctgactagagacggatttaagttggttttcgagtctaataaagtagtcgtgtcaaaacatggatattttattggtaaaggttatgagtgcggaggcctgttccgttttcccctttctgatttctgcaataagtctgtgaaccatatttgtgacagtgtggatgatgaggctaatgtttggcactcacactactggaaggaggctgtccgtagtgaaatggattccattatcgctaacgggacttgggaggtgacagagcgaccctatgggtgtaaacctgtggggtgcaagtgggtgctcaagaagaagcttaggcctgacggtactattgaaaagtacaaggctcgacttgttgctaagggctatactcagaaagaaggcgaagatttctttgacacttactcacctgttgctagattgaccacaattcgtgtgctactttccctagaagactcacatggtcttctcgttcatcaaatggacgttaagacagcttttcttaatggagagctggatgaggagatctatatggatcaacctgatgggtttatagttgaagtcaatgaggcagataaatgtgtgtactatcgccatggtgggggtgagggagttattctgtgcttgtatgtggacgacatattgatatttgggacaaatattgaagtgataaatgagtcccattatgtggagaagatcttgaatcactttggctacattgataccgggcagaggcagcgcgcatggcgcggctgggcacagccgagacggcgcgagaccggcacggcagcggccgggaaaggtgcgcgaggctccggcgaccctccaatttcggcggcggcgcaaggcggagcaggggcgagcgttgcggcatggcaacgccatggccaagctcaggctgcaagtggcgggcttgagagcgacatgatggcgcacggcggcgcggggctcaaggcggcgatggcgatacgcggcgacgcgatggtgcggcagctacggcgacgcatgcgcgacgcgatggcggcagcggcgcacggggcgcgaggcactgatgtgacggcgacggtgacacgagtggcgcggggctcggcgcggcgcgggtga

SEQ ID NO: 15715 - DNA, 3771 bp, Oryza sativa
  Clone ID: TFbOSC401417j.C1.o24.fg
atggctggttttgccgatacattgaggccggataaattcaccggtgtgcactttaagagatggcagatcagggtgagtactggcaaacctgaaggagttcttactgctgaacagcagaagcaattcgaggaagccactactctctttgtgggatgcattcttagcgttcttggcgatcgtctggtcgaggtgtatatgcatatgaccgacgctaaggagttgtgggatgcactgaatactaaattcggtgctactgatgctagcaatgatctgtatatcatggagcaatttcatgactacaagatggctgacaaccgttctgtagtcgaacaggctcatgagatacaaaccatagctaaggaactcgaactccttaagtgtgtcttacccgacaaatttgtggccgggtgcattattgcgaaacttcctccatcttggagaagtttcaatactgcactcaaacacaagagacaggaatactctgttgaagagttgatagcgtctcttgatgttgaggagaaagctcgggaaaaagatgctgcgtctaagggcgatgatgggcagtccagtgccaatgttgtgcacaaggcccagaacaagagcaaggggaaatacaaagctcagcagaccaccaacttcaagaagcagaagaacaacaacaacaatcctaatcaggatgagaggacttgctttgtgtgtggccaacctggtcatctggctaggaagtgtccacagcgtaaggggatgaaggcacctgcagggcagacttctaagtctgctaatgtgaccattggcaacactggagatggaaacgggaatcttgttagtggctcccgtctgactagagacggatttaagttagtttttgagtctaataaagtagtcgtgtctaaacatggatattttattggtaaaggttatgagtgcggaggcctgttccgcttttccctttctgatttctgcaataagtctgtgaaccatatttgtggcagtgtggatgatgaggctaatgtctggcactcacgtttatgtcatattaattttggcttgatgtctcggctttccagcatgtgtttaattcctaagttttccattgtcaaaggttctaagtgccatagttgtgtgcaatcaaagcaacctcgcaagcctcacaaggctgctgaggagagaaacttggcacatctagaactcctacattcagatctttgtgaaatgaatggggtgttgacgaagggtggaaaacgatatttcatgacgttgattgatgatgctactagattttgctatgtgtacttgttgaaaacgaaagacgaggctctagactattttaaaatttataaggcagaagttgaaaatcaacttgacagaaacataaaaagacttaggtctgatcgtggtggagagtttttcttatacgagtttgacttattctgtgaggaatatggcattatacatgagaggacgcctccctattctcccgagtctaatgggattgccgaaaggaagaaccgcacactgactgacttggtgaatgccatgttggacaccgcgggactacctaaggcatggtggggggagtctcgtgatgttaccttctttgagagctttttcccaatgaaggatacacatagtaattctagtcaaccttctgaaataattcccagttcattcacaccaccagaacaaattgaatatacacatgaacatgtcactgaggaggatgatagtgaagctcctcgaaggagtaaaagacaaaggacgactaagtcttttggtgatgatttcactgtgtacctcgtggacgacactcctaagtcaatttcagaagcatatgcatctcctgatgcagactactggaaggaggctgtccgtagtgaaatggattccattatcgctaacggaacttgggaggtgacagagcgaccctatgggtgtaaacctgtggggtgcaagtgggtgttcaaaaagaagctgaggcctgacagtaccattgaaaagtacaaggctcggcttgttgctaagggctatactcaaaaagaaggtgaagatttctttgacacttactcacctgttgccagattgaccacaatttgtgtgctactttccctagcagcctcacatggtattctcgttcatcaaatggacgttaagacagcttttcttaatggagagctggatgaggagatctatatggatcaacctgatgggtttgtagttgaaggtcaagaagccaaggtgtgcaaattgttgaagtctttgtatagtctgaaacaagctcctaagcaatggcatgagaaatttgatagaacattgacatctgcatgcttcgcagtcaatgagacagataaatgtgtatactatcgccatggtgggggtgagggagttattttgtgcttgtatgttgatgacatactgatatttaggacaaatcttgaggtgataaatgaggttaaatcattcttgtctcaaaaatttgatatgaaggatttgggagtagctgatgttatcctaaacatcaagctaattagaggtaagaatgggattacactcttgcagtcccattatgtggagaagatcttgaatcactttggctacattgatagtaagccttctccaacgccttatgatcctaacttattgcttcgcaagaacaagagaattgctaggaatcaactggaatactcccaaatcattggctcgctgatgtacctggctagtgcaactaggcctgatatctcctttgctgtgagcaagttgagccggtttacctctaatccaggagatgatcactggcgtgcgcttgagcgagtaatgcgctatctgaaaggtactatggaattggggcttcactattctgggtaccctgcggtactggaaggatatagtgattctaactggatctctgatgtggacgagatcaaagccactagtgggtatgtcttcacactaggtggtagtgctgtttcgtggaggtcttgcaaacagaccattttgacaaggtcaaccatggaagcagagttaacggcactggatactgctactgttgaggcagaatggctgcgtgatctattaatggatctgcctattgttgaaaaaccggtgccggctatccttatgaactgtgacaatcaaacggtaattgtcaaagtgaatagttctaaggataatatgaaatcgtctagacatgtgaaaagacgattgaagtctgtcaggaagttgagaaactccggagttataacgttggattacatccaaacaactagaaacctggcagatcctttcacgaagggactatcacgaaatgtgatagacaatgcatcgaaggaaatgggtttgagacccatcgaagatgctgtcctacagagcattcttgaaagaactcacctttgtgagcttgactgttggtcgcagtctatgaagattttgggtgaatcttctaggaagcttactaaagacctaggagactgcggtcactgcgggcgggcgttggcggcacacgcggcaggtctgcagcagtgcgctagtgcggcactgcggctgcggcggcagccggccaaggcggcggactgctgcaggctacggcgccagtgcggcagtgggctgctgcggcgaccaagccggccaaggcgcgcacgcgtggcccggcggcgctcgctctcacgatctgatcagatcgctgctcgcgttggcgtcgcgactcgcgagggcgaggaggggagagacagagagtcctgcgatggcgcgacgcttcggtttctgaattccaattga

SEQ ID NO: 15716 - DNA, 2283 bp, Oryza sativa
  Clone ID: TFbOSC401478j.C1.o139.gm
atgacagaaaatagattccttgacaagacgtcgccaaaagacgaatcagagggtgcccaaatcgccacgccgatcagtggcgacgagacgccgagttcttccacaatgactagactcgtccaatacaactcctgccgctcggcgacgtcaacggtggcggcgaacctccccagaagcatgaggcggagatgggggacaagcacgacggccgcctcagtgccggtccaatgtcctcggtgccgcccaccgcccgccgcccgcctcactctccccaccgtgcgtgccgcacgcggcacccaccgcgccctcctagaggaggactcgtcgcccatcaccattgatgtggagctcgagaggggtctccagaacctctgccttcgacgccctgcactgggagaaggcggcaataagatttttgggaagcgcttcgcgcgactgctccctattcgtccgcgacggctcgccttcctctccgctcgcgtgctgtgcgccttcgtcgacgcccgcaaccgcgaggtcactctgtggctgggagctatgaaatgcttctgggtgagtactggcaagcctatgggcgttcttaatgctgatcagcagaaagaattcgatgaggccactactctctctgtgggatgcattcttagcgtgcttggcgatcgtctggtcgaggtgtatatgcatatgaccgacgctaaggagttgtgggatgcactgaatactaaattcggtgctactgatgctagcaatgatctgtatatcatggagcagtttcatgactacaagatggctgacaaccgttctgtagtcgaacaggctcatgagatacaaaccatggctaaggaactcgaactccttaagtgtgtcttacccgacaaatttgtggccgggtgcattattgtgaaattacctccatcttggagaggtttcagtactgcactcaaacacaagagacaggaatactccgttgaggggttgatagcatctcttgatgttgaggagaaagctcgggaaaaagatgtcgcgtctaagggcgatggtggccagtccactgccaatgttgtgcacaaggcccagaacaagagcaaggggaaatacaaagctcagcagaccaccaacttcaagaagaagaagaagaacaacaatcctaatcaggatgagaggacttgctttgtgtgtggtcaacctggccatctggccaggaagtgtccacaacgcaaagggatgaaggcacctgcaggacagacctctatgtctgctaatgtgaccattggcaacactggagatggaagcgggtatggaaagatcgtgcagctgaagaacgtgcagcatgtaccttctatcgacaggaatcttgttagtggctcccgcttcgcagtcaatgatgcaatgatgcagataaatgtgtatactatcgccatgatggggtcccattatgtggagaagatcttgaatcgctttggctacattgatagtaagccttctccaacaccttatgatcctagcttgttgcttcgcaagaacaagagaattgctaggaatcaactggaatactcccaaatcattggctcgctgatgtacctggctagtgcaactaggcctgatatctcctttgctgtgagcaagttgagccggaaattgagaaactccggagttataacattggattacatccaaacaactagaaacctggcagatcccttcacgaagggactatcacgaaatgtgatagacaatgcatcgaaggagatgggtttgagacccatcgaagatgctatcctgcagagcattcttgaaagaactcacctttgtgagcttgactgttggtcgcagtctatggatattttgggtgaatcttctaggaagcttactaaagaccacccgagcgtgcacctgcgatcgggagagcaggtctccggaacctctgccttcgacgccccgcactgggagaaggcagcaataaggggtgacagtcgatctacgagggctatggaatgggtgggtggcgagacggtggtgtcggtgccaccggagccacaggtggaggagcaccacgacgagcaacagaagcacatcgggcgccggctaggtgaagagaaactcatgagggctgaacattggaaatgggaaaggaaggtttgggatggcgagaatacaagggccaagaagtgtggcaaggagatggtagaaattgacaactcttgcaaggtcagggagaagccttgcaaggtcaagaacgttccaaagtactcggaacaaaatgttctagcactcaagaacgtctag

SEQ ID NO: 15717 - DNA, 4383 bp, Oryza sativa
  Clone ID: TFbOSC401518j.C1.o12.fg
atgccgctgcggcgcggagccctccctccccgcgcccctcttcggccggcacccggcggtctctgcggccgcgcgctcctccgccggacctgcagcctctcgtggccggcgacgacgggcggagcggcgctcaggcatacaaaatacaagaatttggcagatctctactatgcagaagatttggtagttgacttgatatctgcactctatagttaccagatgaaaaattctagatggaagccagtatttgccttggaaacaggtggaccatctaatgctgatagccaagacttcgaagatgatggtggctttcttggtagaacaaggctgggaaggctcatccaagctgctgggagggaactacttgaaaagctgaactctgccagaagcaactcccccacgaagatattccttgtgctgtttggcttctataccgccaacgcattggcaacaatcctagggcagactggtgactgggatgttcttgtggctggtgttgtagtggctgccatagagggaattggcatgcttatgtacagaaaaccgatgagtagacctcctggacgattccagtcattgattgcaatggtgaactactggaaagccggcgaggcaaaggtgagagagtgtctcggtgaccggcgacggcgaggcgagctagatgctggttgggaatggtggatcgtggaaggagatgagctcctactcgacatcatctgtcatagtccactcggcatcggcgcgctcctatgggtgtggcgcatccacacggttcacgctgcagcatatagtcagagggtgacgatccagctcccgacaatgggtcttgaaagcagggacgccacaagtggtggagacctaagatcgcgtgcgaaggacgactcttaccacaacccacaggcgccatgcaaggaggagcttggggcggtgaccggccagaggcgcaggaaaattcggatttgttttattgttggaaacattccgaaaaatccggtgagtactggcaagcctatgggcgttcttaatgctgatcagcagaaagaattcgatgaggccactactctctttgtgggatgcattcctagcgtgcttggcgatcgtctggtcgaggtgtatatgcatatgaccgacgctaaggagttgtgggatgcactgaatactaaattcggtgctactgatgctagcaatgatctgtatatcatggagcagtttcatgactacaagatggctgacaaccgttctgtagtcgaacaggctcatgagatacaaaccatggctaaggaactcgaactccttaagtgtgtcttacccgacaaatttgtggccgggtgcattattgcgaaactacctccatcttggagaggtttcggtactgcactcaaacacaagagacaggaatactccgttgaggggttgatagcgtctcttgatgttgaggagaaagctcgggaaaaagatgtcgcgtctaagggcgatggtgggcagtccactgccaatgttgtgcacaaggcccagaacaagagcaaggggaaatacaaagctcagcagaccaccaacttcaagaagaagaacaacaacaacaatcctaatcaggataagaggacttgctttgtgtgtggtcaacctggccatctggccaggaagtgtccacaatgcaaggggatgaaggcacctgcagggcagacctctaagtctgccaatgtgaccattggcaacactggagatggaagcgggtatggggccaatgtacatgtttgtgctgacatctcattgttttcttcttatcaggtcgcatggggttccaccgtcctaatagggaatgggtcacatgcttctgttcatggtgttggcacggtagatctgaagtttacttcgggaaagatcgtgcagctgaagaacgtgcagcatgtcccttctatcgacaggaatcttgttagtggctcccgtctgactagagacggatttaagttggtttttgagtctaataaagtagtcgtgtctaaacatagatattttattggtaaaggttatgagtgcggaggcctgttctgcttttccttttctgatttctgcaataagtctgtgaaccatatttgtggcagtgtggatgatgaggctaatgtatggcactcacgtttatgtcatattaattttggcttgatgtctcggctttccagcatgtgtttaattcctaagttttccattgtcaaaggttctaagtgccatagttgtgtgcaatcaaagcaacctcgcaagcctcacaaggctgctaaagagagaaacttggcacctctagaactcttacactcagatctctgtaaaatgaatggggtgttgacgaagggtggaaaacgatatttcatgacgttgattgatgatgctactagattttgctatgtgtacttgttgaaaacgaaagacgaggctctagactattttaaaatttataaggcaaaagttgaaaatcaacttgacagaaagataaaaagacttaggtctgatcgtggtggagagtttttctcaaacgagtttgacttattctgtgaggaacatggcattatacatgagaggacgcctccctattctcctgagtctaataagattgctgaaaggaagaaccgcacactgaccgacttggtgaatgccatgttggacaccgcaggactacctaaggcatggtggggggagacattgttgacctcgaatcatgtgttaaacagagttcctaacagaaataaggacaaaacaccatatgagatatggattgggagaaaaccatcactttcttacttgcgcacatgggggtgcttggcgaaagtcaacgtatcaataacgaataagcgcaaacttggacctaagactgtggactgtgtctttctgggatatgctcactacagcattgcctatagatttttaatagttaaatctgaggtacctgacatgcatgttggtacaattatggagtctcgtgatgctaccttctttgagagctttttcccaatgaaggatacacatagtagttctagccaaccctctgaaataattctcagttcaatcacaccaccagaacaaactgaacatacacatgaacatgtcactgaggaggatgacagtgaagctcctcgaaggagcaaaagacaaaggacggttaagtcttttggtgacgatttcactgtgtacctcgtggatgacactcctaagtcaatttcagaagcatacgcatctcctgatgcagactactggaaggaggttgtccgtagtgaaatggattccattatcgctaacgggacttgggaggtgacagagcggcctatgggtgtaaacatgtggggtgcaagtgggtgttcaagaagaagctcaggcctgatggtactattgaaaacttcatatggtcttctcgttcatcaaatggacgttaagacagcttttcttaatggagagctagatgaggagatctatatggatcaacctgatgggtttgtagttgaaggctttgcagtcaatgaggcagataaatgtgtgtactatcgccatggtgggggtgagggagttattctgtgcttgtatgttgatgacatactgatatttgggacaaaccttgaggatttgggagtagttgatgttatcttaaacattaagctaattagaggtgagaatgagattacacttttgcagtcccattatgtggagaagatcttgaattgctttggctacattgatagtaagccttctccaacaccttataatcctagcttgttgcttcgcaagaacaagagaattgctaggaatcaactggaatactcccaaatcattggctcgccgatgtacctggctagtgcaactaggcctgatatctcctttgctgtgagcaagttgagctggtttacctctaatccgggagatgatcactggcgtgcgcttgagcgagtaatgcgctatctgaaaggtactatggaattgggacttcactattctgggtatcctgcggtactagagggatatagtgattctaagtggatctctgatgtggatgagatcaaagccactagtggatatgtcttcacattgggtggtggtgctgtttcgtggaggtcttgcaaacagactattttgacgaggtcaaccatggaagcagaactgacggcactggatactgctactgttgaggcagaatggctgcatgatctattaatggatctgcctattgttgaaaaaccggtgctggctatccttatgaactgtgacaatcaaacggtaattgtcaaagtgaatagttctaaggataatatgaaatcgtctagacatgtgaaaagacgattgaagtctgttaggaaattgagaaactccggagttataacgttggattacatccaaacagcttga

SEQ ID NO: 15718 - DNA, 3774 bp, Oryza sativa
  Clone ID: TFbOSC403909j.C1.o3.fg
atgtgtggtggagagaaaagggggaacacgcgcgagctcgctcgcctcgcctcgcctcgcctcgcctcgcctggtagggcagggcaggtggcgcgcgtgcacgatgtatgcgtcgaatggtccgcgacggctcgacgcttgcagccgcgagtagttcgtgccgagcaaccggtctttccgccacctcggcactgtgattttactatggctagttttaccgatgcactgaggccggataaattcaccggtgtgcacttcaagagatggcagatcagggtcactctgtggctgacagctatgaaatgcttctgggtgagtactggcaagcctatgggtgttcttaaagctgatcagcagaaagaattcgatgaggccactactctctttgtgggatgcattcttagcgtgcttggcgatcgtctgatcgaggtgtatatgcatatgaccgacgctaaggagttgtgggatgcactgaatactaaattcggtgctactgatgctagcaatgatctgtatatcatggagcagtttcatgactacaagatggttggcaaccgttctgtagtcgaacaggctcatgagatacaagccatggataaggaactcagacttcttaagtgtgtcttacccgacaaatttgtggtcgggtgcattattgcgaaactacctccatcttggagaggtttctatactgcactcaaacacaagagacaggaatactctgttgaggggttgatagcgtctcttgatgttgaggagaaagctcgggaaaaagatgctgcgtctaagggcgatggtggccagtccactgccaatgttgtgcacatggcccagaataagagcaaggggaaatacaaagctcagcagaccaccaacttcaagaagaagaagaacaacaacaatcctaatgaggatgagaggacttgctttgtatgtggtcaacctggccatctggccaggaagtgtccacaacgtaaggggatgaaggcacctgcagggcagacctctaagtctgctaatgtgaccattggcaacactggagatggaagcgggtatggtaatttacctactgttttttcagttaatcagtctactaattggtgggttgatactggggccaatgtcgcacggggttccaccgtcctaatggggaatgggttacatgcttctgttcgtggtgttggcacggtagatctgaagtttacttcgggaaagatcgtgcagctgaagaacgtgcagcatgtcccttctatcgacaggaatcttgttagtggctcccgtctgactagagacggatttaagttggtttttgagtctaataaagtagtcgtgtctaaacatggatattttattggttctaagtgccatagttgtgtgcaatcgaagcaacctcgcaagcctcacaaggctgccgaggagagaaacttagcaccactagaactcctacattcagatctttatgaaatgaatggggtgttgacgaagggtggaaaacgatatttcatgacgttgattgatgatgctactagattatgctatgtgtacttgttaaaaacgaaagacaaggctctagactattttaaaatttataaggcagaagatgaaaatcaacttgacagaaagataaaaaggctttggtctgatcgtggtggagagtttttctcaaacgagtttgacttattctgtgaggaatatggcatcatacatgagaggacgcctccctattctcctgagtctaatgggattgctaaaaggaagaaccacacactgactgacttggtgaatgccatgttggatactgcgggactacctaaggcatggtggggggagacattgttgacctcgaatcatgtgttaaacagagtttctaacagaaataaggacaaaacaccatatgagatatggattaggagaaaaccatcactttcttacttgcgcacatgggggtgcttggcgaaagtcaatataccaataacgaagaagcgcaaacttggacctaagactgtggactgtgtctttctaggatatgttcatcacagcattgcctatagatttttaatagttaaatttgaggtacctgacatacatattggtacaatcatggagtctcgtgatgctaccttctttgagagctttttcccaatgaaggatacacatagtagttctagccaaacctctgaaataattcccaattcaatcacaccactagaacaaactgaacatacacatgaacatgtcactgaggaggatgacagtgaagctcttcgaaggagtaaaagacaaaggacggctaagtcttttggtgatgatttcactgtgtacctcgtggacgacactcctaagtcaatttcagaagcatatgcatctcctgatgcagactactggaaggaagctgtccgtagtgaaatggattccattatcgctaacggaacttgggagatgacagagcgaccctatgggtgtaaacctgtggggtgcaagtgggtgttcaaaaagaagctgaggcctgatggtaccattgaaaagtacaaggctcggcttgttgctaagggctatactcagaaagaaggcgaagatttcttttacacttactcacctgtttccagattgaccacaattcgtgtgctactttccctagcagcctcacatggtcttctcgttcatcaaatggacattaagacagcttttcttaatggagagctggatgaggagatctatatggatcagcctgatgggtttgtagttgaaggcttcgcagtcaatgagacagataaatgtgtatactatcgccatggtgggggtgagggagttattctgtgcttgtatgttgatgatatactgatatttgggacaaaccttgaggtgataaatgaggttaaatcattcttgtctcaaaaatttgatatgaaggatttgggattagctgatgttatcctaaacattaagctaattagaggtgagaatgggattgcacttttgcagtcccattatgtggagaaaattttgaatcgctttggctacattgatagtaatccttctccaacaccttatgattctagcttgttgcttcgcaagaacaagagaattgctaggaatcaactggaatacttccaaattattggctcgctgatgtacctggctagtgcaactaggcctgatatctcctttgctgtgagcaagttgagccggtttacctctaatccgggagatgatcactggcgtgcgcttgagcgagtaatgcgctatctgaaaggtactatagaattggggcttcactattctaggtatcctgcggtactggaaggatatagtgattttaactggatctctgatgtggatgagatcaaagccactagtggatatgccttcacactaggtggtggtgctgtttcgtggaggtcttgcaaacagaccattttgacgaggtcaaccatggaagcagagttgacggcactagacactgctactgttgaggcagaatggctgcgtgatctattaatggatctgcctattgttgaaaaaccggtgccggctatccttatgagctatgacaatcaaacggtaattgtcaaagtgaatagttctaaggataatatgaaatcgtctagacatgtgaaaagacgattgaagtctgtcaggaaattgagaaactccggagttataacatttgattacatccaaacagctagaaagctggcagatcccttcacgaagggactatcacgaaatgtgatagacaatgtatcgaaggagatgggtttgagacccatgtga

SEQ ID NO: 15719 - DNA, 3702 bp, Oryza sativa
  Clone ID: TFbOSC405599j.C1.o3.fg
atggtgagtactggcaaacctgaaggagttcttactgctgaccagcagaagcaattcgaggaagccactactctctttgtgggatgcattcttagcgttcttggcgatcgtctggtcgaggtgtatatgcatatgaccgacgctaaggagttgtgggatgcactgaatactaaattcggtgctactgatgctagcaatgatctgtatatcatggagcaatttcatgactacaagatggctgacaaccgttctgtagtcgaacaggctcatgagatacaaaccatagctaaggaactcgaactccttaagtgtgtcttacccgacaaatttgtggccgggtgcattattgcgaaacttcctccatcttggagaagtttcaatactgcactcaaacacaagagacaggaatactctgttgaagagttgatagcgtctcttgatgttgaggagaaagctcgggaaaaagatgctgcgtctaagggcgatgatgggcagtccagtgccaatgttgtgcacaaggcccagaacaagagcaaggggaaatacaaagctcagcagaccaccaacttcaagaagcagaagaacaacaacaacaatcctaatcaggatgagaggacttgctttgtgtgtggccaacctggtcatctggctaggaagtgtccacagcgtaaggggatgaaggcacctgcagggcagacttctaagtctgctaatgtgaccattggcaacactggagatggaaacgggaatcttgttagtggctcccgtctgactagagacggatttaagttagtttttgagtctaataaagtagtcgtgtctaaacatggatattttattggtaaaggttatgagtgcggaggcctgttccgcttttccctttctgatttctgcaataagtctgtgaaccatatttgtggcagtgtggatgatgaggctaatgtctggcactcacgtttatgtcatattaattttggcttgatgtctcggctttccagcatgtgtttaattcctaagttttccattgtcaaaggttctaagtgccatagttgtgtgcaatcaaagcaacctcgcaagcctcacaaggctgctgaggagagaaacttggcacatctagaactcctacattcagatctttgtgaaatgaatggggtgttgacgaagggtggaaaacgatatttcatgacgttgattgatgatgctactagattttgctatgtgtacttgttgaaaacgaaagacgaggctctagactattttaaaatttataaggcagaagttgaaaatcaacttgacagaaacataaaaagacttaggtctgatcgtggtggagagtttttcttatacgagtttgacttattctgtgaggaatatggcattatacatgagaggacgcctccctattctcccgagtctaatgggattgccgaaaggaagaaccgcacactgactgacttggtgaatgccatgttggacaccgcgggactacctaaggcatggtggggggagtctcgtgatgttaccttctttgagagctttttcccaatgaaggatacacatagtaattctagtcaaccttctgaaataattcccagttcattcacaccaccagaacaaattgaatatacacatgaacatgtcactgaggaggatgatagtgaagctcctcgaaggagtaaaagacaaaggacgactaagtcttttggtgatgatttcactgtgtacctcgtggacgacactcctaagtcaatttcagaagcatatgcatctcctgatgcagactactggaaggaggctgtccgtagtgaaatggattccattatcgctaacggaacttgggaggtgacagagcgaccctatgggtgtaaacctgtggggtgcaagtgggtgttcaaaaagaagctgaggcctgacagtaccattgaaaagtacaaggctcggcttgttgctaagggctatactcaaaaagaaggtgaagatttctttgacacttactcacctgttgccagattgaccacaatttgtgtgctactttccctagcagcctcacatggtattctcgttcatcaaatggacgttaagacagcttttcttaatggagagctggatgaggagatctatatggatcaacctgatgggtttgtagttgaaggtcaagaagccaaggtgtgcaaattgttgaagtctttgtatagtctgaaacaagctcctaagcaatggcatgagaaatttgatagaacattgacatctgcatgcttcgcagtcaatgagacagataaatgtgtatactatcgccatggtgggggtgagggagttattttgtgcttgtatgttgatgacatactgatatttaggacaaatcttgaggtgataaatgaggttaaatcattcttgtctcaaaaatttgatatgaaggatttgggagtagctgatgttatcctaaacatcaagctaattagaggtaagaatgggattacactcttgcagtcccattatgtggagaagatcttgaatcactttggctacattgatagtaagccttctccaacgccttatgatcctaacttattgcttcgcaagaacaagagaattgctaggaatcaactggaatactcccaaatcattggctcgctgatgtacctggctagtgcaactaggcctgatatctcctttgctgtgagcaagttgagccggtttacctctaatccaggagatgatcactggcgtgcgcttgagcgagtaatgcgctatctgaaaggtactatggaattggggcttcactattctgggtaccctgcggtactggaaggatatagtgattctaactggatctctgatgtggacgagatcaaagccactagtgggtatgtcttcacactaggtggtagtgctgtttcgtggaggtcttgcaaacagaccattttgacaaggtcaaccatggaagcagagttaacggcactggatactgctactgttgaggcagaatggctgcgtgatctattaatggatctgcctattgttgaaaaaccggtgccggctatccttatgaactgtgacaatcaaacggtaattgtcaaagtgaatagttctaaggataatatgaaatcgtctagacatgtgaaaagacgattgaagtctgtcaggaagttgagaaactccggagttataacgttggattacatccaaacaactagaaacctggcagatcctttcacgaagggactatcacgaaatgtgatagacaatgcatcgaaggaaatgggtttgagacccatcgaagatgctgtcctacagagcattcttgaaagaactcacctttgtgagcttgactgttggtcgcagtctatgaagattttgggtgaatcttctaggaagcttactaaagacctaggagactgcggtcactgcgggcgggcgttggcggcacacgcggcaggtctgcagcagtgcgctagtgcggcactgcggctgcggcggcagccggccaaggcggcggactgctgcaggctacggcgccagtgcggcagtgggctgctgcggcgaccaagccggccaaggcgcgcacgcgtggcccggcggcgctcgctctcacgatctgatcagatcgctgctcgcgttggcgtcgcgactcgcgagggcgaggaggggagagacagagagtcctgcgatggcgcgacgcttcggtttctgaattccaattga

SEQ ID NO: 15720 - DNA, 3018 bp, Oryza sativa
  Clone ID: TFbOSC411284j.C1.o10.fg
atggctcgccttcctctccgctcgcgtgctgcacgccttcatcgacgctcgcaaccgcgagtagttcctgccgagcaatcagtctttccgccacctcggcgctatgattttactatggctgtttttgccgatgcactgaggccggataaatttaatggtgtgcactttaagagatggcagatcagggtcactctgtggctgacagctatgaaatgcttctggaaagaattcgatgaggccactactctctttgtgggatgcattcttagcgtgcttggcgatcatctggtcgaggtgtatatgcatatgaccgacgctaaggagttgtgggatgcattgaatactaaattcggtgctactaatgctagcaatgatctgtatatcatggagcagtttcatgactacaagatggctgacaaccgttctgtagtcgaacaagctcatgagatacaaaccatggctaaggaactcgaactccttaagtgtgtcttacccgacaaatttgtggtcgggtgcattattgcgaaactacctccatcttggagaggtttcggtactgcactcaaacacaagagacaggaatactccgttgaggggttgatagcgtctcttgatgttgaggagaaagctcgggaaaaagatgcggcgtctaagggcgatggtgggcagtccattgccaatgttgtgcaccaggcccagaacaagagcaaggggaaatacaaagctcagcagaccaccaacttcaagaagaagaagaacaacagcaatcctaatcaggatgagaggacttgctttgtgtgtggtcaacctggccatctggccaggaagtgtccacaacgcaaggggatgaaggcacctggagggcagacctctaagtttgctaatgtgaccattggcaacactggagatggaagcgggtatggtaatttacctactgttttttcagttaaccagtctactaattggtgggttgatacaggggccaatgtacatgtttgtgctgacatctcattattgtcttcttatcaggtcgcacggggttctaccgtcctaatggggaatgggtcacatgcttctgttcatgatgttggcacggtagatctgaagtttacttcgggaaagatcgtgcagctgaagaacatgcagcatgtcccttctatcgacaagaatcttgttagtggctcccgtctgactagagacggatttaagttggtttttgagtctaataaagtagtcgtgtctaaacatggatattttattggtaaaggttatgagtgcggaggcctgttccgcttttccctttctgctttctgcaataagtctgtgaaccatatttgtggcagtgtggatgatgaggctaatgtatggcactcacgtttatgtcatattaattttggattgatgtctcggttttccagcatgtgtttaattcctaagttttccattgtcaaaggttctaagtgccatagttgtgtgcaatcaaagcaacctcgcaagcctcacaaggctactgaggagagaaacttggcacctctagaactcctacactcagatctctgtgaaatgaatggggtgttgacgaagggtggaaaacgatatttcatgacgttgattgatgatgctactagattttgctatgtgtacttgttgaaaacgaaagacgaggctctagactattttaaaatttataaggcagaagttgaaaatcaacttgacagaaagataaaaatacttaggtctgatcgtggtggagagtttttctcaaacgagtttgacttattctgtgaggaacatggtattatacatgagaggacgcctccctattctcccgagtctaataggattgctgaaaggaagaaccgcacactgaccgacttgtctcgtgatgctaccttctttgagagctttttcccaatgaaggatacacatagtagttctagccaaccctctgaaataattcccagttcaatcacaccaccagaacaaactgaacatacacatgaacatgttactaaggaggatgacagtgaagctcctcgaagtagcaaaagacaaaggacagctaagtcttttggttatgatttcactgtgtacctcgtggatgacactcctaagtcaatttcagaagcatacgcatctcttgatgcagactactggaaggaggctatccgtagtgaaatggattccattatcactaacgggacttgggaggtgacagagcgaccctatgggtgtaaacctgtggggtgcaagtgggtgttcaagaagaagctcaggcttgatggtactattgaaaagtacaaggctcggcttattgctaagggttatactcagaaagaaggcgaagatttctttgacacttactcacttgttgctagattgaccacaattcgtgtgctactttccctagcagcctcacatggtcttctcgttcatcaaatggacattaagacagcttttcttaatggagagctggatgaggagatctatatggatcaacgtgatgggtttgtagttgaaggtcaagaaggcaaagtgtgtaaattgttgaagtctttgtatggtctgaaacaagctcataagaaatggcataagaaatttgacaaaacattgacatctgcaagctttgcagtcaatgaggcagataaatgtgtgtattatcgccatggtgggggtgagggagttattctgtgcttgtatgttgatgacatactgatatttgggacaaaccttgaggtgataaatgaggttaaatcattcttgtctcaaaattttgatatgaaggatttgggagtagctgatgttatcttaaacattaagctaattagaggtgagaatgagattacactcttgcagtcccattatgtggagaagatcttgaatcgctttggctacattgatatattggagggatatagtgattctaattggatctctgatgtggataagatcaaagccactagtggatatgtcttcacactaggtggtggtgctgtttcgtggaggtcttgcaaatag

SEQ ID NO: 15721 - DNA, 2967 bp, Oryza sativa
  Clone ID: TFbOSC411372j.C1.o4.fg
atgaaatgcttctgggtgagtactggcaagcctatgggcattcttaatgctgatcagcagaaaaaattcgatgaggccactactctctttgtgggatgcattcttagcgtgcttgacgatcgtctggtcgaggtgtatatgcatatgaccaacgctaaggagttgtgggatgcactgaatactaaattcggtgctattgatgctagcaatgatctctatatcatggagcagtttcatgactacaagatggctgacaactgttctatagtcgaacaggctcatgagatacaaaccatggctaaggaactcgaactccttaagtgtgtcttacccgacaaatttgtggccgggtgcattatcgcgaaacaacctccatcttggagaggtttcagtactgcactcaaatacaagagacaggaatactccgttgaggggttgatagcgtctcttgatgttgaggagaaagctcgggaaaaagatgtcgcgtctaagggcgatggtggccagtccactgccaatgttgtgcacaaggcccagaacaagagcaaggggaaatacaaagctcagcagaccaccaactttaagaagaagaacaacaacaatcctaatcaggatgagaggacttgctttgtgtgtggtcaacctggccatctggccaggaagtgtccacaacgcaaggggatgaaggcacctgtagggcagacctctaagtttgctaatgtgaccattggcaacactggagatggaagcagtcgcacgggttccaccgtcctaatggggaatgggtcacatgcttctgttcatggttatgagtgcggaggcctgttccgcttttccctttctgatttctacaataagtctgtgaaccatatttgtggtagtgtggatgataaggcttatgtttggcactcacgtttatgtcatattaattttggcttgatgtctcggctttccagcatgtgtttaattcctaagttatccattgtcaaaggttctaagtgctatagttgtgtgcaatcgaagcaacctcgcaagcctcacaaggttgccgaggagagaaacttggcaccactagaactcctacattctgatctttgtgaaatgaatggggtgttgacgaagggtggaaaacgatatttcgtgatgttgattgatgatgctactagattttgctatgtgtacttgttgaaaacgaaagacgaggctctagactattttaaaatttataaggcagaagttgaaaatcaacttgacaggaagataaaaaggcttaggtctgatcgtggtggagagtttttctcaaacgagtttgacttattctgtgaggaacatggcatcatacatgagaggacgcctccctattctcccgagtctaatgggattgctgaaaggaagaatcgcacactgactgacttggtgaatgccatgttggacaccgcgggactacctaaggcttgcattgcctatagatttttaatagttaaatctgaggtacctgacatgcatgttggtacaatcatggagtctcgtgatgctaacttctttgagatcagctttttcccaatgaaggatacacatagtagttctagccaaacctctgaaataattcccaactcaatcacaccaccagaacaaactaaacatacgcatgaacatgtcactgaggaggatgacagtgaagctcctcgaaggagtaaaagacaaaggacggctaagtcttttggtgatgatttcactgtgtacctcatggacgacactcctaagtcaatttcagaagcatatgcatctcctgatgcagactactggaaggaggctgtccgtagtgaaatggattccattatcgctaacggaacttgggaggtgacagagcgaccctatgggtgtaaacctgtggggtgcaagtgggtgttcaaaaagaagctgaggcctgatggtaccattgaaaagtacaaggctcggcttgttgctaagggctatactcagaaagaaggcgaagatttctttgacacttactcacctgttgctagattgaccacaattcgtgtgctactttccctagcagcctcacatggtcttctcgtccatcaaatggatgttaagacaacttttcttaatggagagctggatgaggtgatctatatagatcagcctgatgggtttgtagttgaaggtcaagaagacaaggcgtgcaaattgttgaagtctttgtatggtctgaaacaagctcctaagcaatggcacgagaaacttgatagaacattgacatctgtaagctttgcagtcaatgaggcagttaaatgtgtatactatcgccatggtgggggtgagggagttattctgtgcttttatgttgatgacatactgatatttgggacaaaccttgaggtgataaatgaggatttgggagtagctgatgttatcctaaacattaagctaattagaggtgagaatgggattacactcttgcagtcccattatgtggagaagatcttgaatcactttggctacattgatagtaagccttctccaacaccttatgatcctagcttgttgcttcgcaagaacaagagaattgctaggaatcaactggaatactcccaaatcattggctcgctgatatacttggctagtgcaactaggcctgatatctcctttgctgtgagcaagttgagccggtttacctctaatccggaagatgatcactggcgtgcgcttgagcgagtaatgcgctatccgaaaggtactatggaatttgggcttcactattctgggtatcctgcggtactggaaggatataatgattctaactggatctctgatgtggatgagatcaaagccactagtggatatgtcttcacactacgtggtggtgctgtttcgtcgaggtcttgcaaacagaccattttgacgaggtcaaccatggaagcagagttgacagcactggatactgctactgttgaggcataa

SEQ ID NO: 15722 - DNA, 3903 bp, Oryza sativa
  Clone ID: TFbOSC419914j.C1.o1.fg
atggctggttttgccgatgcactgaggccagataaattcaccggtatgctcttcaagagatggcagatcagggtcactctgtggctgacagctatgaaatgcttctgggtgagtactagcaagcctatgggcgttcttaatgctgatcagcagaaagaattcgatgaggccactactctctttgtgggatgcattcttagcgtgcttggcgatcgtctggtcgaggtgtatatgcatatgaccgacactaaggagttgtgggatgcactgaatactgaattcggtgctactgatgctagcaatgatatgtatatcatggagcagtttcatgactacaagatggctgacaaccgttctgtagtcgaacaggctcatgaaatacaaaccatggctaaggaactcgaactccttaagtgtgtcttactcgacaaatttgtggccgggtgcattattgcgaaactacctccatcttggagaggtttcggtactgcactcaaacacaagagacaggaatactccgttgaggggttgatagcgtctcttgatgttgaggagaaagctcgggaaaaagatgccgcgtctaagggcgatggtgggcaatccaatgctaatgttgtgcacaaggcccagaacaagagcaaggggaaatacaaagctcaacagaccaccaacttcaagaagcagaagaagaacaacaacaatcctaaccaggatgagaggacttgctttgtgtgtgggcaacctggtcatctggctaggaagtgtccacagcgcaaggggatgaaggcacctgcaaggcagacttataagtctgctaatgtgaccattgacaacattggagatggaagcgggtatgataatttacctactgttttttcagttaatcagtctactaattggtgggttgatactagggccaatgtcgcacggggttccaccgtcctaatggggaatgggtcacatgcttctgttcatggtgttggcacggtagatctgaagtttacttcgggaaagatcgtgcagctgaagaacgtgcagcatgtcccttctatcgacaggaatcttgttagtggctcccgtctgactagagacggatttaagttggtttttgagtctaataaagtagtcatatctaaacatggatattttattggtaaaggttatgagtgcggaggcctgttccgcttttccctttctgatttctgcaataagtctgtgaaccatatttgtggcagtgtggatgatgaggctaatgtttggcactcacgtttatgtcatattaattttggcttgatgtctcggctttccagcatgtgtttaattcctaagttttccattgtcaaaggttctaagtgccatagttgtgtgcaatcgaagcaacctcgcaagcctcacaaggctgccgaggagagaaacttggcaccactagaactcctacattcagatctttgtgaaatgaatggggtgttgacgaagaaaacaaaagacgaggctctagactattttaaaatttataaggcagaagttgaaaatcaacttgacagaaagataaaaaggcttaggtctgatcatggtggagagtttttatcaaacgagtttgacttattctgtgaggaacatagcatcatacatgagaggacgcctccctattctcccgagactaatgggattgctgaaaggaagaaccgcatactgactgacttggtgaatgccatgttggacaccgcgggactacctaaggcatggtggggggaggcattgttgacctcgaatcatgtgttaaacagagttcctaacagaaataaggacaaaacaccatatgagatatggattgggagaaaaccatcactttcttatttgcgcacatgggggtgcttggtgaaagtcaatgtaccaataacgaagaagcgcaaacttggacctaagactgtggactgtgtctttctgggatatgctcatcacagcattacctatagatttttaatagttaaatccgaggtacctgacatgcatgttggtacaattatgaagtctcgtgatgctaccttgtttgagagctttttcccaatgaaggatacacatagtggttcgagccaaccctctgaaataattcccagttcaatcacaccaccagaacaaactgaacatacacatgaacatgtctctgaggaggatgtcagtgaagctcctcgaaggagtaagagacaaatgacggctaagtcctttggtgatgatttcactgtgtacctcgtggatgacactcctaagtcaatttcagaagcatatgcatctcctgatgcagactactggaaagaggctgtccgtagtgaaatggattccattatcgctaacgggacttgggaggtgacagagcgaccctatgggtgtaaacctgtggggtgcaagtgggtgttcaagaagaagcttaggcctgacggtactattgaaaagtacaaggctcggcttgttgctaagggctatactcggaaagaatgcgaagatttctttaacacttactcacctgttgctagattgaccacaattcgtgtgctactttccctagcagcctcacatggtcttctcgttcatcaaatggacgttaagacagcttttcttaatggagagctggatgaggagatctatatgtatcaacctgatgggtttgtagttgaaggtcaagaaggcaaagtgtgcaaattgttgaagtctttgtatggtctgaaacaagctcctaagcaatggcatgagaaatttgacaaaacattgacatctgcaggctttgtagtcaatgaggcagataaatgtgtgtactatcgccatggtgggggtgagggagttattttgtgcttgtatgttgatgacatactgatatttgggacaaaccttgaggtgataaatgaggttaaatcattcttgtctcaaaattttgatatgaaggatttgggagtagctgatgttatcttaaacattaagctaattagaggtgagaatgggattacactcttgcagtcccattatgtggagaagatcttgaatcgttttggctacattgatagtaagccttctccaacaccttatgatcctagcttgttgcttcgcaagaacaagagaattgctaggaatcaactagaatactcccaaatcattggctcgttgatgtacctggctagtgcaactaggcctgatatctcctttgctgtgagcaagttgagccgatttacctctaatccgggagatgatcactggcgtgcgcttgagcgagtaatgcgctatctgaaaggtactgtggaattggggcttcactatactgggtatcctgcggtactggagggttatagtgattctaactggatctctgatgtggatgagatcaaagccactagtggatatgttttcacactgggtggtggtgctgtttcatggaggtcttgcaaacagaccattttgacgaggtcaaccatggaagcagagctaacggcactggatactgctactgttgaggcagaatggctgcgtgatctattaatggatctgcttgttgttgaaaaaccggtgccggctatccttatgaactgtgacaatcaaacgacatgtgaaaagacgattgaagtctgtcaggaaattaagaaactccggagttataacgttggattacatccaaacagcgagaaacctggcagatcccttcacgaagggactatcacgaaatgtgatagacaatgcatcgaaggagatgggtttgagacccatttcactgatgtccgctcggcagcctacttcaatggacatcaacacaacatagaagctccccatcagaatcgtaaaaaagaataccgaatgagaacatacattacatatggcattcatataatgctactggatctcaaacttgtatattgctga

SEQ ID NO: 15723 - DNA, 2001 bp, Oryza sativa
  Clone ID: TFbOSC900064j.C1.o13.gm
atggaggacgccaaagctctgcgacgtctcctgaacgacaccgacctcgatcttgtcagtgatcgggaaagacaagcctactacatgctgagtgaccgggagtatgctcacatgcgagaatacgctccggagctgctgaaaaagataggaatacggttgatctacaccggcaagatcaacaacccacggagaggcgtgcacctgcgatcgggagagcaagtctccggaacctctgccttcgacgtcctgcaccgggagaaggcggcaataaggtttttgggaagcgcttcgcgagactgctccctgttcgtccgcgacggctcgccttcctctccgctcgcgtgctgcgcgccttcgtcgacgcccgcaaccacgagtagttcctgccgagcaaccgatctttccgccacctcgtggcttggcgatcgtctggtcgaggtgtatatgcatatgaccgacgctaaggagttgtgggatgcactgaatactaaattcggtgctactgatgctagcaatgatctatatatcatgcagcagtttcatgactacaagatggctgacaaccgttctgtagtcgaacaggctcatgagatacaaaccatggctaaggaacttgaactccttaagtgtgtcttaccagacaaatttgtggccgggtgtattattgcgaaactacctccatcttggagaggtttcggtactgcactcaaacacaagagacaggaatactccgttgaggggttgatagcgtctcttgatgttgaggagaaagctcgggaaaaagacaccgcgtctaagggcgatggtgggcagtgcagtgccaatgttgtgcacaaggccaagaacaagagcaaggggaaatacaaagctcaacagaccaccaacttcaagaagcagaagaagaacaacaacaatcctaaccaacatgagaggacttgctttgtgtgtgggcaacctggtcatctagctaggaagtgtccacagcgcaaggggatgaaggcacctgcagggcagacttctaagtctactaatgtgaccattggcaatactggagatggaagtgggtatggtaattttcctactgtcgcacggggttccaccgtcctaatggggaatgggtcacatgcttctgttcatggtgttggcacggtagatctgatgtttacctcgggaaagatcgtgcagctgaagaacgtgcagcatgtcccttctatagacaggaatcttgttagtggctcctactactggaaggaggctgtccgtagtgaaatggattccattatcgctaacgggacttgggaggtgacagagcgaccctatgggtgtaaacctgtggggtgcaagtgggtgttcaagaagaagcttaggcttgacgcctcacatggtcttctcgttcatcaaatggacgttaagacagcttttcttaatggagagctggatgaggagatctatatggatcaacctgatgggtttgtagttgaaggctttgcagtcaatgaggcaaacaaatgtgtgtactatcgccatggtgggggtgagggagttattatgtgcttgtatgttgacgacatactgatatttgggacaaaccttgagatgataaatgagtcccattatgtggagaagatcttgaatcgctttggctacattgatagtaagccttctccaacacattatgatcctagcttgttgcttcgcaagaacaaaagaattgctaggaatctactggaatactcccaaatcattggctcgctgatgtacctggctagtgcaactaggcctgatatctcctttgccgtgagcaagttgagccggcgtgcacctgcgatcaggagagcaggtctctggaacctctgccttcgacgtcctacactgggagaaggcggcaataaggtttttgggaagcgcttcgcgcgactgctccctgtttgtccgcgacggctcgccttcctctccgctcgcgtgttgcgcgccttcgtcgacgcccgcaaccgcgagtag

SEQ ID NO: 15724 - DNA, 2643 bp, Oryza sativa
  Clone ID: TFbOSC900186j.C1.o17.fg
atggcagatcagggtcactctgtggctggcagcgatgaaatgcttctgggtgtatacatgaccgacgctaaggagttatgggatgcactgaatactaaattcggtgctactgatgctagcaatgatctgtacatcatggagcagtttcatgactacaggatggctgacaaccgttctgtagtcgaacaagctcatgagatacaaaccatggctaaggaactcgaactccttaagtgtgtcgtacccgacaaatttgtggccgggtgcattattgcaaaactacctccatcttggagaagtttcggtactgcactcaaacacaagagacaggaatactctgttgaggggttgatagcgtctcttgatgttgagaagaaagctcgggaaaaagatgctgcgtctaagggcgatggtgggcaatccagtgccaatgttgtgcacaaggcccataacaagagcaaagggaaatacaaagctcaacagaccaccaacttcaagaagcagaagaagaagaagaacaatcctaatcaggatgagaggacttgctttgtgtgtggccaacctggtcatctggccaggaagtgtccacaacgcaaggggatgaaggcacctgcagggcagacttctaagtctgctaatgtgaccattggcaacactagagatggaagcgggtatgtcgcacggggttccaccgtcctaatggggaatgggtcacatgcttctgttcatggtgttggcacggtagatctgaagtttacttcgggaaagatcgtgcagctgaagaacgtgcagcatgtccctactatagacatgaatcttgttagtggctcccgtctgactagagacggatttaagttggtttttgagtctaataaagtagtcgtgtcaaaacatggatattttattggtaaaggttatgagtgcggaggcctgttctgtttttccctttctgatttctgcaataagtctgtgaaccatatttgtggcagtgtggataggggtgggaaaaataagaccgaaccgaagaaccgaaccgaaaagaccgagaccgagaccgaaaagaccgagatcgagaccgaaaagaccgagaccgagaaattcgggtctgatcatggtggagagcttttctcaaacaagtttgacttattttgtgaggaacatggcatcatacatgagaggacgcctccctattctcccgagtctaatgggattgctgaaaggaagaaccgcacactgactgacttggtgaatgccatgttggacaccgcgggactacctaaggcatggtgggggaaggcattgttgacctcgaatcatgtgttaaacagagttcctaatagaaataaggacaaaacaccatatgagatatggattgggagaaaaccatcactttcttatttgcgcacatgggggtgcttagcgaaagtcaatgtaccaataacgaagaagcgcaaacttggacctaagactgtggactgtgtctttctgggatatgctcatcacagcattgcctatagatttttaatagttaaatctgaggtacctgacatgcatgttggtacaattatggagtctcgtgatgctaccttctttgagagctttttcccaatgaaggatacacatagtagttcgagtcaaccctctgaaataattcccaattcaatcactgaacatacacatgaacatgtcactgaggaggatgtcagtgaagctcctcgaaggagtaagagacaaaggacggctaagtcctttggcgatgatttcactgtgtacctcgtggatgatactcctaagtcaatttcagaagcatatgcatctcctgatgcagactactggaaggaggctgtccgtagtgaaatggattccattatcgctaacgggacttgggagtgggtgttcaaaaagaagcttaggcctaacggtactattgaaaagtacaaggctcggcttgttgctaagggctacactcagaaagaaggcgaagatttctttgacacttactcacctgttgctagattgaccacaatttgtgtgctactttccttagcagcctcacatggtcttctcgttcatcaaatggacattaagacaacttttcttaatggagagctggatgagatctatatggatcaacctgatgggtttgtagttgaaggctttgcagtcaatgaggtagataaatgtgtgtactatcgccatggtgggggtgagggagttattctgtgcttgtatgttgatgacatactaatatttgggacaaaccttgaggtgataaataaggttaaatcattcttgtctcaaaattttgatatgaaggatttgggagtagctgatgttatcttaaacattaagctaattagaggtgagaatgggatcacactcttgcagtcccattatgtggagaagatcttgaatcgctttggctacattgatagtaagccttctccaacaccttatgatcctagcttgttgcttcgcaagaacaagagaattgctaggaatcaactggaatactcccaaatcattggctcgctaatgtacttggctagtgcaactaggcttgatatctcctttgctgtgagcaagttgacccggtttacctctaatccgggagatgatcattgcgtgcgcttgagcgagtaa

SEQ ID NO: 15725 - DNA, 4329 bp, Oryza sativa
  Clone ID: TFbOSC900199j.C1.o19.fg
atgtgtggtggagagaaaagggggaacacgcgcgagctcgctcgcctcgcctcgcctcgcctcgcctcgcctggtagggcagggcaggtggcgcgcgtgcacgatgtatgcgtcgaatggtccgcgacggctcgacgcttgcagccgcgagtagttcgtgccgagcaaccggtctttccgccacctcggcactgtgattttactatggctagttttaccgatgcactgaggccggataaattcaccggtgtgcacttcaagagatggcagatcagggtcactctgtggctgacagctatgaaatgcttctgggtgagtactggcaagcctatgggtgttcttaaagctgatcagcagaaagaattcgatgaggccactactctctttgtgggatgcattcttagcgtgcttggcgatcgtctgatcgaggtgtatatgcatatgaccgacgctaaggagttgtgggatgcactgaatactaaattcggtgctactgatgctagcaatgatctgtatatcatggagcagtttcatgactacaagatggttggcaaccgttctgtagtcgaacaggctcatgagatacaagccatggataaggaactcagacttcttaagtgtgtcttacccgacaaatttgtggtcgggtgcattattgcgaaactacctccatcttggagaggtttctatactgcactcaaacacaagagacaggaatactctgttgaggggttgatagcgtctcttgatgttgaggagaaagctcgggaaaaagatgctgcgtctaagggcgatggtggccagtccactgccaatgttgtgcacatggcccagaataagagcaaggggaaatacaaagctcagcagaccaccaacttcaagaagaagaagaacaacaacaatcctaatgaggatgagaggacttgctttgtatgtggtcaacctggccatctggccaggaagtgtccacaacgtaaggggatgaaggcacctgcagggcagacctctaagtctgctaatgtgaccattggcaacactggagatggaagcgggtatggtaatttacctactgttttttcagttaatcagtctactaattggtgggttgatactggggccaatgtcgcacggggttccaccgtcctaatggggaatgggttacatgcttctgttcgtggtgttggcacggtagatctgaagtttacttcgggaaagatcgtgcagctgaagaacgtgcagcatgtcccttctatcgacaggaatcttgttagtggctcccgtctgactagagacggatttaagttggtttttgagtctaataaagtagtcgtgtctaaacatggatattttattggttctaagtgccatagttgtgtgcaatcgaagcaacctcgcaagcctcacaaggctgccgaggagagaaacttagcaccactagaactcctacattcagatctttatgaaatgaatggggtgttgacgaagggtggaaaacgatatttcatgacgttgattgatgatgctactagattatgctatgtgtacttgttaaaaacgaaagacaaggctctagactattttaaaatttataaggcagaagatgaaaatcaacttgacagaaagataaaaaggctttggtctgatcgtggtggagagtttttctcaaacgagtttgacttattctgtgaggaatatggcatcatacatgagaggacgcctccctattctcctgagtctaatgggattgctaaaaggaagaaccacacactgactgacttggtgaatgccatgttggatactgcgggactacctaaggcatggtggggggagacattgttgacctcgaatcatgtgttaaacagagtttctaacagaaataaggacaaaacaccatatgagatatggattaggagaaaaccatcactttcttacttgcgcacatgggggtgcttggcgaaagtcaatataccaataacgaagaagcgcaaacttggacctaagactgtggactgtgtctttctaggatatgttcatcacagcattgcctatagatttttaatagttaaatttgaggtacctgacatacatattggtacaatcatggagtctcgtgatgctaccttctttgagagctttttcccaatgaaggatacacatagtagttctagccaaacctctgaaataattcccaattcaatcacaccactagaacaaactgaacatacacatgaacatgtcactgaggaggatgacagtgaagctcttcgaaggagtaaaagacaaaggacggctaagtcttttggtgatgatttcactgtgtacctcgtggacgacactcctaagtcaatttcagaagcatatgcatctcctgatgcagactactggaaggaagctgtccgtagtgaaatggattccattatcgctaacggaacttgggagatgacagagcgaccctatgggtgtaaacctgtggggtgcaagtgggtgttcaaaaagaagctgaggcctgatggtaccattgaaaagtacaaggctcggcttgttgctaagggctatactcagaaagaaggcgaagatttcttttacacttactcacctgtttccagattgaccacaattcgtgtgctactttccctagcagcctcacatggtcttctcgttcatcaaatggacattaagacagcttttcttaatggagagctggatgaggagatctatatggatcagcctgatgggtttgtagttgaaggcttcgcagtcaatgagacagataaatgtgtatactatcgccatggtgggggtgagggagttattctgtgcttgtatgttgatgatatactgatatttgggacaaaccttgaggtgataaatgaggttaaatcattcttgtctcaaaaatttgatatgaaggatttgggattagctgatgttatcctaaacattaagctaattagaggtgagaatgggattgcacttttgcagtcccattatgtggagaaaattttgaatcgctttggctacattgatagtaatccttctccaacaccttatgattctagcttgttgcttcgcaagaacaagagaattgctaggaatcaactggaatacttccaaattattggctcgctgatgtacctggctagtgcaactaggcctgatatctcctttgctgtgagcaagttgagccggtttacctctaatccgggagatgatcactggcgtgcgcttgagcgagtaatgcgctatctgaaaggtactatagaattggggcttcactattctaggtatcctgcggtactggaaggatatagtgattttaactggatctctgatgtggatgagatcaaagccactagtggatatgccttcacactaggtggtggtgctgtttcgtggaggtcttgcaaacagaccattttgacgaggtcaaccatggaagcagagttgacggcactagacactgctactgttgaggcagaatggctgcgtgatctattaatggatctgcctattgttgaaaaaccggtgccggctatccttatgagctatgacaatcaaacggtaattgtcaaagtgaatagttctaaggataatatgaaatcgtctagacatgtgaaaagacgattgaagtctgtcaggaaattgagaaactccggagttataacatttgattacatccaaacagctagaaagctggcagatcccttcacgaagggactatcacgaaatgtgatagacaatgtatcgaaggagatgggtttgagacccatgaaaattcggatttgttttgttttggaaacactccgaaaaatccgggtttgcctcctactctatactgcgccgtcgctcatagactactccatcccgctcgccggcgtgcaccggcgatcaggagagcaggtctccggaacctctgccttcgatgtcctgcaccgggagaaggcggcaataagtactagcatgcatcaatttgctgggcaggctcagccggaggaggagcagaagtgcgtccactgcggcggtggcgtcgccggagcgcaggtggaggcggcactgaaccgcaagaacgtggaggcgctcccggaggatgagacggtggagggcggcccagatgacgtgtgggtgcccgaccacgagacttgcgtcttcgtccccgccgacaaggccgccgtcttcggcactgaaaaccatgaccactgcggagcggcggcggtggccggcggctcgccgtcggtgcttgaccaggctgtgttcgtccatgaggaggacatggaggacgtcgagaggccggccgtcgacatggccgctgccaatcacaagcccaaatga

SEQ ID NO: 15726 - DNA, 3672 bp, Oryza sativa
  Clone ID: TFbOSC900250j.C1.o4.fg
atggctaaggaactcaaactccttaagtgtgtcttacccgataaatttgtggccgggtgcattattgcgaaactacctccatcatggagaagtttcggtactgcactcaaatacaagagacaggaatactccgttgaggggttgatagcgtctcttgatgttgaggagaaagctcgggaaaaagacgccgcgtataagggcgatggtgggcagtccagtgccaatgttgtgcacaaggcccagaacaagagcaaggggaaatacaaagctcaacagaccaccaatttcaagaagcagaagaagaacaacaacaatcctaaccaggataagaggacttgctttgtgtgtgggcaacctggtcatctggctaggaagtgtccacagcgcaaggggatgaaggcacctgcagggcagacttctaagtctgctaatgtgaccattggcaacactggaaatggaagcgggtatggtaatttacctactgttttttcagttaatcagtctactaattggtgggttgatactggggccaatgtacatgtttgtgctgacatctcattgttttcttcttatcaggtcgcacggggttccaccgtcctaatggggaatgggtcacatgcttctgttcatggtgttggcacggtagatctgaagtttacttcgggaaagatcgtgcagctgaagaacgtgcagcatgtcccttctatcgacaggaatcttgtcagtggctcccgtttgactagagacggatttaagttggtttttgagtctaataaagttttcgtgtctaaacatggatattttattggtaaaggttatgagtgcggaggcctgttccgcttttccctttctgatttctgcaataagtctgtgaaccatatttgtggcagtgtggatgatgaggctaatgtttggcactcacgtttatgtcatattatttttggcttgatgtctcgactttccagcatgtgtctaattcctaagttttccattgtcaaaggttctaagtgccatagttgtgtgcaatcgaagcaacctcgcaagcctcacaaggctgccgaggagagaaacttggcaccactagaactcctacattcagatctttgtgaaatgaatggggtgttgatgaagggtggaaaacgatatttcatgacgttgattgatgatgctactagattttgctatgtgtacttgttgaaaacgaaagacgaggctttagactattttaaaatttataaggcagaagttgaaaatcaacttgacagaaagataaaaaggcttaggtctgatcgtggtggagagtttttctcgaacgagtttgacttattttgtgaggaacatggcatcatacatgagaggacgcctccctattctcccgagtctaatgggattgctgaaaggaagaaccgcacactgactgacttggtgaatgccatgttggacaccgcgggactacttaaggcatggtggggggaggcattgttgacctcaaatcatgtgttaaacagagttcttaacagaaataaagacaaaacaccatatgagatatggattgggagaaaaccatcactttcttatttgcgcacatgggggtgcttggcgaaagtcaatgtaccaataacgaagaagcgcaaacttggacctaagactgtggactgtgtctttctgggatatgctcatcatagcattgcctatagatttttactagttaaatccgaggtaccggacatgcatgttggtacaattatgaagtctcgtgatgctaccttctttgagagctttttcccaatgaaggatacacatagtggttcgagtcaaccctctgaaataattcccagttcaatcacaccaccagaacaaattgaacatacacatgaacatgtctctgaggaggatgtcagtgaagctcctcgaaggagtaagagacaaaggacggctaagtcctttggtgatgatttcactgtgtacctcgtggatgacactcctaagtcaatttcagaagcatatgcatctcctgatgcagactactggaaggaggctgtccgtagtgaaatggattccattatcgctaacgggacttgggaggtgacagagcgaccctatgggtgtaaacctgtggggtgcaagtgggtgttcaagaagaagcttaggcctgacggtactattgaaaagtacaaggctcggcttgttgctaagggctatactcagaaagaaggcgaagatttctttgacacttactcacctgttgctagattgaccacaattcgtgtgctactttccctagcagcctcacatggtcttctcgttcatcaaatgaacgttaagacagcttttcttaatggagagctggatgaggagatctatatggatcaacctaatgggtttgtagttgtaggtcaaggcaaagtgtgcaaactgttgaagtctttgtatggtctgaaacaagctcctaagcaatggtataagaaatttaacaaaacattgacatctgcaggctttgcagtcaatgaggcagataaatgtgtgtactatcgccatggtgggggtgagggagttattctgtgcttgtatgttgacgacatactgatattgggacaaaccttgagaggtgagaatgggattacactcttgcagtcccattatgtggagaaaatcttgaatcgctttggctacattgatagtaagccttctccaacaccttatgatcctagcttgttgcttcgcaagaacaaaataattgctaggaatcaactggaatactcccaaatcattggctcgctgatgtacctggctagtgcaactaggcctgatatctcctttgttgtgagcaagttgagccggtttacctctaatccgggagatgatcactggcatgcgcttgagcgagtaatgcactatctgaaaggtactatggaattagggcttcactatactgggtatcgtgcggtactggagggttatagtgattctaactggatctctgatgtggatgagatcaaagctactagtggatatgtcttcacactgggtggtggtgctgtttcgtggaggtcttgcaaacagaccattttgacgaggtcaaccatggaagcaaaactgacggcactggatactgctactgttgaggcagaatggttacgtgatctattaatggatctgcctattgttaaaaaaccggtgccggctatccttatgaactgtgacaatcaaacggtaattgtcaaagtgaatagttctaaggataatatgaaatcgtctagacatgtgaaaagacgattgaagtctgtcaggaaattgagaaactccggagttataacgttggattacatccaaacagctagaaacctggcagatcccttcacgaagggactatcacgaaatgtgatagacaatgcatcgaaggagatgggtttgagacccatcgaagatgctgtcctgcagagcagtcttgaaagaactcacctttgtaagcttgactattggtcgcagtctatggagattttgggtgaatcttctaggaagcttactaaagacctaggaatgcctgcgaaaagtttcgaccgagcagccggtctttccgccacctcgggagagactggaggaagggggaacagataccccgaagaaatcgagcatgagaagaagggcgtgggaaagatcgtgcatacgtag

SEQ ID NO: 15727 - DNA, 2682 bp, Oryza sativa
  Clone ID: TFbOSC900297j.C1.o4.gm
atggggaggacggcacagacctcgacgctgtcgattgtgctcccggctccctcctctccgactatgctgccccactactccatcccgctcaccggcgtgcaccggcgatcgggagagcaggtctccggaaccattgccttcgacgtcctgcaccgggagaaggcggcaataagcgttcttggcgatcgtatggtcgaggtgtatatgcatatgaccgacgctaaggagttgtgggatgcactgaatactaaattcggtgctactgatgctagcaatgatctgtatatcatggagcagtttcatgactacaagatggctgacaaccgttctgtagtcgaacaggctcatgagatacaaaccatggctaaggaactcgaactccttaaatgtgtcttacccgacaaatttatggccggtgccaatgttgtgcacaaggcccagaacaagagtaaggggaaatacaaagctcaacagaccaccaacttcaagaagcagaagaagaacaacatcaatcctaatcaggatgagaggacttgctttgtgtgtgggcaacctggtcatctggctaggaagtgtccacaacgcaaggggatgaaggcacctacaaggcagacttctaagtctgctaatgtgaccattggcaatactagagatggaagcaggtatggtaataatactggagatggaagcaagtatggtaatttacctactgtcgcacggggttccaccgtcctaatggggaatgggtcacatgcttctattcatggtgttgacatggtagatctgaagtttacttcgggaaagatcgtgcagctgaagaacatgcagcatgtcccttctatcgacatgaatcttgatacacatagtagttcgagccaaccctctaaagtaattcccagttcaatcacaccaccagaacaaactgaacatacacatgaacatgtcactgaggaggatgtcagtgaagctcctcgaaggagtaagagacaaaggacggctaagtcctttggtgatgatttcaccatgtacctcgtggatgacactcctaagtcaatttcagaagcatatgcatctcctgatgtagactactggaaggaggctgtccatagtgaaatggattccattatcgctaacgggacttgggaggtgacagagcgaccctgtgggtgtaaacctgtggggtgcaagtgggtgttcaagaagaagcttaggcctgacgtcaatgaggcagataaatgtgtgtactatcgccatggtgggggtgagggagttattctgtgcttgtatgttgatgacatactgatatttgggacaaaccttgaggtgataaatgagtctcattatgtggagaagatcttgaatcgctttggctacattgatagtaagccttctccaacaccttatgatcctagcttgttgcttcgcaagaacaaaagaattgctaagaatcaactggaatactcccaaatcattggctcgctgatgtacctggctagtgcaactaggcctgatatctcctttgctatgagcaagttgagccggtttacctctaatccgggagatgatcactggcgtgcgcttgagcgagtaatgcgctatctgaaaggtactatgaaattggggcttcactataatgggtatcctgcggtactggagggttatagtgattctaactggatctctgatgtggatgagatcaaagccactagtggatatgtcttcacactaggtggtggtgctgtttcgtggaggttttgcaaacagaccattttgacgaggtcaaccatggaagcagaactgacggcactggatattgctactgttgaggctgaatggctgcgtgatctattaatggatctgcctattgttgaaaaaccggtgccggctatccttatgaactatgacaatcaaacgggcaggcggtgcgcgtgcacgatgtacgcgtcgaatgactactctatcccgctcgccggcgtgcaccggcgattgggagagcaggtctccggaatctctgccttcgacatcctgcaccaggagaaggcggcaataaggtttttgggaagcgcttcgcgcgactgctccctgttcgtccgcgatggctcaccttcctctccgctcgcgtgcttcgcgccttcgtcgacgctcgcaaccgcgagtagttcctgccgagcaaccggtctttccgccacctcgggtcacaagcaaaaggaggggagttcattcccggtgcctcccatgcccatcatctggaaacgaacaccggtgcaggagatcatgtgtgcatatcgtgtagcagcgccggtgagcggcgaggatgaggcggcgccggcgagtagcgagaggacggggagaaggcaaggcggccatggtatctccttccccgtcgtcaatgagctcttccgccatatcctcgcccctcctcgaccgtcctcgccggcggcggccgcggccgcgcccgctccccgcacccctctgctactgacgatgagagaggaggacggaaagagtgaagggagtggcatgattttaattttagaaattttcagtggtacccagccgataacacaaatagtagtgctgatgagcatggccgcgcggaactctaacgagccttacgatcttgttgcgaagaagtcccctctcgttgttctgctgcttacagtcgttggtgtccgagagtag

SEQ ID NO: 15728 - DNA, 1152 bp, Oryza sativa
  Clone ID: TFbOSC900312j.C1.o12.fg
atggctgacaaccgttctgtagtcgaacatgctcatgagatacaaaccatggctaaggaactcgaactccttaagtgtgtcttacccgacaaatttgtggccgagtgcattattgcaaaactacctccatcttggagaggtttcggtactgcactcaaacacaagagacaggaatactccgttgaggggttgatagcatctcttgatgttgaggagaaagctcgggaaaaagatgccgcgtctaagggcgatggtggacagtccactgccaatgttgtgcacaaggcccagaacaagagtaaggggaaatacaaagctcagcagaccaccaacttcaagaagaagaagaacaacaacaatcctaatcaggatgagaggacttgctttgtgtgtggtcaacctggtcatctggccaggaagtgtccacaacgcaaggggatgaaggcacctgcagggcagacctctaagtctgctaatgtgaccattggcaacactggagatggaagcgggtatggtaatttatctactgttttttcagttaatcagtctactaattggtgggttgatacagggggcaatgtcgcgcggggttccaccgtcctaatggggaatgggtcatatgcttctattcatggtgttggcacggtaggtcgagccgaaccaactaactgctacagccaaaaatgcaagggcaatttcacattacgaaaatgcagcctccgcctagccgccgaggatgagatccatgccctcctcgccatcatggagctcggcgcattccttcactcactcctcctccgcccggctgccagggatgagatcaatgccttcatgtcggcatggagttcggcgcgctcctccgcttactcggcccctgtctggcaaagcccacttctaataccatcgagttcgacgtgggttccgtcgagtttgatcgacgtgctcgcctccatactcacagaactcatcgtcgggccttgctgccccatcatcaccctcgaccaggcggaggtcaccgaggccttcagggcctttgactgcaagggcaacggcttcatctctgccattgagctcacacgctccatagctgacacggcgacaccgacagcctcatcatccttttatttgactgtgggtcccatcacccactga

SEQ ID NO: 15729 - DNA, 3249 bp, Oryza sativa
  Clone ID: TFbOSC900381j.C1.o18.fg
atggctggttttgccgatgcactgaggccggataaattcaccggtgtgcactttaagagatgcagaagcaattcgaggaagccactctttgtgggatgcattcttagcgttcttgacgatcgtctggtcgaggtgtatatgcatatgaccgacgctaaggagttgtgggatgcactgaatactaaattcggtgctactgatgctagcaatgatctgtatatcatggagcagtttcatgactacaagatggctgacaaccgttctgtagttgaacaggctcatgagatacaaaccatggctaaggaacttgaactccttaagtgtgtcttacccgacaaatttgtggctgggtgcattattgcgaaactacctccatcatggagaagtttcgcgtctcttgatgttgaggagaaagctcgggaaaaagacgccgcgtctaagggcgatggtgggcagtctagtgccaatgttgtgcataaggcccagaacaagagcaaggggaaatacaaagctcaacagaccaccaacttcaagaagcagaagaagaacaacaatcctaaccaggatgagaggacttgctttgtgtgtgggcaacctggtcatctggctaggaagtgtccacagtgcaaggggatgaaggcacctgcagggcagacttctaagtctgctaatgtgaccattggcaacactggagatgggagcgggtatggtaatttacctactgttttttcagttaatcagtctactaattggtgggttgatactggggccaatgtcgcacggggttccaccgtcctaatggggaatgggtcacatgcttctgttcatggtgttggcacggtagatctgaagtttacttcgggaaagatcgtgcagctgaagaacgtgcagcatgtcccttctatcgacaggaatcttgttagtggctcccgtctaactagagacaaatttaagttggtttttgagtctaataaagtagtcgtgtctaaacatggatattttaatggtaaaggttatgagtgtggaggcctgttccgcttttccctttctgatttctgcaataagtctgtgaaccatatttgtggcagtgtggatgatgaggctaatgtttggcactcacgtttatgtcatattaattttggcttgatgtctcggctttccagcatgtgtttaattcctaagttttccattgtcaaaggttctaagtgccataggtgtgtgcaatcgaagcaacctcgcaagcctcacaaggctgccgaggagagaaacttggcaccaatagaactcctacattcagatctttgtgaaatgaatggggtgttgacgaagggtgaaaaacgatatttcatgacgttgattgatgatgctactagattttgctatgtgtacttgttgaaaacgaaagacgaggctctagactattttaaaatttataaggcagaagttgaaaatcaacttgacagaaagataaaaaggcttaggtctgatcgtggtggagagtttttctcgaatgagtttgacttattttgtgaggaacatggcatcatacatgagaggacgcctccctattctcccgagtctaatgggattgctgaaaagaagaaccgcacactgactgacttggtgaatgccatgttggacaccgcgggactacctaaggcatggtggagggaggcattgttgacctcaaatcatgtgttaaacagagttcctaacagaaataaggacaaaacaccatatgagatatggattgggagaaaaccatcactttcttatttgcgtacatgggggtgcttggcgaaagtcaatgtactaataacgaagaagtgcaaacttggacctaagattgtggactgtgtctttctgggatatgctcatcatagcattgcctatagatttttaatagttaaatccgaggtaccggacatgcatgttggtacaattatggagtctcgtgatgctaccttctttgagagctttttcccaatgaaggatacacatagtggttcgaggcaaccctctgaaataattcccagttcaatcacaccaccagaacaaactgaacatacacatgaacatgtctctgaggaggatgtcagtgaagctcctcgaaggagtaagagacaaaggacggctaagtcatttggtgatgatttcactgtgtacctcgtggatgacactcctaagtcaatttcagaagcatatgcatctcctgatgcagactactcgaaggaggctgtccatagtgaaatggattccattatcgctaacgggacttgggaggtgacagagcgaccctataggtgtaaacctgtggggtgcaagtgggtgttcaagaagaagcttaggcttgacggtactattgaaaagtataaggctcggcttgttgctaagggctatactcaaaaagaaggcgaagatttctttgacacttactcacctgttgctagattgaccacaattcgtgtgctactttccctagcagcctcacatggtcttctcgttcatcaaatggacttctcgttcatcaaatggacgttaagacagcttttcttaatggagagctggatgaggagatctatatggatcaatctgatgggctttgcagtcaatgaggcagataaatgtgtgtactatcgccatggtgggggtgagggagttattttgtgcttgtatgttgacgacatactgatatttggaacaaaccttgaggtgataaatgaggttaaatcattcttgtctcaaaattttgatatgaaggatttgggagtagctgatgttatcttaaacattaagctaattagagaacttgggaggaatgtgctggtccacgtgcgcccacgtcgatcggctgggagctccccacagaacacgttgttcgcgagtgcgagaccttgcaacgacgtcatgttgaagaaactcggcgggatctctccggtgaggctgttctgcgacaaggctaacatgcggagcgccgggaggtgtgacaagccgtcggggatggaacttcccagaaggttctggtcgaactcgagctgcacgatcttcgtgaggttcgccagcgatggcgggaagtggccggagagcgagttgtggctgagctggagcaccgtgagattcggcaacgcgtcaagccaccgtggaatgccgccgacgatcgaggttgttgtttttgaggtacgcgacgtcgagggcggtgcaattgtggagcgcgtcaggtatctcgccggcgaacgcgttgtcgcatag

SEQ ID NO: 15730 - DNA, 3906 bp, Oryza sativa
  Clone ID: TFbOSC900389j.C1.o9.np
atggctggttttgccgatgcactgaggccggataaattcaccggtgtgcactttaagagatggcagatcagggtcactctgtggctgacggctatgaaatgcttctgggtgagtactggcaaacctgaaggaattcttactgttgatcagcagaagcaattcgaggaagccactactctctttgtgggatgcattcttagcgttcttggcgatcgtctggtcgaggtgtatatgcatatgaccgacgctaaggagttgtgggatgcactgaatactaaattcggtgctactaatgctagcaatgatctgtatattatggagcagtttcatgactacaagatggctgacaaccgttctgtagtcgaagaggctcatgagatacaaaccatagctaaggaactcgaactccttaagtgtgtcttacccgacaaatttgtggccgggtgcattattgcgaaactacctccatcatggagaagtttcagtactgcacttaaacacaagagacaggaatactccgttgaggggttgatagcgtctcttgatgttgaggagaaagctcgggaaaaagacgccgcgtctaagggcgatggtgggcagtccagtgccaatgttgtgcacaaggcccagaacaagagcaaggggaaatacaaagctcaacagaccaccaacttcaagaagtagaagaagaacaatatcaatcctaaccaggatgagaggacttgctttgtgtgtgggcaacctggtcatctggctaggaagtgtccacagcgcaacgggatgaaggcacctgtagggcagacttctaagtctgctaatgtgaccattggcaatactggagatggaagcgggtatggtaatttacctactgttttttcagttaatcagtctactaattggtgggttgatactggggccaatgtacatgtttgtgttgacatctcattgttttcttcttatcaggtcgcacggggttccaccgtcataatggggaatgggtcacatgcttctgttcgtggtgttggcatggtagatatgaagtttacttcgggaaagatcgtgcagctgaagaacgtgcagcatgtcccttctatcgacaggaatcttgttagtggctcccgtctgactagagacggatttaagttgggttttgagtctaataaagtagtcgtgtctaaacatggatattttattgataaaggttatgagtgcggaggcctgttccgcttttccctttctgatttctgcaatatgtctgtgaaccatatttgtggcagtgtggatgatgaggctaatgtttggcactcacgtttatgtcatattaattttggcttgatgtttcggctttccagcatgtgtttaattcctaagttttccattgtcaaaggttctaagtgccatagttgtgtgcaatcgaagcaacctcgcaagcctcacaaggctgtcgaggagagaaacttggcaccactagaactcctacattcagatctttgtgaaatgaatggggtgttgacgaagggtggaaaacgatatttcatggcattgattgatgatgctactagattttgctatgtgtacttgttgaaaacgaaagacgaggctctagactattttaaaatttataaggcagaagttgaaaatcaacttgacagaaagataaaaaggcttaggtctaatcgtggtggagagtttttctcaaacgagtttgacttattctgtgaggaacatggcatcatacatgagaggacgccttcctattctcccgagtctaatgggattgctgaaaggaagaatcgcacactgactgacttggtgaatgccatgttggacaccgcgggacaacctaaggcatggtgggggaggcattgttgacctcgaatcatgtgttaaacagagttcctaacagaaataaggacaaaacaccatatgagatatggattgggagaaaaccatcactttcttatttgcgcacatgggggtgcttggcgaaagtcaatgtaccaataacgaagaagcacaaacttggacctaagactgtggactgtgtctttctgggatatgctcatcacagcattgcctacagatttttaatagttaaatccgaggtacctgacatgcatgttggtacaattatggagtctcgtgatgctaccttctttgagagctttttcccaatgaaggatacacatagtagttcgagttaaccctctgaagtaattcccagttcaatcacaccaccagaacaaactgaacatacacatgaacatgtcactgaggaggatgtcagtgaagctcctcgaaggagtaagagacaaaggacggctaagtcctttggtgatgatttcactgtgtacctcgtgaatgacactcctaagtcaatttcagaagcatatgcatctcctgatgcagactaatggaaggaggctgtccgtagtgaaatggattccattatcgctaacgggacttgggaggtgacagagcgaccctatgggtgtaaacctgtggggtgcaaatgggtgttcaagaagaagcttaggcctgacggtactattgaaaaaagtacaaggctcggcttgttgctaagggctatactcagaaagaaggcgaagatttctttgacacttactcacctgttgctagattgaccacaattcgtgtgctactttccctagcagcctcacatggtcttctcgttcatcaaatggacgttaagacagcttttttaatggagagctggatgaggagatctatatggatcaacctgatgggtttgtagttgaaggtcaagaaggcaaagtgtgcaaattgttgaagtctttgtatggtctgaaacaagctcctaagcaatggcatgagaaatttgacaaaacattgacatctgcaggctttgcagtcaatgaggcagataaatgtgtgtactatcgccatggtgggggtgagggagttattctgtgcttgtatgttgacgacatactgatatttgggacaaaccttgaggtgataaatgaggttaaatcattcttgtctcaaaattttgatatgaaggatttgggagtagctgatgttatcttaaacattaagctaattagaggtgagaatgggattacactcttgcagtcctattatgtggagaagatcttgaatcgctttggctatattgatagtaagccttctccaacaccttatgatcctagcttgttgctttgcaagaacaaaagaattgctaagaatcaactggaatactcccaaatcattggctcgctgatgtacctggctagtgcaactaggcctgatatctcctttgctgtgagcaagttgagccggtttacctctaatccgggagatgatcactggcgtgcgctcgagcgagtaatgcgctatctgaaaggtattatggaattggggcttcactatactgggtatcctgcggtactggagggttatagtgattctaactagatctctgatgtggatgagatcaaagccactagtggatatgtctttacactgggtggtggtgctgtttcgtgcaggtcttgcaaacagaccattttgatgaggtcaaccatggaagcagaactgacagcactggatactactactgttgaggcagaatggctgcgtgatctattaatggatctgcctattgttgaaaaaccggtgccggctatccttatgaactgtgacaatcaaacggtaattgtcaaagtgaatagttctaaggataatatgaaatcgtctagacatgtgaaaagacgattgaagtctgtcaggaaattgagaaactccggagttataacgttgaattacatccaaacagctagaaacctagcagatcccttcacgaaaggactatcacgaaatgtgatagataatgcattgaaggagatgggtttgagacccatg

SEQ ID NO: 15731 - DNA, 1965 bp, Oryza sativa
  Clone ID: TFbOSC900404j.C1.o25.gm
atggggaggacggcacagacctcgacgctgtcgattgtgctcccggctccctcctctccgactatgctgccccactactccatcccgctcaccggcgtgcaccggcgatcgggagagcaggtctccggaaccattgccttcgacgtcctgcaccgggagaaggcggcaataagcgttcttggcgatcgtatggtcgaggtgtatatgcatatgaccgacgctaaggagttgtgggatgcactgaatactaaattcggtgctactgatgctagcaatgatctgtatatcatggagcagtttcatgactacaagatggctgacaaccgttctgtagtcgaacaggctcatgagatacaaaccatggctaaggaactcgaactccttaaatgtgtcttacccgacaaatttatggccggtgccaatgttgtgcacaaggcccagaacaagagtaaggggaaatacaaagctcaacagaccaccaacttcaagaagcagaagaagaacaacatcaatcctaatcaggatgagaggacttgctttgtgtgtgggcaacctggtcatctggctaggaagtgtccacaacgcaaggggatgaaggcacctacaaggcagacttctaagtctgctaatgtgaccattggcaatactagagatggaagcaggtatggtaataatactggagatggaagcaagtatggtaatttacctactgtcgcacggggttccaccgtcctaatggggaatgggtcacatgcttctattcatggtgttgacatggtagatctgaagtttacttcgggaaagatcgtgcagctgaagaacatgcagcatgtcccttctatcgacatgaatcttgatacacatagtagttcgagccaaccctctaaagtaattcccagttcaatcacaccaccagaacaaactgaacatacacatgaacatgtcactgaggaggatgtcagtgaagctcctcgaaggagtaagagacaaaggacggctaagtcctttggtgatgatttcaccatgtacctcgtggatgacactcctaagtcaatttcagaagcatatgcatctcctgatgtagactactggaaggaggctgtccatagtgaaatggattccattatcgctaacgggacttgggaggtgacagagcgaccctgtgggtgtaaacctgtggggtgcaagtgggtgttcaagaagaagcttaggcctgacgtcaatgaggcagataaatgtgtgtactatcgccatggtgggggtgagggagttattctgtgcttgtatgttgatgacatactgatatttgggacaaaccttgaggtgataaatgagtctcattatgtggagaagatcttgaatcgctttggctacattgatagtaagccttctccaacaccttatgatcctagcttgttgcttcgcaagaacaaaagaattgctaagaatcaactggaatactcccaaatcattggctcgctgatgtacctggctagtgcaactaggcctgatatctcctttgctatgagcaagttgagccggtttacctctaatccgggagatgatcactggcgtgcgcttgagcgagtaatgcgctatctgaaaggtactatgaaattggggcttcactataatgggtatcctgcggtactggagggttatagtgattctaactggatctctgatgtggatgagatcaaagccactagtggatatgtcttcacactaggtggtggtgctgtttcgtggaggttttgcaaacagaccattttgacgaggtcaaccatggaagcagaactgacggcactggatattgctactgttgaggctgaatggctgcgtgatctattaatggatctgcctattgttgaaaaaccggtgccggctatccttatgaactatgacaatcaaacggaaattgagaaactccggagttataacgttggattacatccaaacagctag

SEQ ID NO: 15732 - DNA, 645 bp, Oryza sativa
  Clone ID: TFbOSC16941j.C1.o1.fg
atggccaaccaacatgcccgttctaatggagagaagcatcaaggcaacacaaatcctcgccaagattacagtttcagcctaactccagtgccaggacagaggaatcaaaatgagaaaagaaaatgccgagtccggaaagatatctgttgcttcagttgtcaagaaatgggtcatttcgctgacaagtgcccaaaaccgagaaacatggctgccagcacgtcagtccacgcaactccccgcaatcagaagcttgctcctcagcgaattgtcatccatgcatcccgaagcagtcctatagcacgcgttgcaacagctccaactccaacgagtgcactaccacaaggtgtcaatgcaccatttcagtcccatccacctgctgacgagacagaggccagtatctgcgttgtacctttggatgttccaatacagcagctgataaatcaagtacaagatgaagaacccgagtgtaagaaagttattgtttgttacaactgtagtgaagaagggcattactcgagggactgtcctcaaccaaggcaaaatcggcccccacattttcgccaatttacaggaagcaaacatgccaatcgccaagtggtcactggagcaaatgcagtacctgttaagcctagtgctagtcaatag

SEQ ID NO: 15733 - DNA, 403 bp, Oryza sativa
  Clone ID: TFbOSC423269j.C1.o2.gp
tactaataagatagaactgatcacccgctgctcggtgattcagtgagggagggggagcaaaacgcatcatgggagggagctggatctgacgccgcgagcagcgcctagtaggtcttgctggggcactcgcgagcgatgtggccggtctcgccgcagttgtagcacccgccgccgccgccgccaccaccaccgccgcggtagccgccgccaccaccaccgtagccaccaccgccgcctcctccctgggagcagtccctggccatgtggccctcctcgccgcacttgtagcacgcgcggctgcctccgccgccgccgccgccgtactccgacgccatctcgacctcgccctcgccctctcgccgccgccgccgccgcaacccaaaaccctagaaaccctagatcg

SEQ ID NO: 15734 - DNA, 4705 bp, Oryza sativa
  Clone ID: TFbOSC900284j.C1.o10.np
atggctagccgcccccgccgtgcagctcgtgcgccagcccgctttggttttgaagaaggtagagttgagccagaagaaaatcatgagtcagctaatgagcagtctcaccacagcaaccgttcgcaccgtactgcttcccgcaacgcagaagttgagcaaccacgccgcagcaaccgctcgcatcacacagctccccgtaatgcagagatggaacagtctcaccgcactgctagtcacaattctggagaagaacgccttccttccccacctcatgtggaaaacaacatgcagcacttaatggcagttcagacacaaatcttgcaaggattagccgcagccgtagccggttttcagcataatgcgcatggaaatggccaccctcatatgagcaacaatagatccaagctgacagattttctgaggtctcgtccgccagagttctctcagaccgtcgagcccgtcgaggctgacgattggctgaaagatgttgatagaaaactcaacttagtgcaatgtactccggttgagaagacgctctacgcctctcaccagctaagaggacctgctgcagattggtgggagaattactgcaacgcacaccctgaacccactaacattgcttgggatgagtttgctacggctttccgtgcagctcatgtgcctgaaagcactattgacatgaagaaagaagaattcaacagacttaagcaaggcaacagcagtgtcaatgagaacctaagtatgttcaacaagttggctcggtacgcccctgaggaagtggacacagacaagaagaagatcaggaaattcttgaaagggatcgcagttggaatgagactccagttgcttgctcatgacttccccacttttcaacatatgatcaacaaggcacttctacttgaggatgccagaaaagaggctaccgaagaatacaagaaacgcaagtctaaccatcaggaaattcttcccgaggcgcgcctcgccctcgctacggacaacccatgcaataccaccagtcagtcactcaggctaaccgccagccaggctacgcccctcgtcctcagatgaaccgtccggcccctcagccacagcagcgtgcccctagtggcaatactgcgccaaacagtgttacctctttcaagtcaccacagggaccgtcagcagttcagtgtttccggtgcaaccagataggtcactatgccagacagtgccctcagaaccctaccaacaccaactcagggcatgctaatggcagcactgccagagctcctactccagcggcagctcagtctcgtcctagctctcaggcaagtggacaaggttcacgtgcatccaacaactttggtcgaggccgggtgaatcacattcaagctgaaaccgctcaggatgctccagacgttgtgatgggtatgttctctgtcaactccgtacccgcaatagttctgtttgattcaggagcttcccattctttcatatcacaagcttttgtgaaaagaaatggttggaaaacccaaaatttacgtgtaccaatgatagtacattcccctggaagaaatataagggcaactcaaatatgcccggaagttaaccttagaattgaggaagttgacttcctagccaaaccgatagtcctagactcgcaaagcttggacatcatcctagggatggattggttggctaagcacaaaggacagatagattgtgccgaaaagtccatcactttgcaaggacctggaggaaagcaagtccgctttacctctaacacccctaccgcaagtcggtctatcctaacctgtttacaagtcaccaccttggagtcggtgcccatagtctgtgaatatcccgacgtatttccggaagaattaacgagtatgccactagaccgagagattgagttcgccatagaactggcgccaggcactgcaccaattgcaaaaagaccctaccgaatggcagctaatgagttagcagaagttaaaagacaaatcgaagaattggagggtaaaggttatgtgcgacctagctcatccccttggggagccccagtgcttctggttaagaaaaaggatggctctgagagaatggtaatcgactatagagccctgaatgaagtaactataaagaacaagtacccgttgccacggattgatgatttattcgatcaacttaatggagcaagagttttctcaaaaattgacttgaggtcaggttaccaccaactgaaaatcagatctgaagatatcccgaagaccgctttctcaacgcgttatggtctatatgagttcacagtaatgtccttcggactcaccaatgctccagcattcttcatgaacttaatgaacaaaatctttatggaatacctggaccagtttgtcgtggtgttcatcgatgacatcctgatatactccaagaacgaggaagacatgccgaacacctgaggctgataatggaaaagctcagagatcatcaactattcgctaaattctcgaaatgcgaattctggttagaccgagtagcatttcttggacacgtgatctcctccaacggtgtcgaagtagatcccagcaaagttgaggctgtacttgcttggaacccgcccaagaatgtgttagagattcgcagcttccttggcttagctggatattatcgaagattcattgaaggattctctaagctagccagacctatgaccgagctgttaaagaaggaaaagaaatttcaatggtctgcagcctgtgaagacagctttcaagaaatgaagaaaaggttgaccactgccccagttctcaccttgccagatattcgaaaagatttcgagatcttctgtgatgcatcaagacaaggcttaggatgtgtcctaatgcaagaacgaaaggttgtggcctatgcatccaggcagctcaggcctcatgaagtcaattatcccacccacgatctcgagttggcagccgtggttcatgctcttaagatctggaggcactatctaatcgggaacagatgtgaagtatacaccgatcacaaaagtcttaagtacatcttcactcagaccgagttaaatatgaggcagagaagatggctggaactaatcaaggattacgatcttggaattcattaccaccccggtaaagctaacgtggtcgctgatgcgctaagtcgcaaggcctattgcaatatagctcaaatacggcctgaccaagatcgcctgtgcagagaattggagaagttaaggctgaccgtggtacagtcaggtgtccctgccagcttgacagtacagcctaccctagaatcgcaaatccgggaagctcagaaagacgacgaagggataaaagagttaataaaaagaatacaggagaagaaagacaccaatttctccatagacaatcaaggcacagtttggtgcggtccacgcatctgtgtaccggccaagaaggagttaagagatctcatcctaaaggaagctcatcagtccgcctactccattcatccaggaagtacgaagatgtaccaagatatcaaggcatacttctggtgggctggaatgaagcgagacgtcgcagaatacgtagccttgtgtgacatttgccaaagagtcaaggcagagcatcagaggccagctggtctgctgcaacccctaccgattcccgagtggaaatgggaagagatcggaatggatttcatcaccggtttgccaagaacccctagcaggtacgactccatctgggtaatcgtggaccgactcacaaaatcagctcatttcgtgccagtgaaaaccacctttgatggaaagaaactagcagaactctacatgacccatgtcgtatgtagatttggctgtcccaagaaaattgtgtcagaccgaggcactcagttcacctcaaggttctggaaacagttgcatgaagccctcggaaccgatctaaattttagtacggcctaccatccgcagaccgatggtcagacagaaagggtaaaccaaatcctagaagacatgctacgtgcgtgtgccctggatttcgaaggcacttgggatcgttgtttgccgtatgcggagttctcatacaacaacagctatcaggccagcattcagatgtcgccgaatgaggcaatgttcggaagaaagtgccgcactcccttgtgctggaatgaggtgggcgaagcactggtattcggtcctgacatactcaagtcagcagaagaacaagttaagctgatccgagaacgtttaaagacagcgcagaaccgccagaagaattacgctgacaatcggaggcgtgaccttgagttcgaaaaaggagatcatgtgtacctgcgggtatcacccctccatggtatgaggaggtttgggatgtccggcaagttagcaccccgctacatcggcccctacctcataaccgccagacatggcgaagtggcttatcagcttgagttacctgaaggtctcgcagatgtgcacaacgtgttccacgtatcccagctaaagaaatgtcttcgagttccaaaagagcaagtccccctgggtaatatcgaactggaaaagaatctgacctacaaggaaagaccgatcaaggttcttgaagaggcagaacgtcagactcgaaggaagaccatcaagttctacaaagtccaatggagcaatcattctgaagatgaggcaacttgggagcgagaagatcttctccgcgccgagttcccggagctgctccct

SEQ ID NO: 15735 - DNA, 4272 bp, Oryza sativa
  Clone ID: TFbOSC14746j.C1.o4.fg
atgaagaatggaatcgatgagattttcagagataccaagaaagatgctattgtgatgtcttcaactaagtctgaattacaaaacgaacgtatttttgtgcctattgttttggacactaatattttgcaggcatctgagaataaccaaggtaatgagaaagagaagaaatacgaagtggaaaaagatctatctatagctccatgcatgctggaagaatgttccattgaccaagcacctataatttctaaagaggagaaaagagatactgataatggtgttataactactcagggtatgggtggcgctcaaaatcagcgataccaacaaggtaacaataatcgcgtgcccgatgatccttatgctaaggttaagtttaaaataccatctttttcgggttattatgatgctgagaaatactctgattgggagatgatagtagagcaaaagtttagtgcccaccttgtgcctgaccaacatagagttcgacaagccagtagtgagttcaaagattttgctatcatgtggtgggctaggttagctgatgatggaattttacctactacttggaaagaacttaaggtagctatgcgtgatatatttgttcctccatcttatcttagagatttaagcaagaaactgatgcgtttagagcaaagggataaatctgtacaggattactatggtgagctacaaaagggattgatgcgatgtagcatagtgaagggaactgaggattccatttgtcgcttttacatgggattgaggcgcaagattcaggacatagtagataataaggaatttaacactgtcaaccagttgtttcagtttgctatgcttgcagtgaaggaattgcaggggcgtgatcaacaggtcaagaataaggcgagcacatacataccgcgagcaaagccatctttggggcttcccaagcccatctctttctggacgaccccactagcgagcaagcgaccagttgcgtccggagtttctgcagcgccaaaaccaccttccccacgacctgcagtttcaggtaaaggttcttcgcaggtatccaccaagagtgcctcatctatcgcttcgacgggacgcacgtccagaattcggtgccaccactgccatggatttggccatgtgcagaagatttgccctagtcaacgggcatacgttgctacggtagattgctacatctgcacctccgacgttgaagatgttgaggtggaagagaagaaagacggagagcaaaaagacttatccatagctccatgcatgcttgaggaatgtctaattgaccaagcgcctataatttctgaagatgagaaaaaaggtaatgataatggtgctacaactaatcaagggattagccttctcgacgaggtcaacctggtttcggcacggttgataaccagaggagacgtggtgctgcgattgcggggctcagtagcgtgttcgttcagaagccagatcgagttgtgtcgcgactccgcccaaatcgattgtttatcaatacctattggaagatcgggacctaacatcctcatcatacggggtaaacgaagtgaaccacctctctctcctgaggaagaggttaagtttgaggcttcggattgcctgttccgtggagcattgatcagtgtactcgctgacaacatagtggacgtgtatatgcagatgccttcaaggaaggacatgtgggatgcacttgaggccaagttcggagtttccgacgctggtagtgagctgtatgccatggagcagttctatgactacaagatggtcgatgaccgttctatagtagaacaagctcatgagattcagatgctggctaaggaacttgagaacaacaactgtgagttgccggacaagtttgtggcggatggcattattgccaaattgctaccttcttggtcggactttgccacttctctaaagcacaagagacaagagttcagtgtttctgatctcattggctctttgggtgttgaagagaaggcgagggcaaaggacaaccggggcaaaaaggttgagggaggttctagtgccaatatgttacagaagaagaaccctcatgcatcccacaacaacaagaaagtcaaggctgatgtgaaacccaaggctacaaccaattttaagaagaaaggcaagggaaaggcaaagggagactgctttgtgtgtggcaagtctgggcattgggccaaggactgtcctgagcgcaaagacaggaagtctgccaacatggtcattagtgagggcagaggaacatcggggtacggtagggagaggtttctccttgttgatgggaaatgggtcacttgtggctgttcacggtgttggatgaagcattgcgttacttttaagacctataaagctgaggtagaaaaccaacttgaaaggaaaatcaaacggttgaggtctgatagaggtggggagtatttttccaatgagtttacatccttttgcgaagagtttggaattattcatgagatgacgcctccctattcaccccaatcaaatggggtggccgaaagaaagaaccgtactctaactgagatggtgaatgccatgttagacactgcagggctttccaaggaatggtggggtgaggcagttttgactgcgtgtcatgtcctgaataaaattccaatgaagcataaggaagtaacaccattcgaggaatgggaaaggaagaaattaaatctctcatacctacgaacatgggggtgtttggccaaggtaaatgtacctatagccaaaaagcataaacttggaccgaatactgttgattgtgtgttccttggttatgctattcacagtgtgggttatagattcttaatagtaaactatggagtacccgacatgcgtgttggtacaattattgagtccagagatgctacattctttgacaatgaatttgccatgaaaaatacacctagcacttctagtcaagaaactgtcataccccataagcactttgcaccgatagaacacaatgatcaaacgcctgagggaaatcctgaggaggacaacattgtagatactcgtaagagtaagcgacaaagggttgcaaaatcctttggagatgacaacattgtatacctcgtggatggcactccaagaaccatagaagaggcatattcatctcctgacgctgaccactggaaggaagcagtacgcagtgagatggactcgattatgtctaatggtacttgggaagtcgttgagcgtccatatgggtgcaagcctgtaggatgcaaatgggttttcaagaaaaagcttaggcctgatggtacaattgaaaagtacaaggcaaggcttgtggccaaaggttatacccaaaaggaaggcgaggattttttcgacacatactcaccagttgcccgcttgaccacgattcgagtactacttgctctggcagcctctcatggtcttctcgtccatcagatggatgttaagacagctttcctaaacggagagctggaggaggagatctatatggatcaaccagacgggtatgtactagaaggtcaggagagaatggtgtgtaaactgttgaaatccttgtatggccttaagcaagcacctaagcaatggcatgagaagtttgacaccacacttacatctgttggctttgttgtgaacgaagttgacaaatgtgtgtactatcgctatggtgggggagaaggagtgatcttgtgcttatatgtcgatgacatattgatctttgggactagcctcaatgtgattgaggaggtcaagtattttctgtccaagagttttgaaatgaatgatttgggagaggttgatgttatttttaacattaagctactaagaggagatgagggtgggattacacttgtgcaatcccaccaagtggacaagattttgagtcgctttggatatagtgtctacaagccagctcctactccttatgatcccagcgtgctattaaggaaaaaccgaagaatagcaagggatcaactgagatactctcaaatcattggttcattgatgtacttggctagtgcaacgaggcctgacatctcatttgttgtaagcaagctgagccggtttgtctcgaatccgggagatgatcattggcatgctctggaaagagtaatgtgctatcaaaagggcactatgggctatggaattcactataccgggtactcaaaagtactagaagggtatagtgactcaaacttgatatctgatgctgatgagataaaagccacaagtggatatgtgttcacacttggaggtggcgctgtttcctag

SEQ ID NO: 15736 - DNA, 2250 bp, Oryza sativa
  Clone ID: TFbOSC31101j.C1.o1.np
tggcgcagctctgtactgtagcagggattggggaaaatggcgagagttccggcggggaagacgaagtgacgtgggcgatcttaagctgtcgcagctgcgcctccactgcgccctagcgccgccgccgccgcggatttcgccgcatcccgccgtccccgcgcgcattaaagacggggaaaatcacccccgtgattccctctcccgtttccccctcttttccctctctctctccctcggattcgttcgaatcgcgcccgcaatcctcgccggcgcaatcaatggcggccgagatctccgcgcccgtttcctccctctccggccgcgctctccccctctcggcgctatataatcgttccccgagctccgctcttccgtttccgccgctcgccgctcgctctcgccttcggattcgtgctcgcgacgttctcctctctctccgccgtcgccgccgaccttcggttagccgccgtcgtcgctccggtcttcctcccgactcggcgccacctccatcggcttcgccgcgttgtcgccgaccccgtccgccccttcgcttcgcccgccgaccgccggagctccgtctccttcgtcgtcccgaaccgcgccgccgcgttcctccgctccggccgtcgtttccgccgtcctcgttgtcccggggtgagccgtggaccgtccctctcgcttccctctcctctccgctctctcgggcgccgctccgccgcgccggtggtcgccggcggtgaccatcggggcgcgggcgcgcgtctcccgtcggtcgagccggcgaggccgccttcggccgcctcccgcggctgccaggtggggcccggccgtcagccgcccgcgcccgcgggtgcggctgacgcgtgggacccacggcgccggccgccgccagccgcgtgcacccggtccaccgtggaccgagaggctgacgcgtgggccccactcccgtggacccggacaaatgaaggctacacgagctgcggcccgatggctgacaatgagaaaggcaataaggtcagaagtcaggacattggtacctcaagctcccgagtgaatgaagcaccagacaacagttgtgtgacactggtccaacacctaattaaccagaaccgattgcttatagagatactacagcagcatcagacgccaattctgaacctgagtcagatacaacctcaagtgcagttggaggcagtccaatcactcacaccacaagtcagcatgccgccagcatcccaaaagacccatggtggcgtgccacatgttgactcaaaagaagcaagtatcatttgttttatgtgtgatgagcaagggcactatgcaaggaactgtccctagcagaaaagaaaaacaccaatgcgaaccgaagatgaagtccgtaagatgatcattaccagcacagaatggcctccaccaggaatgaccaaacgtcagagaagaaataccttccgaggtgcaccacagttgacagagcatcttttagctaatggaggtagagtgtctgatagtgaagattcagatcaagtctcctcagatgatgaagatgagatggaacgtaaggcatgctctcgttgtggagaaatcggtcatgttgccagctcgtgtgccactacatgcgttcattgcgaggaagaccatccacccgataggtgtccaacgagcaggatcacttgtttcttttgtgaaggaactgatcatgtaccaaaagattgtcaattcagttttctgctgacgaagaagatggccaaccaacccgccagttccaacggagagaagcatcaaggcaacacaaatcctcgccaagattacagtttcagcctaactccagtgccaggacagaggaatcaaaatgagaaaagaaaatgccgagtccgggaagatatctgttgcttcaattgtcaaggaatgggtcattttgccgacaagtgccaaaaaccgagaaacatagctgccagcacgtcagtccacgcaactccctgcaatcagaagcttgctcctcagcgaattgtcatccatgcatcccgaagcagtcctatagcccgcgttgcaacagctccaactccagcgagtgcatcaccacaaggtgtcaatgcccaatttcagccccagccatcagttgacaagaccggcaaggatttccagccaccaattccaactccaagtcagaatgatcgtccccagacggatagctcagcaaagaagacgttgatttgctacaattgcaaagaaccagggcattactcgagggac

SEQ ID NO: 15737 - DNA, 1409 bp, Oryza sativa
  Clone ID: TFbOSC400445j.C1.o12.gp
actccgcctctgcagtagcttgcgcatgcctgatggcgtccgcagcctctcccttgctgccgaggaccatcacccacatgtaacgggagaggtcgtcgacgagcagcaggaagtaacgtcgtcctcctggtgtggccgctgtcactgggccacacaagtccccgtgcacgagctcgagccgctccttggctcggaagctcgtctgctggggaaaggggagccgccgctgcttcgtcaccacgcaaacgtcgcagagctgctccacgtggtccaggcacggcatgcctcgcaccatctccttagcactgagctgcttcagggcctcgaagtggaggtgcccgaagcgctcgtgccactgccacgcctcgtcgtcccgacgagcggcgaggcaaactggttgtgcgacctgcgcgctgaggatgtagagttgattagtgcctctggttaccttggcaagaaggcgacgacggcgatcccaaatcctcatgagtccgtcctcgaccaacacgcgtgagccgttctcatccagctgtcccacgctgatgatagaattcctcaacgcggggatgtagtagactccggtgagcagcctgtgctcaccggacttggcagtgaaggtgacggagccaacacccttgatctccacgccggaggcgtccccgaacttgacggagccttggacgctggagtcgaactcggtgaagaactcccgtcagccggtcatgtgatgggtggcgccggtgtcgaggtaccacccatcagccttgtcgttgctggagccgttgcagagggagacgagtaccttcggctcatcaaggtggaggaaagccgctgcggccggtgccgctggaggtagctcgatgcttgcatgagccaggagcagagccggctcttcctcctccacccgtgcgacgtgggcctggccacgtcgtggctgtcgacagtctttggcccaatggccaagcttgccacagttgcggcaggcgttgtctcgtgccggcttgtggttgccggtggcaacgccctgggcgcctctgcgggcgccaccctcggcacgtcttcgcgcccaccgtagctggacacctccccgcgccttgcgcggcttacggccgcctgtcggggaagatgactcccccttcctcccgtcaccctgagaggcctcccactgctcccgagtgagattgagcttcccgccgatggtgatgggccccgagagaggctgtggctcatcaccatcgacgaccttgaggcgacctaacgcctcctcgatcgacatcgtggagaggtccagcagagattcgatcgagcgagcgatctgcctgtacttctcagggacacagcggaagagcttctcgacagctctctcctcgtcgtaggtgtcgtcgccgtactgcaccattttctgcaag

SEQ ID NO: 15738 - DNA, 7767 bp, Oryza sativa
  Clone ID: TFbOSC400445j.C1.o19.fg
atggcggcgcctcccaattcaccgattgggtggtggcgcgaggtgagagcgcgcttgtggctgcacacggtggaagtggaagtcaactttcttgcacatccatttgtggtttactcccatttccctctgtttgaatctggctctcctcctagtttctctctgaaagcagccttgcatttgatcagcaagaagaaagatcaagggcctcttcttctaggagtgagctgcagttctgatcttactactagtcagattgcaaccaagaagctctactttgccaaaatgaaagattctgcctatgatgccgacgacgtcatggatgaatttgattacctgattctgaaggcaaatgctcagcagaagagcaagctaagtagcttggcctccagttctcttgccataggaaagcgtttggttggccaagacaagttcagatccaagttaaggagggtcctcaatagcctgattagagtaaaagaatgtgctgacatgctcatcaaagtgattggggctgaaaactctaattcatatatgcctcctcagccacttcaatggcgtgtcaccagctcaatttctcctggccaaattatcattggccgacaaaatgagcaggatgatctagtgcaccgacttctgagagaagctgatggaccagagccaagcagaggactaacaatatcaccaacaccatctataattaccatagttggcagtggtggcattgggaaaactgcattagctcagcttatttacaatgacagaagaatagtcagtggttttgatctgaggacatggatatatgtttcaaatatcttcaataaggtcaaaatcaccaaagagattttgaaatcaattgatagaaacagtgatataacaaatttcagttttaacatgctccaggaagatcttaagaacaagttaacagcaaagaagtttctacttgtgctagatgatgtgtggtatgatgaaaagattggtgagcttacaaatgctgatagatggagagaattgtttgctcctctatgctatggagctaaaggaagcaaaattcttgttactgctcgaacaaatattgtttcaaggattttgggttgcccagcaccattccatttggagggtctgaagggtgaagatagttggaacctcttcaggatctgcgcatttggcgctgaagatccaggaaattatccagaactagagtctatcggtgaatgtattgtccaaaagttgaatggctcagcattagtcataaaggttgttggtgcacatttgaatgctaacctcaacgttgaagagtggacacgagttatgaaaagtagttcatcaaacaaggaagacattatgcaaattttgcgtctgagctatgaatgcttgccaggtcacctccagcaatgttttactttttgcagcctgttccccaaaggctattctcttgagcctgacttgttggtgaatatgtggatagcccataaatttgttcatggtcatataggcacatatgaaagtatgagagaaactggtagaagttatttcaatgaactattatctagatcattttttcaggaacttcagtatggccatacaatacgttatgttatgcatgacctcatgaatgaccttgcttctcacatttccagagcagccccccggaggtgcgccatgtccgacgctcggtctcggcgtttggtcgcctcgagcacttggcgtcagcaggacgccgagctcgccgcagcagaagagcgcaggcgagcaacggctcagaccgctgcagcagcagcagcgagggtggccaaactggcggcagtggagttggcagcagccagggcggaggcggaggcggaggcggcggaagatgcggcacgtgcggcggaggtagaggttgagaccttgcgcagcagcatcaacggctccatcgccggcgacatcaccgccgacagggagcttgaggagttggcaagaggaagggcatgggagcgggcagagcggtgggcagcagcccacctccacggcggcggcggcggcccaagggaccgcgcgcccgccgacgggaacccagacgggcgctggcgtgccggcggcagcccggagcccgcacgcggccctcgcaggcagcgcggctctctctcccctgactggcgccatggtcaccacggcgtccagacggtggtcagggactttggtcccggcggtgggtggcctaccctcaccaaaaccaactacatcgagtgggccgcggtgatgaggtccggtacgggcgacgtcgactacgacgaggatcggcgggcactggatgccctcatcgctgcagtcccgcccgagatgcagttctcgctttcccagaagcggactgccaaggaggcctgggacgccatcgctgcggcacgcatcggcagcgaccgcgcccgcaagtccacactgcaggcactccgcaaggagtgggagaacctgcccttcaagccaggtgaggatgttgatgactttgctctccgtctcaacactctcttgcagaaaatggtgcagtacggcgacgacacctacgacgaggagagagctgtcgagaagctcttccgctgtgtccctgagaagtacaggcagatcgctcgctcgatcgaatctctgctggacctctccacgatgtcgatcgaggaggcgttaggtcgcctcaaggtcgtcgatggtgatgagccacagcctctctcggggcccatcaccatcggcgggaagctcaatctcactcgggagcagtgggaggcctctcagggtgacgggaggaagggggagtcatcttccccgacaggcggccgtaagccgcgcaaggcgcggggaggtgtccagctacggtgggcgcgaagacgtgccgagggtggcgcccgcagaggcgcccagggcgttgccaccggcaaccacaagccggcacgagacaacgcctgccgcaactgtggcaagcttggccattgggccaaagactgtcgacagccacgacgtggccaggcccacgtcgcacgggtggaggaggaagagccggctctgctcctggctcatgcaagcatcgagctacctccagcggcaccggccgcagcggctttcctccaccttgatgagccgaaggtactcgtctccctctgcaacggctccagcaacgacaaggctgatgggtgcgtccaaggctccgtcaagttcggggacgcctccggcgtggagatcaagggtgttggctccgtcaccttcactgccaagtccggtgagcacaggctgctcaccggagtctactacatccccgcgttgaggaattctatcatcagcgtgggacagctggatgagaacggctcacgcgtgttggtcgaggacggactcatgaggatttgggatcgccgtcgtcgccttcttgccaaggtaaccagaggcactaatcaactctacatcctcagcgcgcaggtcgcacaaccagtttgcctcgccgctcgtcgggacgacgaggcgtggcagtggcacgagcgcttcgggcacctccacttcgaggccctgaagcagctcagtgctaaggagatggtgcgaggcatgccgtgcctggaccacgtggagcagctctgcgacgtttgcgtggtgacgaagcagcggcggctcccctttccccagcagacgagcttccgagccaaggagcggctcgagctcgtgcacggggacttgtgtggcccagtgacagcggccacaccaggaggacgacgttacttcctgctgctcgtcgacgacctctcccgttacatgtgggtgatggtcctcggcagcaagggagaggctgcggacgccatcaggcatgcgcaagctactgcagaggcggagtgcgaccgcaagctgcgcagggggatgccggccatcttttggggggaggcggtggtgacggccgcctacatcctcaaccgctcgcctaccaaggccctcgatggcaggacaccgtacgaggcttggcatgggcgcaagccggcggtctcccacctatgggtcttcggctgcctcgcgttcgccaaggagcttggccacatcggcaagctcgacgacaggagcaccccaggggtgttcatcggctacgcggagggctcgaaggcctaccgcatcctcgacctggagacacagcgtgtgcgcactgcgcgcgacgttgtgttcgacgaagggcgagggtgggtatgggacaaggcggtggacgatggttcgactccgatgtacgacgacttcaccgtcgagtacgtccacttcgagggagctgggggagtaggcagctcttcttcatcgagcgtgtctaccccagcccccgaatctccaccgactccgacaccaacacaccctcgggccacgacttcgactacgacgagctcttcgtcgacaccaccccagccagtgactccacatgctccagcaccaacagtcactcctccaagcacgtctacttcgacgccagctcgtgttgagcgcagcccggtggagttcgctactccgctctcccacgacggggagcgcatcgcataccacgacggtgagcagctacggtaccgtacgatggaggatcttctcggcgaccagccggtgccgggactggtgcctcgcgacctagaggcgcagttgcaccttgcgtgcgacgacggtgagcctcggtcttttgcagaggccgagaaacacgcggcatggcgtgccgcgatgcagtcggagatggacgcggttcaggagaaccgcacctgggagcttgctgacctccctcgtggtcaccgcgcgatcacccttaagtgggtgttcaagctgaagagggatgaagccggagccatcgtcaagcacaaggctcgcttggtggcacgcggtttcgtgcagcaggaggggatcgactacgacgatgccttcgctcccgtggcacggatggagtccgtgcgactccttcatgcgctggctgctcaggaaggctggggcgtccatcacatggacgtcaagtcggcgtttctgaacggcgacttgaaggaggaggtctacgtgcaccagccgccgggatttgtgatccccggcaaggagggcaaggtgctacgcctgcacaaggccctctacggcttgcggcaggcaccgagggcgtggaatgccaagttggattccacgctcaaggggatgggcttcgagcaaagcccacacgaggcggccatctaccggcggggcaatggaggaaatgccttgctggtgggtgtctacgtcgacgacttggtgatcaccggcaccaaggatgcggaggacgactccgggatcacgcttcgacagaccgcctacgccaagcgcgtcgttgagctggctgggctcaccgattgcaacccagctctcactccgatggaggagagactgaagctgagccgcgacagcacggcggaggaggtggatgctacacagtaccggcgtcttgtggggagccttcgctacctcacccacacacggccggacttggccttctccgtcggctacgtcagtcggttcatgcagcgaccgacgacggagcaccagcaggctgtgaagaggatcatccgctacgttgcggggactctcgaccacggtctctactacccaaggtgtcctggcaaggcacacttcgtcggctgcgaggccgagtacatggcggcctccgccgcttcgacccaggcgctctggcttgctcgactgcttagtgatctcctcggcagagacactggaacggtggagctcagggtggatagcaagtccgctctggccctgacaaagaaccccgtttttcacgaacggagcaagcacatccgggtgaggtaccacttcatccgaagctacttggaagaagggagcatcaaggcgagctacatcaacaccaaggaccagcttgcggacttgctcaccaagcctcttgggaggatcaagcgacttgttacttttcctaagtgcttgggcaccttgagcagcattttgtgtattgatgttcatcgtatgtgcactgttgatttagctgccagcagccatatgccatgtcttcgagcggctggggaattctgtgttgataagagtaaagtgcagggactagaggtgctgaagcagatgaatgaacttcaggggtcgcttgctattacatctcttgagaatgtgaaaagcagggatgaggcaactgatgctcaactattcagaaagagtcaaatctttaaactgaaactgcaatggggttcttctaatgcttctagcaagtctgacaaagcgaatgatgtgttcgatgctttaagacctcactcgggccttgaggaattgattgttcagggatatccagggtgtgtgtccccatcttggttggagtcagagtggctctctagactgagacacattagcatttctgattgcaagtgttggaagttgcttccatctttaggccaaatacaatctctcaggacacttcgtattgctagactgaatgcagtggtttgtataggccccgagttttatgggactgctggctttccctcactggagattctggaaatgatagagttgccagaattggcagaatggtcttctgtggactgtttttttcctgctcttcttgaggtgtgcatcagaggatgccccaagctgaaacaattgccaccagttgttctcccacctgtaagaatgagtatatatgtatctaccgaagtttgcaggctgcgaaatcataatcgcctggagacatgttttactcaggaggtgagcttaagcacactcttggatatgttgcatcttcgtcgtctggaacctgtgaaatgtgtaaatatcatctttgaaggagcaaacactctggaagatggacttaaagatgtaacaacaaatctgccatcccttgaagagttggttatcaggggatgttctgatctgcagcatgcttttgcagctagtaaacagcgggaagaggatgggaatgtcttttcttcggcatctattcaatgtctcaaaatgattggctgcaacctgacagtggacatttttcttagtgtgtttcagaacattagtttcctttcattgtggataaacgattgcaacatcacttattcaactcctgaacgtgtgttggccatgccaaagtcagtgactggagtacttgagaagctgtgtattttaagctgtgatgggttgacagctttcatgggcctagaaacattcttaaggttaagcacaatagaaattgcaagttgccccaagttaacgtcagtgccagactttaggtgtcttccagccctccagaacttgatcataaagaattgccctgagctcaaggaactacctgaaaatggtaacctaacaacattaactgcactggttgtggaacactgcaacgcgctaatatcactgaggaacctgcgagacctttctttcctctcaaaactggtggtcagaaattgtatgaagttaatggctttgcctcagatgattagtttctcttccctcagagtcttgatcataaaaaactgccctgaagtagtttctttaccagaagatggtcttcctgtgtcccttaattgtttgtatttggctggatgccatccagtgctggaggaacagtttgaccagaaaaatggtagtgaatgggagaagtatgaagtgttgccgttttgtttctttgctgataaatcaatagaagatatcgaagagatagccaaagaagtacttatggcggatgatcttaccaggatttccattcagggcaatcgagttcatgcaactgattctgcagcaagctcgtccagtttcccttag

SEQ ID NO: 15739 - DNA, 3943 bp, Oryza sativa
  Clone ID: TFbOSC419088j.C1.o1.np
atgcgagtgaacctgcaggctcagggtctgtgggaagctgttgacaccggcgacgtgccctttcatgaagatcgtcaggctctttcggccatcctgcgagccgtgccggctgagatgctccggccgctcgcggagaaggacaatgccaaggacgcctgggatgcgctcaagtccatgcgagtgggcacggatcgcgtgagagaatcctgtgcgcagaagctacgccaagcgtttgagtccatgcaattcaagcccgacgaatcggtcgaggatttcagtcttcatcttcagtgggttgtcagcgacctccgtcttcttggtgacgacatcaccgaggaaaaaatcatgtgcaagtttctgcgtgttgtgccccgcaggtatcgtcagatggctctttcaattgaaaccttgattgacctcacaactctctccattgaggacctcactggccggcttctcaccgttgatgatcaccctgattccgacagtgaggacgcgggtcaggcactgttcggcaagaaggaggagcaggcgcgggccaacaaggggttaggccagtcctcatcccgtggcagcggtaccgggactggctcatcggagcggcgacaacgcggccgtggtgggtgcggtcgtgacggtgctggcggcaagcacaaacctggcgccaatcagggtggaggccgtgacgtgtccaaggacaagtgtcgctactgcggcgaattgggccattgggccaaagactgccgcaaggctaaacgcgaccgcgacaagcttgcgcatgcccatttgcttggggatgacgagcccacactgctgatggcccaggtgtgcgagctcgttcccactacggagcctgagcttatcaacggcgaggtgaatttgaataaggagcgcgcgcttgtctctctccgcgaagaaggggagccggtcgaccccgactggatcctggacatggccgcctccaaccacatgactgggcttgacaccaccatgcgtggtacggtcaagttcggcgacacctctgcggatcgagggacgcggcactatgctgttcgcctgcaagaacggtgactactgcgggcttattggtgtctacttcatccccaagcttcgcagcaacatggtcagcctcgggcagctcaacaaggtcgggtgcaagacggtgatcgaggatggcgctctaaccctgcgtgacccacggtggcgcttgttgtgccgtgttcgccgtgggagagagcgcctgtatgtgcttcaggtggagctggcccagctggtgtctctcgcagcaaggagctccgaagacgcgtggctctagcatgccaggtttgggcatctcaacttcgactccctgcgcacactctacgcccatggcttggcgcatgggttgccgaagctggagcgtgtcaggcaagtctgcgacgggtgtctcatcagcaagcagcgtcgagtgccgttccccacagcggcgacgttccgagccacgagtcggctcgaccttgttcatggcaacatctgcgttcccatctcgcctcccacgcacggtggtaaaaagtattttttgttgctgattgatgacatgtctcgctatatgtggctatttctgctgacatccaaaagtgaggctccggcaaccatcaagcggttcaaagcgggagtggaggtggagactgcctgcaagctgcgcgttctccgcactaatcgtgggggggagttcacctccattgagttcggcttgtattgcgcgaacgagggcgtggctcggcaactaacggcgccgtactcgcctcaacaaaatggcgtcatcaagcgccgcaaccaaacggttgtgtccatggcaagatgcatgatgaaggcgaagcacatgcccaggaagttctggggagaagcggtgaggaccgccgtcttcatcctcaaccggtcgcccacgaaagctgtccccaacaagaccccttacaaggcgtggcacggacgaacgcctgccgtgccattacttcaagacctttggctgcgtcgttcacatcaaggaggtgaagcctcatctcaagaagcttgaagaccgcagcaagatgatggtttttctcggctatgagccgggaaccaagggctaccgtgtctatgacccggatgccaaccgtgtcgtcatcacacgcgacgccgtctttgatgaagtaacgtcgtggccatggggggaacccgttgaacatggagaggcatccacagacgactcgttcaccgtctactatgaggtggcctcaagcatcgtggcggcaagtcggcctcctagcgtcgaggccatgtcacccacaccctccgcgcagctcgcaacgcctccagacacaccctctgtggaattcatgtcgctgccgaactcgatgctagatgtcgacgacgactagggcgcgccgcgtcgctaccggagcatggcaaacatcctcgacacgacagcgccagtggagcttgattagaatgagatttacctggcagctgcagaggagctggcgaacctctctgaagcagagcaggatgaacactggcgacaagcgatgcttgatgaaatcaaatccattgaggagaacaacacttggatactcactgagctcctgaccggcaagcgtccaattggcgtcaagcgggtgttcaagttgaaaaagaaggagactagcgctgtgatccggcacaaggcgcggctcgtggcaaagggctacgtccagcgtcatggaattgactttgatgaagtcttcgctccggttgcgcgaatggaatccgtgcgacttctcctcgccgtcgcagcttatctcgggtggactgtgcatcacatggacatcaaatcggcgttccttaacagagagctggaggaggaggtatacgtctcgcagccgccgggcttcattgacgacaagcatccaagtcaggtcttgcacctgaaccgagctctgtatggccttcgtcaagcccgacgaacctggaacgcgtagctggacactcgccttcatgaactaggcttcaagcggagcgccaccgagcacgcggtgtacacacgtggcgagggatccaagcggctaatcattggcgtcgatctcggattgctcagctactacctcaggatcgaggtgcgtcaaggcagtgacgacatcaccatcaactagtcagcatacgcacagaagctactcaagatcggtgggctggtggactgcaactcaacttgtgtccccatggagcctagactgaagctgatgaagaacagcgataggccggccatcgacgccactctgtatcgcagcctcgtgggtagcctgcgttaccttgtgcacacgtggcctgactttgcctttgccgtcggctctgtgagccgattcatggaatcgccacgcgatgatcatctgttggtggtgaagcacatcctgcggtatgtagctggtactcagaactttggatgttgtttggcaagatcaggggaaacgggaatttgtctgctgggtttttcagacagtgatttggggggagacattgatgatcggaagagcacctcaggggctttgttctttctcggctccagtccaattgcttggcaatctcagaagcagaaggtggtggccctttcctcttgtgaagcagaatacattgccgccacaggagcggcttgcctcggcatttggctagcgcgtttgctggctgaagtgctgggcactgaaccagagatggccatcctcaaggtcgacaacaagtcggtgatctcactgtgcaagaatcctgtgttccacgatagaagcaaacatatcgacactcgatatcacttatcaggcagtgcatagaggagaagaaagatgatgttgagttcatccccacggacgaacaggtggcggacattctgaccaagccactcgtgtgcatcaagttccaagaatttcgcaacaaggcgggcgtggtccagattgtcacttgg

SEQ ID NO: 15740 - DNA, 6255 bp, Oryza sativa
  Clone ID: TFbOSC12503j.C1.o1.fg
atgttggacttagggggaaagaatggggaaaatggaaatgaagatgaagcaagcagcaagggaactccaccacccaagggagctactataccttttgattacagcaaacttactattccctctcactacttcgtctccatgccttccgggcatactcctcaatttgatgggacatattatgacgcttggaagcacaaggtgaagttgcatctaatctctttgcatccaagtatttggaaagttgtttgtacaggtattgatataccccatgatgacatggagctcacttcggggcaagaacaattcatccaccgcaatgctcaagcttctaatgcaattctctccgccttgagtccggaggagttcaacaaggttgatggactagaggaggctaaggagatatgggatactttgcaattggctcatgagggatcacccgccgttcgtgaggccaagattgaattattggaaggaaggcttggaagatttgtgatggatgtcaaggagacaccacaagaaatgtatgataggatgatgattcttgtcaacaagattaaaggacttgggaagacttctgcgtgcatttggtccaagaaatcccactcttttttatcaatgatacgggaaaggaaacacttcaagagactcaccccaagtgacattcttggaagaattgtgtctcatgagatgcaagaagaggaagctcgtgaagtgagacaaatggtgaataatgccgccatgataaaaaatcaagaagttgctttgaaggcaaaacaagaagaagagtcaagttgtgaagaaagtgaagatgaagaaatggcttttattgtcaagagattcaagcactttcttcgcaagagtggctatgacaaagggaggaaggatgatgacaagggaaagaggcaatcaaagagagcgtgcttcaattgtggcgaatatggccacttcattgccgattgtcccaagtcaaatgaagctaaggctaagggaggcaagaagaagccggagcgtgctcatgtggcggaggcacacatggcggaagtgtggcactccggagatgaagaagatcccgaggtcaagcccaagcccaagtcaaaagacaaggttgaaggagaaggtggtgttgctaccgtcgccttcaagtcatcctcttcaagcaaggagtgtctcttcaacaacttgagtgatgatgacgacgactcctaccactactcttgcttcatggcccaaggccgcaagagctttagcaaacccgctatgcaacatttggctaagttaatgagagctttggatagtaaagaacaatcactcgaaaggcaagaagaattgcttattcttgagaagaaaagaaatcttgccttagaggagagcttagctaaagaatgtgctaaaaataaacaacttgctaatgagcttaatttggctaatggttctttagctagccttagggatgtcaatgaaactcttcaagaaaaatttgctaatttagacaaaagtcataaagatcttgaagttcaatttgacactctttggaatagcacctctcaaccaaatgtggtttctaattcttctaacccttttactagcaatggttgtgctaggtgttacgatattgatttgaactcttatgctactaatattgacgctatgcaagctcttaagaaagagaatgaaaggttgagcactttggtgaaatatggatgcatgaagacataccattcaaaagatgtcctttacaagaccatcaccgctcatcctaacaaggatggacacgagctcgggttttcgggtggaagtcctgtgcctaagcgtgtgatggtaaatgggaaagaatgcttgatgtttgtgcgagaaggtaaagctccacaagcaagtgaggtgactggtcttgtgagctgccagggacccggaacatccggacaaaccgggcgaaacctctgggtgggagtctctgtctctcaaaaattcccaccgggaagttccggccggtttgccaggaagtttcgggccaatggccgtgcacaagacatgaccggaagttccgggcataatgccaggaggttccagccagatggtctttactatgattcatatgtaatttccaaaaattcagagggcaaagtggttgcttattttaatgtgaattacaatgatgagtaccgcacttgtgtgtgggtgccaaaggctttggtaactaacatcaagggacccaaacttagacaggcatactcctccggtggttcaagttgggttgtggacagtggttgcaccaatcatatgactggagagaggagtatgtttacaagtcttgataaggagaacggaactcgtgagaatattgtgtttggagatgatggtaaaggaaagttgggttacaattgcttgtttaccgatgaggatgtgaccgtctttagaagggatgactcctccgtagcattcaaaggcaagttaaagggtgatctctatcttgtcgatttcgatgtggatagagtgaatccggaaacttgtttgattgctaaatcctccatgggttggctatggcatcgtagactagcccatgttggaatgcggaatttggcaactcttctaaagggggaacacatcctcgggctcactaatgtcacatttgagaaagatcgtagtgaggctcaagatgtcttcaagcgcttcgccaagcaagcccaaaacctctatgatctcaccatcaagagggtacgaagtgacaatggaggagaattcaagaacacacaagtggaggaattccttgatgaagtgggaatcaagcacgagttctccgccccttatgatcctcctaaaaatggcattgttgagaggaagaaccgaactcttattgaagccgcaagagcaatgcttgataagtacaagacttcggatatcttttgggcggaggccgtgagcaccgcatgccatgccatcaattgcctgtacctccacaaaattctaaagaaaacttcatatgagctcttgagtggtaagaaaccaaatgtttcctattttcgtgtctttgggagtagatgctttattttgagtaagaggcctcgttcatctaagttctcacctaaggtggacgagggattcttacttggctatgagtcaaatgcacatgcctaccgtgtcttcaataaaaccttcggtattgttgaagttataagggatgtgacatttgacgaatctaatggctcccaaggagagcaagttgttgtacatgttgtaggtgatgtggatccaagtcaagctataggtactaaggctattggagacatacgaccagtcgagacgcaggatgaccaagaagatagggatcaaccttcgtcatcgacatccaatagccctacatcgagtcaagagtcagttgacccggaagttccgggaccagatgatcggatcctccggacctccccaagccaggaagttccgggtccatctgccaggaagttccgggcagaggacagtcaaggcgtgcctgtggatgggattgatgccgagggcactgtagagcatcctgatcaggctcaggtcccctcggtgcaccatccaagaatacatcacactgtccaaagagatcatcccgtcgacaacatacttggtgacataagaaaggggataactactcgttctcgtgtcgctaacttttgtcaacactattcgtttgtctcttctttggaaccaaccagggttgaagatgcacttggtgatacggattgggtgatggctatgcaagaggagttgaataacttcactcgcaaccaagtatggacgttgttggagagacctgaccaaaatatcatcggcaccaagtggatcttccgcaacaagcaagatgaacatagagtggttgtaaggaacaaagtccggttagttgcgcaagggttcacccaagtcgagggtctcgattttggtgaaaccttcgcacctgttgctcgccttgagtcaatccgaatccttttagcctatgccgctcaccatgatttcaggttattccaaatggatgtcaagagtgcctttctcaatagacctatctcggagttggtctatgtggagcaaccaccggggttcgaggatccaaagttgccaaaccatgtgtacaagctccacaaggcgctctacgggctcaaacaagcccctagagcttgtagtatcatgactaaaaggttcgagatgtctatgatgggtgagttgaccttcttcctcgggctacaagtgaagcaagcacaagagggcactttcatctctcaaaccaagtacgtgaaggacattctcaagaagtttgggatggaagatgccaaacccatcaagactcctatgcctactaatggccacctagacctcgacgacaatggtaaatgtgtggaccaaaaggtatatcgctccaaaagtgtttgcatgtgtgctcactttcaagcggagcctaaagagtgccatttgattgccgtcaagagaattctaagatatttagttcatactcctaatattggcttgtggtatcctaagggttgtgactttgagcttttgggctattccgattcggattatgccgagtgtaaggttgatagaaaaagcacaaccgggacttgtcaattccttgggcggtcccttgtttcttggtcctccaagaagcaaaattccattgccctatccaccgccgaagccgaatatgtcgccgccggttcttgttgtgcccaactcctttggatgaaacaaaccctaaaagattttggctacaacttcaccaagatcccactcctatgtgataatgagagtaccatcaaaatagccaacaatcccgttcaacactcaagaaccaagcacatagatattcgccaccacttcttgagagatcatgaaaccaaaggagacatatgccttacccatgtgagaaccgagagccaattagccgacattttcaccaaacctttagatgagaaaagattttgcgagcttaggataagcactatgcctcgtgagaaaagacagaaagcctctcaggatgtgtccggtgataagagtcctcctattcgttttcctcgtggtcgtttgggtaaagagaaagtggttgatgcggcagtggtagcagtactcgtacttgtcctaggtttaccagtgattatggctagagaaaatccagtggttgagatgaagtggattgattgggcttacatgaggaagaagaacaatgaagtgttcaaccaagtgatgcaagtgtgccacaacaagaatcttggagatattcttgccttggagtatgattggaatgaggaggtcattgcacagttctatgcgacagcattctttggtactacaaggaagggaaccccttatgtgaagtggttgactgaggatgatgaggatctcaataggcccaacattcatagtgaagcatctctccccatgatcaagaccaagttcatgtatgcaaaggatgctcctaggacttgcatgggatctactcatggattgcatcccaactacaaggtgttgtactccatctttcattggtctttgcttccaaaggttggagatgctactgctttgccatccaagcatgctcatcttctcagtcgcatgcgctacaatcagcctcccttcaatgtgatgaaattgatttggtatgagatcgccaacaccattcttgagcctaagcggggttgcatctatgctcctttcattatgaagatgattgagacagtcaccggggtattctacatcaaagatgggcaccataatccttttcgccctcgtgctccacctttctcttctccagtggtccctcgatctgttccttctacttcagctggtccttctactagtggcccaccaagttcctcgagtttttctcccatcaagaaggcacttcaggcaattttctgtatgtgtgctaagactgccaagaaagtgaagaagatcgaaaggcgtcagaaggaagatagaagagaggctaggaaagaagtgtcagatgattctgaggatgaggtctatgttgatccatttgaggcttatgaggcagcccgcaacgttgccggtgaaggtccatccaccttcttcaatgaagaatcttcccattctgatgatgatgatgatgatgatgatgatgatgatgatggtgatgagggtgacaccgaggcagctgctgaggatgcccccattgatgttgatgagggtgacaccgctgctcagtccgatgagtctcatctctccggcgataccgagattgttccctctgatggagatgagtga

SEQ ID NO: 15741 - DNA, 1713 bp, Oryza sativa
  Clone ID: TFbOSC13789j.C1.o4.fg
atgtcgcatctagagggagacgaatatttggaggagaagggagacgcttctagcaccaaggagactggatcaaagggagctactattcactttgattacatcaaacttaatgttcctcctcataactttgtctccgtgccttccgggcgtgcacctcattttgatgggacacattatgccgcttggaagcacaagatgaagttgcatctaatctctttgcatccaagtatttggaaagttgtttgtacaggtattgatgtacccaatgatgacatggagctcacttcggagcaagagcaactcatccaccgcaatgctcaagcttccaatacaattctctccgccttgagtccgaaggagttcaataagtttgatggtcttgaggaggccaaagagatatgggatactttgcaattggctcatgagggatcacccgccgttcgtgaggacaagattgaattgttggaaggaaggcttggaagatttgtgatggatgacaaggagacacctcaagagatgtatgataggatgatgatccttgtcaacaagattaaaggatttgggagtgaggacatgacaaatcactttgtggtcaagagacttctccgtgcatttggtccaagaaatcccactcttgtatcaatgatacgtgagaggaaagacttcaagaggctcaccccaagtgacattcttggaagaattgtgtctcatgagatgcaagaagaggaagctcgtgaagtgaggcaaatggtgaagaatgccgccatgatcaaaaatcaagaagtggctttgaacgcaaaacaagaagaagagtcaagttgtgaagaaagtgaagatgaagagatggctcttattgtcaagagattcaagcactttcttctcaagagtggctatggcaaaggaaggaaggatgatgacaagggaaagaggcaatcagagagagcttgcttcaattgtggcgaatatggccacttcattgccgattgccccaaaacaaatgaagctaaggctaaaggagacaagaagaagccggagcgtgctcatgtggtgaaggcacacatggtggaggtgtggtactccgaagatgaagaagcttccgaggacaagcccaaacccaagccaaaagacaagattgaaggagagggtggtattgctaccgtcgccttcaagtcatcctcttcaagcaaagagtgtctcttcaacaacttgagtgatgacgacgacgactcctaccactactcatgcttcatggcccaaggccgcaaggtgatgactcaaaagccttctcacacttctcttgatgatgattctagtgatgaagaaactagccttagggatgtcaatgaaactcttcaagaaaaatttgctattttagacaaaagtcataaagatcttgaagttcaattagacactctttggagtagcacctctcaaccaaatgtggtttctaattcttccaatccatctactagtaatggttgtgctaggtgttacaatattgatttgacctcttatgctactaatgttgatgctatgcaagctcttaagaaagagaatgaaaggttgggtacattggtgaaatatggatgcatgaagacttaccattcaaaagatgccctttacaagaccatcaccgctcatcctaacaaggatggacacgggctcgggttttcgggtggaatgtcacgtcctgataaattcatcccaaaataa

SEQ ID NO: 15742 - DNA, 1974 bp, Oryza sativa
  Clone ID: TFbOSC30721j.C1.o1.fg
atggagctcacttcggagcaagaacaactcatctaccgcaatgctcaagcttccaatgcaattctctccgccttgaatccggaggagttcaacaaggttgatggactagaggaggccaaggagatatgggatactttgcaattggctcatgagggatgtcccgccgttcgtgaggccaagattgaattattggaaggaaggcttggaagatttgtaatggatgacaaggagacagcacaagagatgaaagacttcaagagactcaccccaagtgacattcttggaagaatagtgtctcatgagatgcaagaagaggaagctcgtgaagtgagacaaatgatgaagaatgccgccatgatcaaaaatcaagaagttgctttgaaggcaaaacaagaagaagagtcaagttgtgaagaaagtgaagatgaagaaatggcttttattgtcaagaggttcaagcactttctttacaagagtggctatggcaaagggaggaaggacgatgacaagggaaagaggcaatcaaagagagcgtgcttcaattgtggcgaatatggccacttcattgccgattgtcccaagtcaaatgaagctaacgctaagggaggcaagaagaagccggagcgtgctcatgtggcggaggcacacatggcggaagtgtggtacttcggagatgaagaagatcccgaggtcaagcccaagcccaagtcaaaagacaaggttgaaggagaaggtggtgttgctaccgtcgccttcaaatcatcctcttcaagcaaggagcgtctcttcaacaacttgagtgatgacgacgacgactcctaccactactcttgcttcatggcccaaggccgcaaggtgatgactcaaaagccctctcaaacttctcttgatgttgattctagtgatgaggaaagtgataatgaattagatgatgtgcttaagagctttagcaaacccgctatgcaacatttggttaagttaatgagagctttggatagtaaagaacaatcactcgaaaggcaagaagaattgcttattcttgagaagaaaagaaaccttgtcttagaggagagcttagctaaagaatgtgctaaaaataaacaacttgctaatgagcttaatttggctaatggttctttagctagccttagggatgttaatgaaactcttcaagaaaaatttgctaatttagacaaaagtcataaagatcttgaagttcaatttgacactctttggaatagcacctctcaaccaaatgtggtttctaattcttctaacccttctactagcaatgctcttaagaaagagaatgaaaagttgtgcactttggtgaaatatggatgcatcaagacataccattcaaaagatgccctttacaagaccatcaccgctcatcctaacaaggatggacacgggttcgggttttcgggtagaagtcctgtgtctaagcgtgtgatggtaaatgggaaagaatgcttgatgtttgtgcgagaaggtaaagctccacaagcaagtgaggtgactggtcttgtgagctgccagggacccggaacatccggacaaaccgggcgaaacctccgggtgggagtctctgtctctcaaaaattcccaccagaaagttccggccggtttgccaagaagttccgggccaatggccgtgcacaagacatgaccggaagttccgggcataatgccaggaggttccggccagatggtctttactatgattcatatgtaatttccaaaaatttagagggaaaagtgggtgcttattttaatgggaattacaatgatgagtaccgcacttgtgtgtgggtgccaaaggctttggcatactcctccggtggttcaagttgggttgtggacagtggttgcaccaatcatatgactggagagaggagtatgtttacaagtcttgatgaggagaacggaactcgtgagaatattgtatttggagatgatggtaaaggaaag

SEQ ID NO: 15743 - DNA, 1350 bp, Oryza sativa
  Clone ID: TFbOSC400044j.C1.o46.fg
atgtcgcatcaagagggaaacggagagatagatgaaggggacaagggagacgcttccagcaccgaggagattgcatcaaagggggctactattcactttgattacagcaaacttaatgttccttctcataacttcgtctccgtgccttccgggcgtgcacctcattttgatgggacacactatgccgcttggaagcacaagatgaagtggcatttaatctctttgcatccaagtatttggaaagttgtttgtacaggtattgatgtaccccatgatggcatggagctcacttcggagcaagagcaactcatccaccgcaatgctcaagcttccaatgcaattctctccgccttgagtccggaggagttcaacaaagtggatggacttgaggaggccaaggagatatgggacactttgcaattggctcatgagggatcacccgccgttcgtgaggccaagattgaattgttggaagaaaggctaggaagatttgtgatggatgacaaggagacaccacaagagatgtatgataggatgatgattcttgtcaacaagattaaaggacttagaagtgaggatatgacaaatcactttgtggtcaagagacttctccgtgcttttggtccaaggaaccccactcttgtatcaatgatacatgagaggaaagacttcaagaggctcacctctagtgacattcttggaagaattgtgtctcatgagatgcaagaagaggaagctcgtgaagtgaggcaaatggtgaagaatgccgccatgatcaaaaatcaagaagtggctttgaaggcaaaacaagaagaagagtcaagttgtgaagaaagtgaagatgaagagatggctcttattgtcaagagattcaagcactttcttcgcaagagtggctatgggaaaggaaggaaggatgatgacaagggaaagaggcaatcaaagagagcttgcttcaattgtggcgaatatggccacttcattgccgattgccccaagtcaaatgaagctaaggctaagggaggcaagaagaagccggagcgtgctcatgtggcggaggcacacatggcggaggtgtggtactccgaagatgaagaagcttccgaggccaagcctaagcccaagcccaagccaaaagacaaagttgaaggagagggtagtgttgctaccatcgccttcaagtcatcctcttcaagcaaggagcgtctcttcaacaacttgagtgatgacgatgacgactcctaccactactcatgtttcatggcccaaggccgcaaggtgatgactcaaagccctctcacacttctcttgatgatgattctagtgatgaagaaagtgataattaattag

SEQ ID NO: 15744 - DNA, 5385 bp, Oryza sativa
  Clone ID: TFbOSC400116j.C1.o1.fg
atgtcgcatctagagggaaccgaagggttggatgacaagggagacgcttctagcaccaaggatactggacccaagggagctactattcactttgattacaacaaacttaatgttcctcctcacaactttgtctccgtgccttccgggcgtgctcctcaatttgatgggacacattacgccgcttggaagcacaagatgaagttgcatttaatctcgttgcatccaagtatttggaaagttgtttgtacaggtattgatgtaccccatgatgacatggagctcacctcggagcaagagcaactcatccactgcaatgctcaagcttccaatgcaattctctctgccttgagtctggaggagttcaacaaggttgatggacttgaggaggccaaggagatatgggatattttgcaattggctcatgagggatcacccgccgttcgtgaggccaagattgaattgttggaaggaaggcttggaagatttgtgatggatgacaagaagacacctcaagagatgtatgatagaatgatgatccttgtcaacaagatcaaaggacttgggagtaaggacatgacaaatcactttgtggtcaagagacttctccgtgcttttgatccaagaaatcccactcttgtatcaatgatacgggaaaagaaaaactttaagaggctcaccccaagtgatattcttggaagaattgtgtctcatgagatgcaagaagaggaagctcgtgaagtaaggcaaatggtgaagaatgccgccatgatcaaaaatcaagaagtggctttgaaggcaaaacaagaagaagagtcaagttgtgaagaaagtgaagatgaagagatggcttttattgtcaagagattcaagcactttcttcgcaagagtggctatggcaaagggaggaaggatgatgacaagggaaagaggcaatcaaagagagcttgcttcaattgtggcgaatatggccacttcattgccgattgtcctaagtcaaatgaagctaaggctaagggaggcaagaagaagccggagcgtgctcatgtgacagaggtaaacatggcggaggtgtggtactccagagatgaagaagatcccgaggtcaagcccaagcccaagctaaaagacaaggttgaaggagaaggccgcaaggagatgactcaaaagccctctcacacttctcttgatgttgattctagtgatgaggaaagtgataatgaattagatgatgtgcttaagagctttagcaaacccgctatgcaacatttggctaagttaatgagagctttggatagtaaagaacaatcactcgaaaggcaagaagaattgcttattcttgagaagaaaagaaaccttgccttagaggagagcttagctaaagaatgtgctaaaaatgaacaactagctaatgagcttaatttggctaatggttctctagctagccttagggatgtcaatgaaactcttcaagagaaatttgctaatttagacaaaagtcataaagatcttgacgttcaatttgacactctttggaatagcacttctcaaccaaatgtggtttctaattcttccaacccatctactagcaatggttgtgctaggtgctacaacattgatttgaactcttgtactactaatgttgatgctatgcaagctcttaagaaagagaatgagaggttgggcacattggtgaaatatggatgcataaagacgtaccattcaaaagatgccctttacaagaccatcaccgctcatcctaacaaggatggacacggactcgggttttcaggtggaagtcctgtgtctaagcgtgtgatggtaaatgggaaagaatgcttgatgtttgtgagagaaggtaaaactccacaagcaagtgaggagactcgtcccttcagtggtcaacacccggaagttccggacaaaatgatcggaagttcctgccctgcatactcctccgatggctcaaattgggttgtggacagcggctgcaccaatcatatgacgggagagaggagtatgtttaccagtcttgatgaggagggtggaagtcgtgaaaatattgtctttggagatgatggtaagggaaagctacaatttattatccgtatctcaattgtgcgagatgactcatccatagcattcaagggtgtgttaaagggtgatctctatctcgttgatttcaacgtggatagagtgaatccggaggcatgcttgattgctaaatcctctatgggttggctatgtcaccgtaggctagcccatgttggaatgaggaatttggcatctcttctaaaaggagaacacattcttggtttatctaatgtttcttttgagaaggatcgtgtgtgtagtgcttgccaagtcgggaagcaagttgggagtccgcatcctatcaaaaacatcatgactacaacaagaccactcgagcttcttcatatggacttatttgggcccgtggcctacataatcattggaggtaacaagtatggttttgtcattgttaatgatttttctcgcttcacttgggtgtactttctccatgacaaaagcaaagctcaagatgtcttcaagcgtttcgcaaagcaagcccaaaacctctatgatctcactatcaagagggtgcaaagcgacagtggaggagaattcaagaacactcaagtggaggaatttcttgatgaagaaggaatcaagtacgagttctccaccccctatgatcctctccaaaaaggcattgttgaaaggaagaaccgaaccctcattgaagccgcaagggcaatgcttgatgagtacaagacttcggatgtcttttgggcgaaggccgtgagtaccgcatgtcatgccatcaaccgcttgtatctccacaagatcctaaagaaaacttcatatgagctcttgagttgtaagaagcctaatgtttcatattttcgtgtctttgggagcaaatgctttattttgagtaagaggcctcgctcatctaagttctcatctaaggtggatgagggattcttacttggctatgaatcaaatgcacatgcctatcgtgtcttcaacaaaacctccggtattgttgaagtcactagggatgtgacatttgatgaatctaatggctcccaaggagagcaagttgttgtacatgttgtaagtgatgtggatccaagtcaagctataagtattaaggctattggagacatacgaccagtcgagacgcaggatgaccaagaagatagggatcaacctccgtcatcaacatccaatagccctacaagtgttgtgtctgctgagccggaagttccgggtcctattgactggaacatccggacatctccaggcccggaagttccgggttctctagtccagaacctccggaccagtggcagtgaagacgtgccaacggcgcaagtccatgattatgtccaaagagatcatcccgtcgacaacatacttggtgacataagaaaaggggtggaagatgcgcttggtgatccggattgggtgatggctatgcaagaggagttcaataacttcactcgcaaccaagtatggactttgatggagagacccaagaaaaatgtcatcggcaccaagtggatctttcgcaacaagcaagatgaacatggggtgattgtaaggaacaaagcccggttatttcaaatggatgtcaatagtgcctttctcaatggacctatctcggagttggtctatgtggagcaaccaccggggttcgaggatctaaagttgccaaaccatgtgtacaagctccacaaggcgctctacgggctcaaacaagcccctagagcttgtgtttccatgtgtgcccgttttcaagcggagcctaaagagtgccatttgattgccgtcaagagaattctaagatatttagttcatactcctaatcttggcttgtggtatcctaagggttgtgactttaagcttttgggctattccgattcggattatgccggatgtaaggttgatagaaaaagcacaaccgggacttgtcaattccttgggtggtcccttgtttcttggtcctccaagaagcaaaattctattgcattatccaccgccgaagccgaatatgttgccgccggttcttgttgtgcccaattccattggatgaaacaaaccctaaaagattttggctacaacttctccaagattccactcctatgtgacaatgagagtgccatcaaaatagccaacaatcccgttcaacactcaagaaccaagcacatagatattcaccaccacttcttgagagatcatgaaactaaaagagacatatgccttacccatgtgagaaccgagagccaattagccgacattttcaccaagcctttagatgagaaaagattttgcgagcttaggatggtcagtatgcctcgtgagaagagacagaagctgtcacaggatgttccctctgactcgagtcccctggttcgtggtcctagggggagattgggcaaagaaaaagtgggagatttttacagtgggagtcagattctgattcattccaggagggctggtagcattgtcattcgtgatgctccccgctctccctctccagttgcatctgagtcagacaatggtggaaatgaggatgagcctggttctgagagcaatcctttaaggctttacaagacgagggctgttgatcctgatcctagacatccaagggtgaactatctgaagaatttgctaaggtgtgcaaaggatagaatggtgagtcctgatacaatgactgctgactctcaggatgacagattcaggaccttggtgcagattgattggtacaactctatgatcatgcgaagatcttatccagtggtagagatgaagtggctagactggcagtacatgtcctcaaagaacaacttggttttcaatgaggtgcgcaaggatgctcccaaggattgtttggggactactcgtgggttgcatccatactatagagtgctttattctatcttcaggtggtctttgctccccaaagtgaatgatgctacagctcttccaagtcggcatgcgctccttctcagtcgcatgcgctacaacaagccagatttcagcatcatgaagcttatctggacaggcaaggaggtctctgatatttctgatgatgaggagttcgttgatccttttgctgcttatgaggctgctcgagacattgctaatggtgagggtccctctggcactactcatttcttcaatgaggagtcctcctactccgaggagaacagcgatgatgaggagtccgatgcacctactgagaatgtgcctacagatctagatgaggcagtggacgccgctgggcaagacattgactctcctgactccggcgacaccgagatcatttcttctgatggagatgatgatgaggcttga

SEQ ID NO: 15745 - DNA, 5337 bp, Oryza sativa
  Clone ID: TFbOSC400685j.C1.o36.fg
atgtcggacttagggggaaagaacggggaaaatggaaatgaagatgaagcaagcagcaagggaactccaccacccaagggagctactataccttttgattatagcaaacttaccattccttctcacaacttcgtctccgtgccttccgggcgtgctcctcaatttgatgggacatattatgccgcttggaagcacaagatgaagttgcatctaatctctttgcatccaaatatttggaaagttgtttgtacaggtattgatataccccatgatgacatggagctcacttcggagcaagaacaacttatccaccgcaatgctcaagcttctaatgcaattctcttcgccttgagtccggaggagttcaacaagattgatggactagtggaggccaaggagatatgggataccttgcaattggctcatgagggatcacccgccgttcgtgaggccaagattgaattattggaagaaaggcttggaagatttgtgatggatgacaaggagacaccacaagagatatatgataggatgatgattcttgtcaacaagattaaaggacttgggagtgaggacatgacaaatcactttgtggtcaagaaacttctccgtgcatttggtccaagaaatcccactcttgtatcaatgatacgggaaaggaaagacttcaagagactcaccccaagtgacattcttggaagaattgtgtctcatgagatgcaagaagaggaagctcgtgaagtgagacaaatggtgaagaatgccgccatgattaaaaatcaagaagttgctttgaaggcaaaacaagaagaaatggcttttattgtcaagatattcaagcactttcttcgcaagagtggctatggcaaagggaggaaggatgatgacaagggaaagaggcaatcaaggagagcgtgcttcaattgtggcgaatatggccacttcattgccgattgtcccaagtcaaatgaagctaaggctaagggaggcaagaagaagccggagcatgctcatgtggcggaggcacacatggcggaagtgtggtactctggagatgaagaagatcccgaggtcaagcccaagcccaggtcaaaagacaaggttgaaggagaaggtggtgttgctaccgttgccttcaagtcatcctcttcaagcaaggagcgtctcttcaacaacttgagtgatgacgacgacgactcctaccactactcttgcttcatggcccaaggctgtaaggtgatgacacaaaagccctctcaaacttctcttgatgttgattctagtgatgaggaaagtgataatgaattagatgatgtgcttaagagctttagcaaacccgctatgcaacatttggctaagttaatgagagctttggatagtaaagaacaatcactcgaaaggcaagaagaattgcttattcttgagaagaaaagaaaccttaccttagaggagagcttagctaaaaaatgtgctaaaaatgaacaacttgctaatgagcttaatttggctaatggttcttcagctagccttagggatgtcaatgaaactcttcaagaaaaatttgctaatttagacaaaagtcataaagatcttgaagttcgatttgacactcgttggaatagcacctctcaaccaaatgtggtttctaattcttctaacccttctactagcaatggttgtgctaggtgtttcaatattgatttgaactcttatgctactaatattgatgctatgcaagctcttaagaaagagaatgaaaggttgggcacattggtgaaatatggatgtatgaagacataccattcaaaagatgccctttacaaaaccatcaccgctcatcctaacaaggatggacacgggctcgggttttcgggtggaagtcctgtgtctaagcgtgtgatggtaaatgggaaagaatgcttgatgtttgtgagagaaggtaaagcaccacaagcaagtgaggtgactagtcttgtgagctgccagggacccggaacatccggacaaaccgggagaaacttccgggtgggagtctctgtctctcaaaaattcccaccaggaagttccggccagtttgccaagaagttccgggccaatggccgtgcacaagacatgaccggaagttccgggcacaatgccaggaggttccggccagagggtctttactatgattcatatgcatactcctccggtggttcaagttgggttgtggacagtggttgcaccaatcatatgactggagagatgagtatatttaccagtcttgatgaggaaaacggaactcgtgagaatattgtgtttggagatgatggtaaaggaaagataattggtctagccttcataagtattggaggtaacaagtatggttttgtcattgttgataatttttcccgcttcacttgggtgtattttctccatgacaagagtgaggctcaagatgtcttcaagcgcttcgccaagcaagcccaaaacctctatgatctcaccatcaagagggtacgaagtgacaatggaggagaattcaagaacacgcaagtggaggaattccttgatgaagagggaatcaagcatgagttctccgccccctatgatcctcctcaaaatggcattgttgagaagaagaaccgaactcttattgaagccgcaagagaaatgcttgatgagtacaagacttcggatagcttttggacggaggccgtgagcaccacatgccatgccatcaatcgcctctacctccataagattctaaagaaaacttcatatgagctcttgagtggtaagaaacctaatgtttcatattttcatgtctttgcgagcaaatgctttattttgagtaagaggcctcgctcatctaagttctcacctaaggtggatgagggattcttacttggctatgagtcaaatgcacatgcctaccgtgtcttcaacaaaacctccggtattgttgaagttacaagggatgtgacatttgacgaatctaatggctcccaaggagagcaagttgttgtacatgttatagatgatgcggatcctagagaagcaattggttctaaggctattggagacatacgaccagtcgagacgcaggatgaccaagaagatagggatcaaccttcgtcatcgacatccaatagccctacaacaagtcaagagtcagttgacccggaagttccgggaccagatgatcggaacctccagacctccccaggccaggaagttccgggtccatctgccaggaagtttcgggcagaggacagtcaaggcttgcctacgacacaagtggatgggattgatgccgtgggcactgtagagcatcctgatcaggctcaggtctcctcagtgcaccatccaagaatacatcacactgtccaaagagatcatcccgtcgacaacatacttggtgacataagaaagggggtaactactcgttctcgtgtcgctaacttttgtcaacactattcgttcgtttcttctttggaaccaaccagggttgaagatgcacttggtgatccggattgggtgatggctatgcaagaggagttgaataacttcactcgcaaccaagtatggacattggtggagagacccgaccaaaatgtcatcggcaccaagtggatcttccgcaacaagcaagatgaacatggagtggttgtaaggaacaaagcccggttaattgtgcaagggttcacccaagtcgagggtctcgattttggtgaaaccttcgcagccgttgcttgtcttgagtcaatccgaatgcttttagcctatgccgctcaccatgatttcaggttatatcaaatggatgtcaagagcgcctttcttaatggacccatctcggagttggtctatgtggagcaaccaccggggttcgaggatccaaagttgccaaaccatgtgtacaagctccacaaagcgctctacgggctcaaacaagcccctagagtttggtatgaatgtctccgagattttcttttgaaaaatggttttgaaattgggaatacgtacactactctcttcaccaaaaagtttgaaaatgatttattcatttgccaaatttatgtcgatgacataatatttggttctactaatgcctctttttgtgaagaatttagtagcatcatggctaaaaggttcgagatgtctataatgggtgagctaaccttcttcctcgggctacaagtcaagcaagcacaagaaggtactttcatctctcaaaccaagtacgtgaaggacattctcaagaagtttgaaatggaagatgccaaacccatcaagactcccatgcctaccaatggtcaccttgatcttgatgaaaatggtaaatgtgtggaccaaaagggttgtgactttgagcttttgggctattccgattcggattacgccgggtgtaaggttgatagaaaaagcacaaccgggacttgccaatttcttgggcggtcccttgtttcttggtcctccaagaagcaaaattccattgcgttatccaccaccgaagccgaatatgtcgccgccggttcttgttgtgcccaactcctttggatgaaacaaactctaaaagactttggctacaacttcaccaagatcccactcctatgtgacaatgagagtgccatcaaaatagccaataatcccgttcaacactctcgaaccaaacacatagatattcgccaccactttttgagagatcatgaaaccaaaggagacatattccttacccataaaagacagaaagcctctcaggatgtgtccggtgatgagagtccccctattcggtttcctcgtggtcgtttgggtaaagagaaagtgattgagggtggcagtggcagcggcactcgtacttctcctaggtttaccaggcaatccagcaatcgtccagttcagattcgggatgttgacagtggtcaaggaagtgatgctcctaatacaagaggtcgtgggagaggtggtggtcgcagttctggggctggaagggcatctcatgatttccctattggatctcgtgagaatcccgttcagctctacaagactcttggatttgacaccactcctatgcaccacattggaagacccaagtccaactaccttcatcagcttgccaagtgcagaagggacctgattacggctagagaaaatccaatggttaagatgaagtggattgattggacttacatgaggaagaagaacaatgaagtgttcaaccaagtgatgcaagtgtgccacaacaagaatcttggagatattcttgccttggagtatgattggaatgaggaggtcattgcacagttctatgcgacagcattctttggtactacaaggaagggaattgtcacgccctga

SEQ ID NO: 15746 - DNA, 5292 bp, Oryza sativa
  Clone ID: TFbOSC400735j.C1.o3.np
atgtcgtacttagggggaaagaacggggaaaatggaaatgaagatgaagcaagcagcaagggaactccaccacccaagggagctactataccttttgattacagcaaacttaccattccttctcacaacttcgtctccgtgccttccgggcgtgctcctcaatttgatgggacatattatgccgcttggaagcacatgatgaaggtgcatctaatctctttgcatccaagtatttggaatgttgtctgtacaggtattgatataccccatgatgacatggagctcacttcagagcaagaacaactcatccaccgcaatgctcaagcttccaatgcaattctctccgccttgagtccggaggagttcaacaaggttgatggactagaggaggccaaggagatatgggatactttgcaattgacacatgagggatcacccgccgttcgtgaggccaagattgaattattggaaggaaggcttggaagatttgtgatggatgacaaggagacaccacaagagatgtatgataggatgatgattcttgtcaacaagattaaaggacttgggagtgaggacatgacaaatcactttgtggtcaagagactttttggtccaagaaatcccactcttgtatcaatgatacgggaaaggaaagacttcaagagactcaccccaagtgacattcttggaagaattgtgtctcatgagatgcaagaagaggaaggtcgtgaagtgagacaaatggtgaagaagtttctttgaaggcaaaacaagaagaagagtcaagttgtgaagaaagtgaagatgaagaaatgacttttattgtcaagagattcaagcactttcttcgcaagagtggctatggcaaagggaggaaggatgatgacaagggaaagaggcaatcaaagagagcatgcttcaattgtggcgaatatggccacttcattgccgattgtcccaagtcaaataaagctaaggcgaagggaggcaagaagaagccggagcgtgctcatgtggcggaggcgcacatggcggaagtgtggtactccagagatgaagaagatcccgaggtcaagcccaagcccaagtcaaaagacaaggttgaaggagaaggtggtgttgctaccgtcgccttcaagtcatcctcttcaagcaaggagcgtctcttcaacaacttgagtgatgacgacgacgactcctatcactactcttgcttcatggcacaaggccgcaaggtgatgactcaaaagccctctgaaacttctcttgatgttgattctagtgatgaggaaagtgataatgaattagatgatgtgcttaagagctttagcaaacccgctatgcaacatttggctaagttaatgagagctttggatagtaaagaacagtcactcgaaaggcaagaagaattgcttattcttgagaagaaaagaaaccttgccttagaggagagcttagctaaagaatgtgctaaaaatgaacaacttgctaatgagcttaatttggctaatggttctttagctagccttagggatgtcaatgaaactcttcaagaaaaatttgctaatttagacaaaagtcataaagatcttgaagttcaatttgacactctttggaatagcacctctcaaccaaatgtggtttctaattcttctaacccttctactagcaatggttgtgctaggtggtacaatattgatttgaactcttatgctactaatattgatgatatgcaagctcttaagaaagagaatgaaaggttgggcacattggtgaaatatggatgcatgaaggcataccattcattagatgccctttacaagaccatcaccgctcatcctaacaaggatggatacaggctcgggttttcgggtggaagtcctgtgtctaagtgtgtaatggtaaatgggaaagaatgcttgatgtttgtgagagaaggtaaagcaccacaagcaagtgaggtgactagtcttgtgagctgccagggacccggaacatccggacaaaccgggagaaacatccgggtgggagtctctgtctctcaaaaattcccaccaggaagttccggccagtttgccaggaagttccgggccaatgaccatgcacaagacatgaccggaagttccgggcacaatgcctggaggttccggaaagagggtctttactatgattcatatgcatactcctccgatggttcaagttgggttgtggacagtggttgcaccaatcatatgactggagagaggagtatgtttacaagtcttgatgagtagaacggaactcgtgagaatattgtgtttggagatgatggtaaaggaaaggtaattggtctagcctacataagtattggaggtaacaagtatggttttgtcattgttgatgatttttcccgcttcacttgggtgtattttctccatgacaagagtgaggctcaagatgtcttcaagcgtttcgccaagcaagcccaaaacctctatgatctcactatcaagagggtacgaagtgacaatggaggagaattcaagaacacgcaagtggaggaattccttgatgaagagggaatcaagcatgagttctccaccccctatgatcctcctcaaaatagcattgttgagaggaagaaccgaactcttattgaagccgcaagagcaatgcttgatgagtacaagacttcggatatcttttgggtggaggccgtgagcactgcatgccatgccatcaatcggctctacctccataagattctaaagtttcatattttcgtgtctttgggagcaaatgctttattttgagtaagaggccttgctcatctaagttttcacctaaggtggatgagggattcttacttggctataagtcaaatgcacatgcctaccgtgtcttcaacaaaacctccggtattgttgaagttacaagagatgtgacatttgacgaatctaatggctcccaagaagagcaagttgttgtacatgttgtagatgatgcggatcctagacaagcaattggttctaaggctattggagacatacgaccagtcgagacgcaggatgaccaagaagatagggatcaaccttcgtcatcgacatccaatagccctacaacaagtcaagagtcagttgacccggaagttccgggaccagatgatcggaacctccggacctccctaggctaggaagttccgggtccatctcccaggaagttcggggcagaggacagtcaaggcgtgcctacggcacaagtggatgggattgatgccgagggcactgtagagcatcctgatcaggctcaggtcccctcggtgcaccatccaagaatacatcacactgtccaaagagatcatcccgtcgacaacatacttggtgacataagaaagggggtaactactcgttctcgtgtcgctaacttttgtcaacactattcgtttgtttcttctttggaaccaaccagggttgaagatgcacttggtgatccggattgggtgatggctatgcaagaggagttgaataacttcacttgcaacctagtatggacatcggtggagagacccgaccaaaatgtcatcggcaccaagtgaattttctgcaacaagcaagatgaacatggagtggttgtaaggaacaaagcccggttagttgcgcaagggttcacgcaagtcgagggtctcgattttggtgaaacattcgcacccgttgctcgtcttgagtcaatccaaatgcttttagactatgccgcttaccatgatttcaggttatatcaaatggatgtcaagagcgcctttctcaatggacccatcttggagttggtctatgtggagcaaccaccggggttcgaggatccaaagttgccaaaccatgtgtacaagctccacaaagcgcaaaacgggctcaaacaagccctagagcttggtatgaatgtctccgagattttcttttgaaaaatagttttgaaattgggaaggcggacactactctcttcactaaaaagtttgaaaatgatttattcatttgccaaacttatgtcgatgacataatatttggttctactaatgcctctttttgtgaagaatttagtagtatcatgactaaaaggttcgagatgtctatgatgggtgagctaaccttcttcctcgcgctacaagtcaagcaagcacaagaaggtactttcatctctcaaaccaagtacatgaaggacattctcaagaagtttgggatggaagatgccaaaaccatcaagactcccatgcctaccaatggtcaccgtgatcttgatgaaaatggtaaatgtgtggaccaaaagggttgtgactttgagcttttgggctattccgattcggattacgccgggtgtaaggttgatagaaaaagcacaaccgggacttgccaatttcttaggcagtcccttgtttcttggtcctccaagaagcaaaattccattgcattatccaccgccgaagccgaatatgtcgccgccgattcttgttgtgcccaactcctttggatgaaacaaactctaaaagactttggctacaacttcaccaagatcccactcctatgtgacaatgagagtgccaccaaaatagccaataatcccgttcaacactctcgaaccaaacacatagatattcgtcaccactttttgagagatcatgaaaccaaaggagacatatgccttacccataaaagacagaaagcctctcaggatgtgtccggtgatgagagtcctcctattcggttccctcgtggtcgtttgggtaaagagaaagttgttgagggcggcagtggcagtggcactcgtacttctcccaggtttacaaggcaatcaagcaaccgtcctgttcagattagggatgttgacagtggtcaaggaagtgatgcacctaatacaagaggacgggggagaggtggttgtcgcagttctagggctggaagggcatctcatgatttccctgtaggatctcgtgagaatcccgttcggctctacaaaactcttggttttgacaccactcctttgcaccacattggaagacccaagtccaactaccttcatcaacttgccaagtgtagaagagatctgattatggctagagaaaatccagtggttgagatgaagtggattgattgggcttacatgaggaagaagaacaatgaagtgttcaaccaagtgatgcaagtgtgccacaacaagaatcttggagatattcttgccttggagtatgattggaatgaggaggtcattgcacagttctatgcgacagcattctttggtactacaaggaagggaaccccttatgtg

SEQ ID NO: 15747 - DNA, 5976 bp, Oryza sativa
  Clone ID: TFbOSC401074j.C1.o9.fg
atggtgaagaatgctgccatgatcaaaaatcaaaaagttgctttgaaggcaaaacaagaagaagagtcaagttgtgaagaaagtgaagatgaagaaatggcttttattgtcaagagattcaagcacttttttcacaagagtggctatggcaaagggaggaaggatgatgacaagggaaataagcaatcaaagagagcgtgcttcaattgtggcgaatatggccacttcattgccgattgtcccaagtcaaatgaagctaacgctaagggaggcaagaagaagccggagcgtgctcatgtggtggaggcacacatggcggaagtgtggtactccggagatgaagaagatcccgaggtcaagcccaagcccaagtcaaaagacaaggttgaaggagaaggtggtgttgctaccgtcgccttcaagtcatcctcttcaagcaaggagcatctcttcaacaacttgagtgatgacgacgacgactcctaccactactcttgctttatggcccaaggccgcaaggtgatgactcagaagccctctcaaacttctcttgatgttgattctagtgatgaggaaagtgataatgaattagatgatgtgcttaagagctttagcaaacccgatatgcaacatttggctaagttaatgagagctttggatagtaaagaacaatcactcgaaaggcaaaaagaattgcttattcttgagaagaaaagaaaccttgccttagaggagagcttagctaaagaatgtgctaaaaatgaacaacttgctaatgagcttaatttggctaatggttctttagctagccttaggaatgtcaatgaaactcttcaagaaaaatttgctaatttagacaaaagtcataaagatcttgaagttcaatttgacactctttggaatagcacctctcaaccaaatgtggtttctaattcttctaacccttctactagcaatggttgtgctaggtgttacaatattgatttgaactcttatgctactaatattgatgctatgcaagctcttaagaaagagaatgaaaggttgggtactttggtgaaatatggatgcatgaagacataccattcaaaagatgccctttacaagaccatcaccgctcatccttacaaggatggacacgggctcgggttttcgggtggaagtcctgtgtctaagcgtgtgatggtaaatgggaaagaatgcttgatgtttgtgcgagaaggtaaagctccacaagtaagtgaggtgactggtcttgtgagctgccaggaacccggaacatccggacaaaccgggcgaaacctccgggtgggagtctctgtctctcaaaaattcccaccaggaagttccggccggtttgccaggaagttctgggccaatggccgtgcaaaagacatgaccggaagttccgggcataatgccaggaggttccggccagatggtctttactatgattcatatgtaatttccaaaaatttagagggcaaagtggttgcttattttaatgggaattacaatgatgagtaccacacttatgtgtgggtgccaaatgctttggcatactcctccggtggtacaagttgggttgtggatagtggttgcaccaatcatatgactggagagaggattatgtttacaagtcttgatgaggagaacgaaactcgtgagaatattgtgtttggagatgatggtaaaggaaagttgggttacaattgcttgtttactgatgaggatgtgaccgtctttagaagggatgactcctccgtagcattcaaaggcaagttaaagggtgatctctatcttgtcgatttcgatgtggatagagtgaatccggaagcttgtttgattgctaaatcctccatgggttggctatggcatcgtagattagcccaagttggaatgcggaatttggcaactcttctaaagggggaacacatcctcgggctcactaatgtcacatttgagaaagatcgtgtgtgtagtgcttgccaagccggaaaacaagttgggaatccacatcctatcaagaacatcatgactacaacacgccctcttgagcttctacatatggatttatttgggcccgtggcttacataagtattggaggtaacaagtatggttttgtcattgttgatgatttttcccgcttcacttgggtgtattttctctatgacaagagtgaggctcaagatgtcttcaagcgcttcgccaagcaagcccaaaacctctatgatctcaccatcaagagggtacgaagtgacaatggaggagaattcaagaacacacaagtggaggtattccttgatgaagtgggaatcaagcacgagttcttcgccccctatgatcctcctcaaaatggcattgttgagaggaagaaccgaactcttattgaagccacaagagcaatgcttgatgagtacaagacttcggatatcttttgggcggaggccgtgagcaccgcatgccatgccatcaatcgcctatacctccacaaaattctaaagaaaacttcatatgagctcttgagtggtaagaaaccaaatgtttcctattttcgtgtctttgggagtagatgctttattttgagtaagaggccttgttcatctaagttctcacctaaggtggacgaggattcttacttggctatgagtcaaatgcacatgcctaccgtgtcttcaacaaaacctctagtattgttgaagttacaagggagccctacatcgagtcaagagtcagttgacccggaagttccgggaccagatgatcggaacctccggacctccccaggccaggaagtttcgggtccatttgccaggaagttccgggcagaggacagtcaaggcgtgcctacggcacaagtggatgggattgatgccgagggcactatagagcatcctgatcaggctcaggtcccctcggtgcaccatccaagaatacatcacactgtccaaagagatcatcccgtcgacaacatacttggtgacataagaaagggggtaactactcgttctcgtgtcgctaacttttgtcaacactattcgtttgtctcttctttggaaccaaccagggttgaagatgcacttggtgatccggattgggtgatggctatgcaagaggagttgaataacttcactcgcaaccaagtatggacgttggtggagagacccgaccaaaatgtcatcggcaccaagtggatcttccgcaacaagcaagatgaacatggagtggttgtaaggaacaaagcccggctagttgcgcaagggttcatcaaagtcgagggtctcaattttggtgaaaccttcgcacccattgctcgccttgagtcaatccgaatccttttagcctatgccgctcaccatgatttcaggttattccaaatggatgtcacgagtgcctttctcaatggacctatctcggagttggtctatgtggagcaaccaccagggttcgaggatccaaagttgccaaaccatgtgtacaagctccacaaggcgctctacgggctcaaacaagcccctagagcttgtagtatcatgactaaaaggttcgagatgtatatgatgggcgagttgaccttcttcctcgggctacaagtgaagcaagcacaagagggcactttcatctctcaaaccaagtacgtgaaggacattctcaagaagtttgggatagaagatgccaaacccatcaagactcctatgcctactaatggccacctaaacatcaacgacaatggtaaatgtgtggaccaaaaggtatatcgctccatgctaggatccttgctttacttatgtgcatctcgtcatgatatcatgcttagtgtttgcatgtgtgctcgctttcaagcggagcctaaagagtgtcatttgattgccgtcaagagaattctaagatatttagttcatactcctaatcttggcttgtggtatcctaagggttgtgactttgagcttttgggctattccgattcggattatgccgggtgtaaggttgatagaaaaagcacaaccgggacttgtcaattccttggacggtcccttgtttcttggtcctccaagaagcaaaattccattgtcttatccaccgccgaagccgaatatgtcgccgccggttcttgttgtgcccaactcctttggatgaaacaaaccctaaaagattttggctacaacttcaccaagatcccactcctatgtgataatgagagtgccatcaaaatagccaacaatcccgttcaacactcaagaaccaagcacatagatattcgccaccacttcttgagagatcatgaaaccaaaggagacatatgccttacccatgtgagaactgagagccaattagccgacattttcaccaagcctttagatgagcaaagattttgcgagcttaggataagcactatgcctcgtgagaaaagacagaaagcctctcaggatgtgtccggtgatgagagtcctcctattcggtttcctcatggttgtttgggtaaagagaaagtggttgagggcggcagtggcagcggcactcgtacttcttctaggtttaccaggcaatccagcaaccgtctagttcagattcgggatgttgacagtggtcaaggatgtgatgctcctaatacaagaggtcgtgggagaggtggtggtcgcagttctggggctggaagggcatctcatgatttccctgttggatctcgtgagaatcctgttcggctctacaagactcttggatttgacaccactcctatgcaccacattggaagacccaagtccaactaccttcatcagcttgccaagtgcagaagggaccgtttgattgatccagagactcggcctgaggagtcacatgatcctcgtttcaggactttcactcaattggattggtataattcaatgattatggctagagaaaatccagtggttgagatgaagtggattgattgggcttacatgaggaagaagaacaatgaagtgttcaaccaagtgatgcaagtgtgccacaacaagaatcttggagatattcttgccttggagtatgattggaatgaggaggtcattgcacagttctatgcgacagcattctttggtactacaaggaagggaaccccttatgtgaagtggttgactgagggtgttaggcacaagatttccatggcacagtttgctgagatgttggggttagatgatgaggatctcaataggcccaacattcatagtgaagcacccctccccatgatcaagaccaagttcatgtatgcaaaggatgctcctaggacttgcatgggatctactcatggattgcatcccaactataaggtgttgtactccatcttttgttggtctttgcttccaaaggttggagatgctactgctttgccatccaagcatgctcatcttcttagtcgcatgcgctacaatcaacctcccttcagtgtgatgaaattgatttggtatgagatcgccaacaccattcttgagcctaagcggggttgcatctatgctcctttcattatgaagatgattgagacaatcaccggggtattctacatcaaagatgggcaccataatccttttcgccctcgtgctccaccttcctcttctccagtggtccctcgatctattccttctacttcagctggtccttctactagtgccccaccaagttcctcgagttcttctcccatcaagaaggcacttcaggcaattttctatatgtgtgctaagactgccaagaaagcttatgaggcagcccgcaacgttgtcggtgaaggtccatccaccttcttcaatgaagaatcttcccattctgatgatgatgatgatgatgatgatgatgatgatgatgatgatggtgatcagggtgacactgaggcagctgctgaggatgcccccactgatgttaatgagggtgacaccgctgctcagtccgatgagtctcatctctccggcgatatcgagattgttccctctgatggagatgagtga

SEQ ID NO: 15748 - DNA, 4296 bp, Oryza sativa
  Clone ID: TFbOSC401693j.C1.o19.fg
atgtcgtccgcgtccatggcaggcgcctgctccttcctggtggcagcagcggggaagccgccgcgccggagctccctccagcggtgcttcatgacgcgcgaggggagcaagcgaagtgggggcgtcaacgggcgagcgcagtggcggaacgacagcgtgggtgggcaatcttcgcgcgcgtacaacggcctcaatggcagcgttgtccttccagcagaggaggtggacgtggaggccggtggcggcaaagaagagctcgagctgggggctcccgagctccgcggcggcggaggcaccagcggacagcacggagagcgcggaggcggcgtccccatctatgatgagtgcggaggtgagctgcgtttggaagttgcaggtccaaaggagggccaggccacgggcgagaaggcccgatgcggaggcggagacgaggagccccaacctgtggcggagcacgttcttctacaaggggacagcaccgaggacgccataggtggtggtgaggagggagtgggcaaggagcttgagccacgggagagctggggccagcgaggggggcggggagaccggcgtcgagtggcggagagggagaagataggtttggtgagggggtcaggaagactggcgagctcgccctcgccccacctccaacgccacaacacctgcctccgcgccttcacgaccttgtgtgtcacgtcggcgagattatctacagtgtcgcgtgcgttgtgttcatccggtgttcgttctcgcccgctcgctgattcgttgggatttcctgacaagatcgggaggaggagcagcaggggcgggcaagggcgcaacggcagcggaggtggcgacagcgctggcccggctcgcaagaccgacaagtgccacaactgcggcaaactcggccactgggccaaggactgcaggagcaagcccaagcaggagcaggcacatgtggtccaggaggaggatgagcccacgctcatgctcatgacgggtggctgcattgatgtggtggaggagacgggcgcgccgtgcgtgacaccggcgccgcccgcgccgcggcctcgcctagacgttgtcgagcttgtggagcagaaggtgtttgccgcgctggacgacgccaccgaccacgacaacaagcgctggatcctcgacaccggcgcgtcgaaccacatgactggctcgagggcggcgttctctgacatcgacaccaacgtcaccggcaatgtccggctaggggatggctcgctcgttcgcatcggagggcgccgcaccatcctgttcgcctgcaagaatggtgagcaccacatgcttcacaaggcctactacctcccgtgcctcgccgccaacatcatcagcgtcggccagctggacgaaaccggcttcaaggtgctggttgaagacggcgtgatgcgtgtgtgggacgagcaacaccgactgctcgcccgcataacgcgcaccccaggccggctctacgtgctcgacatcaatctcgcacggccggtctatctgatggctcgcgcgggagaggacgcttggcgctggcacgcgcgtttcgggcacgtcaacttcaccgcgctgcgcaagatgggcagagaagcactggtacgtgggttgcccgttctgtcgcaggttgagcaagtgtgcgaggcttgccttgctgggaagcagcggcgagctcctttcccgcagcaggcacttcaccgcgctaccgaacccctcgccctgctgcacggcgacctttgtgggccggtcatgccggcgacaccgagcggaaatcgctatttcccgctgttggtggatgactacagccgctatatgtggctcgtgctcctcgccaccaaggatgccgcgccggacgccatgaagcgtgttcaggcagccgccgagcgcaagagtggccgcaaactccgggcgctccggactgatcgtggaggcgagttcacggtcgggcacttcaccgagtactgcgcggagctcgggctgcgacgcgagttgacagctccatactcgccgcagcagaacggcgtcgtcgaacgccggaatcagtcggtggtgagcacggcgcgaagcatgctgaaagctaaggggctcccaggtatgttctggggggaggcagtgaatactgctgtttatctgctcaacaggtgctcgtccaagagcattgatggcaagacgccgtatgagctctggaatggagtcacgccggctgtccatcacttgcgcacatttgggtgtgtcgcacacgtgaaggtaaccgccccgacgaagaagcttgacgacaggagtcggccgatgatttttgtcggctacgagctcggctcaaaggcgtaccgtgtctacgacccggcgacgcggcgcgtccacgtctcgcgggacgtggtgttcgacgaggaggcgcagtggaattgggatggcgaggcagctaccaacgttgactccgacttcaccatcgagtacaccacggtgtaccacccagcgacggcgactccgacgcaaaccggcacggagcacgggggagctccagcctcgccgcgctcacctgcatcaggctcgactccgacaacaccgcctgtggcagaagtgtcgccggtggaatttgtctctcctccgcctgacgtggaggatgatcttgacgcggaccacgatgacgcgccactccgtttccgtcgcattgacgacgtgcttgggccggcgacgccgccgggccaggccgttcgcgagctgagcgaggagctgttcgcggtaacagcggaggagccggcgtcgttcgccgaagcagagcagctaagctgctggcgacaagcgatgatcgaggagatgcgttctattgaggcgaacaagacttggcggctcgttgatccgctagcgcgccaacgtccgattggactcaagtgggtctacaaggccaagaaggacgccgccggcaacatcaccaagtacaaagcacgcctggtcgcgaaggggtatgtgcagcggcaaggcatcgacttcgacgaggtgttcgcaccagtggcgcggctcgagtccgttcgcttgttgttggcgcatgcggcgtgcgagggctgggccgtgcatcacatggacgtcaaatcggcgtttttgaacggcgagcttctggaggaggtctacgtcgcgcagccgccgggattcgtcgtcgacggccaggaacacaaggtgttgcgccttgacaaggcgctctatgggctccgtcaggcaccgcgtgcttggtactccaagctggacgcgtcgctgctatcgcttggttttcaccgaagtgattccgagcatgccgtgtacatgcgcggcacgggggagcaacggctggtggtcggcgtgtatgtcgacgatctcatcatcactggcggcaaccccggcgagctgaaacagttcaaggaggagatgaaaggaacattccaaatgagcgacctcggcttgttgcagtactacctcggcctggaagtgaaccagacagaggacggcatcacggtgaaccagcgcgcctacgcggagaagattctgcagactgccggcatggtggccagcaatcccagccttaccccaatggagacgcgcctcaagctcagcaagatgagcaacgccccctccgtcgacgccactgattaccggtggatcgttggctccctgcgctatctggtgaactcgagaccggatttggcgtactcggtgggctacgtgagcaggtttatggagaaacccaccaccgaacacctggcggccgtgaagcgagtgctgcgctatgtcgctggctccatcggctacggctgccactacaagaggaagaaagatgcaagtttagtcggctacagcgacagcgatctcgccggtgacgtcgacactcgcaagagcacctccggcgtcttcttcttcctcggcgacaacttgatcacctggcagtcgcagaagcagaaagttgtggccttgtcgtcctgcgaggctgaatacatagcggcgacaacggcggcttgccaaggtgtgtggctggcgcgtctccttgctgaactccagggagaggaggccgacgccgtcacattgaggattgacaaccaatctgccatcatgcttagcaaaaaccctgtcttccacgatcgcagcaagcacatcgacacgagatatcactacatcagagaatgcattgaggagggcagggtgaaggtcgagttcatcggcaccaacgagcagttggcggatattctgacgaagtcactcggacgggacaggttcatggagctgcgttcccagattggcctcgtcgaagttcaaacaccgcgcaaggtttag

SEQ ID NO: 15749 - DNA, 6297 bp, Oryza sativa
  Clone ID: TFbOSC403369j.C1.o1.fg
atgacaagggagacgcttctagcaccaaggataaagggagctactattcactttgattacagcaaacttaatgttcctcctcataactttgtctccgtgccttccgagcgtgctcctcaatttgatgggacacattacgccgcttggaagcacaagatgaagttgcatctaatctctttgcatccaagtatttggaaagttgtttgtacaggtattgatgtacccaatgatgacatggagctcacctcggagcaagagcaactcatccaccgcaatgctcaagcttccaatgcaattctctccaccttgagtccggaggagttcaacaagatgtatgataggataatgatccttgtcaacaagatcaaaggacttgggaatgaggacatgacaaatcactttgtggtcaagagacttctccgtgcttttggtccaagaaatcccactcttgtatcaatgatacgggaaaggaaagacttcaagaggctcaccccaagtgacattcttggaataattgtgtctcatgcgatgcaagaagaggaagctcgtgaagtgaggcaaatggtgaagaatgccgccatgatcaaaaatcaagaagtagctttgaaggcaaaacaagaagaagtgtcaagttgtgaagaaattgaagatgaagagatggcttttattgtcaagagattcaagcactttcttcgcaagagtggctatggaaaagggaggaaggatgatgacaagggaaagaggcaatcaaagagagcttgcttcaattgtggcgaatatggccacttcattgccgattgtcccaagtcaaatgaagctaaggctaagggaggcaagaagaagctagagcgtgctcatgtggcagaggtgtggtactccggagatgaagaagatcccgaggtcaagcccaagcccaagccaaaagacaaggttgaaggagaaggtggtgttgctaccgtcgccttcatgtcatcctcttcaagcaaggagcgtctcttcaacaacttgagtgatgacgacgacgactcctaccactactcttgtttcatggcccaaggccgcaagttaatgagagctttggatagtaaagaacaatcactcgaaaggcaagaagaattgcttattcttgagaagaaaagaaaccttgccttagaggagagcctagctacaaaatgtgctaaaaatgaacaactagctaatgagcttaatttggctaatggttctctagctatccttagggatgtcaatgaaactcttcaagacaaatttgctaatttagacaaaagtcataaagatcttgaagttcaatttgacactctttggaatagcacctctcaaccaaatgtggtttctaatccttccaacccatctactagcaatgattgtgctaggtgttacaatattgatttgaactcttgtgctactaatgttgatgctatgcaagctcttaagaaagagaatgaaaggttgggcacattggtaaaatatggatacatgaagacataccattcaaaagatgccctttataagaccatcaccgctcatcctaacaaggatggacacgggctcgggttttctagtggaagtcctgtgtctaagcgtgtgatggtaaatgggaaagaatgcttgatgtttttgagagaaggtaaagctccacaagcaagtgaggtgacttgtcccttcactggtcagacactcggaagttccgggcaaaatgacgggaagttcctgccctgtaagacaggaagttccgaacattttgtcaggaagttccggacttctgatgagtcgaaggggctgaccggaagttcctggtataatgccaggaagttccggccagaaggtctttactatgatttatatgtaatttccaaaaattcagagggcaaagtggttgcttattttaatgggaattacaatgatgagtaccgcacttgtgtgtgggtgccaaaggctttggtaactaacatcaagggacccaaacttatgacgggagagaggtgtatgtttacaagtcttgatgagcagggtggaagtcgtgaaaatattttctttggagatgatggtaaaggaaaggattgtgtgtgtagcgcttgccaagccgggaagcaagttgggagtccgcatcctatcaaaaacatcatgactacaacaagaccactcgagcttcttcatatggacttatttgggcccgtggcctacataagcattggaggtaacaagtatggttttgtcattgttgatgatttttcacgcttcacttgggtgtactttctccatgacaaaagcaaagctcaagatgtcttcaagcgtttcgcaaagcaagcccaaaacctctatgacctcactatcaagagggtgcgaagtgacaatggaggagaattcaagaacactcaagtggagaaatttcttgatgaagaaggaatcaagcacgagttctccgccccctatgatcctccccaaaatggcattgttgaaaggaagaaccgaaccctcattgaagccgcaagggcaatgcttgatgagtacaagacttcggatgtcttttgggcggaggccatgagtgatgtggatccaagtcaagctataggtactaaggctattggagacatacgactagtcgagacgcaggatgaccaagaagatagggatcaacctccgtcatcaacatccaatagccctacaagtgctgtgtctgctgagccggaagttccggatcctattgaccagaacctccggacatctccaggcccgatccccccagtgcaccatccaaggatacataacactgtccaaagagatcatcccgtcgacaacatacttggtgacataagaaaaggggtaactactcgctctcgtgtcgcatgtttttgtcaacactactcgtttgtctcttctttggaaccaaccagggtggaagatgcgcttggtgatccggattgggtgatggctatgcaagaggagttgaataacttcactcgcaaccaagtatggactttggcggagagacccaagcaaaatgttgtcggcaccaagtggatctttcgcaacaagcaagacgaacatggggtggttgtaaggaacaaagcccagatagttgcgcaaggattcacccaagtcgagggtctcgattttggtgaaaccttcgcacctgtcgctcaccttgagtcaattagaattcttttagcctatgccgctcaccatgatttcaggttattccaaatggatgtcaagagagcctttcttaatggacctatctcagagttggtctatgtggagcaaccaccggggttcgaggatccaaagttgccaaaccatgtgtacaagctccacaaggcgctctacgggctccaacaagcccctagagcttggtatgaatgtctccaagattttcttttgaaaaatggttttgaaattggaaaggcggatactactctcttcactaaaaaatttaagagtgatttattcatatgccaaatttatgtcgatgacataatatttggttctactaatgcctctttttgtgaagaatttagtagtatcacgactaaaagtttcgagatgtctatgatgggcgagttgaccttcttcctcgggatacaagtgaagcaagcacaagaggggaccttcatctctcaaactaagtacgtgaaagacatactcaagaagtttgggatggaggataccaaacctatcaagacgcccatgcctactaatggccacctagacctcgacaataatggtaaatgtgtggaccaaaaggtatatcgctccatgataggatctttgctttacttatgtgcatctcgtcccgacatcatgcttagtgtttgcatgtgtgcccgttttcaagcggaacctaaagagtgccatttgattgccgtcaagagaattctaagatatttagttcatactcctaatcttggcttatggtatcctaaggattgtgactttgagcttttgggctattccgattcggattatgccgggtgtaaggttgatagaaaaagcacaaccgggacttgtcaattccttgggcggtcccttgtttcttggtcatacaagaagcaaaattccattgcattatccaccaccgaagccgaatatgtcgccgccggttcttgttgtgcccaactcctttggatgaaacaaaccctacaagattttggctataacttcaccaagatcacactcctatgtgacaatgagagtgccatcaaaatagccaataatcccgttcaacattcaagaaccaagtacatagatatttgccatcactttttgagagatcatgagactaaaagagacatatgccttacccatgtgagaaccgagacccaattagctgacattttcactaagcctttagatgagaaaagattgtgcgagcttaggagtgaactcaatatcttagactctcgtaacattaggtttctatttctaatcgttgaattctcgtctattcctttgaacttgggcctgactgccctctgttctgtcaggccggaagttccggtcaccctagtccggaacatccgggggtcggggttttgcaggccggaagttccagtgttcttggtccggaacttccggtctctatccagccagccagcaaaccttgattcctccaatttttattttaaccattgcacttcaaccttgttgattcttgttgcagtggtcagtatgcctcatgagaagagacagaagctttcacaggatgttcctgctgactcgagtcccccggttcatggtcctaggaggagattgggcaaagaaaaagttggaaatttttacagtgggagtcaaattcctattcattctaggagggctggtagcattgtcattggtgatgctccccgctctccctctccagttgcatctaagtcagatgatggtggcaatgaggatgagcctagttctgagagcaatcctttgaggctttacaagacaagggttgttgatcctgatcctagacgtccaagtgtgaactatttgaagaatctgctcaagtgtggaatggacagaatggtgagtcctgacacaatgcctgctgactctcaggatgacagattcaggaccgtggtgcaagttgattggtataattctgtgatcatgggaagatctcatccagtggtagagatgaagtggctagactggcagtacatgtccttaaagaacaacttagttttcagtgaggtacgcaaggtgtgtgagcgcaagcacgtggcagatctgttggccttgcagtattcctggaatgaggaagtcattggtcagttatactccaccgctttctttggcaccaccaagaagggcattgaatttgtgaagtggaccattcaggggcagcagtatagggtctctatggcacagtttgctgcagctctggagttagatgatgatgacctgagtcgtcctcatatctttgtagaaaatgctttgtcaccgaccagcactactttcctgtatgagaaggatgctcccaaggattgtttggggactactcgtgggttgcgtccatactatagagtgctttattctatcttcaggtggtcattgctccccaaagtgggagatactacagcacttccagataggcatgcgctcctcctcagtcgcatacgctacaacaagccagatttcagcatcatgaagcttatctggagtgagatatatgagatagtgtgtgaactaaagaggggttgtatctatgctccttatataatgaagatgattgaggcaaaaattgggattagttatttcaaggacaaccagcacaagccttttcgtcctcatgttccctcctcttcagctcctccttctaccagggcgactcgtgcttctacttcagctgctcgttcttcctctgcagctccacagcgctctgagtcttcttcccccataaagaaggctctccgggctatcttttgcatgtgtgctaagacagctaagaaagtgaagaagatagagaggcgtcaaaaggaagattggattgcagcaggcaaggatgtctctaatatttctgatgaagaggagtttgttgatccttttgctgcttatgagactgctcaagacattgctagtggtgagggtccctctggcacttctcatttcttcaatgaggagtcctcccactccaaggagagcagcgatgatgaggagtccgatgcacctacagagaatgtgcctacagatccagatgaggcagtagacatcgccgggcaagacattgactcacctcactccggcgacaccgagatcattccttctgatggcgatgatgatgaggcttga

SEQ ID NO: 15750 - DNA, 501 bp, Oryza sativa
  Clone ID: TFbOSC4135j.C1.o1.fg
atgatacgggaaaggaaacacttcaagagactcaccccaagtgacattcttggaagaattgtgtctcatgagatgcaagaagaggaagctcgtgaagtgagacaaatggtgaataatgccgccatgataaaaaatcaagaagttgctttgaaggcaaaacaagaagaagagtcaagttgtgaagaaagtgaagatgaagaaatggcttttattgtcaagagattcaagcactttcttcgcaagagtggctatgacaaagggaggaaggatgatgacaagggaaagaggcaatcaaagagagcgtgcttcaattgtggcgaatatggccacttcattgccgattgtcccaagtcaaatgaagctaaggctaagggaggcaagaagaagccggagcgtgctcatgtggcggaggcacacatggcggaagtgtggcactccggagatgaagagatcccgaggtcaagcccaagcccaagtcaaaagacaaggttgaaggagaag

SEQ ID NO: 15751 - DNA, 4068 bp, Oryza sativa
  Clone ID: TFbOSC414619j.C1.o7.fg
atggaactcacctcggagcaagagcaactcatccaccgcaatgctcaagcttccaatgcgattctctccgccttgagtccggaggagttcaacaaggttgatggacttgaggaggccaaggagatatgggatactttgcaattggctcatgagggatcaccagtcgttcgtgaggccaagattaaattgttggaaggaaggcttgaaagatttgtgatggatgacaaggagacacctcaagagatgtatgataggatgatgatccttgtcaacaagatcaaaggacttgggagtgaggacatgacaaatcactttgtggtcaagagacttctccgtgcttttggtccaagaaatcccactcttgtatcaattatacgggaaaggaaagacttcaagaggctcaccccaagtgacattcttagaagaattgtgtctcatgagatgcaagaagaggaagctcgtgaagtgaggcaaatggagaagaatgccgccatgatcaaaaatcaagaagtggctttgaaggcaaaacaagaagaagagttaagttgtaaagaaagtgaagatgaagagatggcttttattgtcaagagattcaagcactttcttcgcaagagtggctatggcaaagggaggaaggatggtgacaagggaaagtggaaatcaaagagagcttgcttcaattgtggcgaatatggccacttcattgccgattgtcccaagtcaaatgaagctaaggctaagggaggcaagaagaagccagagcgtgctcattactccggagatgaagaagatcccgaggtcaagcccaagcccaagccaaaagagaaggttgaaggagaaggtggtgttgctaccgttgccttcaagtcatcctcttcaagcaagaagcgtctcttcaacaacttgagtgatgacgatgacgactcctaccactactcttgtttcatggcccaagccctcaaggtgatgactcaaaagccctctcacatctctcttgatgttggttctaatgatgaggaaagtgataatgaattagatgatgtgcttaagagctttagcaaacccactatgcaacatttggctaagttaatgagagctttggatagtaaagaacaatcactcgaaaggcaagaagaattgcttattcttgagaagaaaaaaaaccttgccttagaggagagcttagctaaagaatgtgctaaaaatgaacaactagctaatgagcttattttggctaatggttctttagctagccttagagatgtcaatggaactcttcaagaaaaatttgttaatttagacataagtcataaagatcttgaagttcaatttgtcactctttggaatagcacctctcaaccaaatgtggtttctaatccttccaacccatctactagcaatggttgtgctaggtgttacaatattgatttgaactcttatgctactaatgttgatgctatgcaagctcttaagaaagagaatgagaggttgggcacattggtgaaatatggatgcatgaaaacataccattcaaaagatgccctttacaagaccatcatcgctcatcctaacaaggatggacacaggctcgggttttcgggtggaagtcctgtgtctaagcgtgtgatggacccaaatttatttgggtccgtggcctacataagcattggaggtaacaagtatggttttgtcattgttgatgatttttctcgcttcacttgggtgtactttctccatgacaaaagcgaagctcaagatgtcttcaagcatttcgcaaagcaagcccaaaacctctatgatctcactatcaagagggtgcgaagcgacaatggaggagaattcaagaacactcaagtggaggaatttcttgatgaagaaggaatcaagcacgagttctccgccccctatgatcctccccaaaatagcattgttgaaaggaagaaccgaaccctcattgaagctgtaagggcaatgcttgatgagtacaagacttcggatgtcttttgggcggaggccgtgagtaccgcatgtcatgccatcaaccgcttgtacctccacaagatcctaaagaaaacttcatatgagctcttgagtgtcactagggatgtgacatttgatgaatctaatggctcccaaggagagcaagttgttgtacatgttataggagatgtggatccaagtcaagctataggtactaaggctattggagacatacgaccagtcgagacgcaggatgaccaagaagacagggatcaacctccatcatcgacatccaatagccctacaagtgctgtgtctgctgagccggaagttccgggtcctattgaccagaacctccagacatctccaggcccggaagttctgggttctccagtccggaaccttcggaccaatggcagtgaagacgtgccaacattgcaagtccccctagtgcaccatccaaggatacatcacactatccaaagagatcatcccgtcgacaacatacttggtgacataagaaaaggggtaactactcgctctcgtgtcgcaagtttttgtcaacactactcgtttgtctcttctttggaaccaaccagggtggaagatgtgcttggtgatccggattgggtgatggctatgcaagaggagttgaataacttcactcacaatcaagtatggactttggtggagagacccaagcaaaatgtcatcggcaccaagtggatctttcgcaacaagcaagatgaacatgtggtggttgtaaggaacaaagcccggttagttgcgcaagggttcatccaagtcgagggtctcgattttggtgaaaccttcacacctgtcgctcgccttgagtcaattaaaattcttctagcctatgccgctcaccatgattttaggttgttccaaatagatgtcaggagtgcctttctcaatggacctatctcagagttggtctatgtggagcaaccatcagggttcgaggttccaaagttgccaaaccatgtgtacaagctccacaaggcgctctacgggctcaaacaagcccctagagcttggtatgaatgtctccgagattttcttttgaaaaatggttttgaaattggaaaggcggatactactctcttcactaaaaaatttaagagtgatttattcatatgccaaatttatgtcgatgacataatatttggttttactaatgcctctttttgtgaagaatttagtactgtcatgactaaaaggttcgagatgtctatgatgggcgagttgaccttcttcctcgggctacaagtgaagcaagcacaagagggcaccttcatctctcaaaccaagtacgtgaaagacatactcaagaagtttgggatggaggatgccaaacctatcaagacacccatgcctactaatggccacctagacctcaacgataatggtaaatgtgtggaccaaaaggtatatcgctccatgataggatctttgctttacttatgtgcatctcgtcccgacatcatgcttagtgtttgtatgtgtgcccgttttcaagcggagcctaaagagtgccatttgattgccgtcaagagaattctaagatatttagttcatactcctaatcttggcttgtggtatcctaagggttgtgactttgagcttttgggctattctgattcggattatgccgggtgtaaggttgatacaaaaagcacaaccgggacttgtcaattccttgggcggtcccttgtttcttggtcctccaagaagcaaaattccattgtattgtccaccgccgaagccgaatatgtcgtagccggttcttgttgtgcccaactcctttggatgaaaccaaccctaaaagattttggctacaacttcaccaagattccactcctatgtgacaatgagagtgccatcaaaatagccaataatcccattgaacattcaagaaccaagcacatagatattcgccatcactttttgagagatcatgagactaaaggagacatatgccttacccatgtgagaaccgagacccaattagccgacattttcaccaagcctttagatgagaaaagattttgcgagcttaggagttag

SEQ ID NO: 15752 - DNA, 600 bp, Oryza sativa
  Clone ID: TFbOSC415728j.C1.o4.fg
atggcttttattgtcaagagattcaagcactttcttcgcaagagtggctatggcaaagggaggaaggatgataacaagggaaagaggcaatcaaagagagcttgtttcaattgtggcgaatatggccacttcattgccgattgtcccaagtcaaatgaagctaaggctatgggaggcaagaagaagccggagcatgatcatgtggcggaggcacacatgacggaggtgtggtactccggagatgaagaagatcccgaggtcaagcccaagcccaagccgaaagacaaggttgaaggagaaggtggtgttgctaccgtcgccttcaagtcatcttcttcaagcaaggagcgtctcttcaacaacttgagtgatgacgacgatgactcctaccactactcttgtttcatggcccaaggccacaaggtgatgactcaaaagccctctcacacctctcttgatgttgattctagtgatgaggaaagtgataatgaattagatgatgtgcttaagagctttagcaaacccgctatgcaacaattggctaagttaatgagagctttggacaacttgaatgtccattgtttgataagaattgactga

SEQ ID NO: 15753 - DNA, 3588 bp, Oryza sativa
  Clone ID: TFbOSC420031j.C1.o1.np
actattcactttgattacaacaaacttaatgttcctcctcataactttgtctccgtaccttccgggcgtgcaggaaagaggcaatcaaagagagcttgcttcaattgtggggaatatggccacttcattgccgattgccccaagacaaataaagctaaggctaagggaggcaagaagaagccggagcgtggccgcaaggtgatgactcaaaagccctctcacacttctcttgatgatgattctagtgatgaagaaagtgataatgaattagatgatgtgcttaagagctttagcagaattccttgatgaagagggaatcaagcatgagttctccgccccctatgatcctcctcaaaatggcattgttgagaggaagaactgaactgaactcttatcaccacccctggaggggttatgacagcaaagtattatagccctgccgttcctatagaaattcagggaattccttttccctcggatctgattcttctagacaccaagaacttggatgtgatccttgggatgaattggttggctcaattccaaggagtagtggattgtgcaagacgcactgtcactctgtaccgagggccggaacaaccggttgttttctttgctcccccaacctctgtcggtagttcagaacttcatcagataggactgtcagaaatccccatcgtcagagagttcggagacgtgtttccggaagaactacccggtatgccgccaaagcgagagattgagttctggatagatcttgctccaggaaccactcccctgtacaagtgaccctaccgtatggcatcaaatgaactggccgaagtcaagaaacagttggaagagttgaaagaaaaggggtatatacggccgagtacttccccctggggtgctcctgtgatttttgtggaaaagaaggacaagacaaagaggatgtgtgttgactacagagctctcaatgaagttactataaaaaacaagtaccctcttccccggatcgatgatctgttcgatcagcttaaaggtgccactgtattctccaagattgatcttcgttccggatatcaccaattacgtattcgtgaagaagatatccctaagaccgcattcaccacgcgatacggactgtatgaattcacggtgatgtctttcggtttaaccaatgctcctgccttcttcatgaacttaatgaacaaagtgttcatggaatacttggataagtttgttgtggttttcattgacgacattctggtgtactcacaatcagaggaagaccatcagcaccatctccgtctggtgttgggaaagttgcgggaacatcaattgtatgccaagcttagcaagtgtgagttctggttgtccaaagtcaaattcttagggcacgtgatatctgctaaaggagtcgctgtggactccgaaacagtgaccgccgtcactgattggaagcaacccaagacagtcactcaaattcgcagcttcttgggtttggcaggatactaccggaggttcatcgagaacttctccaaaatcgctcgacccatgacacagttgttgaagaaggaagagaaatttgtgtggagcccgcaatgcgagaaggcgttccaaactctcaaggaaaggctggtttcctcgccggttttaatcttaccggatactcgcaaggacttcatggtgtattgtgacgcttcgcgccaaggattggggtgcgtgctcatgcaggaaggtcatgtcgtagcctatgcctcacgccagctatggccccatgaaggcaactaccctacccgtgatttggagttagccgctgtggttcatgctctaaagatctggcggcactatctcattgggaatcgctgtgaaatatatactgatcataagagtttgaaatacatcttcactcagtcggatctgaatcttcggcagaggagatggttagaactcatcaaggattatgatgtgggaattcactatcatcctggtaaggccaacgtggtcgccgacgctctaagtcgaaaaagccattgcaacactcttgacgtccgtggcattccacccgaacttaatcaacagatggaagccctgaacctaagcatagttggtcgtggattcttggctacgctggaagccaagcctaccttgctcgatcaaatccgcgaggctcagaagaatgatccggatatgcgtggactcctcaagaatatgaaacagggtaaagccgctagtttcacagaggatgaacacggaaccctatggaacggaaatcgggtatgcgttccagacgacagagaacttaaacagttgatacttcaggaagctcacgaaagcctttattccatccaccctggcagtacgaagatgtacttagacttgaaagagaaatactggtgggttagtatgaagcgggaaattgcagagttcgtggccctttgtgatgtgtgccagcgtgtcaaggcagagcaccaacgaccggccggacttctccaacctctccaagtaccagaatggaaatgggatgaaattgggatggatttcatcaccggacttccaaaaacccaaggcggatatgattctatatgggtagttgtggaccgactaaccaaggtagctcggtttattcctgtgaagaccacctatggagggaacaaactagccgagctctacttcgctaggatcgtgagtctccatggcgttcctaagaaaattgtatctgataggggaagccaattcacctctcacttttggaagaagctccaagaagagctaggtacccgattaaattttagcaccgtgtatcacccgcagacagatggacagaccgagcgtctaaatcagatcctagaagatatgcttcgcgcatgtgtcctagatttcgggaagacctgggataagagtctcccctatgccgagttctcctacaataacagctaccaagccagcatacaaatggcaccctatgaagcgttgtatggacgcaaatgccggacaccgctattgtgggaccaagttggggaaagccaagtgttcgggactgatatcctgagagaagctgaagctaaagtcagaactattcgggataatctaaaggtggcacagtcccggcagaagagttatgcagataaccgacgccgtaatctggaattcgcagtggacgattttgtgtaccttcgggtcacgccattgcgaggtgtacacaggtttcagacgaaagggaagctcgcacctcggtttgtgggtcctttccatatcattgctcgacgcggggaagtcgcttaccagttggagctgcccgcctccttgggcaacgtgcatgatgtgttccatgtgtcgcaactcaagaaatgtcttcgagtgccatccgagcaggccgattcagagcaaattgaagttcgcgaagacttgacctacgtggagaggccagtgaaaatcctggacaccatggagtgcaggaccaggaaccgggtaatccgtttttgcaaggtccaatggagcaaccacgctgaggaagaagctacttgggagcgtgaagacgagatgaaagcagcccatcccgatctcttcgccagttcttccgaatctcggggtcgagattccgtt

SEQ ID NO: 15754 - DNA, 6891 bp, Oryza sativa
  Clone ID: TFbOSC420074j.C1.o1.fg
atgaaggcacctgcagggcagacttctaagtctgctaatgtgaccatttgcaacactggagatggaagcgggtatggtaatttacctactgttttttcagttaatcagtctactaattggtgggttgatactgggaccaatgtcgcacggggttccaccgtcctaatggggaatgggtcacatgcttctgttcatggtgttgacacggtatatctgaagtttacttcgggaaagatcgtgcagctgaagaacgtgcagcatgtcccttctatcgacaggaatcttgttagtggctcccgtctgagtagagacagatttaagttggtttttgagtctaataaaggtggaaaacgatatttcatgacgttgattgatgatgctactatattttgctatgtgtacttgttgaaaacgaaagacgagactctagactattttaaaatttataaggcagaagttgaaaatcaacttgacagaaagataaaaaggcttatgtctgatcgtggtggagagtttttctcaaatgagtttgacttattctttgaggaacatggcatcatacatgagaggacacctccctattctcctgagtctaatgggattgctgaaagtaagaaccgcacaatgactgacttggtgaatgccatgttggacaccgcgggactacctaaggcatggtggggggaggcattgttgacctcgaatcatgtgttaaacagagttcctaacagaaataaggacaaaacaccatatgagatatggattgggagaaaaccatcactttcttatttgcgcacatgggggtgcttggcgaaagtcaatgtaccaataaggaagaagcgcaaactgggacctaagactgtggactgtgtctttctaggatatgctcatcacagcattgcctatagatttttaatagttaaatctgaggtgcttgacatgcatgttggtacaattatggagtctcgtgatgctaccttctttgagagctttttcccaatgaaggatacacatagtagttcgagccaaccctctgaagtaattcccagttcaatcacaccaccagaacaaactaaacatacacatgaacatgtcactgaggaggatgtcagtgaagctcctcgaaggagtaagagacaaaggacggctaagtcctttggtgatgatttcactgtgtaccttgtggatgacactcctaagtcaatttcagaagcatatgcatctcctaatgcagattactggaaggtggctgtccgtagtgaaatggattcgattatcgctaacgggacttgggaggtgacagagcgaccctatgggtgtaaatctgtggggtgcaagtgggtgttcaagaagaagtttaggcctgacggtactattgaaaagtacaaggcttggcttgttactatgggctatactcagaaagaaggcgaagatttctttgaaacttactcacctattgttagattgaccacaattcgtgtgctactttccctagcagcctcacatggtcttctcgttcatcagatggacgttaagataacttttcttaatggagagctggacgaggagatctatatggatcaacctgatgggtttgtagttgaaggtcaagaaggcaaagtgtgcaaattgttgaagtctttgtatggtctgaaacaagctcctaagcaatggcatgagaaatttgacaaaacattgacatctgcaggctttgcagtcaatgaggcagataaatgtgtgtactatcgccatggtgggggtgagggagttattctgtgtttgtatgttgatgacatactgatatttgggacaaaccttgaggtgataaacgaggttaaattattcttgtctcaaaattttgatatgaaggatttgggagtagctgatgttatcttaaacattaagctaattagaggtgagaatgtgattacactcttgcagtcccattatgtggagaagatcttgaatcgctttggctacattgatagtagtatggaattgtggcttcactattctgggtatcctgtggtactcgagggatatagtgattctaactggatctctgatgtggatgagatcaaagccactagtggatatgtcttcacactgggtggtggtgctgtttcgtggaggtcttgcaaacagaccattttgacgaggtcaaccatggaagcagagttgacagcactggatactgctactgttgaggcagaatggctgcgtgatctattaatggatctgcctattgttgaaaaaccggtgccggctatccttatgaactgtgacaatcaaacggtaattgtcaaagtgaatagttctaaggataatatgaaatcgtctagacatgtgaaaagacgattgaagtctgtcaggaaattgagaaactccggagttataacgttggattacatccaaacagctagaaacctggcggatcccttcacgaagggactatcacgaaatgtgatagacaatgcatcgaaggagatgggtttgagacccatagagggctacccggaggttctggccggaacttccgggcgccgtttcattgcaaaaaatttcctaagtgctgcctggaagttcctggcatttttgcccggaacctcctggcagcttcaccgctttgaagatgaagacttagggggaaagaacggggaaaatagaaatgaagatgaagcaagcagcaagggaactccaccacacaagggagctactataccttttgattacagcaaacttaccattccctctcacaactttgtctccgtgccttccgggcgtgctcctcaatttgatgggacatactatgccgcttggaagcacaagatgaagttgcatttaatctctttgcatccaagtatttggaaagttgtttgtacaggtattgatataccccatgatgacatggagctcacttcggagcaagagcaactcatccaccgcaatgcccaagcttccaatgcaattctctccgccttgagttcggatgagttcaacaaggttgatggacttgagaaggccaaggagatgtgggataatttgcaattggctcatgagggatctcccgccgttcgtgaggccaagattgaattattggaaggaaggcttggaagatttgtgatggatgataaggagacatcacaacagatgtatgataggatgatgatccttgtcaacaagattaaaggacttgggagtgtggacatgacaaatcactttgtggtcaagagacttctctgtgcatttggtccaagaaatcccactcttgtatcaatgatacaggaaatgaaagacttcaagagactcaccccaagtgatattcttggaagaattgtgtctcatgagatgcaagaagaggaagctcgtgaagtgagacaaatggtgaagaatgccaccatgataaaaaatcaagaagttgctttgaaggtaaaaaaagaagaagattcaagttgtaaagaaagtgaagatgaagagatggcttttattgtcaaaagattcaagcactttctttgcaagagtggctatggcaaagggaggaaggatgatgacaagggaaatatgcaatcaaagagagcttgcttcaattgtggcgaatatggccacttcattgccgattgtcccaagtcaaatgaagctaaggctaagggaggcaagaagaagccggagcgtactcatgtggcggaggcacacatggcagaagtgtggtactccggagatgaagaagatcctgaggtcaagcccaagcccaagtcaaaagacaaggttgaaggagaagctagccttagggatgtcaatgaaactcttcaagaaaaatttgttaatttagacaaaagtcataaagatcttgaagttcaatttgacactctttggaatagcacctctcaaccaaatgtggtttctaattcttctaacccttctactagcaatggttatgctaggtgttacaatattgatttgaactcttgtggtactaatattgatgctatgcaagctcttaagaaagagaatgaaaggttgggcacattggtgaaatatggatgcatgaagacataccattcaaaagatgccctttacaagaccatcaccgctcatcctaacaaggatggacacgggctcgggttttcgggtggaagtcctgtgtctaagcgcgtgatggtaaatgggaaagaatgcttgatgtttgtgagagaaggtaaagcaccacaagaaagtgaggtgactagtcttgtgaactgccagggacccggaacatccggacagaccgggagaaacctccgggtgggaatctctgtctctcaaaaattcccactaggaagttccggccgttttgccaggaagttccgggccaatggccatgcacaagacatgaccggaagttccgggcacaaagccaggaggttccggccagagggtctttactatgattcatatgtaatttccaaaaattcagagggcaaagtggttgcctattttaatggaaattacaatgatgagtaccgcacttgtgtgtgggtgccaaaggctttggcatactcctccggtggttcaagttgggttgtggacagtggttgcactaatcatatgactggagagagaagtatgtttacaagtcttgatgaggagagcggaactcgtgagaatattgtgtttggagatgatggtaaaggaaagttgggttataattgcttgtttaccgatgaggatgtgaccgtctttagaagggatgactcctccgttgcattcaaaggcaagttgaagggtgatctctatctggtcgatttcgatgtggatagagtgaatccggaagcttgtttgattgctaaatcttccatgggttggctatggcatcatagactagcccatgttggaatgcggaatttggcaactcttctaaagggggaacacatcctcgggctcactaatgtcacatttgagaaagattatgtgtgtagtgcttgccaagcctggaaacaagttgggaatccacatcctatcaagaacatcatgactacaacacgccctcttgagcttctacatatggatttattcgggcccgtggcctacataagtattggaggtaacaagtatggttttgtcattgttgataatttttcccgctttacttgggtgtattttctccatgacaagagtgaggctcaagatgtcttcaagcgcttcgccaagcaaggccaaaacctctataatctcaccatcaagaggagggaatcaagcacgagttctccacccccctatgatcctcctcaaaatggcattgttgagaggaagaaccaaactcttattgaagccgcaagagcaatgcttgatgagtacaagacttcggatatcttttgggcggagaccgtgagcaccgcatgccatgccatcaatcgcctctacctccacaaaatcctaaagaaaacttcatatgagctcttgagtggtaagaagccaaatgtttcatattttcgtgtctttgggagtaaatgcttcattttgagtaagaggcctcgttcatctaagttctcacgtaaggtggacgagggattcttacttggctatgagtcaaatgcacatgcctaccatgtcttcaacaaaacctccagtattgttgaagttacaagggatgtgacatttgacgaatctaatggctcccaaggagagcaagttgttgtacatgttgtagatgatgcggatcctagacaagcaattgattctaaggctattggagacatacgaccagtcaagacgcaggatgacgaagaagatagggatcaaccttcgtcatcgacatccaatagccctacaacaagtcaagagtcagttgacccggaagttccgggaccagatgattggaacctccggacctccccaggcccggaagttctgggtccatctgctaggaagttccaggcaaaggatagtcaaggcgtgcctacggcacaagtggatgggattgatgccgagggcactgtagagcatcctgatcgggctcatgtcccctcggtgcaccatccaagaatacatcacattgtccaaagagatcatcccgtcgacaacatacttggtgatataagaaagggggtgatggctatgcaagaggagtttaataacttcactcgcaaccaagtatggacattggtggagagacccgaccaaaatgtcattggcaccaagttatatcaaatggatgttaagagcgcctttctcaatggacccctcttggagttagtctatgtggagcaaccaccggggttcgaggatccaaagttgccaaaccatatgtacaagctccacaaggcgctcaacgggctcaaacaagcccctagagcgctgggagggccccaacgtgttcctctacttcctccccatctgcagcgcgggaacgccatcatctccatgtcgcggttcgacatcaactccctgatggaggctgtgcagaggcaccgcgtcacgcacctgttctgcgtgccgccggtcattatcgcgctcaccaagcacgggagggcagctgccattgacacggtgggagaatgggacaccggtgtcgaggctggcgaggagcagctccgcgacgtcacaactctccaccatcgcccactatgtactatgactcgtgagaaaagacagaaagcctctcaggatgtgtccggtgatgagagtcctcctattcggtatactcgtggtcgtttgggtaaagagaaagtggttgagggcggcagtggcagtggcactcgtacttctcctagatttacaaggcaatccagtaaccgtcctgttcagattagggatgttgacagtggtcaagtgatgcccctaatacaagaggtcgcgggagaggtggtggtcgcagttctggggctggaagggcatctcatgatttccctgtga

SEQ ID NO: 15755 - DNA, 1680 bp, Oryza sativa
  Clone ID: TFbOSC422195j.C1.o16.fg
atgtcgcatctagagggagacgaatatttggaggagaagggagacgcttctagcaccaaggagactggatcaaagggagctactattcactttgattacatcaaacttaatgttcctcctcataactttgtctccgtgccttccgggcgtgcacctcattttgatgggacacattatgccgcttggaagcacaagatgaagttgcatctaatctctttgcatccaagtatttggaaagttgtttgtacaggtattgatgtacccaatgatgacatggagctcacttcggagcaagagcaactcatccaccgcaatgctcaagcttccaatacaattctctccgccttgagtccgaaggagttcaataagtttgatggtcttgaggaggccaaagagatatgggatactttgcaattggctcatgagggatcacccgccgttcgtgaggacaagattgaattgttggaaggaaggcttggaagatttgtgatggatgacaaggagacacctcaagagatgtatgataggatgatgatccttgtcaacaagattaaaggatttgggagtgaggacatgacaaatcactttgtggtcaagagacttctccgtgcatttggtccaagaaatcccactcttgtatcaatgatacgtgagaggaaagacttcaagaggctcaccccaagtgacattcttggaagaattgtgtctcatgagatgcaagaagaggaagctcgtgaagtgaggcaaatggtgaagaatgccgccatgatcaaaaatcaagaagtggctttgaacgcaaaacaagaagaagagtcaagttgtgaagaaaagattcaagcactttcttctcaagagtggctatggcaaggaaggaaggatgatgacaagggaaagaggcaatcagagagagcttgcttcaattgtggcgaatatggccacttcattgccgattgccccaaaacaaatgaagctaaggctaaaggagacaagaagaagccggagcgtgctcatgtggtgaaggcacacatggtggaggtgtggtactccgaagatgaagaagcttccgaggacaagcccaaacccaagccaaaagacaagattgaaggagagggtggtattgctaccgtcgccttcaagtcatcctcttcaagcaaagagtgtctcttcaacaacttgagtgatgacgacgacgactcctaccactactcatgcttcatggcccaaggccgcaaggtgatgactcaaaagccttctcacacttctcttgatgatgattctagtgatgaagaaactagccttagggatgtcaatgaaactcttcaagaaaaatttgctattttagacaaaagtcataaagatcttgaagttcaattagacactctttggagtagcacctctcaaccaaatgtggtttctaattcttccaatccatctactagtaatggttgtgctaggtgttacaatattgatttgacctcttatgctactaatgttgatgctatgcaagctcttaagaaagagaatgaaaggttgggtacattggtgaaatatggatgcatgaagacttaccattcaaaagatgccctttacaagaccatcaccgctcatcctaacaaggatggacacgggctcgggttttcgggtggaatgtcacgtcctgataaattcatcccaaaataa

SEQ ID NO: 15756 - DNA, 6336 bp, Oryza sativa
  Clone ID: TFbOSC900024j.C1.o13.fg
atgtcggacttagggggaaagaacggggaaaatagaaatgaagatggagcaagaagcaagggaactccatcacccaagggagttactatacattttgattacagcaaacttaccattccccctcacaactttgtctccgtaccttccgggcgtgctcctcaatttgatgggacacattacgccgcttggaagcacaagatgaagttgcatctaatatctttgcatccaagtatttggaaagttgtttgtacaggtgttgatgtaccccatgatgacatggagctcacttcggagcaagagcaactcatccaccgcaatgctcaagcttccaatgcaattctctccgccttgagtccggaggagttcaacaaggttgatgggcttgaggaggccaaggagatatgggatactttgcaattggctcatgagggatcacccgccgttcgtgaggccaagattgaattattggaaggaaggcttggaagatttatgatggatgacaaggagacaccacaagagatgtatgataggatgatgatccttgtcaacaagattaaaggacttgggagtgaggacatgacaaatcattttgtggtcaagagacttctccgtgcatttggtccaagatatcccactcttgtatcaatgatacgggaaaggaaagacttcaagagactcaccccaagtgacattcttggaagaattgtgtctcatgagatgcaagaagaggaagctcgtgaagtgaggcaaatggtgaagaatgccgccatgatcaaaaatcaagaagttgctttgaaggcaaaacaagaagaagagtcaagttgtgaagaaagtgaagatgaagagatggcttttattgtcaagagattcaagcactttcttcgcaagagtggctatggcaaaaggaggaaggatgatgacaagggaaagaggcaatcaaagagggcttgcttcaattgtggcgaatatggccacttcatagccgattgtcccaagtcaaatgaagctaaggctaagggaggcaagaagaagccggagcgtgctcatgtggcagaggcacacatggcggaggtgtggtactccagagatgaagaagatccagaggtcaagcccaagcccaagccgaaagacaaggttgaaggagaaggtggtgttgctaccgtcgccttcaagtcatcttcttcaagcaataagcgtctcttcaacaacttgagtgatgacgacgatgacttctaccactactcttgtttcatggcccaaggccgcaaggtgatgactcaaaagccctctcacacctctcttgatattgattctagtgatgaggaaagtgataatgaattagatgatgtgcttaagagctttagcaaacccgctatgcaacatttggctaagttaatgagagctttggatagtaaagaacaatctctcgaaaggcaagaagaattacttattcttgagaagaaaagaaaccttgccttagaggagatcctagctaaagaatctagccttaggaatgtcaatgaaactcttcaagagaagtttgctagtttagacaaaagtcataaagatcttgaagttcaatttgacactctttggaatagcacttctcaaccaaatgtggtttctaattcttccaacccatctactagcaatggttgtgctaggtgttacaatattgatttgaactctcatgctactaatgttgatgctatgcaagctcttaagaaagagaatgaaaggttgggcacattggtgaaatatggatgcatgaaaacataccattcaaaagatgccctttacaagaccatcaccgctcatcctaacaaggatggacacgggctcgggttttctggtggaagtcctgtgtctaagcgtgtgatggcatacttctccggtggctcaagttgggttgtggacaatgggtgcaccaatcatatgacgggagagaggagtatgtttacaagtcttgaggaggagggtggaagtcgtgaaaatattgtctttggagatgatggtaaaggaaagctacaatttattatccgtgtctcaattgtgcgagatgactcttccatagaatttaagggtgtgttaaagggtgatctctatctcgttgatttcgacgtagatagagtgaatccggaggcatgcttgattgctaaatcctctatgggttggctatggcaccgtaggctagcccatgttgtaatgaggaatttggcatctcttctaaaaggggaacacattcttggtctatctaatgtttcttttgagaaagatcgtgtgtgtagtgcttgccaagccgggaagcaagttgggagtccacatcctataaaaaacatcatgactacaacaagaccactcgagcttcttcatatggatttatttgggctcgtggcctacataagcattggaggtaacaagtatggtttcatcattgttgatgatttttcacgcttcacttgggtgtactttctccatgacaaaagcgaagctcaagatgtcttcaagcgcttcgcaaagcaagcccaaaacctctatgatctcactatcaagagggtgcgaagcgacaatggaggagaattcaagaacactcaagtggagaaatttcttgatgaagaaggaattaagcacgagttctccgccccctataatcctccccaaaacggcattgttgagaggaagaaccgaaccctcattgaagccgcaagggcaatgcttgatgagtacaagacttcggatgtcttttgggcggaagccatgagtactgcatgtcatgccatcaaccgcttgtacctccacaagatcctaaagaaaacctcatatgagctcttgagtggtaagaagcctaatgtttcatattttcatgtctttgggagcaaatgttttattttaagtaagaggcctcgctcatctaagttctcacctaaggtggatgagggattcttacttggctatgaatcaaatgcatatgcctatcgtgtcttcaacaaaacctccggtattgttgaagtcactagggatgtgacatttgatgaatctaatggctcccaaggagagcaagttgttgtacatattgtaggagatgtggatccaaatcaagctataggtactaaggctattggagacatacgaccagtcgagacgcaggatgaccaagaagatagggatcaacctccgcgtcatcgacatccaatagccctacaagtgctgtgtctgctgagccggaagttccgggtcctattgactggaacctccggacatctccaggcccggaagttccgggttctacagtccggaacctccggatcagtggcagtgaagacgtgccaatggcacaaggtggaagatgcgcttggtgatccggattgggtgatggctatgcaagaggagttgaataacttcactcgcaatcaagtatggactttggtggagagacccaagcaaaatgtcatcggcaccaagtggatctttcgcaacaagcaagatgaacatggggtggttgtaaggaacaaagcccggttattccaaatggatgtcaagagtgcctttctcaatggacctatctcggagttagtctatgtggagcaaccaccggggttcgaggatccaaagttgccaaaccatgtgtacaagctccacaaggcgctctacgggctcaaacaagcccctagagcttgttttgaaattggaaaggtggatactactctcttcactaaaaaatttaagagtgatttattcatatgccaaatttatgtcgatgacataatatttggttctactaatgcctctttttgtgaagaatttagtagtatcatgactaaaaggttcgagatgtctatgatgggcgagttgaccttcttcctcgggctacaagtgaagcaagcactagtgggcatcttcatctctcaaaccaagtacgtgaaagacatactcaagaagtttgggatggaggatgccaaacctatcaagacgcccatgcctactaatggatacctagacctcgacgataatggtaaatgtgtggaccaaaaggtatatcgctccatgataggatctttgctttacttatgtgcatctcgtcccgacatcatgcttagtgtttgcatgtgtgcccgttttcaagcggagcctaaagagtgccatttgattgccgtcaagagaattctaagatatttagttcacactcctaatcttggcttgtggtatcctaagggttgtggctttgagcttttaggctattccgattcggattatgccgggtgtaaggttgatagaaaaagtacaactgggacttgtcaattccttgggcggtcccttgtttcttggtcctctaagaaacaaaattccattgccttatccacggccgaagccgaatatgttgccgctggttcttgttgtgctcaactcctttggatgagacaaaccctaaaagactttggctacaacttcaccaagatcccactcctatgtgataatgagagtgccatcaaaatagccaacaatcccatccaacactcaagaaccaagcacatagacattcgccaccacttcttgagagatcatgagactaaaggagacatatgccttacccatgtgagaaccgaaagccaattagccgacattttcaccaagcctttagatgagaaaagattttgcgagcttaggagttttcatttccaaatctttgaattctcatctattccattgaacttgggcctgactgccctctgttctgtcaggccggaagttccggtcaccccagtccggaacttccgggggtcgggggccggaaattccggtgttcttggcccggaacttccggtctctgtccagccagccagtaaccttgattttgctactgtttcatttaaccattgcactccaaccttgttgattcttgttgcagtggtcattatgcctcgtgagaagagacagaagctttctcaagatgttcctgctgactcaagccccccggttcgtggtcctagggggagattgggcaaagaaaaagttggagatttttacagtgggagtcagattccgatccattccaggagggctagtagcattgtcattcgtgatgcaccccgctctccctctccagctgcatctgactcagatgatggtggcaatgaggatgagcctggttctgaaagcaatcctttgaggctatacaagacaagggctgttgatcctgatcctaaacgcccaagagtgaactatctgaagaatctactcaagtgtggaagggacagaatggttgattggtataactctgtgatcatgggaagatctcatccagtggtagagatgaagtggctagactggcagtacatgtcctcaaagaacaacatagtcttcaatgaggtacgcaaggtgtgtgagcgcaagcacgtggcagatttgttggccttgcagtattcctggaatgaggaagtgattggacagttctactccactgctttctttggcaccactaagaaggggcttgattttgtgaagtggaccattcaagggcagcagtatagggtttctatggcacagtttgctgcagctttggggttagatgatgatgacctgagtcgtccacatatctttgtagaggatgctctgtcaccgaccagcactacctttatgtatgagaaggatgctcccaaggattgtttggggactactcgagggttgcgtccatattatagagtgctgtactctatcttcaggtggtctttgctccccaaagtgggagatgctacagctcttccaggtaggcatgcactcctccttagtcgcatgcgctataacaagcccgatttcagcatcatgaagcttatctggagtgagatctatgagacagtgtgtgagccaaagagaggcttcatctatgctccttatatcatgaagatgattgaggccaagactgggatttgttatttcaaagacaatcaacacaagcctttccgtcctcatgctcccactacttcagctactcctaccaccagagtgactcgtgcttccacctcagctgctccttctttctctgctgcacctcagcgttctgagtcttcttctcccataaagaaggctctcagggctatcttttgcatgtgtgccaagacagctaagagtgatgagggtccctctggcacttctcgtttctttaatgaggagtcctctcactccgaggagagcagtgatgatgaggagtcagatgcccctactgagaatgctcctacagatcccaatgaggcagtggatgccgccgggcaagacatcgactctcctcactctggcgacactgagatcattccttctgatggcgataatgatgaggcttga

SEQ ID NO: 15757 - DNA, 4353 bp, Oryza sativa
  Clone ID: TFbOSC900028j.C1.o16.fg
atggagctcacttcggagcaagaacaactcatctaccgcaatgctcaagcttccaatgcaattctctccgccttgaatccggaggagttcaacaaggttgatggactagaggaggccaaggagatatgggatactttgcaattggctcatgagggatgtcccgccgttcgtgaggccaagattgaattattggaaggaaggcttggaagatttgtaatggatgacaaggagacagcacaagagatgaaagacttcaagagactcaccccaagtgacattcttggaagaatagtgtctcatgagatgcaagaagaggaagctcgtgaagtgagacaaatgatgaagaatgccgccatgatcaaaaatcaagaagttgctttgaaggcaaaacaagaagaagagtcaagttgtgaagaaagtgaagatgaagaaatggcttttattgtcaagaggttcaagcactttctttacaagagtggctatggcaaagggaggaaggacgatgacaagggaaagaggcaatcaaagagagcgtgcttcaattgtggcgaatatggccacttcattgccgattgtcccaagtcaaatgaagctaacgctaagggaggcaagaagaagccggagcgtgctcatgtggcggaggcacacatggcggaagtgtggtacttcggagatgaagaagatcccgaggtcaagcccaagcccaagtcaaaagacaaggttgaaggagaaggtggtgttgctaccgtcgccttcaaatcatcctcttcaagcaaggagcgtctcttcaacaacttgagtgatgacgacgacgactcctaccactactcttgcttcatggcccaaggccgcaaggtgatgactcaaaagccctctcaaacttctcttgatgttgattctagtgatgaggaaagtgataatgaattagatgatgtgcttaagagctttagcaaacccgctatgcaacatttggctaagttaatgagagctttggatagtaaagaacaatcactcgaaaggcaagaagaattgcttattcttgagaagaaaagaaaccttgtcttagaggagagcttagctaaagaatgtgctaaaaataaacaacttgctaatgagcttaatttggctaatggttctttagctagccttagggatgttaatgaaactcttcaagaaaaatttgctaatttagacaaaagtcataaagatcttgaagttcaatttgacactctttggaatagcacctctcaaccaaatgtggtttctaattcttctaacccttctactagcaatgctcttaagaaagagaatgaaaagttgtgcactttggtgaaatatggatgcatcaagacataccattcaaaagatgccctttacaagaccatcaccgctcatcctaacaaggatggacacgggttcgggttttcgggtagaagtcctgtgtctaagcgtgtgatggtaaatgggaaagaatgcttgatgtttgtgcgagaaggtaaagctccacaagcaagtgaggtgactggtcttgtgagctgccagggacccggaacatccggacaaaccgggcgaaacctccgggtgggagtctctgtctctcaaaaattcccaccagaaagttccggccggtttgccaagaagttccgggccaatggccgtgcacaagacatgaccggaagttccgggcataatgccaggaggttccggccagatggtctttactatgattcatatgtaatttccaaaaatttagagggaaaagtggttgcttattttaatgggaattacaatgatgagtaccgcacttgtgtgtgggtgccaaaggctttggcatactcctccggtggttcaagttgggttgtggacagtggttgcaccaatcatatgactggagagaggagtatgtttacaagtcttgatgaggagaacggaactcgtgagaatattgtatttggagatgatggtaaaggaaagctacaatttattatccgtttctcaattatggatgactcctctgtagcattcaaaggcaagttaaagggtgatctctatcttgtcgatttcgatgtggatagagtgaatccagaagcttgtttgattgctaaatcctccatgggttggctatggcatcatagactagcccatgttggaatgcagaatttggcaactcttctaaagggggaacacatcctcgggctcactaatgtcacatttgagaaagatcgtgtgtgtagtgcttgccaagcagggaaacaagttgggaatccacatcctatcaagaacatcatgactacaacacgccctcttgagcttctacatatggatttatttgggcccgtggcttacataagtattggaggtaacaagtatgtttttgtcattgttgatgatttttcacgcttcacttgggtgtactttctccatgacaaaagcaaagctcaagatgtcttcaagcgctttgcaaagcaagcccaaaacctctatgatctcactatcaagagggtgcgaagcgacaatggaggagaattcaagaacactcaagtggaggaatttcttgatgaagaaggaatcaagcacgagttctccgccccctatgatcctccccaaaatggcattgttgagaggaagaaccgaaccctcattgaagccgcaagggcaatgcttgatgagtacaagacttcggatgtcttttgggcggaggccgtgagtaccgcatgtcatgccatcaaccgcttgtacctccacaagatcctaaagaaaacttcatatgaactcttgagtggtaagaagcctaatgtttcatattttcgtgtctttgggagcaaatgttttattttaagtaagaggccttgctcatctaaattctcacctaaggtggatgagggattcttacttggctatgaatcaaatgcacatgcctatcgtgtcttcaacaaaacctccggtattgttgaagtcactagggatgtgatatttgatgaatctaatggctcccaaggagagcaagttgttgtacatgttgtaggtgatgtggatccaagtcaagctataggcactaaggctattggagacatacgaccagtcgagacgcaggatgaccaagaggatagggatcaacctccgtcatcgacatccaatagccctacaagtgttgtgtctgctgagccagaagttccgggtcctattgaccggaacctccggacatctccaggcccggaagttccgggttctacagtccggaacctccggaccagtggcagtgaagacgtgccaacggcacaagtggatgggatcgatgctgcgggcactttagaggttgaagatgaacttggtgatccggattgggtgatggctatgcaagaggagttgaataacttcattcgcaaccaagtatggacgttggtggagagacccgaccaaaatgtcatcggcaccaagtggatcttccgcaacaagcaagatgaacatggagtggttgtaaggaacaaagcccggttatatcaaatggatgtcaaaagcgcctttctcaatggacccatctcggagttagtctttgtggagcaaccaccggggttcgaggatccaaagttgccaaaccatgtgtacaagctccacaaggcgctctacgggctcaaacaagcccctagagcttggtatgaatgtctccgagattttcttttgaaaaatggttttgaaattgggaaggcggacactactctcttcactaaaaagtttgaaaataatttattcatttgccaaatttatgtcgatgacataatatttggttctactaatgcctctttttgtgaagaatttagtagtatcatgactaaaaggttcgagatgtctatgatgggtgagctaaccttctttctcgggctacaagtcaagcaagcacaagaaggtaccttcatctctcaaaccaagtacgtgaaggacattgttaagaagtttgggatggaagatgccaaacccatcaagactcccatgcctaccaatggtcaccttgatcttgatgaaaatggtaaatgtgtggaccaaaaggtatatcgctccataataggatccttgctttacttatgtgcatctcgtcccgatatcatgcttagtgtttgcatgtgtgctcgctttcaagcggagcctaaagagtgccatttgattgccgtcaagagaattctaagatatttagttcatactcctaatcttggcttgtggtatcctaagggttgtgactttgagcttttgggctattccgattcggattacgccgggtgtaaggttgatagaaaaagcacaaccgggacttgccaatttcttgggcggtcccttgtttcctggtcctccaagaagtaa

SEQ ID NO: 15758 - DNA, 5549 bp, Oryza sativa
  Clone ID: TFbOSC900207j.C1.o1.fg
atgacaagggagacgcttctagcaccaaggataaagggagctactattcactttgattacagcaaacttaatgttcctcctcataactttgtctccgtgccttccgagcgtgctcctcaatttgatgggacacattacgccgcttggaagcacaagatgaagttgcatctaatctctttgcatccaagtatttggaaagttgtttgtacaggtattgatgtacccaatgatgacatggagctcacctcggagcaagagcaactcatccaccgcaatgctcaagcttccaatgcaattctctccaccttgagtccggaggagttcaacaagatgtatgataggataatgatccttgtcaacaagatcaaaggacttgggaatgaggacatgacaaatcactttgtggtcaagagacttctccgtgcttttggtccaagaaatcccactcttgtatcaatgatacgggaaaggaaagacttcaagaggctcaccccaagtgacattcttggaataattgtgtctcatgcgatgcaagaagaggaagctcgtgaagtgaggcaaatggtgaagaatgccgccatgatcaaaaatcaagaagtagctttgaaggcaaaacaagaagaagtgtcaagttgtgaagaaattgaagatgaagagatggcttttattgtcaagagattcaagcactttcttcgcaagagtggctatggaaaagggaggaaggatgatgacaagggaaagaggcaatcaaagagagcttgcttcaattgtggcgaatatggccacttcattgccgattgtcccaagtcaaatgaagctaaggctaagggaggcaagaagaagctagagcgtgctcatgtggcagaggtgtggtactccggagatgaagaagatcccgaggtcaagcccaagcccaagccaaaagacaaggttgaaggagaaggtggtgttgctaccgtcgccttcatgtcatcctcttcaagcaaggagcgtctcttcaacaacttgagtgatgacgacgacgactcctaccactactcttgtttcatggcccaaggccgcaaggtgatgactcaaaagccctctcacatctctcttgatgttgattctagtgatgaggaaagtgataatgaattagatgatgtgcttgagagctttagcaaacccgctatgcaacatttggctaagttaatgagagctttggatagtaaagaacaatcactcgaaaggcaagaagaattgcttattcttgagaagaaaagaaaccttgccttagaggagagcctagctacaaaatgtgctaaaaatgaacaactagctaatgagcttaatttggctaatggttctctagctatccttagggatgtcaatgaaactcttcaagacaaatttgctaatttagacaaaagtcataaagatcttgaagttcaatttgacactctttggaatagcacctctcaaccaaatgtggtttttaatccttccaacccatctactagcaatgattgtgctaggtgttacaatattgatttgaactcttgtgctactaatgttgatgctatgcaagctcttaagaaagagaatgaaaggttgggcacattggtaaaatatggatacatgaagacataccattcaaaagatgccctttataagaccatcaccgctcatcctaacaaggatggacacgggctcgggttttctagtggaagtcctgtgtctaagcgtgtgatggtaaatgggaaagaatgcttgatgtttttgagagaaggtaaagctccacaagcaagtgaggtgacttgtcccttcactggtcagacactcggaagttccgggcaaaatgacgggaagttcctgccctgtaagacaggaagttccgaacattttgtcaggaagttccggacttctgatgagtcgaaggggctgaccggaagttcctggtataatgccaggaagttccggccagaaggtctttactatgatttatatgtaatttccaaaaattcagagggcaaagtggttgcttattttaatgggaattacaatgatgagtaccgcacttgtgtgtgggtgccaaaggctttggtaactaacatcaagggacccaaacttatgacgggagagaggtgtatgtttacaagtcttgatgagcagggtggaagtcgtgaaaatattttctttggagatgatggtaaaggaaaggattgtgtgtgtagcgcttgccaagccgggaagcaagttgggagtccgcatcctatcaaaaacatcatgactacaacaagaccactcgagcttcttcatatggacttatttgggcccgtggcctacataagcattggaggtaacaagtatggttttgtcattgttgatgatttttcacgcttcacttgggtgtactttctccatgacaaaagcaaagctcaagatgtcttcaagcgtttcgcaaagcaagcccaaaacctctatgacctcactatcaagagggtgcgaagtgacaatggaggagaattcaagaacactcaagtggagaaatttcttgatgaagaaggaatcaagcacgagttctccgccccctatgatcctccccaaaatggcattgttgaaaggaagaaccgaaccctcattgaagccgcaagggcaatgcttgatgagtacaagacttcggatgtcttttgggcggaggccatgagtgatgtggatccaagtcaagctataggtactaaggctattggagacatacgactagtcgagacgcaggatgaccaagaagatagggatcaacctccgtcatcaacatccaatagccctacaagtgctgtgtctgctgagccggaagttccggatcctattgaccagaacctccggacatctccaggcccgatccccccagtgcaccatccaaggatacataacactgtccaaagagatcatcccgtcgacaacatacttggtgacataagaaaaggggtaactactcgctctcgtgtcgcatgtttttgtcaacactactcgtttgtctcttctttggaaccaaccagggtggaagatgcgcttggtgatccggattgggtgatggctatgcaagaggagttgaataacttcactcgcaaccaagtatggactttggcggagagacccaagcaaaatgttgtcggcaccaagtggatctttcgcaacaagcaagacgaacatggggtggttgtaaggaacaaagcccagatagttgcgcaaggattcacccaagtcgagggtctcgattttggtgaaaccttcgcacctgtcgctcaccttgagtcaattagaattcttttagcctatgccgctcaccatgatttcaggttattccaaatggatgtcaagagagcctttcttaatggacctatctcagagttggtctatgtggagcaaccaccggggttcgaggatccaaagttgccaaaccatgtgtacaagctccacaaggcgctctacgggctccaacaagcccctagagcttggtatgaatgtctccaagattttcttttgaaaaatggttttgaaattggaaaggcggatactactctcttcactaaaaaatttaagagtgatttattcatatgccaaatttatgtcgatgacataatatttggttctactaatgcctctttttgtgaagaatttagtagtatcacgactaaaagtttcgagatgtctatgatgggcgagttgaccttcttcctcgggatacaagtgaagcaagcacaagaggggaccttcatctctcaaactaagtacgtgaaagacatactcaagaagtttgggatggaggataccaaacctatcaagacgcccatgcctactaatggccacctagacctcgacaataatggtaaatgtgtggaccaaaaggtatatcgctccatgataggatctttgctttacttatgtgcatctcgtcccgacatcatgcttagtgtttgcatgtgtgcccgttttcaagcggaacctaaagagtgccatttgattgccgtcaagagaattctaagatatttagttcatactcctaatcttggcttatggtatcctaaggattgtgactttgagcttttgggctattccgattcggattatgccgggtgtaaggttgatagaaaaagcacaaccgggacttgtcaattccttgggcggtcccttgtttcttggtcatacaagaagcaaaattccattgcattatccaccaccgaagccgaatatgtcgccgccggttcttgttgtgcccaactcctttggatgaaacaaaccctacaagattttggctataacttcaccaagatcacactcctatgtgacaatgagagtgccatcaaaatagccaataatcccgttcaacattcaagaaccaagtacatagatatttgccatcactttttgagagatcatgagactaaaagagacatatgccttacccatgtgagaaccgagacccaattagctgacattttcactaagcctttagatgagaaaagattgtgcgagcttaggagtgaactcaatatcttagactctcgtaacattaggccggaagttccagtgttcttggtccggaacttccggtctctatccagccagccagcaaaccttgattcctccaatttttattttaaccattgcacttcaaccttgttgattcttgttgcagtggtcagtatgcctcatgagaagagacagaagctttcacaggatgttcctgctgactcgagtcccccggttcatggtcctaggaggagattgggcaaagaaaaagttggaaatttttacagtgggagtcaaattcctattcattctaggagggctggtagcattgtcattggtgatgctccccgctctccctctccagttgcatctaagtcagatgatggtggcaatgaggatgagcctagttctgagagcaatcctttgaggctttacaagacaagggttgttgatcctgatcctagacgtccaagtgtgaactatttgaagaatctgctcaagtgtggaatggacagaatggtgagtcctgacacaatgcctgctgactctcaggatgacagattcaggaccgtggtgcaagttgattggtataattctgtgatcatgggaagatctcatccagtggtagagatgaagtggctagactggcagtacatgtccttaaagaacaacttagttttcagtgaggtacgcaaggtgtgtgagcgcaagcacgtggcagatctgttggccttgcagtattcctggaatgaggaagtcattggtcagttatactccaccgctttctttggcaccaccaagaagggcattgaatttgtgaagtggaccattcaggggcagcagtatagggtctctatggcacagtttgctgcagctctggagttagatgatgatgacctgagtcgtcctcatatctttgtagaaaatgctttgtcaccgaccagcactactttcctgtatgagaaggatgctcccaaggattgtttggggactactcgtgggttgcgtccatactatagagtgctttattctatcttcag

SEQ ID NO: 15759 - DNA, 1653 bp, Oryza sativa
  Clone ID: TFbOSC900226j.C1.o2.gm
atgtcggacttaggggaaaagaatggggaaaatggaaatgaagatggagcgagcagcaagggaactccatcaaccaagggagctactataccttttgattacagcaaacttaccattccctctcacaactttgtctccgtgccttccgggcatgctcctcaatttgatgggacacattacgccgcttggaagcacaagatgaagttgaatctaatctctctgcatccaagtatttggaaagttgtttgtacaggtgttgatgtaccccatgatgatatggagctcacttcggagcaagagcaactcatccaccgcaatgctcaagcttccaatgcaattctctccgccttgagtccggaggagttcaacaaggttgatgggtctgaggaggccaaggagatatgggatactttgcaattggctcatgagggttcacccgccgtttgtgaggccaaaattgaattattggaaggaaggcttggaagatttgtgatggatgacaaggagacaccacaagagatgtatgataggatgatgattcttgtcaacaagatcaaaggacttgggagtgaggacatgacaaatcactttgttgtcaagagacttctccgtgcttttggtccaagaaatcccactcttgtatctatgatatgggaaagaaaagacttcaagaggctcaccccaagtgacattcttggaagaattgtgtctcatgagatgcaagaagaggaagctcatgaagtgaggcaaatggtgaagaatgccgccatgatcaaaaatcaagaagttgcttggaaggcaaaacaagaagaagagtcaagttgtgaagaaagtgaagatgaagagatggcttttgttgtcaagagattcaagcactttcttcgcaagagtggctatggcaaagggaggaaggatgatgacaagggaaagcggcaatcaaagagagcttgcttcaattgtggtgaatatggccacttcattgccgattgtcccaagtcaaatgaagctaaggctaagggaggcaagaagaagccggagcgtgctcatgtggcggaggcacacatggcggaggtgtggtactccagagatgaggaagatcccgaggtcaagcccatgcccaagccaaaagacaaggttgaaggagaaggtggtgttgctaccgtcgccttcaagtcatcatcttcaagcaaggcgcgtctcttcaacaacttgagtgatgacgacgacgactcctaccactactcttgtttcatggcccaaggccgcaagggttcgcggtggaccgggtgcacggcggcggctcacggaaacgaacgtccgagatcgatcctatccaaaacggacggccaagatccatcggtccacgaccgggccacggggaacgacgacgatgacgtcggtggtgacgtcaccaccggcggcggctcgggcgtgcatgctcgccggcgaatgacggcgcggcggcgcaaacgaagagcacctacgggtagcggacggcacggcgaactcaccggtgaccaaagtagcggcggaggagcaacggacggcgacggcgtcgaggaagaagcggcggcaaccttcggcttgatgacgacggcggtgctccggcgacctacggcgacggcggaggggcggacgaggacggcgacgtga

SEQ ID NO: 15760 - DNA, 6711 bp, Oryza sativa
  Clone ID: TFbOSC900330j.C1.o8.fg
atgtcggacttagggggaaagaacggggaaaatggaaatgaagatggagcgagcagcaagggaactccatcacccaagggagctactataccttttgattacagcaaacttaccattccctctcacaactttgtctccatgccttccgggcgtgctcctcaatttgatgggacacattacgccgcttggaagcacaagatgaagttgcatctaatctctttgcatccatgtatttggaaagttgtttgtacaggtgttgatgtaccccatgatgacatggagctcacttcggagcaagagcaactcatccaccgcaatgctcaagcttccaatgcaattctctccgccttgagtccagaggagttcaacaaggttgatgggcttgaggaggccaaggagatatgggatactttgcaattggctcatgagggttcacccgctgttcgtgaggccaagattgaattattggaaggaaggcttggaagatttgtgatggatgacaaggagataccacaagagatgtatgataggatgatgattcttgtcaacaagatcaaaggacttgggagtgaggacatgacaaatcactttgttgtcaagagacttctccgtgcttttggtccaagaaatcccactcttgtatcaatgataagggaaagaaaagacttcaagaggctcaccccaagcgacattcttggaagaattgtgtctcatgagatgcaagaagaggaagctcgtgaagtgaggcaaatggtgaagaatgccgccatgatcaaaaatcaagaagttgttttgaaggcaaaacaagaagaagagtcaagttgtgaagaaagtgaagatgaagagatggcttttattgtcaagagattcaagcactttcttcgcaagagtggctatggcaaagggaggaagaatgatgacaagggaaagcggcaatcaaagagagcttgcttcaattgtggtgaatatggccacttcattgccgattgtcctaagtcaaatgaagctaaggctaagggaggcaagaagaagccggagcgtgctcatgtggcggaggcacacatggcggaggtgtggtactccggagatgaggaagatcccgaggtcaagcccaagcccaagccaaaagacaaggttgaaggagaaggtggtgttgctaccgtcgccttgaagtcatcttcttcaagcaaggagcgtctcttcaacaacttgagtgatgacgacgatgactcctaccactactcttgtttcatggcccaaggccgcaaggtgatgactcaaaagccctctcacacctctcttgatgttgattctagtgatgaggaaagtgataatgaattagatgatgtgcttaagagctttagcaaacccgctatgcaacatttggctaagttaatgagagctttggatagtaaagaacaatctctcgaaagacaagaagaattacttattcttgagaagaaaagaaaccttgccttagaggagagcctagctaaaaaatgtgctaaaaatgaacaactagctaatgagcttaatttggctaatggttctctagctagccttagggatgtcagtgaaactcttcaagagaagtttgctagtttagacaaaagtcataaagatcttgaagttcaatttgacactctttggaatagcacttctcaaccaaatgtggtttctaattcttccaacccatctactagcaatggttgtgctaggtgttacaatattgatttgaactctcatgctactaatattgatgctatgcaagctcttaagaaagagaatgaaaggttaggcacattggtgaaatatggatgcataaagacataccattcaaaagatgccctttacaagaccatcaccgctcatcctaacaaggatggacacgggctcgggttttctggtggaagtcctgtgtttaagcgtgtgatggtaaatgggaaagaatgcttgatgtttgtaagagaaggaaaagctccacaagcaagtgagatgacttgtcccctcactggtcagacacccggaagttccgggcaaaatgaccggatgttcctgccctgtaagactggaagttccggacattttgtcaggaagttccgggcttctgataggccgaaggggctgaccggaagttccgggtataatgctaggaagtttcagccagagggtctttactatgattcatatgtaatttccaaaaattcagagggcaaagtggttgcttattttaatgggaattacaatgatgagtaccgcacttgtgtgtgggtgccaaaggctttggcatactcctccggtggctcaagttgggttgtggacagtggctgcaccaatcatatgacgggagagaggagtatgtttacaagtcttgatgaggagggtggaagtcgtgaaaatattgtctttggagatgatggtaaaggaaaggtaatgggtctcggtaagattgccatttccaagaatcaatctctttctaatgtcctccttgtcaattctttaagctacaatttattatccgtgtctcaattgtgtaagttaggatttaattgcttgtttaccgatgtggatgtgaccgtttttaggcgagatgactcttccatagcattcaagggtgtgttaaagggtgatctctatctcgttgatttcgacgtagatagagtgaatccggaggcatgcttgattgctaaatcctctatgggttggctatggcaccgtaggctagcccatgttggaatgaggaatttggcatctcttctaaaaggggaacacattcttggtctatctaatgtttcttttgagaaagatcgtgtgtgtagtgcttgccaagctgggaagcaagttgggagtccacatcctataaaaaacatcatgactacaacaagaccactcgagcttcttcatatggatttatttgggcccgtggcctacataagcattggaggtaacaagtatggtttcgtcattgttgatgatttttcacgtttcacttgggtgtactttctccatgacaaaagcgaagctcaagatgtcttcaagcgcttcgcaaagcaagcccaaaacctctatgatctcactatcaagagggaagaaggaatcaagcacgagttctccgccccctatgatcctccccaaaacggcattgttgagaggaagaaccaaaccctcattgaagccgcaagggcaatgcttgatgagtacaagacttcggatgtattttgggcggaggccgtgagtaccgcatgtcatgccatcaatcacttgtacctccacaagatcctaaagaaaacctcatatgagctcttgagtggtaagaagcctaatgtttcatattttcttgtctttgggagcaaatgttttattttaagtaagaggcctcgctcatctaagttctcacctaagatggatgagggattcttatttggctatgaatcaaatgcacatgcctatcgtgtcttcaacaaaacctccggtattgttgaagtcactagggatgtgacatttgatgaatctaatggctcccaaggagagcaagttgttgtacatgttgtaggggatgtggatccaagtcaagctataggtactaaggctattagagacatacgaccagtcgagacgcaggatgaccaagaagatagggatcaacctccgtcatcgacatccaatagccctacaagtgctgtgtctgttgagccggaagttctgggtcctattgaccggaacctctggacatctccaggcccggaagttccgggttctatagtccggaatctccggaccagtggcagtgaagatgcacaaatggatcgtagatggatgtactatgcgcatcgttcgtctaccgagtataaagagggggtcactgaatttgtcacatttgcggataatgacagaaaaagtaggatgagcatgcacatgttgtgtccatgtagggactgtaagaatgaccagatgatcgaagacaaggatgaagtgcatgttcatttgataatgaatggattcatgaagaaatatacctgctggaccaagcatggagagcaagaggtgcctgatgtcgcagctgaagaagtgttggatcaggatgtagagaacaccgccgcagctcgagatggcatgttcgtaccttctcctttaggtggagagaccatagatttggacactcaatgtctattacaatgttgcatgacattgaagacgcagaggacaacgacagagattttgagaagtttagaatacgctgacttggatgtctgccctatctatggggcatcaagatacaaacgagcaaagagtgaaggtgaaggaagtaagtcaaagaggggaggcccagcaaaggtggtgtggtatctcccaattgcggagcgcatgaagagaatgtttgcgaataaggaacaagctaagcttgtgcgctggcatgccgaagaacggaaagtcgatagtatgctgacgcacccagcagatttagtacagtggaggacaatcgataggatttaccaggaattctcaaatgacccaagaaacatgcgtttcgcaatgtgtacggacggcattaatccttttggtgatttgagcagtcgtcacagtacatggccagttctgcttgttaactataaccttcctccctggttgtgtttcaaaagaaagtatattatgcttgccatgctcattcaaggaccgagacaacctggcaacgatatcgatgtgttccttgaaccgataatcgatgacttcgaaaggctatggaatgagggtacacgaacatgggacgcatatgcacaagagtatttcaacctccatgcgatgctgttttgtaccatcaacgattatccggcccttggcaacctttctggccaaactgtgaaagggaaatgggcatgttcggagtgtatggaggaaacaagaagcaaatggttgaagcattcacacaagacggtctacatgggtcacagaagatttctcccaaggtatcacccatataggaatatgataaagaatttcaatggacacagagatacagccggaccaccggcagagctaacagggacagaggtgcacaacttagtgatgggaataaccaacgagtttggaaaaaagaggaaagttggaaagcgaaaagagaagagcacatcgaaggaaaaaacagaggagcatgtggaaaaacaaaagataaaagagaggagcatgtggaaaaagaagtcaatattttggagactaccatactggaaggatcttgaagttcgccactgcatagatttgatgcatgtcgagaagaatgtatgcgagagtttaatgggattactgcttaacccaggtactacaaaggatggtctcaacgcccgacgagatctggaagatatgggggttcgctcggagctacatcccataaccacggaatccggcagggtttaccttcctccagcctgctacactctctcgaaagaagagaagattgatttgctaacatgtttgagtggtataaaggttccatctggttactcatcaagaattagtaggctcgtttcactgcaagatcttaagttggtaggaatgaagtcgcatgattgccacgttcttatcacacagctgttgcccgttgcaataaggaatattttgcctcctaaggtgcgacacacgatccagcggttgtgttccttcttccatgcaatcggccagaagatcattgatcccgagggactagatgaactacagacagaacttgtgagaaccctatgtcatcttgagatgtactttcctccaactttctttgacataatggaacatcttccggtgcaccttgtgaggcaaacaaagtgctgtggtccagcatttatgacgcagatgtatccttgcgaaaggtacctggggatctttaagggttatgtacggaaccgttcacaccctgaggggagtatcatcgagagttacaccaccgaagaggtcatcgatttttgtgtggactacatgtcagaaacatcttcaattggattaccacgatctcatcacgaagggaggcttgatggtgttggtactgttggaagaaagactattaggttggatcggaaggtgtacgataaagctcatttcacggtactacagcatatgactgaggtggtgccgtacgttgacgaacaccttgcagttatccgacaagagaacccaggccgatcaaagagttgggtcaggaataagcacatgtcttctttcaacgagtggctgaagaaccgaattgccaggttgcagaacttgtctagtgaaacacttcagtggttgtcacagggtcctgaatggagtgccaccacctggcaaggatatgacataaatggatacacctttcacacggtaaagcaagacagcaaatgcacagtgcagaacagtgggttacgcatcgaagctgctagtgacggtggtcgtcgtgatcaatactacggtttcaccactgtcaacttggctaacaacgcgtacaaggatgaaccgttcattctcgccaaacaagttgttcaagtgttcaacatagttgacccgtgtaacaagaaactacatgttgttcgtgaagggaaaaggagaattgttggattggaaaatattgtagacgaggatgattacaaccagcacgtccacggcataggtcaagaaatacctctagaagaggaggaagaagaagatgaagttcaatatgcatgtgtcgaccatgaggaaggattatttttgtaa

SEQ ID NO: 15761 - DNA, 3312 bp, Oryza sativa
  Clone ID: TFbOSC900406j.C1.o18.gm
atggagctcacttcggagcaagaacaactcatccaccgcaatgctcaagcttccaatgcaattctctccgccttgagtccggaggagttcaacaaggttgatggacttgaggaggccaaggagatatgggatactttgcaattggctcatgagggatcacccgccgttcgtgaggccaagattgaactattggaaggaaggcttggaagatttgtgatggatgacaaggagacaccacaagagatgtatgataggatgatgattctggtcaacaagattaaaggacttgggagtgaggacatgacaaatcactttgtggtcaagagacttctccgtgcatttggtccaagaaatcccactcttgtatcaatgatatgggaaaggaaagacttcaagagactcaccccaagggacattcttggaagaattgtgtctcatgagatgcaagaagaggaagctcgtgaagtgagacaaatagtgaagaatgccgctatgatcaaaaatcaagaagttgctttgaagggaaaacaagaagaagagtcaagttgtgaagaaagtaaagatgaagagatggcttttattgtcaagagattcaagtactttcttcgcaagagtggctatggcaaagggaggaaggatgatgataagggaaagaggcaatcaaagagagcatgcttcaattgtggcgaatatggccacttcattgccgattgtcccaagtcaaatgaagctaaggctaagggaggcaagaagaagccgaagcgtgctcatgtggcggaggcacacatggcggaagtgtggtactccggagatgaagaagatcccgatcacgaggtcaagctcaagcccaagtcaaaagacaaggttgaaggagaaggtggtgttgctaccgtcgccttcaagtcatcctcttcaagcaaggagcatcttttcaacaacttaagtgatgacgacgacgactcctaccactactcttgcttcatggcccaaggccgcaaggtgatgactcaaaagccctctcaaacttctcttgatgttgattccagtgatgaggaaagtgataatgaattagatgatacataccattcaaaagatgccctttacaagaccatcaccgctcatcctaacaagaatggacacggctcgggttttcgggtggaagtcatggacccggaacatccggacaaaccgggagaaacttccgggtgggagtctctgtctctcaaaaattcccaccaggaagttccgggccaatggccgtgcacacgatatgaccggaagttccggtcacaatgccaggaggttccggccagagggaaacaagttgggaatccacatcctatcaagaacatcatgactacaacacgccctcttgagcttctacatatggatttattcgggtccatggcctacataagtattggaggtaacaagtatggttttgtcattgttgatgatttttcccgcttcacttgggtgtattttctccatgacaagagtgaggctcaaaatgtcttcaagcgcttcaccaagcaagcccaaaacctctatgatctcaccatcaagaaggtgcgaagtgacaatggagaattcaagaacactcaagtggaggaattccttgatgaagagggaatcaagcacgagttctccaccccctatgatcctcctcaaaatggcattgttgagaggaagaaccgaactcttattgaagccgcaagagcaatgcttgatgagtacaagacttcggatatcttttgggcggaggctgtgagcaccgcatgccatgccatcaatctcctctacctccataagatcctaaagaaaacttcatatgagctcttgagcggtgatgtggatccaagtcaagctataggtactaaggctattggagatatacgactagtcgagacgcaggatgaccaagaagatagggatcaacctccgtcatcgacatccaatagccctacaagtgctgtgtctgctgagccggaagttccaggtcctattgaccggaacctccggacatctccaggcccagaagttccgggttctacagtccggaacctccggaccagcggtagtgaagacgtgccaacggcgcaagtggatgggatcgatgttccgggcactttagagcatactgatcaggctcaggtccccccagtgcaccatccaaggatacatcacattgtccaaagagatcatcccgtcgacaacatacttgaattggtctatgtggagcaaccaccggggttcgaggatccaaagttgccaaaccatgtgtacaagctccacaagacgctctacgggctcaaacaagcccctagagcttgtatcatgactaaaagtttcaagatgtctatgatgggcgagttgaccttcttcctcgggctacaagtgaaacaagcacaagagggcaccttcatctctcaaaccaagtacgtgaaagacatactcaagaagtttgggatggaggatgccaaacctatcaagacacccatgcctaccaatggccacctagacctcgacgataatggtaaatgtgtggaccaaaagcgggaacaccactccacaggcatcctcgacggcacggacgaagcctactcctcggagaacccgccatcggacacatactcgagctctgaggaccagccggggtacacaaacgacaatgttgacatacagatccaccgggaacaccactccacaggcatcctcgacggcacggacgaagcctactcctcggagaacctgccatcggacacatactcgagctctgaggttggggggaaaaggctgacgtcagcgagggggcgcggcgccgacaggcggggcccaccggtcagcgaccgggagagagagaaagggggtggcggcgcgcgggcccacgggtcagcggcacgggggaaaggaggggcggcggcgccacgtggcggccgaaccgacggccccgatctacccaagggtagatcggacggcggcgggacctcgcggccggggcgcgcgggcgcggcgcgagacggcggcaaccatggcgccggcggcgcggcgctcacacggcggcggcgcgcatgcggcagcggcgcaaggcggcgaccgaaggcgaccgaccggcggcggggagcggcggctagaggaggagcggcggctacgcggctaagcggcgcgcacgcggctacccggtacggggaaaaggagaaagaggagggggaagcctcaccgacaacggtcgacgacggcggccgacggaggacgacgacgacggcgggacgagctccggaacctcctaacgaacaaaaggagagggattag

SEQ ID NO: 15762 - DNA, 3540 bp, Oryza sativa
  Clone ID: TFbOSC900415j.C1.o4.fg
atgtcggacttaggtggaaaggacggggaaattggtaatgaagatggagcgagcagcaagggaacaccatcacccaagggagccactacaccttttgattacagcaaacttaccattccctctcacaacttcgtctccgtgccttccgggcgtgctcctcaatttgatgggacacattacgccgcttggaagcacaagataaagttgtatctaatctctttgcatccaagtatttggaaagttgtttgtacaggtattgacgtaactcatgaagacatggagctcactttggagcaagagcaactcatccatcgcaatgctcaagcttccaatgcaattctctccgccttgagtcctgaggagttcaacaaggttgatagacttgaggaggccaaggagatatgggatactttgcaattggctcatgagggatttcccgccgttcgtgaggccaagattgaattattggaaggaaggcttggaagatttgtgatggatgataaggagacaccacaagagatgtatgataagatgatgattctcgtcaacaagattaaaggacttgggagtgaggacatgacaaatcactttgttgtcaagagacttcttcgtgcttttggtccaagaaatcccactcttgtatcaatgatacgggaaaggaaagacttcaaaaggctcaccccaagtgacattcttggaagaattgtgtctcatgagatgcaagtagaggaagctcgtgaaagtggctatggcaaagggaggaaggacgatggcaagggaaagaggcaatcaaagagagcttgcttcaattgtggtgaatatggccacttcattgccgattgtcccaagtcaaatgaagccaaggctaagagaggcaagaagaagccggagcgtgctcatgtggcggaggcacacatggcggaagtgtggtactccgaagatgaagaagcctccgaggccaagcccaagcccaagccaaaagacaaggttgaaggagagggtggtgttgctaccgtcgccttcaagtcatcttcttcaagcaaggagcgtctcttcaacaacttgagtgatgacaacgacgactcctaccaatactcttgcttcatggctcaaggccgcaaggcatactcctccggtggttcaagttgggttgtggatagtggttgcaccaatcatatgactggagagaggagtatgtttacaagtcttgatgaggagaacaaaactcatgagaatattgtatttggagatgatggtaaaggaaagttgggttacaattgcttgtttaccgatgaggatgtgacggtctttagaagggatgactcctccgtagcattcaaaggcaagttagagggtgatctctatcttgtcaatttcgatgtggatagagtgaatccggaagcttgtttgattgctaaatcctccatgggttggctatggcatcgtagactagcccatgttggaatgcggaatttggcaattcttctaaagggggaacacatcctcgggctcactaatgtcacatttgagaaagatcgtgtgtgtagtgctttccaagccgggaaacaagttgggaatctacatcctatcaagaacatcatgactacaacacgccctcttgagcttctacatatggatttattcgggcccgtggcttacataagtattggaggtgaggctcaagatgtcttcaagcgcttcgccaagcaagcccaaaacctctatgatctcaccatcaagagggtgcgaagtgacaatggaagagaattcaagaacactcaagtggaggaattccttgatgaagagggaatcaagcacgagttctccgccccctatgatcctcctcaaaatggcatcgttgagaggaagaaccaaactcttattgaagccgcaagagcaatgcttgatgagtacaagacttcggatatcttttgggcggaggccgtgagtaccgcatgtcatgccatcaaccgcttgtacctccacaagatcctaaagaaaacttcatatgagctcttgagtggtaagaaacctaatgtttcatattttcgtatctttgggagcaaatgctttattttgagtaagaggcctcgctcatctaagttctcacctaaggtggatgagggattcttacttggttatgaatcaaatgcacatgcctattgtgtcttcaacaaaacctccggtattgttgaagtcactagggatgtgacatttgatgaatctaatggctcccaaggagagcaagttgttgtacatgttgtaggtgatgtggatccaagtcaagctatatgtactaaggctattggagacatacgaccagtcgagacggttgaagatgcacttggtgatccggattgggtgatggctatgcaagaggagttgaataacttcactcgcaaccaagtatggacattggtggagagacccgaccaaaatgtcatcggcatcaagtggatcttccgcaacaagcaagacgaacatggagtggttgtaaggaacaaagcccggttagttgcgcaaggattcacccaagtcgagggtcttgattttggtgaaaccttcgcgcccgttgctcgccttgagtcaatccaaatccttttagcctatgccgctcaccatgattttaggttattccaaatagatgtcaagagtgcctttctcaatggacctatctcggagttggtctatgtggagcaaccaccggggttcgaggatccaaagttgccaaaccatgtgtacaagctccacaaggcactctacgggctcaaacaagcccctagagcttgtagtatcatgactaaaaggtttgagatgtctatgatgggcgagttgaccttcttccttgggctacaagtgaagcaagcacaagagggcactttcatctctcaaaccaagtacgtgaaggacattctcaagaagtttatgatggaagatgccaaacccatcaagactcctatgcctactaatagccacctagacctcgacgataatggtaaatgtgtggaccaaaaggtataccgctccatgataggatccttgctttacttatgtgcatctcgtcccgatatcatgcttagtatatgcatgtgtgcttgctttcaagcggagcctaaagagtgccatttgattgccatcaagagaattctaagatatgtagttcatactcctaatcttggcttgtggtatcctaaaggttgtgactttgagcttttgggctattccgattcggattatgccgggtgtaaggttgatagaaaaagcacaaccgggacttgtcaattccttgggcggtcccttgtttcttggttctccaagaagcaaaattccattgccttatccaccgccgaagccgaatatgtcgccaccggttcttgttgtgcccaactcctttggatgaaacaaaccctaaaagattttggctacaacttcaccaagattccactcctatgtgacaatgagagtgctatcaaaatagccaacaatcccgttcaatactcaagaaccaagcacatagacattcgccaccacttttcttga

SEQ ID NO: 15763 - DNA, 242 bp, Oryza sativa
  Clone ID: TFbOSC422776j.C1.o6.gm
atggagatggagctagggttgggaaggtactggggggttgggaggaggcggtgcggcgcgtgcgcggtggcgccggcggcggtgcactgccggacgtgcgacggcgacggcggcggaggtgggtatctgtgcgcggggtgcgacgcggagcatgggagggcggggcacgagagggtgtgggtgtgcgaggtgtgcgagctcgcgccggcggcggtcacctgcaaggccgacgcggcggcgct

SEQ ID NO: 15764 - DNA, 169 bp, Oryza sativa
  Clone ID: TFbOSC415445j.C1.o6.gm
atggagttgcgcaagtactggggcgtcggcgggcggcggtgcggtgcgtgcgaggcgtcgccggcggccgtgcactgccgcggctgcggcggggtgtacctgtgcacggcgtgcgacgcgcgcccggaccacgcgcggacggatcacgagcggattgtggttgtgctag

SEQ ID NO: 15765 - DNA, 771 bp, Oryza sativa
  Clone ID: TFbOSC403009j.C1.o11.fg
atgaagatccagtgcgacgcgtgcgagagcgcggcggcggcggtggtgtgctgcgcggacgaggcggcgctgtgcgcggcgtgcgacgtggaggtgcacgcggcgaacaagctggccgggaagcaccagcggctgccgctggaggcgctctcggcgaggctcccgcgctgcgacgtgtgccaggagaaggcggcgttcatcttctgcgtggaggaccgcgcgctcttctgccgcgactgcgacgagcccatccacgtccccggcacgctctccggcaaccaccagcgctacctcgccaccggcatccgcgtcggcttcgcctccgcctcgccctgcgacggcggcagcgacgcccatgactccgaccaccacgccccgcccatgggctcctccgagcatcatcaccatcatcagcagccggccccgaccgtcgccgtcgacacgccctcgccgcagttcctgccgcagggctgggccctgcagaaggagtcgtcgccgccgctcgggttccaggagctggagtggttcgccgacatcgacctgttccacaaccaggcgcccaagggcggcgccgccgccggccggacgacggcggaggtccccgagctcttcgcttcgcaggcggccaacgacgtggcgtactacaggccgccgaccaggaccgccgccgccgccttcaccgcggccaccggcttccgccagagcaagaaggcccgcgtcgagctccccgacgacgaggaggattacctcatcgtccctgatcttggttga

SEQ ID NO: 15766 - DNA, 1212 bp, Oryza sativa
  Clone ID: TFbOSC23982j.C1.o10.fg
atgggtcaagatgaggtggaggtaggtgcggagaagaaggatcaagaactaccggaggtggaggtggtcgaggaggaggaggaggagggatccaagaaggcggcggcgggctgcgactactgcggcgacgcggcggcggtggtgtattgcagggccgacgcggcgaggctctgcctgccatgcgaccgccacgtgcacggcgccaacggggtgtgctcccgccacgcgcgcgcgccgctctgcgccgcgtgcgccgccgcgggggccgtcttccgccggggcgcgggcggcttcctctgctccaactgcgacttctccaggcaccgccacggcggggagcgcgacccggcggcgccgctccacgaccgctccacggtgcacccgtacaccgggtgcccctccgcgctcgacctcgccgcgctcctcgggatctcctactccgacaaggcggcggcggcgaccgcggcggcggggggcgacgacggtgggtggtgggccatctgggaggagccccaggtgctcagcctcgaggatctcatcgtcccgaccacctcctgccatggattcgagcctctcctcacgccatcttcccccaagattcagaactcgccggatgggaaggtgaatgaggaggtcatacgacagctaaccgagctcgccaattcagacggcggcggcgcgcagatttgggctcatcgcgaggcggcgcaggccggcgatcatcagttaccttcatggggaacaacaacacaacacaacactggacatggcaatttcggtactgcaaacagcaatgaggttgcaaccatgccgacgcctggttatgagaatggtggatgggataacagcgattaccctgcgctaaatgatccgtgcaaggtcgagttcacatatgagcaacctccagccagctcagctgaagcatgtatttcatcatttgttcagatgtctgaactttgccccagcatgagcaatggtagcagcatggaggaaacccaccagacaaaccctggaaatggcacgccaatgcaagttctacccaaaatgccagaatttgttccttgccccgacaggaacttggtcatttctcgctataaagagaagaggaagacaagaagattcgacaggcaggtccggtatgagtcccgcaaagctcgtgctgatagcaggctgaggattaagggccgttttgctaaagtcaatcagatttga

SEQ ID NO: 15767 - DNA, 1284 bp, Oryza sativa
  Clone ID: TFbOSC400961j.C1.o15.fg
atggcaggccgctttggaacttttctcatgtatctgcactggctacctcacaccggagctaaagctactactaccacaagcaaggctacttcgttcatgaattataattttggtggcaacgtgttcgaccaggaggttggagttggaggcgaaggaggaggaggaggagaggggagcggctgcccatgggcgcggccgtgcgacgggtgccgcgcggcgccgagcgtggtgtactgccgcgcggacgcggcgtacctgtgcgcgtcgtgcgacgcgcgggtgcacgcggccaaccgcgtggcgtcccgccacgagcgcgtgcgggtgtgcgaggcctgcgagcgcgccccggccgcgctcgcgtgccgcgccgacgccgccgcgctgtgcgtggcgtgcgacgtgcaggtgcactccgcgaacccgctcccggccatcaccatcccggccacctccgtcctcgctgaggcggtggtggccaccgccaccgtcctcggcgacaaggacgaggaggtggactcttggcttctcctctccaaagattccgacaacaacaacaacaataacaacaacaacgacaacgacaataacgacaacaacaacagcaacagcagcaacaacggcatgtattttggtgaagtcgatgagtactttgatcttgtcgggtacaattcgtactacgacaaccgcatcgaaaacaaccaagatcggcagtatgggatgcatgaacagcaagagcagcagcagcagcagcaggagatgcaaaaggagtttgcagagaaggaagggagcgagtgtgtggtaccttcacagatcacaatgctgagtgagcagcagcatagtggttatggagttgtgggagcagaccaggccgcctccatgaccgccggcgtcagtgcttacacagattccatcagcaacagcatatctttctcatcaatggaggcgggtatagtaccagacagcacggtgatagatatgccaaattccagaatcctgacacctgctggagcaatcaatctcttctcaggtccctcgcttcagatgtcccttcacttcagctccatggacagggaggccagggtgctcaggtacagggagaagaagaaggccaggaagtttgagaagacaatacgttatgaaacaagaaaggcgtatgcagaggcacgaccccggatcaagggccgtttcgccaagagatcagatgtgcagatcgaagtggaccagatgttctccactgcagctctatctgacggtagctatggtactgttccatggttctga

SEQ ID NO: 15768 - DNA, 672 bp, Oryza sativa
  Clone ID: TFbOSC900291j.C1.o4.fg
atggaaaatgaggtgggttgcgagtgccagctgtgcggtgggcggcgtggcgtggtgttctgcggcgcccacggcgggcgcctctgcctccaatgcgaccgagccctgcaccaagcccacggcggggccggcgatcacccccgcgcgccgctctgcgactcgtgcaacgccgccgccgccgagctgcgcctcaacgacggggccacgctgtgcgggccgtgcgcctacccctacgcctacgcctacccctacacatacacctacgtctacaccggctgccccaccccgctggagatgatgcgcctcctccatgccgccccgccgccgccgccagctacctgcagtttacaacaacgaggagaaggagaagagctacttccaactctcttatctgcgactgcgactcctaatactgctactgctgcgccaatggcaatgccacccccaccactacaacaccacaccaccacctccctcatcatgatgataaggaacattcacaagcgggaggagaggaacagagccaagctcaggttcagcaagcagatcaagtatgcctgccgcaaggccggagccgacgcacgaaagcgggtcaaaggccgattcgcaaaggcctcttcctcctcctcctcctcctcctcctcttcttcttccatcgatcatcgattatga

SEQ ID NO: 15769 - DNA, 903 bp, Oryza sativa
  Clone ID: TFbOSC401495j.C1.o5.fg
atgtcggtggcggcggaggggaaggagaagggggttggtggtgggggtggtggtgcgggtgcgggggcgtgcgagctgtgcggggcggcggcgagggtgtactgcggggcggacgaggcgacgctgtgctgggggtgcgacgcgcaggtgcacggggccaacttcctggtggcgcggcacgcgcgggcgctgctgtgccgcgggtgcgcgaggcccacgccgtggcgcgccgcggggcccaggctgggccccaccgcgtcgctctgcgagcgctgcgtccgccgcggcggtggtggccgtggtggtggaggaggtggaggcgctgctggtggtggaggccgtggtggtgggggagacgaggagatgggcggcgagggcgatgaggaggaggaggacgaggacgaggaggtggtcgtcgaggaggaggaggacgaggatgatgaagacgaggagggggagggggagggggagaaccaggtggtgccgtgggcggaggaggcggaggccacgccgccgcccgtcgcgagctccacgtcgagcagcagccgggaggccgccgccaacggcgcgaacgccgccgaccgcgtcaaggaggaccagccgtgctcgacgtcgcagccgagcttgtgccggtacgcgtcctcggctcaccatggcggtggtggccggagcgacgaggccacctcctcccggaacggcggtggcgtcggcggccgattccttgcctcccggcataggaagagatcgccctcggatttccgccggtcggggttggcgcagtcgttgattgatagcaaactagcttttagattccaagagcattgcaaatctacttttccttcatccagtttgagtatattgccatgtacatggcagcttttcctgaggcaactgaaacaatga

SEQ ID NO: 15770 - DNA, 1046 bp, Oryza sativa
  Clone ID: TFbOSC400901j.C1.o11.gp
ttgatcattggctcttcccattcaagctaacacgactggggggtacacactgttgttagtgctaacaatactgtccatacaagtggtaagcccagtacattgagataccaactaacaccaaacacaagacaggactagcaaagattggaaggaaaaaaatatcgagttggtagttggtactatacaatacagggagacattcttgaccacataaagtctagttgatcaaatcacctttaattaataaccaattaataacaaatcaaattgtactatcatcattgtatactaatactacacagaaaaattagagtcccatccatttggatttagacttgtgatttgatgttaaccacaagagaggccttcctaaaccacaagatttttgggtccttgatggtgattaagaatttgagattaatttaattaattagggaggaagcaaacaaacaatcattgcccacaagtttcgcatttttagtactttctatctcaggcggccggaagattcgtcgtgcggtggccggcggcggcggcggatcaggagcactcggcccagccctcctcggcggcgggcggcgtcgacgcgcgcgcccctcatccaccacctcaacccccaaccggcggcgggcggtgcctggacgcgaggaagttggcgccgtgcaccttgtcgtcacataccaagcaaagaaacgcggagtcagcggcgcagtgcaccgcggccacgcccccgcacagctcgcacccggcgccaccaccgccgcacttgccgttgccgacctccattacaggttgcaagaggctggactcttgtgtcactcggtcgaacacctggcgggggtttgcgtggctttatactacagagcaaaacagggacaccagtctccgcgcgagggcgagatggcgatggcgaccggcgggcgcaggcgcgggcgcggcgcgcttcggggaaaccggcggcgagcgggggaaaccggcggcgagcgggggaaaccgcgggcgcgcgcgcggacggcgaggggggaggtttggttgggagcgagacg

SEQ ID NO: 15771 - DNA, 407 bp, Oryza sativa
  Clone ID: TFbOSC400070j.C1.o2.np
atgaattgtaatttcagcagtaacctttttgagcaggaagctggagggagaggctttccatgggggtcgggccatgcgacggatgtcatcgctgattcaactactaggttcattctgctgatcatgtcacatctcgtcatcgccgtctgcaaagccaatgagtgcacccctcaggcctcagtgttggcatgctgtgcagatgcagttgcactgtgtactacctgtgatgcagaggttcactctgcaaatccacttgctcagaggcaccaagagtacctgtgctaccactcccagttgcctctggtttaattaggcagaagctgcccatggaagcgaggaagatgaagtgaactcttggctcctgctcagcagaggttctgatgacagaggttgtacacttgtactga

SEQ ID NO: 15772 - DNA, 1059 bp, Oryza sativa
  Clone ID: TFbOSC406117j.C1.o11.fg
atggtccgctgccttgtagaaaatgcctcgctttgccaaaattgtgattggaatgggcatagtgctgggtcttcagctgctggtcataagaggcagaccataaactgctactcagggtgcccatcatcttcagaactttcaaaaatctggacatttgtttcggatattcctaatgtagctcctgagccgaattgcgagcaagggataagcatgatgagcatcagcgacagtggtgtcagtaatcaagacaatgctgcaggggacagcagtttgttagatattgctagtgcaacccttatgagtgatcttggcactgctggcaagccaaagtctttgataggctcctcatctgaagctggcgtgaaccttcttccacttgctactgatcagatggctggatccgtggattcgacatcagctaaggtgccctatacggcagaccaagatatgttcagcaaagacagtatatatgaagatttctgtgtggacgatgttgatcttagtttcgaaaattatgaggaactatttggcacctcccatattcaaacagagcaactgtttgatgatgctgggatcgacagttactttgaatcgaaggaaataccttctggaaactctgatgagcagcccaagctgatgcagccagtgaccagcaatgcagtatctgctgattcagggatgtcgatcccaggagccaaaggtgattccagtctttgtatacctgtgaggcaagctaggtccagtatctctctttcattttctggtttgactggtgagagcagtgctggagattaccaagattgtggggtatcaccagtgctccttatgggtgagcctccttggcatcctcctggccctgaggggtcatttgctggagctaccagagacgatgctatcacacgatacaaggagaagaagaagagaagaaaatttgacaagaaaatcaggtatgcatctcgcaaggctagggcagatgtgagaaaaagagtcaagggccggtttgttaaggctggtgaagcatacgactacgatccactctgtgaaacgaggagctactga

SEQ ID NO: 15773 - DNA, 690 bp, Oryza sativa
  Clone ID: TFbOSC401841j.C1.o12.fg
atgaggatccagtgcgacgcgtgcgaggccgcggcggccacggtggtgtgctgcgcggacgaggcggcgctgtgcgcgcgctgcgacgtcgagatccacgccgccaacaagctcgccagcaagcaccagcgcctcccgctcgacgccgcgctccccgccgccctcccgcgctgcgacgtctgccaggagaaggcggcgttcatcttctgcgtggaggacagggcgctcttctgccgggactgcgacgagcccatccacgtcccggggacgctctccggcaaccaccagcgctacctcaccaccggcatccgcgtcgggttcagctccgtctgtagcgccaacgccgaccacctcccgccgccagcgcccaaggggaactccaagccgccggcaagcggcatcgctgctgctgctgctcccaagccggccgtgtccgcggcggcgcaggagaagggctctcctattgggttcaaggatctggagtggctcgatgacatcgacctgttccatgtccagtcgccggccaagggaggcagcacggcggcggaggtgcctgagctcttcgcctcgccgcagccagcgagcaacatggggctctacaaggcgagcggtgcacgccaaagcaagaagccacgggtggagatacccgatgacgacgaggacttcttcatcgttcctgatcttggatga

SEQ ID NO: 15774 - DNA, 1266 bp, Oryza sativa
  Clone ID: TFbOSC401487j.C1.o38.fg
atggcgagcgccgccgcggcgacgggcgcggcgctgggggcgcgcacggcgcgggcgtgcgacgggtgcatgcggcggcgggcgcggtggcactgccccgcggacgacgcgttcctgtgccaggcgtgcgacgcgtccgtgcactcggcgaacccgctggcgcggcggcaccaccgcgtgcgcctcccgtcggcgtcctcctcgccggcatcctcccctcgctcggcggccgctccacgtgccggatcagacgaccccgacgcgccggcgtggctgcatgggctcaagcggcggccgcgcacgccccggaccaagcccgggggaggcggcaagcacgacgcctccgccgcgacggtggccgcggcggcggcgtcggcggtcccggacctcgaggcggaggagtccgggatcgtgggcgacaccgaccacgacgtcggggaagaggacgacgaggacctgctgtaccgcgtccccgtgttcgaccccatgctcgccgagctctacaaccccgtggcggccgacgacgaggagcagcagatcgagcagaagcctgctgcacgcgtcgtgccgttctcggagccgtcgccggagttcgcctccggctcggtggaggcggacggcctctccggcttcgacgtgccggacatggagctcgccagcttcgcggcggacatggagagcctcctcatgggagtcgacgaggggttcgacgatctgggcttcttggacgacgagaagcctcacgtgaaactggacctggacatggacatggacttcgcctccatctcgccggcgccggcgccggagcgggaggagaggaagaggaagcggccggagatgatactcaagctcgactacgagggcgtcatcgactcgtgggcccgcgacggagcctcgccgtggttccacggcgagcgccctcgcttcgatcccagcgagtcatggccggacttcccggcgggaagccggggagggctcggcgcggcggtgacggcggtgaccggcggcgagagggaggcgcgggtgtcgcggtacagggagaagcggcggacgcggctgttcgccaagaagatccggtacgaggtgcgcaagctcaacgccgagaagcggccgcggatgaagggccggttcgtcaagcgcgccgccgcgctgccgccgctcccgctgcccaggcaccagcatccgccgccgccgccgccgcgcgctctgccgccggtgccgatgatgctcgcgccgcgcggcgcgcacgggcgctaccgtttttga

SEQ ID NO: 15775 - DNA, 1440 bp, Oryza sativa
  Clone ID: TFbOSC414184j.C1.o8.fg
atgaaggatggtggtggaggaggagggagggggcagcagcagcagtggccttgcgactactgcggggaggcggcggcggcgctgcactgcagggcggacgccgcgaggctgtgcgtcgcctgcgaccgccacgtgcacgccgccaacgcgctctcgcggaagcacgtccgcgccccgctctgcgccgcctgcgccgccaggccggccgccgcgcgcgtcgcctccgcctcggcgccggcgttcctgtgcgcggactgcgacaccgggtgcggcggcgacgacggcgcggccttgcgggtgcccgtcgaggggttctccgggtgccccgccgccgccgagctcgccgcgtcgtgggggctcgacctccccggcggctgcggcggcgaggaggaggaggccgacgacgcgttcttctcggcgctcgactactccatgctcgccgtcgaccccgtgctgcgcgacctctacgtgccatgcgacccgcccgaggtggtggtggccggcggcgggcggcgactcaagggggaggcgctcggccaccagctcgccgagatggcgcgccgggaggccgagacggcgcacccgcacacgcagccgcactcggatctgagcccccgcacgcctcgccggacctccgccgcggcgagcggccgcctgcaggaaaagcaagctcccccgccgttgcctcatgctgctgcgacggcggcgccgctgccgtacacttcactgctcatgatggcgccggccaactgcaccgagctcatggaaaacaaccgtgttggagacgaagatgaaaatgttctgtgggagagcaccgcgccatcagtgccaccaacccagatatgggattttaatttgggaaaatcaagggatcacaatgagaactctgcacttgaagttggatttggctcaaacaatggaggctttatgattaagagttataatgacatgctcaaggagatttcttctgggacaacgaaggatctggaagatatttatgactcaagatattttgcagctgccgaagatatcatgtcgactaatgtctgtcagctgtcatcgaaaaatccaagcaccaggagcaacaaacggaaggcgagctcatgcgcttcgacgatcgatggaccgacaacttccacaagccatgtacctgctgcttcaggggcattggggggctcttcgaacgacagaggatcggctctccccaaggagatttccttctgtgatcagaccgtcgtccctaccggagccgatcagaggccatgtaccatcaagatcgacagcgagacgctcgcgcagaacagggacagcgcgatgcagcggtatgagaagcacatcaggtacgagtcgaggaagctgagagcggacacgaggaagagggtgaaaggccggtttgtgaagtcgaacggagcacctgatgatgtcagcaatggcgggtga

SEQ ID NO: 15776 - DNA, 810 bp, Oryza sativa
  Clone ID: TFbOSC401779j.C1.o12.fg
atgaaggtgcagtgcgacgtgtgcgcggccgaggcggcgtcggtgttctgctgcgccgacgaggccgcgctgtgcgacgcgtgcgaccaccgggtgcaccgggccaacaagctcgccgggaagcaccgccggttctcgctgctcaacccctcggcgtccggccgctcgccgacatcgacgacggcgccgctctgcgacatctgccaggagaagaggggtttcctgttctgcaaggaggaccgggcgatcctgtgccgcgagtgcgacgtgccggtgcacacggcgagcgagctcaccatgcgccacagccggtacctcctcaccggcgtgcggctctcctcggagcctgccgcgtccccggcgccgccgtcggaggaggagaacagcagcagcttctgctgcagcgccgacgacgccgtgccggccccggcggcgcccgccacgagccacggcgggagcagcggcagcagcagcatctccgagtacctcaccacgctgcccgggtggcacgtcgaggacttcctcgtcgacgacgccactgccgaggccgccgccgccgccgccgccacctcttccggcatctccgcgaacgggccgtgtcagggggtaacacggatcggagggctgcaagaatccgccggctaccctgcgtggatggcgcagcagcagctgtgctgcgacggcctcgtcgccggcgacgcgtcgccggctagccgggagcggtgggtgccgcagatgtacgcggatcagcttgccgccggcagcaagagatccaggacgtccactgcttcttcctactcctactggtga

SEQ ID NO: 15777 - DNA, 531 bp, Oryza sativa
  unsure (1)..(531): unsure at all n locations
  Clone ID: TFbOSC412318j.C1.o1.fg
atgggtgcaggaggttggtcggctagatctatncgatgggtagggcagggcagaaggaggagcagggtaccggggtcaaaggggaggaggaggtggtggatggcggaggcggcgggttcgtcgtcgtcgtcgtcggcgtcggcggtggtggtggctgtggtgattgcggtggtggtggtggtgtgggttgtggtccgacggaaggtgaggcgcgccgcggcgcggagggaggaggtgctgcggctcacgcggctggcgcaggaggagtcggagatggcggaggtggagtgcgcgcgcgcctactactcggagctgttcccgagcgtcgtgcacgcgacggagatggtggatgaggcggcgtggggggcgccgccggccgtggttccggctcaggcggaggcagaggcggagatggaggcccgggcccagccgcagccgcagccgccggtgggtgccaagggggtctgcgcggtgtgcttccggccgacgacgttcaggtgcaagcagtgcaaggctgtcaagtactggtga

SEQ ID NO: 15778 - DNA, 532 bp, Oryza sativa
  Clone ID: TFbOSC18513j.C1.o1.fg
ttgtatgcagattatcatgaaatcttgccgggatactcactgccactattgctttagtgaagctccagcagatgtcgtagtctgcccttcatgtacaatacccatttactgttcaaacaggtgccaggagaaggctataggacaaatgtcttgtaatcaaaatactcatctagaatctaacaataatgtggtggatattgcaaaattgagtgtaacttctacaaagagcaagactccagactctaaacaaattgctgaacataggcatgaatgtggaggtgcctgttgggcagctgttttgccagctgatatagttttagctgggcggataatggcacagtacatagagaaacaattgctggtcggaaagagatctaccatctctggtccaaatctggatctcgttcaccactatgatcaagattcttctgctagcaaatttgagtcacatatatatgcaactgtcctgttcttatgcctccagagctattataaatcaggtgtctcgtgggcagaggattctttatcacag

SEQ ID NO: 15779 - DNA, 1140 bp, Oryza sativa
  Clone ID: TFbOSC410441j.C1.o2.fg
atggtggcgaagcgcggcgccggcgcttgtgccctctcctgggatgaggagggcgaggtgtcccgcggcgagaagaggaggagggcggatggggatggctcgtcggacgttggcggcggcggcggcataggggcgttcgacgcgctgcacgacgagctggtcgtgtccatcctcgccgacgtggccgcctccgccggctcgccggctgacctcgccgccgccatgctcacgtgcaggagattcagggagctggggaagcacgggctggtgctcgcccgggcctcgccgtcggccgtcgccgtgcgcgccgcggcatggtgcgacgacgcgcaccgcttcctcgtccgttgcgcggaagccggaaacgtcgaagcctcctaccttctcggcatgatcatgttctactgcttcgagaatcgcaagctgggggcggagctgctcggcgcggcggcgcggcgcgggcacggcgaggcgctctactcgatggcgatcatccagttcaacggcagcggcctccccaaggacgggcgcaacctccaggctggtgcccagctgtgcgcgcgcgccgcgtcgcgcggccacaccgacgcgctccgcgagctcggccactgcgtctcggacggctacggcgtccgccgctccctctccggcgggcggcgcctcctcatccaggccaacttccgcgagctgtgcgccgcggtggcgaacggcggggccaggttcgccgcggcgctggggcgcagcggcgagtgcaagccgccgggcccgcacatgtgcctcctgagcgactacgggtgccacgtcgccggcgcggcggggcggcgcgcgcacgcggcgaacgcgttcctggccgggtggtacgcgtcgcggccgctggcgtccggcgccggcgccgcggcgctccggatgtgctcgcagcccacctgcgggcggccggagacgcggaagcacgagttccggcggtgctccgtgtgcagcggggtgatctactgctcccgcgcgtgccaggcgatgcactggaaggtggcgcacaagagcgcgtgcgtgccgatggcgcactggctcgtcgccgccaacgccggcgccggcaatgcggtcggggccgcggcggcggcggcggcgcagatggcgatgccgtga

SEQ ID NO: 15780 - DNA, 1260 bp, Oryza sativa
  Clone ID: TFbOSC400421j.C1.o12.fg
atggagtccaacgccgagaagcttcgtggtctcaccatcacctcgctggatgaggaagacgacgagcccgaactgccccaccgatccccacccgccagcggcggcggcggaggcggcggcgcgggctacgaggacgacgatgaggaggaggaggaagaggcggaggtgacgcttggttttctggagaagccgaagcacccgggcctcctcctccgccacctgttccctagcaaggccggaggcatcccggcgtggttggatcctgtgaacttgccatcggggaactcgcgttgctgcggcttctgcggcgagcccctgcagttcgtcctccagatatatgcaccgattgaggacaatgcggcatcatttcaccgcactttgttcatgttcatgtgcccgtcaatggcatgcttactccgagaccagcacgaccagtggaaacatagacaaggcaatccgtgtagaagcgtgaaggttttccggtgccagcttccccgtagtaatgccttctactcaagtgaaccaccaaagcacaatgattctgacaagccactatgtccaggagctcctgtctgccattggtgcggtacatggaaaggtgataaactctgtagtagctgcaagaaagcacgctactgctctgagaagcatcagacactgcactggcgctctggccataagagtgattgcctacagttaatcagttcttctgaagcttcaagctctatttttcctgctgtaggaaaagttcctgctagcaaatcttggccagaatatgagattgcaatcgactatgagggtgctttcaattctgacagttgtgatgagagtaactcaaagtccttggtgatgcaaagacctggtaaaccagatgatatgatgcagtcatggatggatcaatttgaggctgatgctgacaacaaatgctgggcgtcttttcaagagcgggtctcaagagcaccaaagcaagtattgagatactgtcgagaagagaatgccaaacctctatgggcgttatcggctggttgtccatcaaatgccgatatcccatcatgtagctactgtagaggtccactatgctatgaatttcagataatgccacagctgctttattactttggtgtgaaaaatgagccagactctcttgattgggcaacaattgttgtgtacacatgtaaaggatcatgcgatcaaaatgtcagctacaaggaggaatttgcatgggttcagttataccctacaacaaccacaaggtcatga

SEQ ID NO: 15781 - DNA, 1205 bp, Oryza sativa
  Clone ID: TFbOSC7547j.C1.o3.fg
gaagacgacgagcccgaactgccccaccgatccccacccgcagcggcggaggcggaggcggcggcgcgggctacgaggacgacgatgaggaggaggaggaagagccggaggtgacgcttggttttctggagaagccgaagcacccgggcctcctcctccgccacctgttccctagcaaggccggaggcatcccggcgtggttggatcctgtgaacttgccatcggggaactcgcgttgctgcggcttttgcggcgagcccctgcagttcgtcctccagatatatgcaccgattgaggacaatgcggcatcatttcaccgcactttgttcatgttcatgtgcccgtcaatggcatgcttactccgagaccagcacgaccagtggaaacatagacaaggcaatccgtgtagaagcgtgaaggttttccggtgccagcttccccgtagtaatgccttctactcaagtgaaccaccaaagcacaatgattctgacaagccactatgtccaggagctcctgtctgccattggtgcggtacatggaaaggtgataaactctgtagtagctgcaagaaagcacgctactgctctgagaagcatcagacactgcactggcgctctggccataagagtgattgcctacagttaatcagttcttctgaagcttcaagctctatttttcctgctgtaggaaaagttcctgctagcaaatcttggccagaatatgagattgcaatcgactatgagggtgctttcaattctgacagttgtgatgagagtaactcaaagtccttggtgatgcaaagacctggtaaaccagatgatatgatgcagtcatggatggatcaatttgaggctgatgctgacaacaaatgctgggcgtcttttcaagagcgggtctcaagagcaccaaagcaagtattgagatactgtcgagaagagaatgccaaacctctatgggcgttatcggctggttgtccatcaaatgccgatatcccatcatgtagctactgtagaggtccactatgctatgaatttcagataatgccacagctgctttattactttggtgtgaaaaatgagccagactctcttgattgggcaacaattgttgtgtacacatgtaaaggatcatgcgatcaaaatgtcagctacaaggaggaatttgcatgggttcagttataccctacaacaaccacaaggtcatga

SEQ ID NO: 15782 - DNA, 535 bp, Oryza sativa
  Clone ID: TFbOSC400080j.C1.o23.gp
cagacttgctttaccttttttacctcagtgttcgttcgctcgtttcaaggtcccatgtacagaagagtagaagaccacccgggtgaaaaaaaagaacgcacagtaattttcctcttttttttttaaccgtctaaagtaaaagtactaattaaacagtcactaataactatccgttcgtttccaacttgcgagttcacgcctagttcgccaaccgttcgtccggtgcatttactgctgcgcctgcgtgcgcgtgtcgcggcgaggcggtcatggggcgggcgcggccatggcggcggcattggggttggcggcgccggcggcggcgttgtcgagccaccggtccatgggcgtgcactccgccttgtgcgccgtcttccagtgcagcgcctggcacgcccgggagcagtagttcaccacgccgcacaccgagcagcgccggaactcgtggcgccgcgtctccggccgcccgcacagcgcgtgcgagcacaggcgcagcccggccgcctcgtcctccgcggcgctccctggcgttggc

SEQ ID NO: 15783 - DNA, 962 bp, Oryza sativa
  Clone ID: TFbOSC419993j.C1.o16.fg
atggcgtcgtgggaggagcagctgcgggacgagctcgccggccgagacctcgccgtcgcctccgtccccgggaagggccgcggcctcttcgccgcacgcagcttcttcccaggagaagtcgttatttcgcaagagccttacgcttctacaccaaacaagatttctgtgggctccaactgcgacaattgtttcgcctccagaaacctgaggaagtgctccgtttgtcgagttgcttggtactgtgggagtgcgtgtcagagagaagaatggaagcttcatcaacttgaatgtcgagcaatcgccgcgcttacagaggatagaaagaagatgcttactcccacaattcgtttgatggtgcggcttgtacttagaagaaaactgcaggatgacaagatggccaatcttgtccaactgattcttccttcattcgagcttgatcttaaggaaattacacataccttttccaagtttgcctgcaacgctcataccatatgtgatcctgaactgaggccccttgggactggactataccctgttttatctattattaaccacagttgtgtaccaaatgcagttttgatatttgaaggtcggacagcatatgttcgtgcattgcaacctataagtaaaaatgaggaggattctgaggaagatgcgctccttgagggatacagatgcaatgaccaaaagtgtgatggatttcttctgcctaatgcagtagataacagtgaggtaggttctatgtacaagaccattgaagagctagagcggaagctttaccatcctttgtcaatcactttgcttcacacacgggaaacactcttgaagatatatatggagttacaagattggcagactgcattgatgtattgcagattgacaattccagtttatgaaagaatttacccaccttttcacccaatgattggattacagttctatacttgcggaaagcttgaatg

SEQ ID NO: 15784 - DNA, 801 bp, Oryza sativa
  Clone ID: TFbOSC400648j.C1.o12.fg
atgaaaaaattccccactctagggaacgccgagactgagaacgccccctttcctttccccctcctctcgttggaggcggccggggaagctggtgggcatatggagtgcgcggcgaaggggctggtggcggagccgtgtgccggcgaggcccgccggcgctgcggcggttgcggcgccgtcgcctactgctcgcgcgcccaccagactgtgcattggggatttcataaagaagaatgcgcaaggctcgcagagcagatgagccgcatcgatatgctgaaacaatttccattcacgttctctgtggaatctcctgctccgaatcatacattccctagtctaagatgtttccttttggaatcattcaaacttcaccaaaaaggactctggaaatcagaatgcatatgtgatccagaggttacttcagtcaaggacttaagcaaaacaactgactggagtatgggaagcgccctctgcccatgcacagagcctgaacataatgtatccacacccctgacaagctggaaagactactataggtggagatcgcttcctttgcaatcacctgttgctgttttacttcactgggattcaaagcctcatctcattgttgccccaaatgctggtatagctgcatatcctagttggattccaactattgaaataattaggaaagttgggattcctgcaattttcacggacttctgtgaagaagctgcacatctagcttcgtcctgcattacctccataactggtcaacccctcagagtcccaattcagaattgcaagtttgtatcaccatga

SEQ ID NO: 15785 - DNA, 2937 bp, Oryza sativa
  Clone ID: TFbOSC401717j.C1.o3.fg
atggcggaggcggcgggttcgtcgtcgtcgtcgtcggcgtcggcggtggtggtggctgtggtgattgcggtggtggtggtggtgtgggttgtggtgcggcggaaggtgaggcgcgccgcggcgcggagggaggaggtgctgcggctcacgcggctggcgcaggaggagtcggagatggcggaggtggagtgcgcgcgcgcctactactcggagctgttcccgagcgtcgtgcacgcgacggagatggtggatgaggcggcgtggggggcgccgccggccgtggttccggctcaggcggaggcagaggcggagatggaggcccgggcccagccgcagccgcagccgccggtgggtgccaagggggtctgcgcggtgtgcttccggccgacgacgttcaggtgcaagcagtgcaaggctgtcaagtactgttccttcaaatgccagatagcccactggagacagggtcataaaaatgaatgccgcccaccaagcactgatgctaatcatgatgatgtggctgaactttctgttgcaaaggaaaggaaaattgagcagacaagtgcttctgaagaaaacatagctgaaaccaacacggcagccaccgtgaagaatttaaatgataaaacaaaagatatgccctcagaagtacttgcttcggtggaggttcctgatgatgaccattctgtcagtgcggtcaaactccctcaaagttcttcacaagtagcttctcttggcagtagaaagacagaatcaaatatgaaacctacaactcctgttgaaaatggttcttacacaaaggacttagatgaggcgttggtgtgtagatttcaaccttctccaccaaagattagtggctctggaagtcttatcaacaaagagtccttaattgattccaagaagcaccaggattgctctcaaactagtaacagcaaaaaatatgcagataacaacaatgctcaagctgctctacctgttgcagtagaacctaaaacttccaggactgctcttcatgtggaagttggacactccaagacaaaagctgctggctcagacaacattggtgtgtcaaaaatggtgccatctgttttgactgttgataaagtttctcctgttcccggtggacgttctgttacacctaattcatcaaaaagggctgataatattgctgaaaggaattctaaaccatcagagaaatcaatttcaacagcaaatagcctggcaacatctctgaaaaaaattgtcaggcagcaaacagcaccaaaagttgtgaggcattatccatcagagccaacacattttccatatgagcttttcattaagctctatgaaaaggttgaattgcaaccgtttggtcttcataaccttggcaatagttgctatgcaaatgctgttcttcagtgcttaatgtttacccgaccacttacatcatatcttttgggagggcttcattcaaaaaattgttccaaaaaggaatggtgcttcatgtgtgaatttgaaaaactcgttggggagggcagacaaggcaagattgctttgtcaccaactgggatactctctcatttgcctgacattggaagtagctttggtcctggtaaacaagaagatgctcatgaattccttaggtacgccattgatgctatgcaatctgtatgcatgaaggaagccaggaaaagcggcactcatcggttacacgaagaaacaacacttatgcaattaatatttgggggctatctgcgatctaagataagatgcacaagatgtgatgctacttccgagcaacatgagcgtattttggatcttactgttgaaatagatggcgacatcagttcactggaaggagcacttgagcgatttacatctacagaagtcttggatggagataataaatataaatgcagcagatgcaaatcgcatgagcgcgctaaaaagaagctgacaatatcggaagcaccaaatgtcctgactattgcgctgaaaagatatcagtctggaaagtttggaaagatcaacaaagccatcagatttccagagaccttgaacttgcagcgctatatgagcccaaaagctgatgacacttcccctgtttacagcctgtatgcagtggttgtccatcatgatattatgaatgccgccttttctggtcattatgtatgctatgtgaaggacacgcatgggaagtggtacaaaacagatgacagtcaggtcaaacctgtatctctggaaaatgtcatgtcgaagtgcgcatacatgctgctctatgcaaggtgttcaccaagagctccaagctctgtaaggccagcgctgatggctcaagatccagcacgtgtaaagaaggacaaggcaagggtaaattcaggacggtggcatggaggaggtcccatacaccaaggtggtcagatgtacgcagatcacatgacagatgatttgccccatacatatgacgagtttggacatggaccatattcgccagcagaatctcctagtccaagtgagagttcatcaattttcaccagttccgacacagggtcacatagcaccgacagcagtgaaagcactagaaactctaccagtgaggatatggaacgcctcatatttggtgatcaagtttcatactttgatggctctatgttcggacatggggaaaacggccgtatgacttattcccgatcaaagtctagcttgggtaccagttcatcgggtcaagaggtggatcagtataggcctgacgagcacaggcttcagggtgccagggagggttggaatcagggcgatgaaagttcttccttgtatactaaccaaagtaaacatcaatttagtagtaagttaacagaacaatataggaggaggttagatgggactgagcatgatcctggagaagccaatagtgttttattgaggagatcggctagggaaaggacggcccaaacattttattga

SEQ ID NO: 15786 - DNA, 1131 bp, Oryza sativa
  Clone ID: TFbOSC400036j.C1.o67.fg
atggaacctgacactgacaagcttcagagccttcagatcaaccccaataaggaaacaaaccttgtcgctgtattcaagaatgactacgtagatgacgaggatgatgaggacatggatcctcaagtaaccttagggttcatagaggagccagagggaccagaggactggcatcttcttctccctcaacacttccccaataaagctggcggtgttccggcctggcttgatcctgttaatttgccatctggcaagtccaggtgctgtgacttctgtggcgaaccactacgttttgttctccaggttgtctttcatttatatgacaaactgcaggtttatgcaccaattcagtgcaaggagacagcctatcaccgcacattatttgtgttcatgtgcccatccatggcatgcttactactagatcagcatgagcaggggaaggatagggcaggggaaaaagtttgtagtcgttgtaggaaatccagttactgttcaaagaagcatcaggaattgcattggcgtgcaaagcacaagaatgagtgccatcaaatatctggctcacataatgcttctgctattatgccagatgcaggaaaagtatttgctggcaatatatggcctgaatacatggtggttgatgaaaccgaaaaggtttcttgttttgctagttgtgagaatagatcagaattgttgatggaacaaggccaaagtgaagaggatgacatgacggcatcattgatggatcagtttgaggttgatgatgacaatagatgctgggcatcttttctagaacgcatctcaagagaacaggatcaagttttgagatactgcagggaatcaactgcaaaaccactttgggtagtatattctgggtctctaaccaatgcagctaagccatcttgtatatactgtaatggtccactttgctatgaatttcagataatgccacaactgctccattacttccatgttgaaaatgaaccagactcacttgattgggcaacaataattgtttacacatgtaaagggtcctgtgatcaaaatgtcagctacatggaagaatttgtttgggttcagttatctccagcaacaactagaaccaaccaaagtacttgcccccctgctggcttgtaa

SEQ ID NO: 15787 - DNA, 2652 bp, Oryza sativa
  Clone ID: TFbOSC402150j.C1.o11.fg
atggcgactccagacgttatattgccaggaccttctttaagacccatgccttatatgagatctgcaccttctgcaagacccgaataccatgagtgtgctacttgccacgggcctgctaagactcgctgctccagatgcaagtctgttagatactgctctggaaagtgtcaaataattcactggaggcaaggtcataagcaaacatgtcagcaatggaatggttttggtactagcagctctggtggactacctcctactgagaatactgaacagatgccattcttaagtaacctgaactcacctcttcgagggagcgatgttcatctgcatgacatggatttcgataccatgtcagagccatcctttgtgacaacagatagctataatcttgataccagcccatttctgtcagaccgaagcaacatgaataaaccaaaccaatttctacatacaagtgaaaatggtgctgccattggatcttatgagaagaacgactatagtattgatggagaagtcccttcttctgagattctgtcaggaaataagggtttaaataacagttctggttcaggtgaaaactgcggaaaccgtgatgtaatttatcctctcaatagtgtggtacatcaacccaataattatgcccctgaaataagaaagcggcccaaagcaagcatcacggtttatgaatctgataaaggcgtgtatttaacttctgatatgatcagttctggtgaggggccatatgcttctgctgcagagtcactacaaagaagtaactcgtctggaaatgttaccggaaaaggaaacatgatacataagaaaccaccatacccatctggatctaccaaaacagctgtttcaacaaacagcagtttgcaaggatgcaatggcatctcaaaagcaggagcatcaaaggttgaagccctgaagaagccttcaaaatttctcaaaaccagtctggtgggtttgatcaatgataacaagaggagtaaggtactgttcccatatgaagatcttgttaagttttttcagtatgaagtacggggcatctcacctagaggtcttttcaattgtggaaatagttgctatgcaaatgctgttctacaatgtctcatgtgcacaaaacccctgatgatctatctgcttctgagactgcattccaaagactgtaataccaaaactcaagcccccaccctccttggtgtagttgtgaaatctctcaccatctctgatttctttgacattgattgctttattcttttaggttgctcaaagaattggtgcctcatgtgtgaacttgagcaatatgcttcaactttgcgtgaaagtggtggccctgtttctccaagtagaatcctttctaatctgaggaatattggatgtcgcttgggtggtggaagtcaagaagatgctcatgaatttttaaggcatcttgtgatgtctatgcaaggggcatgcctggatggacttggtggtgagaagcaggtagaagcaagcttgcaggaaactacactgatacagcagatgtttggtggccgtcttaaatcgaaggttaagtgcctcagatgctaccatgaatctgaaagatacgagaatataatggatcttactttggagattcatggttgggtcgagtccttgcaagatgctttgacacaattcactgctcctgaagatttggatggagaaaatatgtataaatgtggaaggtgttctgcctatgtcaaagctaggaaacaattaagcgtgcatgaggtgccaaatatattaactgtagttcttaaaagattccagacagggaaatatgggaagatcaacaaatgtgttacttttcctgatatgttggacatggttccgtttgtgactggagctggtgataatcctcctctttacttcttgtatgccgtggttgtacacgtggatacagaaaatgcatcattctctggacattacatatcatatgtcaaagatatgcagggcacatggttgagaattgatgattcagaggtccaggctgtttcactgaatcaagttatgtcagaaggtgcatatatgctgttctacatgagatcttttcctcgcccaccgaagatttacattgagaagggcctatcatcagttcctacatgttcaaagcgccattcatcaaaatcctccaagggttctaagcaagacctgaatcatactgagtcactctttgcttccagtgatcaaacctatggaatatacgatttcagaccagacaacggctatatacaagatcagcatgctgctttgagaaccagaaatttctatcataccgatgatgcttttgcagattcaattagcacagacttctcagatgctacatcaagcgaatggtcactgtttaccagctctgatgaatcctcatttacgactgaaagcactagagattcattcagtgttgtggactatggtgacaatgctggccttgatccaatttcctctatatttgggccttattatgctcaagaccatcctcctggcagttttgcctcgtgtacaaggttgtcaccttccaatccacaaacaagatttctaacccacggaactctgaaaggagggattccagcactagaacttcaggggaatatctgcaattctcctaaaatttcagcaaaagcagaatga

SEQ ID NO: 15788 - DNA, 1274 bp, Oryza sativa
  Clone ID: TFbOSC400964j.C1.o156.gm
gcggcaaccactctcccaacgccaacaccaacgccaccgccaacgccaacgccgccccgcatcatctatcaaccgccggccgaggtggagcgggagcttggactgagatgaggacgaggagtggatctctctaccgcagcggcggcggcggcggggagacggccatggttgggcagaagaggaagaggtcgtcgttgccgccgcagtacgccaccgccggtgactgctgcggcggaggaggccgccggaagaggctggccggtggtggcccggattacctcgacgagctccccgacgacctcgtcctcgccgtgctctccaagctcgccgcctccgcctcctccccttccgacctcctctccgttcacctcacgtgcaagaggctgaatgggctggggcgccatgacatggtcttcgcaaaggcctcgccggcgtcgctcgccgtcaaggcggcgtcgtggtcggagcccgtgcagcgattcctcaagctctgcgccgacgccggcaacctcgaggcctgctacattctcggcatgattcggttctactgtcttggcaaccggagcggcggcgcggcgctgctggcgagggcggcggtcggcgggcacgcggcggcgctctactcgctggcggttatccagttcaacgggagcggcggcgccaagtcggaccgcgacctccgcgccggggcggcgctgtgcgcgcgcgccgccgcgctggggcacgtcgacgcgctccgcgagctcgggcactgcctccaggacggctacggcgtgcgccgcgaccccgccgagggccgccgcttcctcgtcgccgccaacgcgcgggagctcacgctcgcgctcgccgccgcggcgtcgcaccgccccttcgccgccctccccctcgccggcggcgccgccgccggcgccatcggctgcccgctcctctccgacttcgggtggagcctcccggaggcggagccccacccggccaacctcttcatggccgactggtgggcgtcccgcggcgtgcaggcgacggccaagaaacccggcctcgaggctcccgctgccgccaccggcgacagcgacggcggcggcgagctccgcctctgctcccacgtgcggtgcggccggagggagacccgccgccacgagttccggcggtgctccgtctgcggcgcggccaactactgctcccgcgcgtgccaggcgctggactggaagcgcgcgcacaaggcgcagtgcgtgcccatggaccggtggctcctcgccgccggcgaggcccagtga

SEQ ID NO: 15789 - DNA, 564 bp, Oryza sativa
  Clone ID: TFbOSC400964j.C1.o176.gp
aaaccccctgtgtcttttaaaggggttggaattataattataattataatttaatttaatttagagtttagtttactcggaatgagaaaaaaaaaaggaataatgcgagtaaaaagcatccgtagcatctctaccctcttcttccctagtggaatacgtacatctgacaagacgacatcgatggaaacggtaaaaaagaaaaaaaaagaaaaaaaaagcttcctcaattttttctctctgccacttgccttggctacacccggtccagcgttaaaccggtggaccgattggtctaagggagtagttggcggcggcggcgagtcactgggcctcgccggcggcgaggagccaccggtccatgggcacgcactgcgccttgtgcgcgcgcttccagtccagcgcctggcacgcgcgggagcagtagttggccgcgccgcagacggagcaccgccggaactcgtggcggcgggtctccctccggccgcaccgcacgtgggagcagaggcggagctcgccgccgccgtcgctgtcgccggtggcggcagcgggagcctcgaggccggg

SEQ ID NO: 15790 - DNA, 2577 bp, Oryza sativa
  Clone ID: TFbOSC415384j.C1.o5.gm
cagcagcaacgtcgcccgcgccggaggaatcatgggggtggcggccagcgccgcggcccgccgcaggagaggccttccgctgcgccgcccccgccgccgccgcagcagcagcagcggcagcagcatgcggcgcccgctccgacccgtgccgccgcgcctgcgcctgcgcgtgtggcggcgacgaaggcggcggcggggggagatggggcggtgccgcagctggtgcaggagatccaggacaagctggcgaggggggcggtggagtgcatgatctgctacgacatggtgcggcggtcggcgccggtgtggtcctgcggcagctgcttctccatcttccacctcccctgcatccgcaagtgggcgcgctccccggcgtccgccgccgacgcgtccgacccggactcctcctggcgctgccccgggtgccagtccgtgcacgccgtccccgcgcgcgagctcgcctacacctgcttctgcgggcgccgccgcgagccacccaacgatctcttcctcacgccgcactcctgcggcgagccctgctccaagcccctcgagaaggctgaccctgccgtgaaggccgacgacgctgcagccaccaggtgcccccatgtgtgcgtcctgcagtgccacccagggccctgcccgccttgcaaagcgttcgcgccggaccggctgtgcccatgcggcaagcagaccattgtgcggcggtgtgcggaccggacaacgcctgtgacgtgcgggcagcggtgtgatcggctgctcccctgccggaggcaccgctgcgagaaggtctgccacactggaccatgcggggactgtaatgttctcatttctgcccggtgtttctgtgggaagaagacagagacattgctgtgtggagagatggaactgaaagggaatttatctgagaaggatggagtgttctcatgcagtgaggcctgcagccatatgctgtcgtgcggaaatcatgcctgccaagacatttgccacccagggccatgcggggagtgcgaacttatgccagggaaggtcacagcatgccattgtgggaagacaaggctgctggagaagagagcaagctgcttggacccgatcccaacctgtgacaaggtgtgcgacaagaagctgccttgtggtgtgcataggtgcaaggtcacatgccatgagggagactgcccaccttgtgtggttcgtgtggaacagaggtgccgctgtggttcatcaggccagatggtggagtgctacaaggtcttggaggaagaattccgttgcaacaagccttatgcaaccaaccttgtggaaagaaccggcaatgtggaatgcacgcttgcaacaggtcttgccatccttccccttgtgatccaccacctgcaaatggagatgctagctcaagtactggtggtagagcttcatgtggacagtgctgggggaaccgccaatggcgataatatgtttgaagtatccatcatacagaagctgccaatgccactccagccggtggaatctgatgggaggagggtaccacttgggcagaggaagctctcttgtgatgaggactgtgccaagatggagaggaagagggtccttgctgaagcatttgacatcactccacccaatttggatgcattgcattttggtgagaactcaaatgcatcggatttgctttctgaccttttccgccgtgagccaaaatgggtgatggccatagaggagaggtgcaagttccttgtacttgggaagacaagaggcaattcttcaggcaacctcaaggtccatgtcttctgtcacatgacaaaggataagagagatgctatcagggtcattgccgacaggtggaagctttctgttcaggctgctggttgggaacccaaacgtttcattactatccatcccacaccgaagtcaaaggcgcctgctcgcatcctgggttccaagccaggtgtatttgttgctgcttcccatcctttctttgatcccttggtggacatggacccaaggcttgttgttgcaatgctggacctgccccgggatgctgatgttagcgctctggttttaaggtttggcggggagtgtgaattggtttggctgaatgacaagaatgctgtggctgtcttcaatgatccagctagagcagcgacagctctgaggcggctggattatggttctgcttaccagggtgctgctgtgtttttgccaagcagcagcgctcagccaggcaatgtctgggttgcagggcagaaagatggagtggcggctaccaagagcagtgccaatccatggaagaaggccactgcctctgagcctgatccatcctcaggagactggacaggtgtgcttggtcaagctccaggatcagtatggaggcgtggcggtgacactgtcgcccaagtcatggggacatcgaaccgctggaacgccctggagtccgatgcggccacaagctccaggccagtcgaggagagtaagcctgctcctcgcaccgatgctgtatccagcgcagggccaagtactgcgccaccggttagtaagatgcagcctgaagtcgaagtggatgattgggaagaagcttgtgaatga

SEQ ID NO: 15791 - DNA, 2484 bp, Oryza sativa
  Clone ID: TFbOSC401685j.C1.o89.fg
atgccattctcctacgccgccgcggcctctggctccgcgtcctcttctcgcaagccggttcccgtcgccgcggccgccgcccgccgacccgcgccctcgccggcagcggcggcggcacccgcgccctcgccgtcaaaccctagcgcggtctccgattccgacccctcctcgtactcctcctccggggaggagaccgacctcaccgcctccgatccggcggccgcctccgtcatctcctcctacctctccgttgcgggggatggcgccgacctctccaaggtcgggatcttcctcagctccgcggcgcgccgccgatcgccgccgtgcctgatatgcttcgatcccatccgcccctccgaccccgtctggtcctgctccgcctcctgcttcgccctcctccacctccactgcatccagtcatgggcacatcagtcatcctctgccgcgccttctcccacctggggttgccccaaatgccgcttcccctatcccaaatcccagactcccacctcctacctctgcttctgctccaagacggtagacccagctccggacccctggatcctcccccactcctgcggcgacgtctgtggccgacgtctcaatgcagaccgtgactctggctgtgagcacaactgcctcctgctttgccaccctgggccatgtccaccgtgcccggcaattgttccaaatgctatgtgcttttgcggctcacatcgtgagacgcgtcgatgctcacatcagcgttattcttgctcggggaaatgcaataaacgcctcggctgtggaatccaccggtgtcctgtggattgccatgatgggccttgcccgccttgtgcggtgcgaggaaagcacaaatgtgagtgtggagaaacaatggaggagaggctatgctctgaaagggtgttccagtgcaagagggagtgtggtgggatgttgcagtgtgggaagcatagttgtgagaggggttgccatgctggaaagtgtggaggatgcccactccaagggcgacgaacttgcccatgtgggaagaaagattatccaagtttggactgtgatgcagaggctgccacatgtggatcaacttgcgagaaggtgcttgggtgcgggcggcacaaatgcccagagcggtgtcatcgtggttcatgcgttgagacatgtcggcttgtgatcacaaaatcgtgccgctgtgggggtctcaagaaggaggtgccttgctaccaagaattgacatgcgaaaggaagtgtcagcgtttgcgaaactgtggccgccatgcttgtagacgacgttgctgcgagggtgattgtgcaccctgcccagaggtttgtgacaagaggctcagatgtggcaaccataaatgcctatctccatgccacaggtgtcatggccccattgctcctccaaatcctgagttcacactgaaaccaataaaaaggaaaaagggaaagcatatagactctacacctggaacaccatgcccgccatgccaagaagttgttttggtgccatgctttggacatcatcttggccaagaacgtgcaatactttgctccaaaaggaggcagtttccatgtcagaatttatgtggtaaccctctcaactgtggcaatcattattgtacgaaggcttgccatgtgttacagattccattgagtcagcctgaaggagatcaatcggctatactgtctcttgctagtgcaagtgcattcgctgagccttgcgaagaatgtaacctgccttgtcaaagggtcagggagcctccatgttcacatccctgccctttgccatgccatcttaacgattgtccaccttgcaaagcccttgttaaaagaccatgtcattgtggtgctatggtacacgcttttgagtgcatgtattataacaacttaaatgctacaaaacagcagaaagtaaggtcctgtggtggcccatgtcatagaaaattaccgaattgtccccatctgtgctcagaaatatgtcaccctggtcagtgcccatcagttgatcagtgcatgaaaaaggtcaatgtccgttgtgcatgcaacaaccttaaaaaagagtggatatgtcaagatgttctgaaggaataccgtcagtctggtcgtgacccaaaacaaatacctaaaaatcaatatgcagttggcctacttgcctgtggtgaagattgtgttaaaaaggttaaagctgcagattctgagttgcatctccggaaaattcaggagatcaagacccctgctgtggaagttgaaaatgtgcccaagcgcaggaagaggcgtaaccgtggccaagaaagtgttgaaagctcaaaattccaggaaatcaaagctgttgcgttgaaatttctcctggttatttttctgtgcataatcgttgtagctggattgtaccttttgtggaaaggtgtttaccggctttctgattggatgaatgacatggaggagcagagggccaggcagaggcatttgaagcctggaagattgtaa

SEQ ID NO: 15792 - DNA, 2547 bp, Oryza sativa
  Clone ID: TFbOSC101038j.C1.o1.fg
atggcgctgtccgcgtcggcggcggcgtcggccgggcggggggcgcgggcggagaaggtggggaggatcttcgagcggttcgatgccaacggggacggggggctggaccgcgacgagatggcggcgctcgtcgtcgccgtcaacccgcgggtgaagttcagcgaggaccagatctccgccatcctcgacgaggtgttccgcacctacgccgagttcatactccccggggggcggggcctctccctgccggggctgctacgcacctacgacgacggcgccggggacgtcgaccgcgacttcctcgcgctgtcccttcccccgctcgagtccggggagtcctccccggagatcgccgcgggggacccggccgccgcctcgtccccgccctccggcgccgccgccgccgcgtcgctcctggacgaccacatcaagccgcttggagcagccggtggggcgccctcgtccagctcacgcgccgcggcggccgcgccggcgtgggcgacgtcgcccagccacgggattgcgttcgactcctcctgggcgctcctcgacgacctggagatactagtgaagcgcctccgctccaagcagctgcggagaacatcctccatcgacacgatcaacggcagcggcggcgcggggaacaacaatttcgactccttctccgaggccgggtggtcaagggagatctccggccaagcggattcggcttcgaccgccgcgccatgggacgagacgagccgcgactacctcaccttcgtcaaggagctcgccgtgctccgcacgcgcgcggacgcctcccgctcacgggaggaggccttcgacaatcacatggtcatcggcagggcgctctccgagcaccgcctcttccgggacgcgcttagcagcttccgccgcgcctgcgagctgcagcccactgacgtgcgcccccacttccgcgcggggaactgcctctacgcccttggccgccactcggaggccaaggaagagtatctcctggcgcttgaggcagcggaggcaggtggctcccagtctgcggacatcctcccacagatccatgtcaaccttggcattgccatggaggctgaggggatggtgctcggtgcctgtgagcactaccgagaggctgccatactgtgtccttctcatgcccgggcgctgaagctcctcggtagcgcgctctttggtgttggtgagtaccgtgcagccgagaaggcactagaggaggccatcttcttgaagccagactatgctgatgcacactgtgatcttgggtcagccctgcatgcgatcggggatgatgaccgtgcggttcaggagtttcagaaggcaattgatctcaaacctgggcatgttgatgccttgtacaatcttggtggattgaatatggatgcagggcgctttgtgcgggctgcggagatgtatactcgtgtgttgagcatccgaccgaaccattggcgtgctcagctaaacaaggctgttgctttgcttggccagggggagtctgaggaggccaagaaggcactcaaggaggcatttaagatgacacaaagggtagaggtgtatgatgccatatctcatctgaagacactgcagaagaagaaaccaaagcctcccaaaggaaaagatgatagtcaaggagaggaggccttcgttgtagtggagccatccaagttcaagagggttggaagaaagactaccttgcggcaggaccttgctaatgcccttgatataagagcctttgagaaaacgacaaagcttggccgctgtgacgcggagcttctgaggaaagagatgaacgagactgatgtccccatatcctactcaggcgctggcaacccagagaagtcaatacggaaagcagctctcgaggttattctccacaggctcctatctttcctcaagccagatacctttcagggttctgtgaaggcgattaacgaaagaatcctctccgtccttgatgcctctggttctggccgtgttgaccttgggatgttctttgctattatcgccccaatttgttctggtcctgtggataagcgcaagcgggttgtctttgatgcacttctttggcgtccggcaagtgaaggaagcaggggtcagattaggaggagcgatgcactgtcctacatcaaacttcttcgtgctgtttatatacccacccatggggctagcgacatgcttgaaatgcatggggagtctgaccccactatggtatcatacacggagttcctcgaaatgttcaatgatcccgattggggatttggaatcctaagcacattggtgaagcttgaggacagcgatcacattcgtcacggccgccacacctgctcaatttgccgatatcctatcattggttcccgattcaaggagacaaagcactcctttagcttgtgcaatcgatgctacagtgaagggaaggttccatcagcattcaagttggatgagtacaggttcaaagaatatggtaacgagtctgaggctcttatcgataagtgcatgtgctttaatttacattctaagaagctcgaagctgatacttga

SEQ ID NO: 15793 - DNA, 2871 bp, Oryza sativa
  Clone ID: TFbOSC100588j.C1.o12.fg
atgctcccctccggcctcgcagtcgctccgcctcccataagcctccacgccgccgcctcccgcacgggccgacagcggtgcctcattgtacttgataatgtgtggactgtatcaacatggaatgttgttagacatgctttacaagaggattgctgtagtagaatagtagtaacaacagaaattaacgatgtggctcaggcatggagtttttacaagtctcaacataatgcatctcacgtgatcaagaagcatattttgaagatggaaccgcttaatgacgatttctcaagagatttacttgttagtagagtttttggtgataaagacaaatgtcctgaagaactcaatgaagtttcatatgagatagcacgaaaatgtggcggtttgccactagcaactatcgctgcagccagtcttttattgagtcggccagacaaaccagatgaatggatctatgtacagaagtcgttgattccagatttgaggatacaacctacttccgaaggaatggcacaactactgaacaatagcttcaacaatcttcctcatcatttgaaagcatgcatgctgtatctgagtatatataaagaggatcacataatcaatccggacgatctggttaagcaatgggtagctgaagattttgtaagtgcgacggaagggaaaagtttggatgaagctgcaaggaatcatttttatgagcttgtccataggggaatacttgaaactgaacatatcagctgtagtgatgaggttgtatcttgcacagtgcatgacatggttcttaactttatcaaacgcaaggcaatggaagagaattttgtcactgcaattgatcattctcagtctggtataagactagcagacaaagttcgacgactctctctccatttcggatattcaaaagatgcaaaggcaccagcatgtattagattgtcacaactacgatcacttgtgttttctggattttggaagtgcgggccttccatttcggagtttcatcttcttcgagttctattccttcatggtaaacatggcgaatttcttgacctcactagaattcgtgaactgtttctactgacttatttgcagattgaaggtaatgtttgcatagacttaccatcagagctccaaggactgaagtatctcaggactctgcatattggtgcaatggtgacctttttgagatcagaagttgttcatcttccgccgttgctgcacttcagacttccacccaatctagggtactttgttgacgcagggagtgtacagagtattgaagaactgaccaatttgcaggatcttcaactcgcatgtcctcagatagccacttctgaccatattaagcacaacatgaaactgttgggttcaattattgggatacttaagagcctcaaatctctaacagttgttcctgtctgcttctctgaagattctaatgataacgaaaattcaagcattgccattttcttggatttcttagataaagttccccccccttgtagccttctgcagaggcttgagttgtttccacgtgtttgcgtcttccatagacttcccagttggatcataactattgagaaactctgtattttgaaagtagcagtcatggaactcctgaggaaagacattgagactctctcaatgctgaatgccctcactgttttctcactgtatgtccggacaacccctgcagaacctatcatatttgacaagtcaggattccatgttttgaagtacttcaaattcaagtgtagtactgtatcaagtctgagatttgatgaaggagctatgcccaacctccaaaggttaaagatggaattcaatggtagcacagtggagcaatacaaccttgaaaatgtgggcttcaagcacttgtcaggtgtcaaggtcagcgcaaaaatttgcattgccggtactagtgaagctaacagaatggctatagcctctgtactgaacaatgccatcaggcaaaatacaagaatatcaagtgtaatcatacggttcatcaacagggttataaaagatcttccgattgtccccacccctcacacggatcatatgcatgaaaatctgaggctggataagagtgtcaggtcctggcctacccagtgcgatggctgcaaggagcttggtgccggccacaggttcaagtgcgagcaatgcaactccaaggtgtactatgatatgtgctgcgcaacagcgcctcacaccctgaaacaccctctgttcccaggctccgtttttcggttcctccgaaagcctctggcctctgaatgcggtagggcctgtgatgcatgtggtgacctcatgcacggcttcgtctaccactgctttgagcgtggcctcgacctccacccacgctgtgcgaggctgcctgttcgcactgcaaacgtaaagggctatgtcatggagcttcgcagggtgtcggcttgcagcagatgttgcatttgcatgtgtggcaaggagggttatcgcaacaagttttggtcctaccgctccagtcaggaaggccaggacattaacgtgcatatggcgtgtttaaaagacttggcatcaaaatcacatgaaaccctaactaaactgtatgagatcctaatgggtgaatcacagtggacgccaacagaggttttaggcgaagatacatccgaccaattagttgtcagcagtgcggaggatggtgatcgtacgccactgagacaagatgaaattacagaggagtttcagcacaaggatgaagtatgtaatgttctagagcatggacgggaggaactccggaagaaagaaaccgataccagagtaaagatcgccaagacaaactcaatgtggttctcttatcatacagttgacaatttgacatgtgcattttga

SEQ ID NO: 15794 - DNA, 2424 bp, Oryza sativa
  Clone ID: TFbOSC102172j.C1.o5.fg
atgctcccctccggcctcgcagtcgctccgcctcccataagcctccacgccgccgcctcccgcacgggccgacagcggtgcctcattgtacttgataatgtgtggactgtatcaacatggaatgttgttagacatgctttacaagaggattgctgtagtagaatagtagtaacaacagaaattaacgatgtggctcaggcatggagtttttacaagtctcaacataatgcatctcacgtgatcaagaagcatattttgaagatggaaccgcttaatgacgatttctcaagagatttacttgttagtagagtttttggtgataaagacaaatgtcctgaagaactcaatgaagtttcatatgagatagcacgaaaatgtggcggtttgccactagcaactatcgctgcagccagtcttttattgagtcggccagacaaaccagatgaatggatctatgtacagaagtcgttgattccagatttgaggatacaacctacttccgaaggaatggcacaactactgaacaatagcttcaacaatcttcctcatcatttgaaagcatgcatgctgtatctgagtatatataaagaggatcacataatcaatccggacgatctggttaagcaatgggtagctgaagattttattgaaggtaatgtttgcatagacttaccatcagagctccaaggactgaagtatctcaggactctgcatattggtgcaatggtgacctttttgagatcagaagttgttcatcttccgccgttgctgcacttcagacttccacccaatctagggtactttgttgacgcagggagtgtacagagtattgaagaactgaccaatttgcaggatcttcaactcgcatgtcctcagatagccacttctgaccatattaagcacaacatgaaactgttgggttcaattattgggatacttaagagcctcaaatctctaacagttgttcctgtctgcttctctgaagattctaatgataacgaaaattcaagcattgccattttcttggatttcttagataaagttccccccccttgtagccttctgcagaggcttgagttgtttccacgtgtttgcgtcttccatagacttcccagttggatcataactattgagaaactctgtattttgaaagtagcagtcatggaactcctgaggaaagacattgagactctctcaatgctgaatgccctcactgttttctcactgtatgtccggacaacccctgcagaacctatcatatttgacaagtcaggattccatgttttgaagtacttcaaattcaagtgtagtactgtatcaagtctgagatttgatgaaggagctatgcccaacctccaaaggttaaagatggaattcaatggtagcacagtggagcaatacaaccttgaaaatgtgggcttcaagcacttgtcaggtgtcaaggtcagcgcaaaaatttgcattgccggtactagtgaagctaacagaatggctatagcctctgtactgaacaatgccatcaggcaaaatacaagaatatcaagtgtaatcatacggttcatcaacagggttataaaagatcttccgattgtccccacccctcacacggatcatatgcatgaaaatctgaggctggataagagtgtcaggtcctggcctacccagtgcgatggctgcaaggagcttggtgccggccacaggttcaagtgcgagcaatgcaactccaaggtgtactatgatatgtgctgcgcaacagcgcctcacaccctgaaacaccctctgttcccaggctccgtttttcggttcctccgaaagcctctggcctctgaatgcggtagggcctgtgatgcatgtggtgacctcatgcacggcttcgtctaccactgctttgagcgtggcctcgacctccacccacgctgtgcgaggctgcctgttcgcactgcaaacgtaaagggctatgtcatggagcttcgcagggtgtcggcttgcagcagatgttgcatttgcatgtgtggcaaggagggttatcgcaacaagttttggtcctaccgctccagtcaggaaggccaggacattaacgtgcatatggcgtgtttaaaagacttggcatcaaaatcacatgaaaccctaactaaactgtatgagatcctaatgggtgaatcacagtggacgccaacagaggttttaggcgaagatacatccgaccaattagttgtcagcagtgcggaggatggtgatcgtacgccactgagacaagatgaaattacagaggagtttcagcacaaggatgaagtatgtaatgttctagagcatggacgggaggaactccggaagaaagaaaccgataccagagtaaagatcgccaagacaaactcaatgtggttctcttatcatacagttgacaatttgacatgtgcattttga

SEQ ID NO: 15795 - DNA, 1731 bp, Oryza sativa
  Clone ID: TFbOSC100588j.C1.o17.fg
atgttacgcacgccggatttgggtgatcctccggtggcggagatcactcacccgtttcaccctcacaagctgaggctggccgacaacgtcaccgacggtcactggcctttccggtgcggcggctgcaaggagctcgccgccggccgccgcaggtacaggtgcgagccctgcgacctcaccctctacacgtgctgcgccaccgcgccgctcaccctagagcacccgctgctcccgggccggcacttccgcctcctcgagcggcctccgccgccgccgccatggctcgccgccgacgaccgtggcggcggcggctggaggccggcgtgcgacgcgtgcggcgacctcctgcgcggcgacggcttcgcctaccactgcgccgatgggcacggcctcgtcggcctgaacctccacccgcgctgcgcgaggctgaggctgccagtggcggcagctcgcggcgccgccgccgtcaagctctgccgcagggcggctccccgccgacggtgcggcgtctgcatgtccggcgaggatgggtaccgtcacgggttctggacctgccgcttccgccgcagcggcggcgacgagctcgtcgacgtgcacctgtcgtgcttgaaggagttgatgtcacactcacacgagactctgactaatttgtatgagattctaatggaggacgggacgccgacaaatgattgtggtgaaggtgcatctgcacaagataatagcagttacagtggggaaagtaacggtgatgcggaggagttcgagaaccagaatggaacaaacaacggtatggtgccggagatgaagacgatcacccaccccagccacccggagcacaagcttagaatggtgaccaccaccggcgaagcgccgttcaagtgcgacgcctgcaaggagcccggagacgggccgaggtaccactgcctcacctgcgaggacctcaacatgcacaagttctgtgcccatgcgccgagcacgctctaccaccatctcttcggccgcacgttcgagcttctcgccaagccaccgcaaggacgaccggagaaaccgcaccccgccgccaccggtggtggcagaggcgaaagcggcggcaggtggtgcgacacctgcggcgaccatgtgttcggtctcgtctaccactgctcaggcgccaacctcgacctccacccatgctgtgcgagcctgcaggaactcccggtccaaaaccgggagacgttggaccaaccgaaagaaagtcttgctacgcctcaaaagctagttaaagagggactagccaagatcactatcgacggggtcgccttcgacatcgcggcgttcagcaagtgcagcctatgcagcagacaggaggaggagggcccggatcactgctgccgccgcctccgccgccaggagcaatggtgctactacaactccgacgtcgtcgacggcggcggcgaggccgtgtccctgcacgtgtcctgcatcaagcagatcgcacggaggagatggcaggcagctcgggacatgaaatgtggagggcagatcatgctggcgatcagcgaggagatgatcggtgaaggtggtcctctccatggcattccgtcggagcgagatcggaacatcgtcggcgcggtggtgcgcgtcatcatcgcggtgatatttggagataggacagccatggagggagacatcagctcttgggtagctttaggtctcccatggctgacaaatttatttaccgttcaaagataa

SEQ ID NO: 15796 - DNA, 258 bp, Oryza sativa
  Clone ID: TFbOSC100588j.C1.o21.gm
atggcctcgccggggcgccactgcttcgccgggccgcatcagcacgactgcgtggccgccgtctgccgcctccccctcgtgcgccgctgcgtgccgccttccctcccagcggacgggagggcgccgccgcccgccgtcgttttcatcgcagctgtcatcggcttcgcagagagggaggggaggagggggatcaagaggagagggaggacgacggcgaagaagatatggagagggtacgatgatagtgatctactgtag

SEQ ID NO: 15797 - DNA, 2538 bp, Oryza sativa
  Clone ID: TFbOSC101306j.C1.o1.fg
atgtccggccggagctcgccgatgtacgaggggctcgcgtcgcgtcccgacgagtgggacgtcgtcctcaaggtgaagtatggtgaaactcttaagaggttcggtgggtatgtgcaaggaccacaattcagcctgaacttatccgctctccggtccaagattgcatctgcttttaagtttggttcggatgtcgacttcattctgacttacactgatgaggatggggatattgtcatgctggatgatgatgatgatctgcatgatgctgctattcatcagaaactgaaccccctcaggattaatgttcagttaaacaacagccacactgcagcacctcaggccaaacagcaggattcagataatatacctctcaggtccaccaccactgaagacccactagctcatattaaatcagttatcgatgaggttttgaagccgatatctatgaagtccatccaggagccagttcctgagacacttgcgaagctgtcccatgaagtacttgaagccgcatcaccacaattagctgagctaataaaaccttttgttaaactggttacaccaagcaacaacaacccatctaatgggcatgctgatggttcctgcagctcctcaactggtttgccccaaacacaggttgatcccaaaactaatgacgagcccaaaatagacacaagtttggggtcgcaacccttggacacgcagaactccaaatcatctggtgctagaggtcttaagactctgtcagttgaggctcctgctacatcgggtgttaaatcttctcaaggtcaacaggcatcattatacccttccattgaggagttgctgttctccccctttttaccgaactcaggtgatgacaaatctgccagcaagggaattagtgatgctcaaagcaagggaaaatctgttatgacctctgctacaccacctacccctcctgctgctcctgctttccgtccagctcctccaattccatctctgaatgattggtctcagccaccagcacgtggatcgacattttacccatctatttggcagtctgaagctgatccaaaagccaatagtgattccagatggcgtgttccattgtgcagagctggccatccattccaaccccatgctcccctgagccgtccacccccaccaatgcctgcaccaatgagctatggaccttctccacattttccttaccctggccgcctcttgtcctctggccatctgcatggagaccttggtaataacattgagaactcaccagcacgcacattccatagatggattcagtgtgatggttgtggagtgcaaccaattgttgggcctcgatacaagtctaaaacaaaagaagattatgatttgtgtgatgcctgctttcatcgcatgggcaatgaggtcgagtacaccaggattgacaagccactcttaccccagagattactgagagaccctacattgtgtcgcaagatccattcacgggctgcgatgaagtcaaagcgggagaaacttgaaagtcgcttcattttggatgtaactgtcctggatggaacattgatggcaccttcaactccgtttactaagatttggcgtatgcataacaatgggtctatcatgtggcccttgggcacacagcttatatgggttggtggcgaccagtttgcactgcagacctatgttccattagagattccagtggacgggtttcctgttgatcaggagattgatgttgctgttgattttgtggcacctgcaaggcctgggaggtatatatcttactggaggttagcatcaccttctggccagaaatttggtcagcgtgtttgggttcacatccaggtggaggatccttcttttgtcagtaacaacaggactgccgctataaacttgaatttgcccccagaaagcaatatcacaaacacaagtaatttgattgatgtcaatattgagcctgtggatcaagtcttcaaccaacatgtcaatagcacaaacaaggagttacttgaacatttgatacaccaccagattgacgagcccaagaatcctgagcctgctccattacctgtgcccattgtttcttccacaacatctcttcaccccatcattgatgttgatgttccctccagttcaactgctgctgcttttgtgcctgtctttgatgagcctgcgcctgaacctgctgtgactcctgtgcctccaactgttaatgtgcctgctggtaatgcacctgcgtctgttggtgcatcatcatctgatcatcatggcattgacaatctcacagaagagaaactgctgaaggaacttgaggaaatgggttttaggcaggtcgatctgaacaaggagatactcaggcagaacaagtacaacctggagcagtctgtcgatgatctctgtggcgtcagcgaatgggaccctctcctggaggagttgcaggaaatgggctttgaggacactgagataaacaaggagatgctcgagaagaacggaggaagcatcaagcgggctgtgatggacctcatcgctagggagaagaaagaccagtga

SEQ ID NO: 15798 - DNA, 15102 bp, Oryza sativa
  Clone ID: TFbOSC900328j.C1.o15.fg
atgcgcaaaaacaatcaattaccagtttccacttctgatccatccattccatttggtttcgaaaataatatgaaatgtgaagtcagcactgtagttgagttgagtgtaccaccatcctttattgaggggcgttacacttttgttttagtggagcaagtggagtcaacggttgtggagattgtggagaggtctttggaattctgtctattgtatctcgaaaaatcatcatatgcatgtgaagactatgggttactgaacgaggttgcctatttcatggaatgcgtgctgcttagagggactcccagcaaggtttactcgttggaacccagtgtcgtaaatgatgttattgagcagtggtcgtctgtccaagttgattctgagcgtatcagcccacaagagaagtatttctgctatttaaaaggtttatggaatgttggtgctttatttgctgattgttttttgatggcacaaccaggcttcaattgctcaaatagtggagatgatctgcaacggtttcgtttgacgttatcacctgaatgtttacagcaagattatgttattgcagagaatactgaatcatcacacacagcatccccaaacggcatggtgtcaatagcacagcattttgcagttgttcacctacattgcataccagtccttcttacattggttcagaagctttgccagtctccagctttggatgtgatagaagataccaactttaatatgaggttgtcttttggccaaagaattttgaagttagtacatggtttggctatggaatttccttgtgatgcttctgatgcgatgatgctttgttcagtagcaagatgtactgatagtctgccagtcttgtttaaacttaagttcaagttcgctaaccatgacagagtgttttctggagatggtgttggaactgtgttgctgcaaatacttgacgaatttctgcagctaattcatattatcttctgcaacagtgatatttgttgtacagtacaagtatgcatacttgcttccctgttggaaattttcagcccagaaaaatggaaatatgacagatctgctgcttgcttgatgccccctttagtttactcaccccacattgttcaatatgtgcttaaacttctcaatgataccaaacgttggacaagtcgtgttgacagggacagacctggcaaagatgttctaggttattcatgcaattccgagacagatggtttgtcttgccatgctcgttcaaagaaagtgccattgctgaagaaatacacatctgaggagtatctgcaattaatcttcccttcagaagagcaatggttggatgatttggtacatctcatctttttcctccatgaagagggagtaaaatcaatgcctctacttgagaagccgcagatgagttgcacaaagcaagttactctttcagagttggagtctgtggctagtcatgaggaagaagcactttttggtaatctatttgctgaagcccgctctacaggagtagctgacagtgttgaacagccaatttctctagggagtggcccttcgagcagccagcatggccctattcaattagctgctgatttgatatgctttatgaagatgtccatcttctcccctgaatggtgcactgctatatatgtggatgcttgcaggaagttccacagcaatcatttggaacagtttctgtcaatacttcaatgtccagccttttgctctgatgaaagcattgctacaacatctctttctgaggttaactcattgcatatcaacacagcctgttttgaacttctacagatgttccttatttcccatgaatgcccggcatctttaagagaggatcttgtggataaagtgtttaatgctgagaatgggatgtatacttacaacaattatacgcttgctctagtggcacgtgctatcatctctggggcaagctcaatatataatcttggaagaaaagtttttgttcagtatgttggttatcttttggagaaagcaaatgataaatcatccagctcattagatttgaataatttctgcagaattcttccttgtgccttccatctagaaattcttttggtggcattccattcaaccactgggccagaaaaggctgatttgatcaatattgtactttcctccctagagaaaatgagacagcctccacttggagtaaatgcatctggactcacaagatgggctttactcctgtcaagactcctgcttgtcttgcggcatatgttgttgtatccggtaacacatccgtcatggttgcttatgaggttaagatccagaatgagggatattttgttgaaagaaggtcagtcacgctccatgaatgattacttgccatccttcacagctgaagttgtggagggcatttttgctgatactgtcaaggagtatgcttcaactagtagtttgttccctcaattgattgacgtgactccagctcatgctgaaatctactttgacaagtctgctctagaagctttgggtttgaacttcgctaatttgggctcaaacatttctgaaattcttggtgtttggaagggcaggaaagctgaagtggctgaggatctcattgcggagagatatttatttttgatttgctggagcactctctctggtataggttacagcggtggatatgaaggtctgttgaatcctgacttcgctgatgtaaactttttcatttcgtttgctctcagtgtaagtgatgatgcttcatcacttttggacgccaatctgccttctgtaatttttggattcctgaagttgttgcagtctgagattctctgtggtccaagtgttctagaaagttgggatttcctcaggaaaggagcatggctttctcttattctgtctctaattaatactggtttttgggggcaccaaacaagtgggaaacctgatgttgatttgcagggaaagcaggtggtccaagatgcagagatatttgggaagagtttgcttacattcataagtgaaaatagtggacattgtttacatgttttgtcatcactgttggagacttatcttcatgcttttaaggaagcatttatctcatttgttgttgagaaagggagggtttgtgaggatcattgttatccttcctggctgcttaaacattctgcatttgacaaatccaagcatcctcttctctttgagaaagttggttcaaacattggaatgctggagcctatatgtgacctttcatcaaggatagatcgagttgctacgaaattgggtgatgggcggaaagaatactttctcttgaagtgtttgttacatggatttccagtgaactctgcctccaataacagtgctatcctttcttgtgttctggtgataaatgagatcatttacatgctcaatggatgtataaagatcatgcagcccaatgacagagatctagttgatgtgggtgttatttctaaactacttagtatgataatgactataaagtcagatggaatgttcacatccattcacaagctgtgtgattctatatttatgtctctaattgaccagaaggatgatctggctggatatagcgacttgtttgttcttaagcagttagaagggtacctggcagacatcaactcgaaagaaatcatggataatgaggtgaaagaaattatagtttttaccattgttgatctagtggaagacctccgatctaaaacaaatgtgttcaaattctttcttggtgaagcagaaggagcacctgaaagagcaaacagtctttttgctcttgagcaggctgatatgtccgtttttattgatgtactggacaaatgccagtctgagcaggttaatttgaagattcttaacttgtttactgatattctaggtgatggtctttgtcccgatcttaagcagaaattgcaacacaaatttattggaatggacgtgtcctgcttttcttcttggctagaatttcgaacattgggtcattctatgaagattgaaagcaccaatagtactacatcaggtcctacagccctaagagaattgacaatggattttcttatgcgccttacctgcccttcatctgagacacttgccaaagagcttcagcatcacctctttgactcaatgcttttattacttgataaagcattcatgtcatgtgaccttcagattgttaaagcacatttccattttattgctcaactctcaactgatgaatcacatttcaaagagctctttgaaaaaacgctgaaactgatggagaacatggttggtaatgagggtttgcttcatactttgaagtttctgtttacttgcgtggagtcagtgtttggtgatgctggatcaaacagaagtgcacttaagaggctttcttctaaaagttctgggaacagttttggttcaggatctcttatcccaaagcaactgaagaattcagacagtcttgttcttcgcaccaatcaagaaagtaattccactgttgattgtgatgctagctccggcgaggaagatgaagatgatggaacatctgatggggaattggtcagtattgatagagatgaggaagaggatggaaacagtgaaagagctcttgcaaccaaagtgtgcacatttacatccagtggtagcaatttcatggaacagcattggtacttctgctatacatgtgatttgactgtttccaagggttgctgttctgtctgtgccaaggtgtgccatcaagggcatcgtgttgtttattctcggtcaagccgtttcttctgtgattgtggagctggtggtgtgaggggaagcagctgtcagtgcttgaaacctcggaaatttactggtacctctagtgtatctcctcctgtcacgagcagtttccagccaatattgccttatcatgaggatgtggagcctgttgcagacagtggttctgattttgaagatgacatctcaactgaagctgagaattgtatcaagctatctgtgccgaaaggcttcagtgatgagcttcctgtatttcttaaaaatcttgatgttgaagttcgaatgcttgaactctgcaagaagttgcttccaatgatacttagccaaagagagctgaatcttttgaaggacaggaaagtatttttaggaggtgaaatgcccatgtcacaagcttctgatatttttcaactgaagaaagctttcaaaagtggatcgctggacctgaagataaaagcagactatccaaattcaagggaacttaagtcgcatcttgcaaatgggtctcttactaaatccttgctaagtatcagcattcgaggtaagcttgctgttggagaaggggataaagtagctatatttgatgtgggacaaattattggacagcctactgcagctcctattacagcagacaaaacaaatgtgaagcctctctccaggaacatagttcgctttgaaattgttcatttgattttcaatccattggtggaacattacctatctgttgccgggtatgaggattgtcaagtactaacattaaatagccgtggtgaggtaactgatcggcttgcaattgaacttgctctgcaaggagcatatattcgttgcgtggagtgggttccaggttctcaggtacaactcatggtagtaacaaacaagtttgtgaagatatatgatctctcgcaggacaacattagcccgttgcattattttactgtggctgatgatataattgttgatgccacgcttgttccctcctcaatgggaaagttggtgcttcttgttctttctgaaggaggccttttgtataggttgaatgttgccttggcgggtgatgttggtgcgaaaacattgactgatacagtcttggtgaaagatgcagtatctatgcacaaaggtctctcattgtacttctcatcaacttacaggcttctatttgtgtctcatcaagatggcacaacttacatggggcgcttggatggcgattcctcgtcaattactgaattgtcctacatatgtgagaatgatcaagacggtaaatcgaaaccagcaggcctgtaccgttggagagagctaatagctggcagtggggcccttgcttgcctatcaaaatttaaatcaaactctcctcttgctgtatctttgggtcctcacgagttgtttgcacataacatgagacatgcaagtggttcaaatgctccagttgttggtattgctgcatataagcctttatccaaagataaagctcattgtcttcttttgtatgatgatggaagccttaacatttattcacatacacctaatggaagtgatagttcaacaacccttactgcagaacagacaaagaagttgggcagcagtatccttagtagtagagcttatgctggcaccaaaccagaatttccacttgatttttttgagaagacgacatgtatcacatgtgatgtgaaattcaatagtgacacaaccaaaagtagtgattctgaaagcatcaagcaaagattaagctcagatgatggttatttagaaagtttgacatccgctggtttcaaggtgactatttcaaacccaaaccctgatattgtcatggttggttgccgaatccatgtgggtaacacatctgcgagcaatatcccttcagaaatcacaatttttcatagagtcattaagctggatgaaggcatgagatcttggtatgatattccgttcactactgctgaatcacttctggctgacgaagaattcacaattgttgttggtcggacattcgatggttcatctattcctcggatagattctattgaagtgtatggtcgtgccaaagatgaatttggatggaaagaaaaaatggatgctgcacttgatatggaagcgcatgtcctaggtggtagttctgctagtggaaagtctggaaaaaaggctcaaacgatgcaagctgctcctatccaggagcaggttctggcagatgctctcaggatcctctcacggatatacctgctttgccaaccaggtttctgtacggacacaatcgatgcagacatggaacttaacaatctaaaatgcagatctttgctggaaacaatctttcagagtgacagggagcctctgttacattctgctgcatgccgtgtccttcaggctgtgttcccgaagaaggaaatatactatcatgttaaggatactatgcgccttctaggggtaataaaatcacttccatcaattacttcaagaataggagttggaggtgctgcatccagttgggttacaaaagaattcatagcccagatccacacagtgtcaaaagttgctgtgcacaggaaatcaaacttggcttcttttcttgagacccacgctgttgctatccttaatgtcacaagaaagctaggctatgctgaatgcttggccttacattcaaatgaaaaatctggagtctcagtagcacctgcagttgctttattgaagaagttactatttgcgccatatgaagcagtccagacttcaagcagtttggctatttcatcacgatttctccaagtccctttcccaaagcagacaatgattgctaatgatgatgctcctgacaatcatgcaaaagcaagtgctgcttcaaattcaaccactggaaatgctcaggtcatgattgaagaagatcctgccacatcctcagtgcaatattgttgtgatggttgttccactgttccaatacttaggcgaaggtggcactgcaacatatgtccagactttgacttgtgtgaaacatgctatgagatacttgatgcagatcgtctacctgcaccacattcaagagatcatcccatgtcagcaataccaattgagcttgatacatttgggggagaaggaaatgaaattcatttctctgttgatgaactaacagattccagtgtccttcaagctcctgctgatagaactatccagacctcaccatcgtcaattcatgtactggatgcaagtgagtctgtagatttccatggttccatgaccgaacaaaggacagtatcaatttctgcatcaaaacgggccattaactctttgctacttagtcgtttaattgaagagcttagtggctggatggagaccactgctggcactcgagctatacctataatgcagctgttttacagactttcatctgcagttggcggacctttcatggatagcacaaaacctgaaaatttggatttagaaaagtttgtgaagtggcttatagatgaaatcaatataagtaaaccatttcctgcgaaaacacgttgttctttcggagaagtatctatccttgttttcatgtttttcacacttatgttccgtaactggcatcagcctgggactgatggctctcattcgaagtcaggtgggagctctgatttgacagaaaaaggtcctgttcatgtccaagtatcaaccacgactcttcaatcctccaatgatgaccatgataaaaatgagtttgcttcccagttaattcgtgcttgttctgccctcaggcagcaatcctttctgaactatttgatggatatactgcaacaacttgttcatgttttcaagtcatcatccataaatggtgaaggtggctcttctagttcaggctgtggatccctattgacagtacggagagagttaccagcgggaaacttctctccctttttctcagattcatatgccaagtcccatcccactgatcttttcatggactactacaaattgttgttggagaatacattcaggcttgtatatagcatggttcgaccagaaaaggaaaaatcagctgataaggataaaagttgcaaggttcccaacaccaaggatctaaagttagatggataccaagatgttctttgtagttatatcagcaatgctcatacaacgtttgttcggaggtatgcaaggaggctatttcttcatctgtgtggcagcaagactcattattacagtgtcagggattcatggcaatattcacatgaagtcaagaaacttcataaaatcattaataagtctggaggttttcgaaatcctgtgccctatgagagaagtgttaagcttataaaatgtttgtctactctttgtgatgtggctgcatcaaggccaagaaattggcaaaaattttgcttgaagcacacagatcttcttccttttttaatggataacttctactatttcagtgaagaatgtatcgttcagactctcaagcttttaaatctagcattctattcaggaaaagatgctaaccataatgcacagaaaacagagagtggagatattggaagttccacaaggactggttcacagtcatcagattcaaaaaagaagcggaaaggtgacgatagctctgaaggctcctcagaaaaatcctgcatggacatggagcaggctgtggtagtgtttactggtaaggatggtgatgtcttgaaacgttttgttgatacattcttgttggaatggaactcaacgagtgtgcgccatgaggccaaaagtgttctatttggactgtggtaccatgcaaagagctcatttaaggagaacatgttaacaactctactgcagaaggtcaagtatctacccatgtatggacagaacatcattgagtacactgatctcatgacatgtttactaggaaaagctaatgattctactgcaaagcaaagtgacactgaacttctgaataaatgtttaacatctgatgtagtaagctgcattttcgacacacttcattctcaaaatgagctattggcaaatcatccgaattcccgtatatacaatacactgagttgcttagtggagtttgatggctattacttggaaagtgagccttgtgttacctgcagctgcccagatgttccatattcgagaatgaagcttgaaagtttgaagtctgagaccaaattcactgacaataggataatagtgaaatgtactggaagctttactatacagtcggtgacaatgaatgtttatgatgctcgcaagtcaaagtcagtgaaagtacttaacctatattacaacaacaggccggtaacagatttgtcagaactgaagaataattggtctctctggaagcgtgctaaaagctgccatcttacatttaatcagacagaattgaaggttgagttccccattccaatcacagcatgcaatttcatgattgagcttgattcattttatgaaaatcttcaagcatcttcccttgagtcattgcagtgtcctcggtgtagcaggtctgtaactgataagcatggcatctgtagcaattgtcatgaaaatgcataccaatgtagacaatgcagaaatattaactatgaaaaccttgattctttcctctgcaatgagtgtggatacagtaaatatggtcgttttgaattccatttcatggcaaaaccaagtttctcattcgataacatggaaaacgatgatgatatgaggaaaggattgacagcaattgagtcagaatcagaaaatgctcacaggcgatatcagcagctgatgggatttaagaagcctctcattaaacttgtatcaagcataggtgagcaggagattgattcacaacagaaagatgctgtccagcagatgatggtgtctctccctgggcctacaggcaaagtaaatcgcaaaattgcacttcttggtgttttgtatggtgaaaagtgcaaagcagcttttgattcagtgagcaagagtgttcagacattacaaggactgcgccgtgttctaatgacatatctgcaccagaagaattctaatgatacagatgcattaccggcttgttcaataccaaggtctccaagtagttgctatggctgtagtaccacgtttgtaactcaatgcttggagttattacaagttctgtccaagcatgcaaccagcaggaagcaacttgttagtgctggcattctgtcagaattatttgaaaacaacattcatcagggccctagaactgcacgcactcttgcaagagctgtgctttcttccttctctgaaggtgatgcagatgcagtgcaggaactgaataacctgattcagaagaaggtgatgtattgtcttgagcaccatcgctccatggatatttcacaatctacacgagaagagttacttctactttcagagacatgtgcccttgtggatgagttttgggaggcaaggcttcgtgttgcttttcagttgttgttttcttctattaaagttggagcaaagcatcctgcaatttcagagcatattattctcccttgtttgagaatcatttctcaggcttgtactcctccaaaatctgattctggggaaaaagagcctggtatgggaaaatctagcttgatgcaggcaaagaatgatgatacagttggccattcagtaactaatctttccacttccaagactcagtctgagttatcaggaaagattccagatggaagtcgaagacgacaggatatttcacttctcagctattcagaatgggagagcggtgcatcatatcttgattttgtgaggaggcagtataaagtatcacaagctgtgaaaggactgcaaaaaacacggcatgattcacaaaaatctgactacctggttctaaaatatggactgaggtggaagcgtcgtgcatgtcgaaagtcatctaaaggtgacttctcaaaatttgccttgggctcctgggtctcagacttgatcttaagttcttgttctcagtcaataagatctgaaatatgcactctcataagcttgttatgcccatcaaactcatccagacagtttcaactattgaacttgcttatgtcgttactccctagaacactgtcagctggtgaaagtgccgcagagtactttgagttacttgggacaatgattgatacagaagcttcacgtcttttcttaactgttcgtggttgtttgaccacattatgttctttgataacaaaagaagtgtccaatgttgaatcacaggagagaagccttagcattgacatttcacaaggattcattcttcacaagcttgttgagcttctcaacaaatttcttgaaattcccaatattagagcaagatttatgagtgataatttattatctgatgtgctggaggcttttctggttatccgtgggctagttgtgcaaaagacaaagttaattaatgactgcaataggcttttgaaggaccttcttgatagcttgcttgtagagagtactgcaaacaaacgtcaatttattcgtgcttgcatctctggattgcaaaagcatgtgaaggaaaagaagagacggacatctctgttcattttggagcaactctgcaatttaatttgcccagtaaagccagaacctgtttatctcttaattctaaacaaagcacatactcaagaagagttcattaggggctctatgacaaggaatccatactccagtgctgagattggcccactgatgagagatgtgaaaaataaaatatgccatcaacttgatttgattggtcttttagaagatgactatggtatggagttactggtcgctgggaatataatttcacttgaccttagcatctcccaagtctatgagcaagtatggagaaagcaccatggtcaaactcaacattctttgtccaatgctagccaactgtctgctgctgcttcatctgtcagagattgtccgccaatgacagtcacttacagattgcagggattagatggtgaagctactgaacctatgattaaagagttagaagatgaaagggaggaatcacaagatcctgaagttgagtttgctatagcaggtgctgtaagggaatgtggaggccttgaaattatattaagcatgattcagagcctacgcgaagatgagttaagatcaaaccaggaagaattgggttcagtccttaaccttctgaagtattgttgcaaaattcgtgaaaatagatgtgctttattacgcctgggtgcattgggtttgctacttgagacagccagacgtgcattctcagtagatgcgatggagccagctgagggtattctattaattgtagaaagtcttacaatggaagctaatgagagtgacataagtattgcccaaagtgtttttacaactactactgaggagactggtgctggtgaggaggcaaagaaaattgttctcatgtttcttgagaggctgtgccctcctgatggtgccaaaaaatcaaacaagcaacaaagaaacgaggagatggtggcaaggatcttacctaacttgacgtatggggagccagcagccatggaggcccttgttttgcattttgagccctaccttatgaactggagtgagtttgaccagttgcagaaacaacacgaggaaaatccaaaagatgaaactttaagcaaaaacgcatcaatgcagaggtctgctgttgaaaactttgttcgagtctcagagtcactcaagacaagttcttgcggtgaaaggctgaaggagattattctagagaagggcattacaaaagcagctgtaggtcatctgagggaaagctttgcttctgcagggcaggctagctttaggactagtgcagaatggacagttgggttaaaactgccttccattccactcatcctctcaatgttgaaggggctcgccaagggtgatctgcctacacaaaagtgtgtcgatgaagaagatattctgccattgctgcatgctttagaaggagtgcctggtgaaaatgaaattggtgcaagagcagaaaatcttttggatacccttgccaacaaagaaaataatggtgatggcttcttggcagagaagattcaagagctccgacatgctacaagggatgaaatgcgacgccgtgctctcaagaaaagagaaatgctactccaggggctaggaatgcgacaagaatttgcttctgatggaggtagacgtattgttgtgtctcagcctataattgaaggcttggatgatgtggaagaagaagaggatgggttagcatgcatggtttgtagagaagggtatactttgaggccgactgacatgttaggagtctatgcatttagtaaacgggtgaacttgggtgccactagttcaggcagtggccgtggggactgtgtttacactactgttagccacttcaacatcatacactaccaatgtcatcaggaggctaaaagagctgatgctgcactgaagaatcctaaaaaggaatgggatggtgctaccctgagaaataatgagacactgtgtaattgtatctttcccttgagggggccatctgttcctcctgggcagtacacacgatgtctcgaccagtattgggaccaattgaattctctaggacgagcagatggaagtcgccttcgcttgttaacatatgacattgttctgatgttggccaggtttgcaacaggcgcttctttcagcactgactgcaaaggtgggggtagggagagcaactcgcggtttcttcctttcatgatccaaatggcttctcatcttgtagatggaagtgccaaccagcagcgtcatgtcatggccaaggctgttacctcgtacttgtcctcttcgccttcaactccagaatctcctgttcgactttcagctctatctggagctcgtggtggttcaggttcctcggaggagactgtacagttcatgatggtcaattctctgctgtctgagtcctatgagagttggctgcagcaccgccccgctttcctgcagaggggcatctaccatgcttacatgcaacacaagcatggacgatccaccctcaagctttctgccgacacgtcttcctctgcagtccgatcagatgaaggttcatccgccgattcaaacgacagcaagaggctctttgccattgtccagccgatgctggtgtacactggtttgattgagcagctgcagcaatttttcaagaaaggcaaatcgtctggcacgcaaaaggtcggtgagaaggacggatcaagtggtggtaacctcgaagcttgggagattatgatgaaagaaaagctggggaacatgaaggagatgctaggattctccaaagacgtgctctcatggctcgaagacatgacctcatctgaggacttgcaggaggccttcgatgtcatgggtgcgttgccagatgtgttctccggtggccacactacatgtgaagactttgtccgggcgatcatacacggtgcaaagagctga

SEQ ID NO: 15799 - DNA, 2646 bp, Oryza sativa
  Clone ID: TFbOSC401213j.C1.o57.fg
atgtctcgccgccgggacgctgcgccgacggcgcgcgagggcgagagggatctcgtcgtgaaggtaaaattcggtggcactcttaagcggttcactgcttttgtgaatggtccgcactttgatcttaatctggctgctcttcggtcaaagattgcgagtgcttttaagttcaatccagatactgagtttgtactcacctatactgatgaggatggggatgttgtcatactggatgatgatagtgatttatgtgatgctgccattagtcagagactgaaccctcttaggattaatgttgagttgaagagcagcagtgatggggtacatcagacaaaacagcaggtattggattccatatctgtaatgtccactgctctggaagatcaattggctcaggtgaaattagctatcgatgaagctttaaaatttgtaccagaacaagttcccactgtccttgcaaaaatatcacatgacttgcgttctaaagctgcatcatcagcgccatcattggctgatttgctggaccggcttgctaaactgatggcaccaaagagcaaaatgcagtcttccagtggttctgctgatggttcatctggctcctctagtggtaggggacaaactttgggaagtttgaatattaaaaatgacactgagctcatggctgtttcagcttcgaaccctctggatatgcataactctggatcaactaaatcacttggtcttaagggtgtgcttcttgatgacatcaaagctcaagctgaacatgtatcgggatatccttattatgtggataccctttcaggctgggtaaaagttgataacaagggaagtaccaatgcccaaagtaagggcaagtctgttacatcctctgctgtgccacaagttactagcattggtcatggtgcacctactgttcattctgctcctgcttcagattgcggtgaagggttaagaagtgatcttttctggacacaactaggcctttcttctgagtcctttgggcctaatggccagattggtggtgatttgaactcgacatgccctcctccaccactgtttccccgttacccacttcagtctctccgagctgataaaagcagtatcaagggtggttgctcttaccctccgtgcatctgcaaaagtagcacatctaagcctgagaatctctcccattacccagttcagtccctccaagctgacagaagcctaaagggtggtcactatttccctccatgcacctgcaaaagtaacacatccaagccagataatctctcaccagtcggtctttatggaccttattctgaaggcagcagctgtaataggtgcccatacagggatctaagtgataagcacgagagcatggcgcagcacacactgcatagatggatacagtgcgatggctgtggggtcactcctatcgctggttctcgctacaagtcaaatattaaagatgattatgatttatgcaatacctgtttttctcgaatgggcaatgtgaatgaatataccagaatagacagaccatcttttgggagtagacgatgtagagacctcaatcagaaccagatgctctttccacatcttcgacagctacatgattgccgcttcattaaggatgttactgtccctgatggaacagtaatggcaccatcaaccccatttacaaagatttggcgcatacataacaatggatcttccatgtggccatatgggacatgtcttacctgggttggtggacatctatttgcacgcaacagctcagttaaattagggatctcggtggatggtttccctattgatcaagagatcgatgttggtgttgattttgtcacacctgcaaagcctggtgggtacgtgtcgtactggagattggcatcacccactggccagatgtttggtcagcgagtttgggtttttattcaggtggagcacccggtcaaaaccagtagcaacaagcagagtgctgctataaacttgaacatgcccccagaaggaagcaacacagaatggaagcattctgttgatgcaaatattcagtctgcagatattgtgggtaaatactctggaagcaccataactgatcctcttgcacatgcactataccatgaagccaccaaaccgatggaacctgagcttgtttcaagtgccgtaccttctgtacctagagcatttgaatcagtgctagtgccagctactgatctcctcacttcatctgctggagctgaaaaggcttcgaagcctgctgccacgcctggacctgcacctcaagccgttcccctgccaaaacctgttagcattcctgcatctggacctgcgcctgctcctgttagtgcgactaccgctgcacctgtcggagctgctgctgctcctatcagtgagcccactgcacctgctgctgccattggaatgccctctgcaactgctcgcgctgcttcttgcctgcctaccgagccttcatctgatcacatcagtgccgtggaggacaacatgctgagagagctggggcagatgggcttcgggcaagtcgacctgaacaaggaaataattaggcggaacgagtacaacctggagcagtccattgatgaactctgtggcatcctcgaatgggatgcactccatgatgaactgcacgaactgggcatctga

SEQ ID NO: 15800 - DNA, 285 bp, Oryza sativa
  Clone ID: TFbOSC100588j.C1.o14.gm
atggtgcacggtggattggtgcggcacgaggaaggaggaggcgacggcgctggcgccgacgtggggagcgagcaggaggcagcggcggtgcaaggaggaggcgcggtgacggcgacggcgccggcgtgcggagggaggcgatgggcagatcagacggcagcgcaaggaggaggcgcggtgacggcgacggcgccggcgtgcggagggaggcgatgggcagatcagacggcgacggcgacggtgcacggagggagcgacgacaatgaggacacatggagggagtga

SEQ ID NO: 15801 - protein, 108 aa, Oryza sativa
  Clone ID: TF_OSC11543j.C1.p1.fg
KGDYYRYLAEFSTGTEKKAATDQSLMAYQAWPCAQLFSLLEIMNSPERASQVAKQALDEATAEINSAGVEGYKDSMLMMQLLKENLALWTSELTGGETSKDDDVVMEG

SEQ ID NO: 15802 - protein, 278 aa, Oryza sativa
  Clone ID: TF_OSC401367j.C1.p84.fg
MVEAMNSVAKLDEGLTKEERNLLSVGYKNLIGAKRAAMRIIGSIELKEETKGKESHVRQTAEYRRKVEAEMDKICCDVINIIDKKGDYYRYLAEFKTGTEKIEVSELSLNAYEACDPFFIFNLFLFSQVTCFIEFTIYQVLVVYTASKTAQTDLTPTDPIRLGLALNISVFYCEIMNSPDKACQLAKNAFDEAVAELPSLSEENYKDSTLIMQLLRDNLALWNSDMADDADDIRERTDTTGAKGDPAACQVRIDTCCHLTYESSPARYVCDHVGFLAL

SEQ ID NO: 15803 - protein, 134 aa, Oryza sativa
  Clone ID: TF_OSC11544j.C1.p1.fg
MKEREKVVRLAKLAEQAERYDDMVEFMKTLARMDVDMSAEERLLFSVGFKKTIGARRASWRILESLEQKVTAGDQPGVTINGYKKKVEDELRAVCNEVLSIIAIHCLPLANSGENVVFFYKMYVQVLPNDAKVS

SEQ ID NO: 15804 - protein, 39 aa, Oryza sativa
  Clone ID: TF_OSC412316j.C1.p1.gp
MAAAAGGGTREEMVYMAKLAEQAERYEEMVEFMEKVVTA

SEQ ID NO: 15805 - protein, 308 aa, Oryza sativa
  Clone ID: TF_OSC410930j.C1.p5.fg
MSQPAELSREENVYMAKLAEQAERYEEMVEFMEKVAKTVDSEELTVEERNLLSVAYKNVIGARRASWRIISSIEQKEESRGNEDRCTLIKEYRGKIETELSKICDGILKLLDSHLVPSSTAPESKVFYLKMKGDYYRYLAEFKTGAERKDAAENTMVAYKAAQDIALAELPPTHPIRLGLALNFSVFYYEILNSPDRACNLAKQAFDEAISELDTLSEESYKDSTLIMQLLRDNLTLWTSDISEALPIYVVLGNLAADSLLGWWILELHFLWGEPQGGTFMSLIGSIVFGMSVVSLISRVHSPAKCPA

SEQ ID NO: 15806 - protein, 1563 aa, Oryza sativa
  Clone ID: TF_OSC900048j.C1.p23.gm
MVVSPTVCNVKLGRVLIDGGAALNILSPAAFDAIKAPGMVLRPSQPIIGVTPGHTWPLGHIDLPVTFGGSANFRTERVNFDVADLSLPYNAVLGRPALVKFMAAVHYAYLQMTMPGPGGPITIHGDLKVALACMEQRADHLAAASKPAGGDERLSTSVPAAPRAGDDHEDALVSFLRANADVFAWRPADMPGVPREVIEHRLAVRPGARPVQQKVRRQAPERQAFIREEVARLLEAGFIREDIHPEWLANPVIVPKANGKLRMCIDYTDLNKACPKDPYPLPRIDQIVDSTAGCDLLCFLDAYSGPTFQRTTRISLGSQIGRNVEAYVDDLVVKTRNQETLLSDLAETFESLRSARIKLNPDKCVFGVPAGKLLGFLVSARGIEANPEKIRAIERMRPPSKLRDAQCVTGCMAALSRFISRLGEKALPLFKLLKRSGPFTWTEEAERAFTQLKAYLSSPPVLVAPEPDEPLLLYLAATPQVVSAALVVERDEDNPHSAHPHPVSTRPGREQGGEAPEPNGGPRPPTVRAGPLPACPTVPGAPDPQDGPGATAGRPRLSPSDPEVVGTEVECAPGGLSDEERPGDAAPGEEDRPRRKVQRPVYFVSEALRDAKTRYPQAQKMLYAILMASRKLRHYFLAHRVSVVTSYPLGQILHNREGTGQVVKWAIKLSEFDLHFEPRHAIKSQALADFVAEWTPAPEPVSVLEASSGPSQLPHTAYWVMQFDGSLSLQGAGAGVTLTSLNGDVLRYLVRLDFRATNNMAEYEGLLAGLRVAAGLGIRRLLVLGDSQLVVNQVCKEYRPPPGAFEERLAQPSARPDPLGETDAPERPPRPVGVQASGPDGSVPSSLRLIAWIAEIQAYLADKTLPEDREGSERVQRISKRYVLALQTIPLSWLFAVWGLDILGPFRRAPGGFEYLYVAVDKFTKWPEAYPVIKIDKHSALKFIRGITARFGVPNRIITDNGTQFTSELFGDYCEDMGIKLCFTSPAHPRSNGQVERANAEILKGLKTKTFNILKKHGDSWIEELPAVLWANRTTPSRATGETPFFLVYGAEAVLPSELTLRSPRATMYCEADQDQLRRDDLDYLEERRRRAALRAARYQQSLRRYHQRHVRARSLCVDDLVLRRVQTRAGLSKLSPMWEGPYRVIGVPRPGSVRLAMGDGTELPNPWNIEHLRRFYPYGTMNRVPTSWGFVYSRVNKVTTLAPAFMLWVLCGYRVPTGSVWAQGSPRGEGSRSLFGAQRAGTRLHWRNGPVAVDRQRVRASGHAGHQPVQQRRFVVVVKRFPTFPVPTKAAFASATTTATRRRRRRRGEEEREGEREAERYEEMVEYMERVARAAGGASGGEELTVEERNLLSVAYKNVIGARRASWRIISSIEQKEEGRGNDAHAATIRSYRGKIEAELARICDGILALLDSHLVPSAGAAESKVFYLKMKGDYHRYLAEFKSGDERKQAAESTMNAYKAAQDIALADLAPTHPIRLGLALNFSVFYYEILNSPDRACNLAKQAFDEAISELDSLGEESYKDSTLIMQLLRDNLTLWTSDANDDGGDEIKEAAAPKEPGDQ

SEQ ID NO: 15807 - protein, 60 aa, Oryza sativa
  Clone ID: TF_OSC34756j.C1.p1.fg
ASQVAKQALDEATAEINSAGVEGYKDSMLMMQLLKENLALWTSELTGGETSKDDDVVMEG

SEQ ID NO: 15808 - protein, 255 aa, Oryza sativa
  Clone ID: TF_OSC401803j.C1.p29.fg
MNMETRRYTSLSHRKARSMECFPSTQCPVKRGKAIATLLNISEPPLELTRTLLEADADSAFQPDRRGSFPIHIAASAAGRLSAVIALLTIFPGSAGLRDSDGRTFVHVAARKKRYSVVAHACQTPALSGILNKQDNEGNTALHLAVEAGDWWIFACLFVNKQVDLNLPNSSGHTPLELSINTIPTGLYCLLNSRILIQETLIAANATRGISRMDAAGTEEHGPQSEAENEEKGSEIVLPLYYILMYDAIDFLFNV

SEQ ID NO: 15809 - protein, 258 aa, Oryza sativa
  Clone ID: TF_OSC401247j.C1.p12.fg
MTVQAGADVNYAYPNTPLVVSTTAGLTDCIKYLLEVHADPNIPDKQSGLTPIEIAASVGRRDHVEILFPFTSPVRAVTNWTVEGIIAHGKSRRLIPKFQILKIKRSLDSSGHDHLNPHYFLQGESCSKVSDRKAELKSQGEKAVKRKDYLAASKIYTKALELDYFDATLYSNRSLCYLQIGKAQKALLDAKKCVKLRPKWMKGHYREGAALMLLKEHKKAFEAFLNALKLDPANAEIEKVMWEAVEAMKKDDAAEDKT

SEQ ID NO: 15810 - protein, 274 aa, Oryza sativa
  Clone ID: TF_OSC406054j.C1.p2.gm
MHDAALQALPMVLEWLKNKKLKTANVDMQQLTSQRDNDNGSTPLHLAASMAGLPSLGSMLLLDANVSTAYQPDNQGQYPIHAAASADSLEAVKALLEKCPDCATLRDARGRTFLHAAVEKKSFDDDNGVRLDMRNKEGMMPADVSWSMMPLKTYYAWNSSIRIRKLLLKLGAPLGESRGDLFDEKHNRIIGEKSKWDMEKMSENVTAAAQVLALFSVLITTVTFASAFTLPGGYRSAGDDGGAAGTPRQAQGLPTFHKSKSMRMSARRVRTENG

SEQ ID NO: 15811 - protein, 412 aa, Oryza sativa
  Clone ID: TF_OSC408633j.C1.p3.fg
MSESIPDKQIVVRFPNHVLPASLRENMGKEGATVDNMDPSCPFLVLEKYDRKKSYEWLNLRAAWVAKSMPNDIIIPDPTPERVRDAFSEISRSLSNVMAEDSVQCFLNMFLESPSTFAYRFTITSETLTFMIRYNALRCMKAVLEGKAPGLGSMHANPNCMSPYGCFPLHEAAERCSPRMIRLLFRHGASANYREDCVYRLVHLLCLPDMIVSLEVIRLLAQKTDNVVDELWNYMKNGKLAQATVLFLAAQKHFRKGKPNGFSIIAQRIFGDYDSLTSDKGNGEAHKQLEERKALLNCQCLLYNIISQAGEALYDYVQTHSEVSHVEVLAHVSSILKEFGFCPKEEYIDTMNLSPYNLDNFYSVVFQEGQTKPVEQTSSPNAAEKKGFAAPFLLLEMSIILQSFVQITTAKD

SEQ ID NO: 15812 - protein, 94 aa, Oryza sativa
  Clone ID: TF_OSC28352j.C1.p1.fg
MGKQEQEKMLLQAAYDDNLRLLRKMARGLDTGQGEAAVVAAVAGRADGNRALHLAAARGSMDVLRYLVEDLHLSVNQFNAKGLALPLFRSIFSV

SEQ ID NO: 15813 - protein, 462 aa, Oryza sativa
  Clone ID: TF_OSC900150j.C1.p15.fg
MSRANSRQTKAQSCEGLNAEGIAGGPAWGELAEAPWRAQGDGGGLAETAAALSVLLEKCKNVEVNVQQEDQQRSIPLLLYLTSQSDKNGSTPLHFAASLKTSIEGFTSRLCEHFRPKQSPTTLLLGLNESAIYQPDNRGSYPILVAASNGILKVVITLLKRYPDCATLRDIQGRTFFHVAVEKKRRNIVAYVCERPGFSPILNMQDSHGDTALHLAVKAGYHMLIFQNPRYMISQLLALSGGTVGYSRQDHFFEKYSKKRDEVIDSNDMTSAAQVLGISSALIATVTFAAAFTLPGGYRADDHTDGGTPTLAGSYPFDAFIISNSLAFICSLLATVSLLYSGIQSRDISIRRRYYAFSMLLMQSSTTSFTVAFAMGMYLVLAPVTLNAAVSVCIIAFVSLLPGNMEIGVSLAIANTLRIRLGIWAAMSQARPVLLFTWKRVWSCIIIFGLPGLMKIHRTKMA

SEQ ID NO: 15814 - protein, 633 aa, Oryza sativa
  Clone ID: TF_OSC400095j.C1.p16.fg
MEDASKYAHSPAHLAVVRRDHASLRRLVAGLPRLPRAGEVATEEESIAGEAVADAVSAAIDRRDVPRRETPLHLAVRLRDPVAADILMSAGADWSLQNADGWSALQEAVCTREDAIATIIARHYQPLAWAKWCRRLPRVLASINRIRDFYMEISFHFESSVIPFIGRIAPSDTYRIWKRGAALRADMTLAGFDGFRIQRSDQTFLFLGDGARPEDAGGKELHPGSLIVLAHKDKEITDALEGAGVQPTEAEVAHEVALMSKTNMYRPGIDVTQAELVPHLNWRRQERTEAVGHWKAKVYDMLNVLVTVKSRRVPGAMTDEELFAMEGEEKNGRGTELDAELDEVLTAEERKQLDSALRMGNQEEEFEERCEEGDGGADHLDANGVAKDKKGWFGWGGKKGTKNDEKPSKANQGSKDESGDLGKGKEKNSSKKKKGASSGDSTKHESEYKKGLRPVLWLTPDFPLKTDELIPLLDVLANKVKAVRRLRELLTTKLPPGTFPVKIAIPIVPTIRVIVTFTKFEELQPLDEFATPPSSPTQFQDAKGKESEGSGSWYSWVRGGRGAQSSDSGDSRNWKDEVDPFQIPSDYTWVDANEKKRRMKAKKAKNRRGSTRKQSSKSTSSEGGHPMMDGFEE

SEQ ID NO: 15815 - protein, 391 aa, Oryza sativa
  Clone ID: TF_OSC101172j.C1.p1.gp
MCSGPRKPSTPPLPQQQKEATVMAASLLLELAAADDVAAVRRVVEEEKVSLGVAGLWYGPSASGVARLGMERRTAAMVAALYGSTGVLGYVVAAAPAEAARASETDGATPLHMAAAGGAANAVAATRLLLAAGASVDALSASGLRAGDLLPRATAAEKAIRLLLKSPAVSPSSSPKKSASPPSPPPPQEAKKEYPPDLTLPDLKSGLFSTDEFRMYSFKVKPCSRAYSHDWTECPFVHPGENARRRDPRRYSYSCVPCPEFRKGGSCRKGDACEYAHGVFECWLHPAQYRTRLCKDEVGCARRICFFAHKPDELRAVNPSAVSVGMQPTVSSPRSSPPNGLDMAAAAAAMMSPAWPSSPASRLKTALGARELDFDLEMLALDQYQQKLFDK

SEQ ID NO: 15816 - protein, 579 aa, Oryza sativa
  Clone ID: TF_OSC900232j.C1.p15.fg
MAASLLLELAAADDVAAVRRVVEEEKVSLGVAGLWYGPSASGVARLGMERRTAAMVAALYGSTGVLGYVVAAAPAEAARASETDGATPLHMAAAGGAANAVAATRLLLAAGASVDALSASGLRAGDLLPRATAAEKAIRLLLKSPAVSPSSSPKKSASPPSPPPPQEAKKEYPPDLTLPDLKSGLFSTDEFRMYSFKVKPCSRAYSHDWTECPFVHPGENARRRDPRRYSYSCVPCPEFRKGGSCRKGDACEYAHGVFECWLHPAQYRTRLCKDEVGCARRICFFAHKPDELRAVNPSAVSVGMQPTVSSPRSSPPNGLDMAAAAAAMMSPAWPSSPASRLKTALGARELDFDLEMLALDQYQQKLFDKVSGAPSPRASWGAAANGLATASPARAVPDYTDLLGSVDPAMLSQLHALSLKQAGDMPAYSSMADTTQMHMPTSPMVGGANTAFGLDHSMAKAIMSSRASAFAKRSQSFIDRGGRAPAARSLMSPATTGAPSILSDWGSPDGKLDWGVQGDELHKLRKSASFAFRGQSAMPVATHAAAAEPDVSWVNSLVKDGHAAGDIFAQWPEQEQMVA

SEQ ID NO: 15817 - protein, 893 aa, Oryza sativa
  Clone ID: TF_OSC400269j.C1.p25.fg
MDEPSIVKLPEYELPDAFRGEIDGKGLEEGATIDNMDPSRPFLVLNVFDWDKVDEWIALKTAWIAKRLKNDIIIPDPVPQIGRDAFFDITPRLTTVLEKDSVRCFLPLFVQCESIMTYQCAITSETLTHMVRHNALRCAKVVLEGKAAELRCKHANPNCMNPYGYFALHEAAERFSADMTKLLFRHGASANVRTASDAGIQGLLPLDVAVENACMHKYLEDNLSPTPMQYHEDYIYKLIHLLCLPEMKVFLDTIRLLAEKTDNLVDELWNYMKNGKLVQTAVLLLAAQKHIRKIKPDGFCIITHHLFKEYANSLRCAKGDTGEAQKQLEEREALLSCKSELFSIILLAGEALDNYIQAHSEVSHAEVLARVSSILKEFGFCPKEKCIDNIKLYCSFCIQNHNFLSPYMYGTSYCDIFHKGAYWHVAVDNHVSANCYAVHVSLRFGRMAGPHGPCRVFGSLNLIDVRYLDTCHRMSRSRKNSEIKRAWSAAISGWVTDQKILLGCEACLVCSNFGMGDRPENSSRSFILERPRYTSRLQLKVEVMEKQSIDFGKVLEEIQESLVVLNLKQGAARGSVRSASTNGAHEQGFKFVCGESFPNSSSVDGRGEEGSATPYAAYATCGCARRRGQMASWPLRCNRSPGKGFGDGYHPDPDSGQEYDFPTNPLIISSNLNLGVEKLDLETALAIASLQEEVILESSAVSVSNPKKIDNGLQIRPNLAYKGALPLPLPPNRGVTTGSVSRMEDRKTLDNGKLVNGTDKISALKAQRRAHGLCYICAEKWSPTHKYANTVQLHAVQELLTTLGSEILYDQEFTEECEGSDSQGLMAISVQSMHGSETMGCMRLLGFIQGREVLILVDSGSTAGFLSSQVAQTISMRHAILLDLMFHIDQKLC

SEQ ID NO: 15818 - protein, 267 aa, Oryza sativa
  Clone ID: TF_OSC900390j.C1.p18.fg
MVSLLLQWKPTLATKVDSNICDNQGQSFLHAAAMKGHSSIISYAVKNSMLKHLLNAQDKEGNTPLHLAVVVEECKVVSKLLSSGEVSLVVKLHESGAQFQPQRQDLIEKWNAQDIMKWRDNTSKNLAVVSTLIATIAFAAAFNVPGSYGDDGKANLAGDPMYNAFLILDTISMVTSVVATILLVYGRASRSHRSWLSFVISMYFLWLSINCMVFGFFTAIAAVSKKGIKIAMSQLIYHGMYILTMQLTFLAMPGSFISTMKFLVFYG

SEQ ID NO: 15819 - protein, 405 aa, Oryza sativa
  Clone ID: TF_OSC21353j.C1.p1.fg
MDRPRQQHEPEHLGGGGIDVEVELDPEDLQPSVPLKKVPAGDLFEAARAGDCARLALLLGGGANVNERDRWDSVALYYACLAGHADAARMLLEAGAVCAERTFDGDRCHYAALNLRLRRLLKAFEARPPPLPPLPAALRATFLACPANRAAFLEMLQWTAGSEAAALAAAAGFGPTDNPSSTSLFPPDITFYVDGKPIEAHRVILCARSSFFRRKFNTDWKDRKEVRFSSQKLSFGALYSLVHFFYSDRLEVDVDDMENLARACKVCKCEGLQKILIKEATLQRYAEHKSPRDLDSSQKRFILHGQSLPEEDRLPSALRHIFEECLANSREQECYNDESNEMSRDSGVDAAADLYIKVILASRSEYFKARLSRNMDFLEVKSGLQSTQSLPFLEEHDMSTEAFEK

SEQ ID NO: 15820 - protein, 93 aa, Oryza sativa
  Clone ID: TF_OSC28359j.C1.p1.fg
MEEKGMGKQRWEKMLLQAAFDGNLRLLRKMARGLVTTGRGRGEADVLAAVADGGSGSRALHLAATEGRMDVLTYLVEDLRLDVNQTNDRGSDL

SEQ ID NO: 15821 - protein, 1025 aa, Oryza sativa
  Clone ID: TF_OSC400945j.C1.p7.gm
MLREADERAAEGGRRVPLDGRRALLGGRRQEVSVFGLLGSSEVAGLAERPTTEILASRRPLVGFSNVIKKVDDIIDGGITPLACAAYNGSVTSMKTLLQAGANVQISKPIGKAIVADLTSSESMVQILLDSGANADAIDEDDVHTAARVTALRERMFNALENINYLLADICCKALRNDDKGKEVMCLKAALALNPQNERAESLLRHGPAAGRADTGPTPIGPGRSSEDATTATGKKMNPLPALASRLWEASIRKLKYSTILRGSVVPSGGTFDGPAAATGNAAGGDPITLTPSLSVSSSTSNTIYQYDDGDEDIDSVLDDVDTDDDDVDEASLGEPSHSDQLLPSGDFYQGDLRCDLPHGAGKYLWTDGSMYEGSWRGGRAAGRGKFSWSSGAIYEGDLAGGYMHGQGTYIGELGDTFAGLWANNLRHGRGTQAYVNGDVYDGHWRDGLQDGHGQYIWRGGHEYIGTWKAGEMHGRGTVIWADGDRYDGAWEDAKPKGQGTFRWSDGGMYIGLWCQESGETQGKGVYYPPSGGPAVPLPREPKGVITKLLEELEMSEGKTVSLLPSQKVLTWPGVEPVTKKPVWLPPEVAADQGMWRPPEVGADQGRRSSRRNNMSSDIDSLVEGEDGGEESRNDRSWVRTPSCMRAPTMPKPGKKQGETISKGHKNYELMLNLQLGIILDVPIIATHFSAERTMSLRGGGESAGSDSPCRREEAKSRTPRPQPGSAGERSAAASAEMSSRGGSKSCGGDSLQPGEAGEHGVAPSAAAVETSSEVAKVRGQAATPYSAAPFDESMLVQHSTGKAMGNREADVAAVGLGPKNSGLKICPARSLGRRRGGGREGAAGHAVDAVAEEEDAGHRAAAGSGGEGVSWRGGGRPRYTTADSLAFVAASLGKGRWRGGGGWRRWVAERSSLRRVIGAATLRDTVTPLLVPCYDLATAAPFPLLPCWSRSSSPVPTPSRGQLRLQRTTTVVVVVVAIPNLLTGRHYPERRSKNRVESKSATIKDQINWHAHTPKGKLLDLHWS

SEQ ID NO: 15822 - protein, 72 aa, Oryza sativa
  Clone ID: TF_OSC28352j.C1.p1.gp
RYLLDHGSDPTIDKSVLPFHAAATKGHCEIVELFLSKGVDVDLYSIAGTPLLAAAISGQHSTMKILLEHHAD

SEQ ID NO: 15823 - protein, 432 aa, Oryza sativa
  Clone ID: TF_OSC9793j.C1.p1.fg
MAFKCNITSETLSCIVRHNALRCAKTVLEGKAPQLSCMHANPNCINPYGIFPLHEAAERFSVDMIKLLFCHGASANLHTVNDAGIPGLLPLHVAVGNTCLHKYLEDNLSPVQYHEDYIYKLIHLLCLPEMKVFLDTVRLLAEKTDNLADELWNYMKNDKLVESAVLLLAARKHIREGKPDGFDIIAQRIYEDYDSLVCDKGDTAEGQKLLEERRALLKCKCLIVTIISQAGEVLDNYIQAHSEVHNNETDLMKFMLARTTIMLSTMKYDLVPNVEVLARVSYILKEFGFCPNEEYIDTMILCPYNKISYSDIVHKDVTKAVAQMSTSLPAAEKKAARKKALKGWDPTFIKRNFFPYWRSVLGAQLSVSNGAADEKSMLHRPQFRNSVNAHEGAKDMSKKVPSGMLLLITIGLQSIMLRTSFADTLRRLRIYM

SEQ ID NO: 15824 - protein, 428 aa, Oryza sativa
  Clone ID: TF_OSC400769j.C1.p1.fg
MMCEMTKLPLVPFSHVQSRGGADVCGDSFPGGNNGLRGRQRCSGGDHDALSTSAKATSDHLAASGCGDVHGHSLFFFAPPSLLPLRHRRGPSLVPGRQRCGGARGAPHRMPLLANGPTLWYQLDDDVAGLRELLAACPSLADEPAPWYSLARGTEPLTPLMVATAYGSVACLDVLLSPPYLVDPNRASASSLSTPLHLAAAGGATSTPTSVSRLLAAGTDNDNDEVEERQGEEGRARNLQKLSDNSGEFERGSVDLQMIRFEELLVFFFSFGFMGYFSLLLLKPYQILGNKPKFSTLKGGDGMRDPSLMHMGGPHCTSSISDDHEELSSISGVFSMPSSRPYNVPPLHAGASQIHLIKEKQQEQQIRRAQTPIRKTLACAETSRETPSFCLIASQGRHPTLSVHSPLRVSDDELTSDNDRPLLQATAA

SEQ ID NO: 15825 - protein, 194 aa, Oryza sativa
  Clone ID: TF_OSC421348j.C1.p4.fg
MEMEGGDNDFAKAVLAGLDKCEELGYEDVELWSDSQRACGVLSDFETINMDDRNRMECMLLRFKSTRFKRLVSVQKPREIKDWSLCEILFMVDDILIEKVHSRYLLRNLLKKWSPYLRGQSIYSITRTKLTRYIIRTKLTRDIIRHPIGAVPLHEAAERFSVDMIKLLFRQGASANIGPNSDFILLGDLVLIHT

SEQ ID NO: 15826 - protein, 432 aa, Oryza sativa
  Clone ID: TF_OSC900089j.C1.p35.fg
QLMLDRPLANSAHHYCKILCVRPIAAPFSTKVNFRVEGLNLVSDSSRLICSFEGSCIFQEDTDNIVDDVEHDDIEYLNFCCPLPSSRGRGFVEVEDGGFSNGFFPFIIAEQDICSEVCELESIFESSSHEQADDDNARNQALEFLNELGWLLHRANIISKQDKVPLASFNIWRFRNLGIFAMEREWCAVTKLLLDFLFTGLVDIGSQSPEEVVLSENLLHAAVRMKSAQMVRFLLGYKPNESLKRTAETFLFRPDAQGPSKFTPLHIAAATDDAEDVLDALTNDPGLVGINTWRNARDGAGFTPEDYARQRGNDAYLNMVEKKINKHLGKGHVVLGVPSSIHPVITDGVKPGEVSLEIGMTVPPPAPSCNACSRQALMYPNSTARTFLYRPAMLTVMGIAVICVCVGLLLHTCPKVYAAPTFRWELLERGPM

SEQ ID NO: 15827 - protein, 997 aa, Oryza sativa
  Clone ID: TF_OSC401265j.C1.p5.fg
MEAARVGAQSRHLYGGGLGEPDMDRRDKRLFGWDLNDWRWDSDRFVATPVPAAEASGLALNSSPSSSEEAGAASVRNVNARGDSDKRKRVVVIDDDDVEDDELVENGGGSLSLRIGGDAVAHGAGVGGGADEEDRNGKKIRVQGGSPSGPACQVEGCTADLTGVRDYHRRHKVCEMHAKATTAVVGNTVQRFCQQCSRKSYIVKRRDYYGSNDFGSYLLILKNNFRFHPLQEFDEGKRSCRRRLAGHNRRRRKTRPEVAVGGSAFTEDKISSYLLLGLLGVCANLNADNAEHLRGQELISGLLRNLGAVAKSLDPKELCKLLEACQSMQDGSNAGTSETANALVNTAVAEAAGPSNSKMPFVNGDQCGLASSSVVPVQSKSPTVATPDPPACKFKDFDLNDTYGGMEGFEDGYEGSPTPAFKTTDSPNCPSWMHQDSTQSPPQTSGNSDSTSAQSLSSSNGDAQCRTDKIVFKLFEKVPSDLPPVLRSQILGWLSSSPTDIESYIRPGCIILTVYLRLVESAWKELSDNMSSYLDKLLNSSTGNFWASGLVFVMVRHQIAFMHNGQLMLDRPLANSAHHYCKILCVRPIAAPFSTKVNFRVEGLNLVSDSSRLICSFEGSCIFQEDTDNIVDDVEHDDIEYLNFCCPLPSSRGRGFVEVEDGGFSNGFFPFIIAEQDICSEVCELESIFESSSHEQADDDNARNQALEFLNELGWLLHRANIISKQDKVPLASFNIWRFRNLGIFAMEREWCAVTKLLLDFLFTGLVDIGSQSPEEVVLSENLLHAAVRMKSAQMVRFLLGYKPNESLKRTAETFLFRPDAQGPSKFTPLHIAAATDDAEDVLDALTNDPGLVGINTWRNARDGAGFTPEDYARQRGNDAYLNMVEKKINKHLGKGHVVLGVPSSIHPVITDGVKPGEVSLEIGMTVPPPAPSCNACSRQALMYPNSTARTFLYRPAMLTVMGIAVICVCVGLLLHTCPKVYAAPTFRWELLERGPM

SEQ ID NO: 15828 - protein, 613 aa, Oryza sativa
  Clone ID: TF_OSC400938j.C1.p12.fg
MPVQDPSSPVPAAARPKRTSSAPIRPSDYTHSPAHHRVALRDAAGLAGVLHGLPPLAHPSRILTAADAAREARLAASVSGALDRRDVPGGDTALHLAVRLRLPSLASALAAAGADPTLQNHAGWTPLQEALCLGCKDIAACLLRAHRLAAWAKLRRRAPALSAALRRVQDFYLEVDFHFESSVVPLLSRAAPSDTYRIWKRGAELRADTTLAGFDGLRIRRADHSFLFFGEEADAGGRHLPPGSLLVLHRGKREVHDAFAAAAAAGDEDSATSDAAAYRPGLNISSARLVPRTTWLRKEKTESVGEWKARVFDVHNVVFSFRTLKAANAGRKDFTFELAGDDDDDDNNDDEEDFLPLEIRDDDEDGDFLVADIPPPPSRRSCYVPGRRSVAAPPSHMATPQRRRNSVDVPRRLPACASVGRGEGGVFGRHATTTGGARWKEEETVKTLRPTVWLTEDFPLTVDEFLPLLDILASRVRAVRRLRELLTTKFPPGTFPVKVAIPVVPTVRVVITFTKFVPLLEPEEFFTPMSSPSLLVSPGPGSIMHKPDTQKSSYLKWGLKNSRSKPVNLSQVADNTDPFTIPSDYTWVSLGSKGQDKKSSKTKKGKTKETKLS

SEQ ID NO: 15829 - protein, 267 aa, Oryza sativa
  Clone ID: TF_OSC8653j.C1.p1.fg
MSSKSSPRELTGKKKLTKHDDEALRFIELAENGTDPATIDASEAKVDDIIDGGITPLACAAYNGSVTSMKTLLQAGANVQISKPIGKAIVADLTSSESMVQILLDSGANADAIDEVMFEDPPIIAAAKRKQMNVVQLLLSSSTPIEGVDWSLNGIIAYTESVTFKAEDDVHTAARVTALRERMFNALENINYLLADICCKALRNDVSTTEWDRLRNLNLLYLSHSFHGQKPVLSSDAIVNMALVYQKQDKGKEVMCLKAALALAPPK

SEQ ID NO: 15830 - protein, 1031 aa, Oryza sativa
  Clone ID: TF_OSC414561j.C1.p1.fg
MAETRKFLMPNQPPDISQMVLEARKRWLRPTEICEILSNYRSFSLSPEPPNRPGSGSLFLFDRKTLRYFRKDGHNWRKKKDGKTVKEAHEKLKAGSIDVLHCYYAHGEENENFQRRTYWLLEEDFTHIVLVHYLEVKGVKQSFSRAKEEIMQLSGADSPSCSNSITSQNQMTPQIMDAAESPISGQISEYEGAEPAKFGAADNCPASSRYNPLIEMQQPLDGIVMDNILYPSSSAICNQVSGYHGELPPGTSNLNGHTFSHSDIARMFDDSSSGLRDISRTLFDSMPYDEHFSGYANGFMEPTLHSSFSMIEANNLEDSSLLETYTSEALYTNNLSQKEADALSFAGISSPEVNGNKYTEGSTKHPLLKQLSLDLFKIESSGLKKHDSFSRWMSKELGEVVDLGIKSSSDALWSSIEIVNAADGPSAPTNEQLDAYAVSPSLAQDQLFSILDISPSCSYIGLKTKVLVTGTFLASKENVENCKWSCMFGDVEVPAEVLADGSLRCYAPEHQSGRVPFYVTCSNRIACSEVREFEYRDSDAQYMETSHSQANGINEMHLQIRLEKLLTLGPDDNQLLVCGNEKLELINAINSLMLDEKWSDQGSPSGSKDVVTPRNQSLKKLMKEKLHCWLIYKIYDCEKGPNILGKEGQGIIHLAAALGFDWAIRPILVAGVNVNFRDAHGWTALHWAASCGRERTVGVLIANGAAAGALTDPTSEFPSGRTPADLASTNGHKGIAGFLAESALTSHLSALTLKESKDSNAEEACRLTIPEDLPEMNYGQLAVQDSHAESLKDSLSAVRKSAQAAARIFQAFRVESFHRKKVVEYGDDDCGLSDEHTFSLISLQKVKQGQHDTRLHSAAVRIQNKFRGWKGRKEFMIIRQRIVKLQAHVRGHQVRKNYKKVVWSVGIVEKVILRWRRKGRGLRGFRPEKQLEGQTQIQPAKTEDEYDYLQDGRRQAEGRLQRALDRVRSMTQYPEAREQYRRLTTCVAEMQQSRMMQDEMLSEAAGADGSDFMNGLEDLICRDDPQMSAIW

SEQ ID NO: 15831 - protein, 501 aa, Oryza sativa
  Clone ID: TF_OSC9750j.C1.p3.gm
MAETPAAAAAVEFGPHPHDMLTLDGELLRVLITGDRVRLEEILREAGSYGGDGEHPGDGGNGGSPPHEVPPLVDGHRDPRRDGPELIAINLPDHAAPAVVVEAGLSLSPRRSYGYLKSGACSATRSGLPSRSDEQREHGLHLVASRGHAELAALIRVRAPSLVATRNRCLDTPLHCAAKAGHREVVARLLDTRTGVAEAEVELAAAVAEAALRVRNCLGATVLHEAVRHGHTEVVHLLMSRAGAAELASVASDDGVSPLYLAATTGSVRMVQELLLRPADDGRRRSSASFTGREGQSTFSLCPLYPREGHVIPHNPTAVTYIVLGGFGRGTRTSIFFHFRYDVPTLKLLRCTSLPACPLLSNGGLTTTSLLLLVPLHIPFHVPLLVPLRIPLHVPFLVQVLRLARRRGDGGGGVALHAAAVLRGGEGGGVAWRRWRCARGGEGGGVACRRRRGAASSWRGVSWRARCGGGGGGGGGGEDDELETTARYGGVGAGICPRQWR

SEQ ID NO: 15832 - protein, 468 aa, Oryza sativa
  Clone ID: TF_OSC401064j.C1.p99.fg
MEPKPSTPTAAATPRFKLGKQSSMAPDRGGAGESSEEGSSEAVGVMGFQLMYMAHEGDVEGIQELLDAGADPNFRDSDGRTAMHIAACEGQAEVVELLLQRGADAVAEDQWGSTPLADALHYQNHDVIKILEKHGSKLKIAPMHVKNVREVPEYEISPNELDFTNGNGISKGTFRKATWRGILVAVKKLDDDLIMDENKVQAFRDELDVLQLIRHPNVVQFLGAVTQSSPMMIVMEFMPKGDLRKHLSRKGALEPSYAVKLALDIARGMNYLHEHKPQAIIHRDLEPSNILRDDTGHLKVADFDLCKMLKWRRKVREEKAVTSPGNACRYVAPEVLRNEEYDTKVDVFSFALILQEMIEGCLPFYDKKNNEIEKAHNSKERPPFRAPPKHYAYGLRELIEQCWSENPASRPDFRTIIEQLSYIQNEISQRNRWKVKPLKCFLSFEGMWKKDRNEGSTTRSSRSSRSYF

SEQ ID NO: 15833 - protein, 494 aa, Oryza sativa
  Clone ID: TF_OSC400896j.C1.p7.fg
MGNSLGCSASGERLVSAARDGDAVEARMLLELSPALARYSTFGGLNSPLHFAAAKGHLDIVTLLLEKGADVNVRNYCGQVFHFYSSILSLSELEHFVDIFLRLFGMVDEDCVDARMPAWPLGGGSDASALQMQCMVTRADYLSGRTALHFAAHDGLVRARLRYINKPADGGVTALHMAALNGAGSTPLHYAAGGGNAECCQLLLSKGASKLTLNCNGWLPIDVARMFGRRFLEPLLSPNSNSSIPAYQPSNYLALPFMSILNIARPDYVLCRIAIISETVKLGREFGLLHTVASVDDSDLCAVCLERSCSVAAEGCCHEFCIKCALYLCSTSNTRVEFTGPPGSIPCPLCRNGIMSFTKLPSTPTEGLKSSSALTFCNPCMLNTRSVDSPATISKAEIRRNRVAAVSSELVCPLTCSPFPSSALPTCRCSDDDPCDAIETQDGSEVQSPQPSHCASMEMDKREQQDLDRTSCSGMFWSRRSCHREEQCNAEINA

SEQ ID NO: 15834 - protein, 709 aa, Oryza sativa
  Clone ID: TF_OSC32694j.C1.p2.fg
MDHHRQMQDIQLARCSSQHHGSEAAVTARGDSAGGLEMCPALYLAASKGRAEEVMALLLQPRHGGVAQGHLDQVNGTWMVPHNGREVEGPGPGAGRAVQAPWAPPSQGPPDQRHGQCNISEVSAESNTVFHVAAEQGHDELIREVYLRFKESSLLSRRNSSQDTPLHCAARAGHAGAVTAIVQLLALDSILGCKNEAGDTALHLAARNGHGAAVEALVSAAAPELSSELNAAGVSPLYLAVMSKSVTAVKAIITTCSDASPVGPNKQNALHAAVFQISEMVDLVLKWKPALSGQCDVKGSSPLHLASSDGDRSIVSAIVRAAPPSTAFLKDSDGLSAIHVAARMGHHHVVEELISAWPDAAELRDGRGRTFLHAAAEKGHAPVISLAVKNPMLCGIVNAQDKDGNTALHLAVAAAASKGLAALLSAGDNVRVNIMNNDGYTPFDLAANSSSFLSMSSDLLLETESGKKERKKRDMRTSREDTWSKISLVVTLSAYGAQSCPQRQDHLNQWRGNDTTDWIRKTSNSLAVVAVLVATVAFSATFNVPGGYGDDGKAVLQAKTAYKFFIVFDSVAMTTSVVAVILIVYGKASGSWKSFILALHFMWVSMIGMIVAFWAALVAVMRRRTINIVIYEVIINGIYVLVLSIMILTKPASWISFVKFMFSSLLPERHHRRVARQYPFAGTYSRNYSVFVVTNILAYVGAFLALSKS

SEQ ID NO: 15835 - protein, 891 aa, Oryza sativa
  Clone ID: TF_OSC100304j.C1.p3.fg
MPTTKCAVPLVSGAAGGGGSAELTRQLSSTQASPRFSFSSGVLPSLGSRGGGERHARLRRFIVSPYDRRYELWNNYLILLVVYSAWVTPFEFGFVPEPAGALAAADNAVNAFFAVDIVLTFFVAYTDPKTFLLQDDPRKIALRYITTWFVLDVVATIPTELARRILPPDLRSYGFFGILRLWRLHRVGILFARLEKDRKFSYFWVRCVKLVCVTLFAVHCSACFYYLLADRYPDPTNTWISAYMPNFHKASIWSRYVASMYWSITTLSTVGYGDMHAENTGEMVFTTTYMLFNLGLTAYIIGNMTNLVVHGTSRTRKFRDMIQAATSFAQRHQLPARLQEQMVSHLSLKFRTNSEGLHQQETFEALPKAIKSSISHHLFFGLVQNVYLFEGVSNDLIFQLVSEMNAEYFAPREDIILQNEAPADFYIIVSGSMLAGMAKSGDVVGEIGVLCYRPQLFTARTRSLCQLLRLDRAAFLRIIQSNIADGTIVMNNLIQYLREKKEIASIVAVAKEIDDMLARGQMDFPITLCFAASKGDSFLLHQLLKRGLDPNESDHYGRTALHIAASNGNEQCVRLLLENGADSNSRDPEGRVPLWEALCRRHQTVVQLLVDAGADLSGGDAAPYARVAVEQNDAALLGEIVRHGGDVSGACSGDGTTALHRAVLDGNVQMARLLLEHGADADAEDVNGLTPRAVAEQGGHADMQLAFASATRHEPRKARPPPPASAIVPVPLRDGVDSSPSSSSRRGRTSSTSAASARSTPQRMANFRNSLFGVISSSHAFHHEGGYRGGGGGGGAAAERERSSSSPPLVRVAISCPESRGGKDHSSKLVFMPETLRGLLELGAARFGVSPTRVVTSGGADVDDARLVRDGDHLLLVTDKWVPPENRSRNQ

SEQ ID NO: 15836 - protein, 172 aa, Oryza sativa
  Clone ID: TF_OSC900166j.C1.p8.fg
MDEDDRQSLTSVRMEGYEPLFEAASSGKIDLCKYLVEELGFDVNAEANHDSGMTPLFCAVLDGQEITVKYFLDKGADPNKKDAAGFAPLHEAAKKGHVGIARLLLSKGASVDVSSSEGTPLHVAASNGKSSTVQILLEHRANIQRSQVDAKSFRNRVQVFYVPALVCYCLTF

SEQ ID NO: 15837 - protein, 496 aa, Oryza sativa
  Clone ID: TF_OSC100279j.C1.p9.fg
MGFLSLVGNSFGCSASGERLVSAARDGDLQEARALLEYNPRLARYSTFGGRNSPLHYAAAQGHHEIVSLLLESGVEINLRNYRGQTALMQACQYGHWEVVQTLMLFNANVHRTDYLNGGSALHFAALHGHARCLRLVLADYVPSMPNFWNSMKDSLSEEGPSADLDEDGLFKMVNQKADGGLTPLHMAALNGHVECVQLLLDLGASVIEATIEDGTTIDLIGAGSTPLHYAACGGNAVCCQLLIARGASLSAQNASGWTPLMVARSWHRNSLEEILSKEPESRIRTVPSPYLCLPLMSIMSIAREFGWRYLNQSPVCIDPCAVCLEGSCSVAAEGCKHEFCTRCALYLCSTSYTSVSPAGAIPCPLCRHPIIAFTALPGTSPIRELPRNSLSLSFCTTCPAVNSDSTPSIASHLYRTEFQCARMPPMGSSSFRSLSCQRLPAMKLNPSFCMGAMDTNPCLIRCSRFGPSFRRSASQGESSRRAWPLTFDPIAATGS

SEQ ID NO: 15838 - protein, 420 aa, Oryza sativa
  Clone ID: TF_OSC12218j.C1.p1.fg
PTEMILGWNSGLAKQGDEKGRTPLHFAASTNRLSMRAMVKLLLEHDRSCVYQPDDEGSYPIHVAAALGGVAGLFAVRLMIEFCPDSAGLRDGTGRSFLHVAVDNLCPSVVALARFSPGLRSAVMNMQDGNGNTALHQAVHVCDIMIFFFLLIDRRVLLDVKNNMGYTPVDLARFKNHLKGLNYPVNPQCMMSSSLTHTAGNHPSGDNPTDSLNEKRVEKEERGELSTIYKDAAQNLTIGAVLIVTVTFAATFTMPGGYVSSSDDDGERRGTPTLAGTCAFDAFVVANTLAFMLSGMATFSLMYAGYTPLDFAFRERCVKLSMGLLHSSVRSVGAAFLTATYVMLARVAPKLVIAVYAAAAVGLVYINFEVWMLGWMTLALLSRGDILAALIVGLQTVAVAFWFSWPFAVIFVLPLILKGH

SEQ ID NO: 15839 - protein, 89 aa, Oryza sativa
  Clone ID: TF_OSC28351j.C1.p1.fg
HCEIVELFLSRGVDVDLDSITGTPLLTAAMNGQYSTMKILLEHHADVGADVNFRDPNGVTCVMVAANHGSPVIMKCLLDAGANSNIPDE

SEQ ID NO: 15840 - protein, 450 aa, Oryza sativa
  Clone ID: TF_OSC401179j.C1.p5.fg
MEAAAKLKRSISRQLSSGAARVWRQLSLEPVYTPRRAGAVGGGGGGGGGGGGGGGGARPTRFGLARQSSLDPTPREGGGAAEDGSGAAAMLAVPENLDATMRLLFAACQGDVAGVEELLRDGVDVDSIDLDGRTAMHIAACEGQGEVVRLLLSWKANMNARDRWGSTPAADAKHYGHFEVYNLLRARGAKTPGHYVARWYGSKVFVKILDKDSFSDANSINEFKHELTLLEKARHPNLVQFVGAVTQNVPMMIVSEYHQKGDLASYLETKGRLQPYKAIRFSLDIARGLNYLHECKPEPIIHGNLSTKSIVRDDEGKLKVAGFGSRSLIKVSEDNPQMDQTTSKFNSVYTAPEMYRNGTFDRSVDVFAFGLILYEMIEGTHAFHPKPPEEAAKMICLEGMRPPFKNKPKYYPDDLRELIQECWDPTPSVRPTFEEIIEGKQIMKYMRNIP

SEQ ID NO: 15841 - protein, 375 aa, Oryza sativa
  Clone ID: TF_OSC409420j.C1.p3.gm
MAKRPEARWPGTQHGVLVRPKHGTARQGSGPCRPGSTTGPCLGLSTGTMGHPRLRAGPARPDGWWSFLGGRRSPWAGTARHEVPIGPCRPDGWWAVPGPGRAGRAIYIDRQLLEAAKSGDSTTLKEDMAAREADVLLRTTKNGSNCLHIACIHGHLKFCKDALEINQSSLLAAVNSYGETPLLAAVTSGHTALASELLRCCSESGLGDVILKQDGSGCNALHHAIRCGHKDLALELIAKEPALSRAVNKDNESPMFIAMMRDFADIFEKLLAIPDSSDVGCKGFNALHAAVRSGNAGFGLDGSIKNYQELKYEMHWIHYFAGSGDWRASAAGFGWMGDEEDESSSRCGAVSPPPSPVSRLGCAAAAASRVSQSVP

SEQ ID NO: 15842 - protein, 495 aa, Oryza sativa
  Clone ID: TF_OSC401887j.C1.p2.fg
MEETLKSLSMDYLNLLINGQAFSDVTFSVEGRLASSSASSSAAPPPTRPPRRRARILLDHLSPRSPSGGASASSPRGAGGSAAAAAAATPGAVIPVSSVSYEVFLLLLQFLYSGQVSLVPQKGEPRPGCGERGCWHTHCAAAVDLALDTLAAARSFGVEELALLTQKQLAGMVEKASIEDVMKVLMASRKQDLHQLWTTCSHLVAKSGLPPEVLAKHLPIDVVAKIDELRLKSMSRRSPFLSHHHHHPHAAAAGIEASSAAELDDHHKIRRMRRALDSSDVELVKLMVMGEGLNLDDALALHYAVENCSREVVKALLELGAADVNHPAGPAGKTPLHVAAEMVCPDMVAVLLDHHADPNVRTVDGVTPLDILRTLTSDFLFKGAVPGLAHIEPNKLRLCLELVQSAAMVMSREDAQTAAVNAAPIYGESPGGGGGGGVYNASGTSSSMVNLSLDNRMVYLNLGMDAQFGKMNDGGDGDDGGSRGPSSLFSPHGFP

SEQ ID NO: 15843 - protein, 1621 aa, Oryza sativa
  Clone ID: TF_OSC32692j.C1.p2.fg
MDTPLHCAARAGHAGTVTILVNLAQDCEENILGCQNAAGDTALHMAARHGHGATVEALVVARAKATVLVSMKVVESVDQFPKRSILMASSSSTAATNPFQGHPISEKLGKANHALWKVQVSAAVRGARLQGHLTGATKRPPAEIAVTKDGATKKEPNPAHEDWEATDQQVLGYLLSSLTREVLMQVATCDTAAEVWSAIEQMYSTHTRARAINTRFALTNTKKGNMSTPEYFAKMKSLGDEMATAGGRPIDEEELIQYIITGLGEGYSEVVSAVCARVEPISVSDLYSQVLNFEARQAIYRGAQEVTVNVANRGGFSHGGRGNSNGGQGGSRGGGGGGHGRGNGGGGRGRGRTPGGVDKRPICQVCFKRGHTAADCWYRYDEDYVPDAKHVAAAAVNSYGVDTNWYIDTGATDHVTGELDKLTMKEKYNGGEQIHTASGAGHIYISRDVVFDENIFPFTELHANASARLRSEIDILTPELLGPIRSVGNEQCMHPVTNPLSADVSAALSNRANEPHRDGAVHPADAEDPPATPPLDASFGPEPDRVVHHSPAATSSGRHPGPTPGSVPRGVASSLAEETAEDSVSQAVQEQESQVVQEQEQSSPAQEHAQAVTDETNTLQHADVTDTGSEAPAGPRTRLQSGVRKEKVYTDGTIKYKHSWFTASGEPTNDLEALKDKNWKLAMDSEYDALVKNKTWHLVPPQRGRNIIGCKWVYKIKRKADGTLDRYKARLVAKGFKQRYGIDYEDTFSPVVKAATIRIILSLAVSKGWSLRQLDVQNAFLHGYLEEEVYMLQPPGFEDPTKPHHVCKLDKALYGLKQAPRAWFSRLSKKLMDLGFKGSKADTSLFFLNKGDITMFVLVYVDDIIVASSSEKATAALLQNLKGEFALKDLGELHYFLGIEVSKVQNGIVLNQDKYANDLLKKVGMIDCKPANTPLSVSEKLSLHEGSLLGPEDASHYRSVVGALQYLTLTRPDIAFSVNKVCQFLHAPTTVHWIAVKRILRYLKQCTRLGLEIHKSGSTLVSGFSDADWAGCLDDRRSTGGFAIFLGSNLVSWNARKQATVSRSSTESEYKAIANATAEIMWVQTLLAELEIKSPKAAKIWCDNLGAKYLSANPVFHARTKHIEVDYHFVRERLLSRFINLGFGCSQLRRTLYRHDGGCSHHIYINTKATHRISAIVSTQTNSQTELNKAGVSPLYLAVMSRSQAQNKNVFVNSIDKFVSLAEMVHLLLQWKPELASQVDCNGSTPLHFAASDGNRKIVHAILAIVPTGTVYMKDSDGLSALHVAARLGHANVVKQLIGICPDAVELRDGHGETFLHTAVREKQSSIVSLAIKKHKQVGGLLDAQDGVGNTPLHIAVVAGSPDIVNALLHKGKVQSDVLNDDGHSPLDLASTSTNLFNMVSFVVILVAFGAQGRPQRNDHLKPWSGRDIGKGIERTTDSLAVVAVLIATVAFAAGFNMPGSYGDDGTANLKGRFSFKWFMVLDTVAVAASVVAVILLVYGKASRSAGSWKSFVAALHFIWVSLVSLILAFFAAFRATMRTSRAVSIVFMVIYVCLIVLVVNVGTWVEPVTTMRIFWRFVWRSHRTNAVKRQYPLAVATVYNCLLFSVINFIIFAGLGVVPS

SEQ ID NO: 15844 - protein, 525 aa, Oryza sativa
  Clone ID: TF_OSC401247j.C1.p14.fg
MGKKGKGRHRGRGGGGGGGGGGGGGGGGGGVGGDRGGGGSGGGGPGMGRRGSDARAQQAAAAAAAISGIATRLGFGCTVNVGGGMPPQMEFLMACTDGDVARLKGNAIVMGAVVCEASLDRVRNRLYLTMKSLTIVTALGMTPLFCAVLDGQEITVKYFLDKGADPNKKDAEGFAPLHEAAKIGNVGIARLLLSKGASVDVSSSEGTPLHVAASNGKSSIVLILLEHHANPNVMTPDCYTPLTAVLSATPEIVNESECLKCMKLLIKAGAHYKLATPDTPLEIATRNGLTECVAYLLEISTVVRLSEHDKGSDGDRKSKLKLHGGKAFEEGDYAGAIIFYTEFLCKYNFFNNPSPNYKQQRLAQKNPTPHIPHRRSMAVSASQLTSRILLSLLLSRNYCCVNKGRLSLNFQWHCHHVGDTLAMKLDPADATLYSNRSLCHLRSGAAQEALLDANDCIKLKPEWTKGYYRKGCAHMALKEYEEACTAFMAGTKLDPLSDEMQNAFWEAAKAMKNEYMAGRRVSSVD

SEQ ID NO: 15845 - protein, 391 aa, Oryza sativa
  Clone ID: TF_OSC421303j.C1.p3.fg
MASAFFNGAMYAGGWMQHMLFEAAHNGDLDLVRGMAMLLVEGRGRLGEAVQAARLRGTGPLDGMGALHIAASKGRLEVCRYLVEELRLDVDDTDQEGRTPLIIAIVFNHVSTVEYLLDRGADANKASHNGLTPIHFAICLGECGMVQLLLAKGACVDPVAYCGTPLHVAATEGRDGAMKILLDHNADFNKMVDGLTPLDTAMDSGELKCINLLIKVGAVVSEDRMLTAENSGSTECFNYLMEETGANCNISDNGEPVNKRKATDLKSLGNKAVEKKDYLSATGFYSKALYLYPDDATLFSNRSLCWHRMGDGGKALLDAHECRKLRSDWPKAYYRLGAALMLLKDYESACEALYNGFKLDPGNSEIEDAFRYPFCLFWSHYGNMAYDDSFG

SEQ ID NO: 15846 - protein, 288 aa, Oryza sativa
  unsure (1)..(288): unsure at all Xaa locations
  Clone ID: TF_OSC402924j.C1.p4.gp
ATCSHLVARSGLSADLLAKHLPIDVVAKIEEIRAKSPLAAVAAPRSPFLTHHYLPMNPASSAADRDNKIRRMRRALDAADIELVKLMVMGEGLDLDDALAVHYAVQHCNRDVVKALLELGAADVNSRAGPTGKTALHLAAEMVSPDMVSVLLDHHADPNSRTLDGVTPLDVLRSLTSEFLFKGAVPGLTHIEPNKLRLCLELVQSAVMVTTRDDGAPVTGGAEAGGSDGGNFPRSDADDSLVSLTMNSTLMYQGQEMAAAVAAGEGRKSNNGRGSPPPAMYFPNGFAX

SEQ ID NO: 15847 - protein, 287 aa, Oryza sativa
  unsure (1)..(287): unsure at all Xaa locations
  Clone ID: TF_OSC900071j.C1.p24.gp
ATCSHLVARSGLSADLLAKHLPIDVVAKIEEIRAKSPLAAAAAPRSPFLTHHYLPMNPASSAADRDNKIRRMRRALDAADIELVKLMVMGEGLDLDDALAVHYAVQHCNRDVVKALLELGAADVNSRAGPTGKTALHLAAEMVSPDMVSVLLDHHADPNSRTLDGVTPLDVLRSLTSEFLFKGAVPGLTHIEPNKLRLCLELVQSAVMVTTRDDGAPVTGGEAGGSDGGNFPRSDADDSLVSLTMNSTLMYQGQEMAAAVAAGEGRKSNNGRGSPPPAMYFPNGFAX

SEQ ID NO: 15848 - protein, 494 aa, Oryza sativa
  Clone ID: TF_OSC900071j.C1.p23.fg
MSSEDSLKSLSLDYLNLLINGQAFSDVAFSVEGRLVHAHRCVLAARSLFFRKLFCGLDPNHQPPPPPPPPLNWPTAGGGGGGSGGGGRGGAGGGGGAPATPELVIPVSSIRYEVLVLVLQFLYSGQASVAAPKSGPLPGCGARGCWHTRCGAAVDLALDTLAAARSFGVEQLALLVQKQLESMVKEASVDDVMKVLMASRKFEMQELWATCSHLVARSGLSADLLAKHLPIDVVAKIEEIRAKSPLAAAAAPRSPFLTHHYLPMNPASSAADRDNKIRRMRRALDAADIELVKLMVMGEGLDLDDALAVHYAVQHCNRDVVKALLELGAADVNSRAGPTGKTALHLAAEMVSPDMVSVLLDHHADPNSRTLDGVTPLDVLRSLTSEFLFKGAVPGLTHIEPNKLRLCLELVQSAVMVTTRDDGAPVTGGEAGGSDGGNFPRSDADDSLVSLTMNSTLMYQGQEMAAAVAAGEGRKSNNGRGSPPPAMYFPNGFA

SEQ ID NO: 15849 - protein, 494 aa, Oryza sativa
  Clone ID: TF_OSC402924j.C1.p1.fg
MSSEDSLKSLSLDYLSLLINGQAFSDVAFSVEGRLVHAHRCVLAARSLFFRKLFCGLDPNHQPPPPPPPLNWPMAGGGGGGSGGGGRGGAGGGGGAPATPELVIPVSSIRYEVLVLVLQFLYSGQASVAAPKSGPLPGCGARGCWHTRCGAAVDLALDTLAAARSFGVEQLALLVQKQLESMVKEASVDDVMKVLMASRKFEMQELWATCSHLVARSGLSADLLAKHLPIDVVAKIEEIRAKSPLAAVAAPRSPFLTHHYLPMNPASSAADRDNKIRRMRRALDAADIELVKLMVMGEGLDLDDALAVHYAVQHCNRDVVKALLELGAADVNSRAGPTGKTALHLAAEMVSPDMVSVLLDHHADPNSRTLDGVTPLDVLRSLTSEFLFKGAVPGLTHIEPNKLRLCLELVQSAVMVTTRDDGAPVTGGAEAGGSDGGNFPRSDADDSLVSLTMNSTLMYQGQEMAAAVAAGEGRKSNNGRGSPPPAMYFPNGFA

SEQ ID NO: 15850 - protein, 494 aa, Oryza sativa
  Clone ID: TF_OSC413271j.C1.p2.fg
MSSEDSLKSLSLDYLSLLINGQAFSDVAFSVEGRLVHAHRCVLAARSLFFRKLFCGLDPNHQPPPPPPPLNWPMAGGGGGGSGGEGRGGPGGGGGAHATLELVIPVSSIRYEVLVLVLQFLYSGQASVAAPKSGPLPGCGARGCWHTRCGAAVDLALDTLAAARSFGVEQLALLVQKQLESMVKEASVDDVMKVLMASRKFEMQELWATCSHLVARSGLSADLLAKHLPIDVVAKIEEIRAKSPLAAVAAPRSPFLTHHYLPMNPASSAADRDNKIRRMRRALDAADIELVKLMVMGEGLDLDDALAVHYAVQHCNRDVVKALLELGAADVNSRAGPTGKTALHLAAEMVSPDMVSVLLDHHADPNSRTLDGVTPLDVLRSLTSEFLFKGAVPGLTHIEPNKLRLCLELVQSAVMVTTRDDGAPVTGGAEAGGSDGGNFPRSDADDSLVSLTMNSTLMYQGQEMAAAVAAGEGRKSNNGRGSPPPAMYFPNGFA

SEQ ID NO: 15851 - protein, 178 aa, Oryza sativa
  Clone ID: TF_OSC3754j.C1.p1.fg
YVDKLLIAKDTNQITIDILEAVRTNDVRAAYRILVLADVSPNMIYDELNNDVHHDPSVTDGKLFDPASCDVKDDSGKPEGCLQGCSLLHIACQYGHSIMAELLLLFGADINKQDFHGRTPLHHCVRRKNDALTKHLLKRGARTTIKDGGGLTALERRMELGAITDEDLFILFVRYDQD

SEQ ID NO: 15852 - protein, 649 aa, Oryza sativa
  Clone ID: TF_OSC407383j.C1.p4.fg
MVLGVKVWRTCGLRIMPDMEHQSEGRFFAWHIQIEVDHMLSERLMQFIDVDLHGVKAREKFVSVRKGTRAEVVTGLEEDLHNAKSAFERCRFNLGYELLSQMEPFIHQVLTYAQQSKEMAINEQDKLAKRIQEYRTQEEIANLRMASNVDTSTSGDGIHVVGLQSYKKIEALMQSTANGEVQIIKQGYLFKRSENSREWKRRFFVLDSHGTLFYYGNKGQSQGAASQQTAGEGTGVFSRFRFLNQKAPTQGDNALSCHKIDLRTSTIKIDAEENDLRFCFRVISPMKAYTLQAESGADQKDWIEKVTGVIASLLNLPFPRQVSYGNLEAEHHGSANSVDSLSLEENKSPEGHDDIFNHLRNIPGNDSCAECRSPDPDWASLNLGILICIECSGAHRNLGVHISKVRSLRLDVKVWEPVIMDLFHELGNDYTNSIWEAMLPKEDQGINEFNDAILFIEKPKPTDAFSIKERYIQTKYVDKLLIAKDTNQITIDILEAVRTNDVRAAYRILVLADVSPNMIYDELNNDVHHDPSVTDGKLFDPASCDVKDDSGKPEGCLQGCSLLHIACQYGHSIMAELLLLFGADINKQDFHGRTPLHHCVRRKNDALTKHLLKRGARTTIKDGGGLTALERRMELGAITDEDLFILFVR

SEQ ID NO: 15853 - protein, 776 aa, Oryza sativa
  Clone ID: TF_OSC407404j.C1.p11.np
MAAFTKLEDSPMFRKQVNSMEQLSDELKQRCSNLHKGCKRFMGSLDEGYAGDLTFADALEAFGAGQDDPVSVAIGGPVMSKFTTAFRELGTYKELLRSQVDHMLSERLMQFIDVDLHGVKDCRQRLDRATVGYDQAREKFVSVRKGTRAEVVTGLEEDLHNAKSDLHNAKSAFERCRFNLVHAVHALSNIEAKKKYEFLESISAVMDAHLRYFKQGYELGYELLSQMEPFIHQVLTYAQQSKEMAINEQDKLAKRIQEYRTQEEIANLRMASNVDTSTSGDGIHVVGLQSYKKIEALMQSTANGEIIKQGYLFKRSENSREWKRRFFVLDSHGTLFYYGNKGQSGSKERHHSKQLEGTGVFSRFRFLNQKAPTQGDNALSCHKIDLRTSTIKIDAEENDLRFCFRVISPMKAYTLQAESGADQKDWIEKVTGVIASLLNLPFPRQSQVSYGNLEAEHHGSANSVDSLSLEENKSPEGHDDIFNHLRNIPGNDSCAECRSPDPDWASLNLGILICIECSGAHRNLGVHISKVRSLRLDVKVWEPVIMDLFHELGNDYTNSIWEAMLPKEDQGYVEEFNDAILFIEKPKPTDAFSIKERYIQTKYVDKLLIAKDTNQITIDILEAVRTNDVRAAYRILVLADVSNMIYDELNNDVHHDPSVTDKLFDPASCDVKDDSGKPEGCLQGCSLLHIACQYGHSIMAELLLLFGADINKQDFHGRTPLHHCVRRKNDALTKHLLKRGARTTIKDGGGLTALERRMELGAITDEDLFILFVRYD

SEQ ID NO: 15854 - protein, 855 aa, Oryza sativa
  Clone ID: TF_OSC900240j.C1.p3.fg
MKTSSFESASSSGGSGGGGGGGGGEGSGSFNLRNLSKLILPPLGVPAGGHAQSGHAGPNDRRVISPLDSRYRCWDTFMVVLVAYSAWVYPFEVAFMNASPKGGLEVADIVVDLFFAVDIVLTFFVAYIDSRTQLLVRDRRRIATRYLSTFFIMDVASTIPFQGLAYIVTGEVRESPAFSLLGILRLWRLRKVKQFFTRLEKDIRFNYFWIRCARLIAVTLFLVHCAGCLYYLIADRYPHREKTWIGAVIPDFQEASLWIRYTSSVYWSITTMTTVGYGDMHAQNTVEMIFNIFYMLFNLGLTAYLIGNMTNLVVEGTRRTMEFRNSIRAASNFVGRNHLPPRLKQQILAYMCLKFRAESLNQQQLMDQLPKSICKGICEYLFLPVVKDVYLFKGVSREVLLLMVTKMKPEYIPPKEDVIVQNEAPDDVYIVVSGEVEVIYSDGEAEERVVATLGTRGVFGEVSALSDRPQSFTLRTRTLCQLLRLRQAALKEAMQSKPEDSVVIIKNFLKHQIEMHDMKVEDLLGEDAAGEYDHGNIPCNLLTVAATGNSSFLEDLLKVGMDPDVGDSKGRTALHIAASKGYEDCVLVLLKQACNVNIKDAQGNTALWNAIAARHHKIFNILYHFARVSSPHHAAGDLLCLAARRGDLDTLRELLKHGLAVDSEDRDGATALRVALAEGHADVARLLVLNGASVDRAASHNEQQAAAAVSVDELRELMKTRELAHPVTIVVDSPSPAAAAVIREVGSSGDSRNGRRQSARSDGAHWPRVSIYRGHPFVRNRSSEAGKLINLPGTMEEFRIIIEEKLKVDARKTLIMNDEGAEIDSIDVIRDNDKLFIVTEEHMTAVASMDSVSGS

SEQ ID NO: 15855 - protein, 633 aa, Oryza sativa
  Clone ID: TF_OSC100264j.C1.p5.fg
MASEIEVLEDTTAAAAAPAATIGGGEVAGAGAGEEGEAAADAEALKDDVYTGAAYGDLEKLHRLVEREGRPVTEPDALGYHALQWAALNNRVAAAQYILEYVLSFSVVCFGGMTVLSLLSGQHGADVNAIDHTGQTALHWSAVRGHIQVAELLLKEGAKVDAADLYGYQTTHVAAQYGQTSYLYHIVAKWNADPDVPDNDGRSPLHWAAYKGFADSLKCFSLGCTPLHWAAIRGNLESCTVLVQAGKKEDLMVQDNTGLTPAQLAADKNHRQVAFFLGNARRVHERGCVISGQYSSNMTLLFGLFSWLGIFLATAGLVMFYKCSRKDPGYIDKNTRDAQNQRDDEPLLKRGLDNPELLAGNWSQLCITCKIVRPVRSKHCSTCDRCVEQFDHHCPWVSNCIGKKNKWEFFMFLILEVSAMIITGVTAVIRVVGDPDSPASFGGWLNYSATNHPWVVSFVVMDLFLFFGVITLTVVQASQISRNLTTNEMANAMRYSYLRGPGGRFRNPFDHGVRKNCSDFLLKGYNEDIERVEQTLQPDEELGMIQMTRSAVSQNGESMSLHANGTDHGCADPQGNSKSHRHSHGSSQCCSHSKRPDKTPLGLGLGLGRNNPSSRYTRSLPSIHSESSAYLPL

SEQ ID NO: 15856 - protein, 518 aa, Oryza sativa
  Clone ID: TF_OSC423045j.C1.p7.fg
MAGRHTSHTMEHKLLKAVATGDADLLAQALGIWPTATAEQGDVDQSCCLKGVTAEGSSVLHIAASRGHLKLVVMICTHDISLIKSRNNQLDTPLICAARAGHADVVDYLVRAASAMQEPERSVLRAWNSGGATAMHEAVRNGYAPVLQKLMSSDSGLATAVLGGCVQPARYGRQQATRGQMEKPRCTLRSTSVKGFTTPTLVFRAHAFQTAKREMSESLRRWEPTLAEKVDIDGRTALHYAVLTGETGLVELLLDNSSAAYIPDNDGLFPVHVAAIAGKASVTRMLMEMCLNCDELLDNKQRNVLHCAVEYGRLMVVWYICRNPKFTRLLNAGDCEGNTPLHLAVKHGNAIIISCLMMNTRVNLSIINHGGSTPLDVAFNKSTRYYSLSWLSSTSITMCLQACNAYTSRFLNRADKRFLEDKEESSVYTNVSQSILCISVLIAAGSFAAAFTPPGGYIADGEDAGMPLLKEYAEFSSYVAANSMSFYCSTFATCLLVHDSLTNRRVRNSQRLSLRNWN

SEQ ID NO: 15857 - protein, 281 aa, Oryza sativa
  Clone ID: TF_OSC400151j.C1.p22.fg
MENEYIYREEEESIKEDEESWPFRRNQPNVIINNGAGSPLMSSLIYRSLKCMKLLIKAGADVNGKGTVVTPLMLAASQGGYTNFIQFLLKAGANPNIPDDLGWLPIEHAALRDCREEVEMLFPLTSPIPNVPNWSVNGIIAHAKVKNTKPMDQHQKESRKVVLKAQADLVFKQKNYAAAAKIYDLAIAHGPTAVLYANRSICRLLMGDGEGALSDAYRCRMMRPNWAKACYRQGAAHMLLKEYKHACDALMDAQKLDSGNVEIERELRKARELMAKPPDEQ

SEQ ID NO: 15858 - protein, 858 aa, Oryza sativa
  unsure (1)..(858): unsure at all Xaa locations
  Clone ID: TF_OSC400177j.C1.p39.np
AGAGGWDPLVGSEIHGFLTYPDLNYEKLVAEAAARWFRPNEIYAILANHARFKIHAQPVDKPVSGTVVLYDRKVVRNFRKDGHNWKKKKDGRTVQEAHEKLKIGNEERVHVYYARGEDDPNFFRRCYWLLDKDLERIVLVHYRQTAGTSFSLLFYVLQXIIHFGCXSEDAFXISNTHDQSLNLVYLDQENAMAPPNPEPEVADVPTVNLIHYTSPLTSADSTSANHGLNQVNANHFGALKHQGDQTQSLLASDVDSQSDQFISSSVKSPMDGNTSIPNEVPARQNSLFHRASVQTNEFHRASVQTNERLLEINEISPEWAYSTETTKVVVIGNFYEQYKHLAGSAMFGVFGEQCVAGDIVQTGVYRFMVGPHTPGKVDFYLTLDGKTPISEICSFTYHVISSLEARLPPSEDDYKRTNLKMQMRLARLLFATNKKKIAPKLLVEGTKVANLMSALQKEWMDLWNILSDPEGTYVPVTESLLELVLRNRLQEWLVEMVMEGHKSTGRDDLGQGAIHLCSFLGYTWAIRLFSLSGFSLDFRDSSGWTALHWAAYHGRERMVATLLSAGANPSLVTDPTPESPAGLTAADLAARQGYDGLAAYLAEKGLTAHFEAMSLSKDTEQSPSKTRLTKLQSENLSEQELCLKESLAAYRNAADAASNIQAALRERTLKLQTKAIQLANPEIEASEIVAAMKIQHAFRNYNRKKAMRAAARIQSHFRTWKMRRNFINMRRQVIRIQAAYRGHQVRRQYRKVIWSVGIVEKAILRWRKKRKGLRGIASGMPVVMTVDAEAEPASTAEEDFFQAGRQQAEDRFNRSVVRVQALFRSYKAQQEYRRMKIAHEEAKVIFFKTFSNNCWHVP

SEQ ID NO: 15859 - protein, 391 aa, Oryza sativa
  Clone ID: TF_OSC33142j.C1.p5.fg
MDGRLFEAAKSGDCRLMKELVAAMDPSILLRTTPQGNTCLHISTINGHEEFCQEVLMLDNSLLTVANSHGETPLLTAVTNGRTALASVLLRRCCEAGLREAILKQDENGCNALHHAIRNGHRDLALELIAAEAGLSQGVNKYRESPMYIAVMRDFTDIFRKLLGIPGSAHVGCHGRNALHAAVRNGNPVIAKELVEKRPGLAREFDDEMDTPMHHAAMWGKTHVLGALLQYDWSLGYVLSNNKDSVPLLNSAAYRGYVSVARELVHHCPDAPYYDANGCTCLHQAAFKGHLEFVEFILESPYLRKLVNMRDNGGNTALHYAVQDCNPRIVAALLSHGDTDVTVLNYTGNEAVWQLGGAADYAKTLNWELNTAILRSYTTYHALHGLLLLLL

SEQ ID NO: 15860 - protein, 2278 aa, Oryza sativa
  Clone ID: TF_OSC401247j.C1.p10.fg
MADPSFNFRVGLALRRALPYYNDAGPQSEFFEAATRGNVRRLRELASGKDAEGKAWLADMGFSGIGPLQAAARLGEVESCRCMVEELGFDINAGSQLGHDEVARLLLSRGASIDIAYFHGTPLHIAAAYGKADVMKVLLEHHADPNKVSEELGTPLVATLHATSQGLAESISLKCVKLLVEAGADVNFSDRDTPLVDKQDDQNEKAQLKLCGEKAVKRKDYRGASNFYSQFQNIELAIEMDPTDATLYSNRSLCHLQMTEAEAALFDAEFCIQLRPEWIKGYYRKGAALMLLKKHEKACDAFMAGLKLEPGNAEMEKALRYDRLVNTSYTVVLPLLSSSLCETLASQQTPPLRGGKGDPRENELLNAVTEGNARRLKKMVNTMGEKDRAKFTDMNIDGNGLLQVAAHLGKIEVIRYFVEELGFDVNAGCLSDGVTALASAAMFGEAYVVRYLLEHGADPNKTDETGSVALHFAAKNGYEEVVRLLLSSGARTGIVVAHGTPLHIAVFYRRIGVVKILLDHHVDSNNTSGVWGTPILTALRSAKHGLDESDSLECVKLLVKAGADVNYACPNTPLVVATTAGLTDCIKYLLEVHADPNIPDKQSGRTPVEISASVGRRDHVEILFPFTSSISAVTNWTVEGIIAHGKSRRLTPKIVDLDSKFEIVPNMGMSRYIVKIPYFGMELAALGYAEAARTAEAARQAAAAAATLRAEEERRDLELANAACVRRDADRDRHVGRRDRDFSPHCGGSDLHRDEEWHDLWRDPWIDRALEAQRLWEQAAAIEAQLDFDREQGGRDIGARSPRRQRASPSSDRHRGRRGRSGSPPVVQTIVKDVGGAWPMLTKTNYAEWAMVMKVKLQARHMWDTVWYGDVDYGEDRRALEALLAAVPTEMQSSIVNKRTTKDAWDAIASARIGSDRARRSTLQKLRQDWENLAFKPGEDIDDFVLRLNSLQQRLAQLGDTTIDEERAVEKLLRVVPEKYTQLALSIETLLDFTELTIEEVMGRLKAVDNRKQLPPSEPITIGGKLFFTKEQWLARQQEWKKGEATGSSASGSSSSRKRRPRKWEKARSGALGDANGEHKGSRDDTCHNCGKTGYWAKDCRQAKHGGQAHVAQAQEAAAHVFLSNGSCGDKIDGWCLDTGATHHMTGRREFFSELDSSVQGSVKFGDASTVVIKGVGSILFTAKTGEHRLLTGVYYIPALRNSIISLGQLDENGSRVEIEDGVLRVWDRHRRLLVKVAQPVCLAARRDDDAWRWHERFGHLNFGALKQLGNKEMVQGMPRVEHVEQFCDTCVLTKQRRLPFPRQASFRAEEKLELVHGDLCGPVTPATPGGRRFFLLLVDDVSRYMWVVLHDSKAAAADAIKHHQVAAEKECGRKLRVLRTNNGGEFTAAEFAAYCADEGIQRHFSAPYTPQQNGVVERRNQTVVATARALLKQRGMPAIYWEEAVMTAVHLLNRLPTKALDGKTPYEAWHGRKPVVSHLRVFGCLAFAKELNHVGKLDDRSSPGVFIGYAEGVKAYRILDPATQRVRISRDVVFDEGRGWAWDKAVDDGSTSTLRDFVVDYVHFGGAGGASSSSSPSSSTSAPGSPSAPASPPPPTPPATPPSPATPCSPTPAPTPPVEFATPLSNDEDRVDAYHDDEPLRYHTVDNIFGDQPVLGLATHDFEAELHLAHEDGEPCSFAEANGDVAWRTAMQHEMDAVERNRTWVLADLPVGHRAITLKWVYKLKKDEAGAVIKHKARLVARGFVQQEGVDFDDAFAPVARMESVRLLLALAAQEGWRVHHMDVKSAFLNGDLKKEVYAHQPPGFVIPSKENKVLRLRKALYGLWQAPRAWNAKLDSTLKQMGFQQSSHEAAVYRRGKDGNALLVGVYVDDLVITGTKEAEVEAFKEEMKATFQMSDLGLLSFYLGIEVHQDSSGISLRQTAYAKRIVELGGLTGCNLAYTPMEERLKLSRDSTAEEIWHSLLAVSRFMQRPTTEHQQAVKRILRYVEGTTNYGLHYPRCPGAQHFIGYSDSDLAGDSDTSKSTSGMLFFLSKCLISWQSVKQQVVALSSCEAEYIATTTASTQALWLVRLLGDLLGRDAEAVELRVDSKSALALAKNPVFHERSKHIRIKYHFIRSCLEERSIKASYINTQDQLVDLLTKSLGRVKFQEFRARIGMDESCGKVNDRKAELKSHGEKAVKRNDYLAASKIYSEALELDYFDATLYSNRSLCNLQIGEAQKALLDADRCVELRPKWVKGHYREGAALMVLKEHKKAFEAFLNALKLDPANAEIEKVMW

SEQ ID NO: 15861 - protein, 615 aa, Oryza sativa
  Clone ID: TF_OSC400431j.C1.p45.fg
MEPPTSHVTNAFSDSDSASVEEGGADADADVEALRRLSDNLAAAFRSPEDFAFLADARIAVPGGGGGGGDLLVHRCVLSARSPFLRGVFARRAAAAAGGGGEDGGERLELRELLGGGGEEVEVGYEALRLVLDYLYSGRVGDLPKAACLCVDEDCAHVGCHPAVAFMAQVLFAASTFQVAELTNLFQRRLLDVLDKVEVDNLLLILSVANLCNKSCMKLLERCLDMVVRSNLDMITLEKSLPPDVIKQIIDARLSLGLISPENKGFPNKHVRRIHRALDSDDVELVRMLLTEGQTNLDDAFALHYAVEHCDSKITTELLDLALADVNHRNPRGYTVLHIAARRREPKIIVSLLTKGARPADVTFDGRKAVQISKRLTKQGDYFGVTEEGKPSPKDRLCIEILEQAERRDPQLGEASVSLAMAGESLRGRLLYLENRGNLHIYHNGFIMLVSLELTVFGLGNKRKFLYDVVALARIMFPMEARVAMDIAQVDGTLEFNLGSGANPPPERQRTTVDLNESPFIMKEEHLARMTALSKTVELGKRFFPRCSNVLDKIMDDETDPVSLGRDTSAEKRKRFHDLQDVLQKAFHEDKEENDRSGLSSSSSSTSIGAIRPRR

SEQ ID NO: 15862 - protein, 154 aa, Oryza sativa
  Clone ID: TF_OSC31727j.C1.p1.fg
MTERLLRWKNDLSEERDKYGSTPLHFAASVESSLHNRFSSKAIVSKVLEACPSSAFQPDNEESLPIHVAASAGVRSAIAILIEKWPGCASFRDSDGRTFLHIAVEKQRNDIVRFACKKDKEGNTALHLAVQLGNLSLVCSLLGNKRVLLNLTNK

SEQ ID NO: 15863 - protein, 597 aa, Oryza sativa
  Clone ID: TF_OSC401824j.C1.p47.fg
MDTGMRVALHRQVSSGSLKESGELRRQSSLESPRTGRAATRFLFGRQSSMDPNRRRGRSQSPVGLAEDLTVPDNLDATMQLLFLACHGDAAGVEALLRGGVDVNSINLDGRTALHIASCEGHPDVVRVLLTWKANIDARDRWGSTAVADAKCYGHTEVYNLLKARGAKIPRNRRTPMMVSNPGDVPEYELNPSELQFKKGDEVVKGVYQVAKWNGTKVHVKILDRECYCDQEVINSFRHELTVLEKVRHPNVVQFVGAVTQNIPMMIISEYLPNGDLSSCIPRKGKLHGQKVLKYGLEIARGMTYLHQCKPDPIIHCDLKPKNIFLDSGGQLKIAGFGLTRLSKISPGRVKLADHESMVDSFSHYTAPELYRNEIFDASVDAFSFGFILYEMVEGTHTVHGKSSEESGHTIRYDGMRPSLKNKLRGYPPDFKALIEECWDTQGNDTCGLSCMNAFLCTYHCEANASLSVKKKPELALTRLEEDDTTYRQICAGAAAVRAMEEGRGGDPPSSSSSAAAAAGVAIGYPFLEPQQGARLRRRRTISPFKKYFSRGFAIGMEIAFIVFGTIVHFPVWARIFLIISLSILPFSAFSITFQEY

SEQ ID NO: 15864 - protein, 232 aa, Oryza sativa
  Clone ID: TF_OSC900390j.C1.p25.fg
MDLTPAGGERDIPDDLFMCSELYIAAFEGHTDQVIGLLEGSRASAAVAGNGWSSPAAQPTAKHHGNCNIHEVTAERWTLLHIAAAQGHDDLIDELCRRDSGLLSAASSSGDTPLHCAARAGHAGAVRAIDRLARANVEEDRLREALRGRNEAGDTALHLAARHGHGEAAEAVVEAAPETAADLNGAGVSPLYLAVMSGSVRAVTAILWCRDASATGPKSQNALHAAVLQCSG

SEQ ID NO: 15865 - protein, 1592 aa, Oryza sativa
  Clone ID: TF_OSC423276j.C1.p2.fg
MASPLPFCSLSLALPSFWILSEYNVKSERRRGGAFEIGEGEGEEEEDASEETTGSMDRAKAAARKDKAAAAGKETAVSRAVALDDTALLLAAVGSFRKEGSDASRMLDQEMSTRLLHLACKHDAVQCARLLLEGGHGITASPVDARDQLTRTPLQVAAEAHSARCIELLLSKNARTDLKLVDGRPLLALEIALLSRRAQVKWSLDNSIEDLLSSLQEKKCHLVPCVGSECSEALAEKTREVGEVAYRYAMEGRVTVLAMLLLVAEEKISAPVSVVIEGVRTKKSIYYSIVDEALSIGDAPARDSNERRKALLSEIQLLNQFGAALWRDRNIDKRSLPPLLKAAKLPKWAIKDIERCCRGFLWKGQEEVSGGHCLVAWRVVCRPVECGGLGIRDIDRFGKALRLKWEFNRLEQEDRPWTMVRWKSDKDVRDIFNSVAQHIVGDGNRTDFWRGKWLPRGGSIANNWPILFSFVGRTKITVAQGLLNNRWVRDLQGSLSNRALVDYLALWDELQLVSLQSGEADSVLWRFSANGVFSASSAYEFLFSTSIKCPHGELIWKTKAPARVRFFLWLAVKGRCLTADNLSKRGWPHDPTCLLCQSAPEDCNHLLVKCPFTNRVWQQLKAWVNVTFPLPAQLGMELADWWHCARRCFQMRFRTAFDSLFMLVGDVNVTKMLLMGDVDVNEADPEGNTALHWCLSGSSSTQEPRIVWLLLKNGARVFQGNKLGLTPVHSAAAKGNYKALQSLLLHAQDCVDTPSKTKETPLFLAVKNGSLDCVKLLLRSGASTKKAKTNRCGNVPRYAFHSYLCKCGSMGGKSKSHCAPKQGSKFVPRPNHWLKHDYTRKIFVGGLPPSVGAEYLTEFFTAEFGPMEEAVVIGIRMGDRVQSRGFGFVKFKREEDVISAKETHHVYMLGKRVEVKDAVARGSLPSEIQKTSSFRHHNQEVPKVTHHLLGGELKEEHYIRKRRPLPEKCLPSWFFIFRKWLPGFLADATERLGDRYPLSSLKGDFRAICRMELDHSTLGYPKLSDFMRSLPGICRMCVVPVGSGPATHKVLLPPVSRPKYVPLLVPFSFDHDELPESVSDHQFPMSPLTTNITEDSPRNTDSQHGDTCSESNAESQQDSASTDNGSQLYTSIEPVSTRKLDVVEPLPARTPDRVEPQKIGSDPARKTISLESGLGVQIFIGNGSANLSLQVDVKKDVEYMLMLYQKRTGISSRNIYFVYRGKRLRLNRSLLSYGVQKDSTVNVRSRILGGAGTSLEEYLHKHKNSLVKKTALYDGRFFPELTPRSSILLRTWVLCFTKAFKERHCWEPKCELSHFKVINGHVKVSTPAKGNLTTHFLQENLSFLAKTLKDFFRTIGTNLVSEYPPYFEYFMKFILKIDLPCVPHLQKVIIELNLCFMDSYMRGVLTVRLKQKFDSLPPKQRATLIDKINHITWDTSRMPNLSTIPVFDKIIKKAKDDGEPYFIENSVNFEFKAFNGFRLSRDAPIHAPQHRFDKTSVPWKENFPDNTIELMTPAYLGDLLPEIIWCFILNKVDITEELSQSQTPCCTMCHPIKTDVGEYPTTQQTTVQDKQPTMEDVGSSSSMQQNVWKKIW

SEQ ID NO: 15866 - protein, 276 aa, Oryza sativa
  unsure (1)..(276): unsure at all Xaa locations
  Clone ID: TF_OSC28359j.C1.p1.np
SSRPPSTATFASSGVSTHPTLSLPPRVSPINSYFLPPSSLGVEMARGLVTTGRGRGEADVLAAVADGGSGSRALHLAATEGRMDVLTYLVEDLRLDVNQNLFLSGETPLFLSAFFGRTASTRYLLDHGADPMIVGKSGSLHAAAGKGHCEIVELLLSRGIGIVFDSLYGTPLHTAAAHGQCSTMKILLDHHADNIFFILFVPFLGVXQKTYMFLPLSKSLECVKLLIQAGADVNFRDSNGATYVMMAANYGFSGIMKCLLDAGANPNIPDQVSYTT

SEQ ID NO: 15867 - protein, 485 aa, Oryza sativa
  Clone ID: TF_OSC401247j.C1.p16.fg
MEKKDKGRHRGRDGGGGGGGGGGGGGGGVDPAGGGSGGGGPGMGRRGSDARGQQAEAAAAAISGIATRLGFGCTINVGGGMPPQMEFLMACTDGDVARLKEVVDSMDEDDRQSLTSVRMEGYEPLFEAASSGKIDLCKYLVEELGFDVNAEANHDSGMTPLFCAVLDGQEITVKYFLDKGADPNKKDAAGFAPLHEAAKKGHVGIARLLLSKGASVDVSSSEGTPLHVAASNGKSSTVQILLEHRANIQRSQVDAKSFRNRVQVFYVPALPNVILPDCYTPLTAVLSATPEIVNESECLKCMKLLVKAGAIYNLATPDTPLKIATRNGLTECVAYLLEITTVKLSEHDKGSDGDRKSKLKLHGGKAFEEGDYAGAIIFYTEAMKLDPADATLYSNRSLCHLRSGAAQEALLDANDCIKLKPEWTKGHYRKGCAHMALKEYEEACTAFMAGTKLNPLNDEMQDAFWEAAKGMMYEHMAGKRVSSVD

SEQ ID NO: 15868 - protein, 300 aa, Oryza sativa
  Clone ID: TF_OSC423046j.C1.p5.fg
MPRRARSPRLPPPPHHPSPPPPPLLSVGPGAAPRAARPSHGDVFWEEPDDGGSGSDDEDGDGAEAEAERQEATGRRSSFSSFPSPSLFSRLGAARRQEQREEEELRGEIELLLTPEEMAILDQNETPDITKISSPKWHPLHSYALALQIPLMDSLLDSGVDINLLDKDGFTPLHKAVIGKKEAVISHLLRRGANPHVRDRDGATPLHYAVQVGALQTVKLLIKNRVDVNVADNDGWTPLHLAIQSRNRDIAKILLVNGADKTRRTKDGRTALDISLCFGRDFKSYDLAKLVKLVPANRKM

SEQ ID NO: 15869 - protein, 1029 aa, Oryza sativa
  Clone ID: TF_OSC421183j.C1.p15.fg
MGSLCLERRKQPDDPLSISQQLHLCLLPLLFCAASKFSAFEGVLAQYPDFSFFFFSASARNRGFDINVLHKEARSRWLKPSEVYYILQNHERFPITPEPPKKPPSGSLFLYNRRVNRYFRRDGHAWRRKKDGRTVGEAHERLKVGNVDALSCYYAHGEQNPCFQRRCFWMLEPAYEHIVLVQYREVGAAEGRYNSASLLNGPTDSLSVLSYPNATYGNQYLGSTSGVSDGSESLHSNLSSVTEVSSYSANKDNGILQSIQELSQSTIMGAPALGQSSLEQSIEVRWVDNSNSTNKSGLNRALKQIVEQLSLGDDEDDDYIHQAQPFDFITNIEAPDRQRDASRNVSEYQPPGSLYNSDMQQISAAKRFLLETEDSIDSPSYNYVPREEGNNGTNTLSVHDYSLQSSLNPDWKKTAPLTLQSNLYGSEIPSLLLDHGQFESLSSGENTRLILGQNPRFSIREVSPEWTYCYEITKVIITGDFLCDPSSSCWAVMFGDSEVPAEIVQAGVLRCHTPLHSSGKLTICVTSGNREICSEVKDFEFRAKSTASSFLDISPSSRSLKSSEELLLLAKFVRMLLCENGSHANSNGDPQSVQCPKLKMNDEHWQRLIDELKGGCENPLNVSDWIMEELLKSKLQQWLSVKLQGYDGIACSLSKHEQGIIHLISALGYEWALSSILSADVGINFRDTNGWTALHWAAYFGREKMVAALLAAGASAPAVTDPTAQDPVGKTAAFLASERGHLGLAAYLSEVSLTSYLASLTIQESDTSKGSAAAEAERAVESISQRNAQLHGGTEDELSLKDSLAAVRNAAQAAARIQNAFRAFSFRKRQQKTARLKDEYGMTQEDIDELAAASRSYYQSLLPNGQFYDKAAVSIQKKFKGWKGRRHFLNMRRNAVKIQLYFTQAQGPYLSGPFFVQAHVRGHQVRKKYKTFVSTVSVLEKVILRWRRKGHGLRGFRAEQTAMAEAEEDDEDDDDDDFNDDEAVKVFRRQKVDESVKEAMSRVLSMVDSPEARMQYRRMLEEFRQATAE

SEQ ID NO: 15870 - protein, 165 aa, Oryza sativa
  Clone ID: TF_OSC413065j.C1.p5.fg
MAPPRFPPSSSAARLPPRSTPPEPRPSPPAAAAGAAALAPGSLEEVLLQAAFDGNLRLVRKMARALDEGDGRRLGDKVGAVRDGNGVGALHLAAGRGSLPVCGYLLEELRVDIDAVEDRGETALTFAINSGNADMVRYLLDHGADTEKLNNDGLTVLHFASGEGV

SEQ ID NO: 15871 - protein, 455 aa, Oryza sativa
  Clone ID: TF_OSC400555j.C1.p7.np
MAVPGRRDDLVGDDLVDDDGIGEEYMAPSDDEEAQLPDELFRLADAAQSGNVAALRAALDNYSGNIDDPIEDGDTLLHIACLYGHLPCVQLLLERQASLECLLLERQASLECKDEEGAIPLHDACAGGFSDIVQYILNFAANIDGCVTRMLNTVDSEGDTPLHHAARGEHLGIVDLLLKAGACAKKENTYGQVPAEMADEGTEVRKLKVVTVPSSNPHPCHQLPIRHSPNHDDGGGAAPSPSSRRPSSAVPRTMEDERDERVVSMDGTYDADEKPVLLFSRGDGVVRVHDLPSLKKRGDILCYDEVKTISIRSRGVVFTGDASGEPSTGVMFAKLNADTSEIKLTEKQDDDTEDDKKKVNGSMKIPRVWLSLSDCWEKMKVSIFEFMIDTSGKKEAIYTVYSYIAIGIILSLNCFWKVWREASNSDEKPSGFKAFFITIVCMVGKKLYDSLKTTK

SEQ ID NO: 15872 - protein, 557 aa, Oryza sativa
  Clone ID: TF_OSC401007j.C1.p11.fg
MERQTSFRLGALEKLKSFRGMEKQKSFKMMSTDNFRRHRDSPGKRGDTPLHLAARSGNAAGAQRIIAEFDPEVAAERAAQANHDGETPLYVAAERGHTDVVREILKVSDVQTAGVKANNSFDAFHIAAKQGHLEVLKELLQAFPALAMTTNSVNATALDTAAILGHTEIVNLLLESDANLARIARNNGKTVLHSAARLGHVEIVRSLLSRDPGIGLRTDKKGQTALHMASKGQNAEIVIELLKPDISVIHLEDNKGNRPLHVATRKANIVIVQTLLSVEGIEVNAVNRSGHTALAIAEQLNNEELVNILREAGGVTAKEQVHPPNPAKQLKQTVSDIRHDVQSQIKQTKQTKMQVQKIKKRLEKLHIGGLNNAINSNTVVAVLIATVAFAAIFTVPGNFVEDITQAPPGMSLGQAYVASNPAFLVFLVFDALALFISLAVVVVQTSLIVVEQKAKRRMVFVMNKLMWLACLFISVAFIALTYVVVGRDDWWLAWCTMAIGAVIMLTTLGSMCYCIIAHRMDERKIRKASTSQSRSWSQTVDSDPDLLNSEYKKMYAL

SEQ ID NO: 15873 - protein, 628 aa, Oryza sativa
  Clone ID: TF_OSC400632j.C1.p12.fg
MAASAAPVAPASPSPSPAAAADGEEGEGPAPAAEDDSLKNDVYTAAAYGDLEKLQRLVEGEGHPVTEPDGLGYHALQWAALNNRVAAAQYILEVFPPPASRPSVSRFGWPSCSRCLLASEGFGWGFGVFTFSSLAGVLDTKLPVPVVELLQHGADVNAVDHTGQTALHWSAVRGHIQVAELLLKEGAKVDVADLYGYQATHVAAQYGQTAFIYHIVAKWNADPDVPDNDGRSPLHWGNLEACTVLVQAGKKDDLMVKDKTGLTPAQLAADKSHRQVAFFLDNAKRVYDRGCDGNTNFGKLSKLGLAPVLWCIIVGLLATYIHSVISGQYIMDMTAPFGLFAWSGVFLATAGLVMFYKCSRKDPGYIKANIRDSQNQRDDEPLLKLELDNPALLSGNWSQLCITCKIVRPVRSKHCSTCDRCVEQFDHHCPWVSNCIGKKNKWEFFMFITLEVFAMIITGSAAIIRMVRDPASPASFIPWLSYSAFNHTGALSFFIMDLFLFFGVAVLAVVQASQIAKNITTNEMANSMRYSYLRGPGGRFRNPFDHGARKNCSEFLLNGYNEDIERLDHTSHTDEEMGMIQMTNAVSQNGEGPSHHGNGTGHSCAESHAHSKSHSQIVCVHAEAPLFI

SEQ ID NO: 15874 - protein, 464 aa, Oryza sativa
  Clone ID: TF_OSC413065j.C1.p4.gm
MALNAGSLKCVVLLLKAGADVKGVGTVTPLITAANNGQTDFYKCLLEAGADPNVPDEDDPMYKMSPADMKLAASEAYRRQDYITAMKLYTRDAQICRLMHSDWSKACYLEGAAQMLLKDFEKACDAFFDGLKLDPASDEIAEALSHFVEHLVGITPPSAWAPPPPTLDADTATGPGVPQQLLIQSAAAGDLPAFKKFARMLDGGKGRLKEAVEAVKNRGAGALHQAARYGRTAMCAYMVEELQVDIDAADELGITQLDEAGADVKGVGTFTPLIVAATEGLTDFYKCLLEGGADPDVPDKVDPFFKIRPADLKLEGNRAYMRKDYLTAAKLYNMADGRRQQAAAATAAALSGVGGSSSNNSSTSTITRRRHRLHHRQHVTAVACSSNTTSTAAATTSKEDCGTRILRPDWPKGCYREGTAHMFMKDYEKACNAFLDGFKLDPANIEIENALREALKSLKASRAA

SEQ ID NO: 15875 - protein, 422 aa, Oryza sativa
  Clone ID: TF_OSC900166j.C1.p9.fg
MEKKDKGRHRGRDGGGGGGGGGGGGGGGVDRGGGGSGGGGPGMGRRGSDARGQQAEAAAAAISGIATRLGFGCTISMTPLFCAVLDGQEITVKYFLDKGADPNKKDAEGFAPLHEAAKIGNVGIARLLLSKGASVDVSSSEGTPLHVAASNGKSSIVLILLEHHANPNVMTPDCYTPLTAVLSATPEIVNESECLKCMKLLIKAGAHYKLATPDTPLEIATRNGLTECVAYLLEISTVVRLSEHDKGSDGDRKSKLKLHGGKAFEEGDYAGAIIFYTEFLCKYNFFNNPSPNYKQQRLAQKNPTPHIPHRRSMAVSASQLTSRILLSLLLSRNYCCVNKGRLSLNFQWHCHHVGDTLAMKLDPADATLYSNRSLCHLRSGAAQEALLDANDCIKLKPEWTKDHEEDACEDPVDPLEWDSYGF

SEQ ID NO: 15876 - protein, 773 aa, Oryza sativa
  Clone ID: TF_OSC900128j.C1.p2.fg
MFFTRLDDSPMFRKQIQSLEEGSELLRERCLRFHKGCRKYTEGLGEAYDGDIAFASSLEAFGGGHNDPISVAFGGPVMTKFTIALREIGTYKEVLRSQVENMLNDKLLQFVDIDLHDVKDARKRFDKASLLYDQARERYLSLKKGTRTDVATAVEDVTALSNIEAKKRFEFLEAVSGTMDAHLRYFKQVLAYAQQSRERSNYEQAALVERMQEFKRQIDRESRWSPNGINDSPNGDGIQAIGRSSHKMIEAVMQSASKGKAHISAWKFMSYFKSGYTNQRSSAPSEHGSGLLSRWFSSHYHGGVHDEKSVARHTVNLLTSTIKADADQSDLRFCFRIISPTKNYTLQRLLSSPKGSGHNRTASESSSFSSSTELDHSISEDCMLERNSGSGYFDHSGRAIQHHRTSMKPDKPIDLLRKVVGNNICADCGAAEPDWASLNLGILLCIECSGVHRNLGVHISKVRSLTLDVRVWEPSVINLFQSLGNTFANTIWEDMLPSSSSVDHGDNSRADGLENTSHNLIFSKPKHSDHIAVKEKFIHAKYAERDYVRKLNMDDSLVAQQMWENVSSNNKKGVYSLIVGSNADVNLTYGQTSFNSALTLGKALLLQEQPTSPSDGSSRCFDRSSLERISPRDSLSLASTSARIDELDDCVEGLSLLHLACRVADVGMVELLLQYGANVNSADSRGRTPLHHSILKGRHMFAKLLLSRECVNIIKLGIVPGEMISGSWFLQCGSWGADSQATDRDGRTALQYAIDSGTIDDEEILVLLEDPSR

SEQ ID NO: 15877 - protein, 406 aa, Oryza sativa
  Clone ID: TF_OSC900390j.C1.p14.fg
MVSLPLQWKPALATHVDRNKSSPLHFASSDGDCSIVQAILACSPPSAPYMQDNEGFSPIHAAALMGHTATVRLLLQFSPASADICDNRGQSFVHTAATKGHSSIISYAIGSSMLEHLLNAQDREGNTPLHLAVDAGKCKIVSKLLSSEIVQAHIMNNEGHTPSDLVQNCKGFYSMVSLVVKMYASGAQFQPQRQDHIEKWNAQDIMKWRDTTSKYLAIVSTLVATVAFSAAFNIPGSYGDDGKANLAGNCMYDTFLILDTISLVTSVVAIMLLVFGRAFSSHHSWLSFMISTHFLWLSINTMVLGFLAAISAVMSKKKGLNITMAILIYFGMWILTMLLTSLTTVGSFTGILKFLFGGRMERQRRAKRRISRQYPYAIFYTFNMVLFFVIANIALAGFDTFKSLSY

SEQ ID NO: 15878 - protein, 388 aa, Oryza sativa
  Clone ID: TF_OSC416911j.C1.p18.fg
MEAVLRHPSLSRLKPPNPNAQRTPALSITVPFRLRLPNRRLTAAAVFQDQTNPRNPASKGGDDDEAYGEVDRIVSSRTIKNPVFAEDGSATTVTATEYLVEWKDGHEPSWIPAEAIAADVVAEYETPWWTAAKKADAAEITALLADETLRRDPDAEDAQGRTAMHFAAGLGSEECVRALAEAGADVGRPERAGGGLTPLHIAVGYGRPAAVRALLELGAEPEAPDGQGRTPLELVQDVLAKTPKGNPATFERRLALEAAAKELEKAVYEWGEVEKVVDGRGEGKWREYLVEWRDGGDREWVRAAWVAEDLVKDFDAGLEYAVAEAVVNKREAAEGEGKWEYLVKWVDIEEATWEPAENVDAELLQEFEQRQSGVAAGGDAPPPPPVAG

SEQ ID NO: 15879 - protein, 526 aa, Oryza sativa
  Clone ID: TF_OSC422826j.C1.p2.fg
MDLPPLSHQALFAAVRSADAAAVAGLLADAGASGPTTQALAAAQTDAGETALYVAAEAGSEEIVRLLIPLYDLEAATVRSRLDLDAFHVAAKQGHTGAVKEFLGRWPELCSICDSSNTSPLYSAAVKDHLDVVNAILDTDDSCIRIVRKNGKTSLHTAARIGYHRIVKALIERDPGIVPIRDRKGQTALHMAVKGKNTDVVEELLMADVSILDVRDKKANTALHIATRKWRPQMVQLLLSYEALEVNAINNQNETAMDLAEKVPYGESKMEIIEWLTEAGAKNARNVGKIDEASELRRTVSDIKHNVQAQLNENAKTNKRVTGIAKELRKLHREAVQNTINSVTMVATLIASIAFVAIFNLPGQYYVDRDSGGDIGEAHIANLTGFRVFCLLNATALFISLAVVVVQITLVAWETGAQKRVIKIVNKLMWSACLSTCAAFISLAYVVVGPQNAWMAFTISAIGGPIMIGTLLFLAYLLLRPRFKFGEDRQRRIKRASGSKSFSWSIHEGISDLEAFSDHEKRIYAL

SEQ ID NO: 15880 - protein, 556 aa, Oryza sativa
  Clone ID: TF_OSC403477j.C1.p12.fg
MSLEIHEEEGGGTAAAAAVKVMTVSGSGKRGRYVRQVTGRHNDTDLHVAARGGDAGALRRALDEAAAAVATGEGREALEEVRRAVAAEPNEAGETPLVAAAERGHLEVVRELLRHLDAEGVAAKNRSGYDALHVAAREGRHAVVQEMLLHNRLLAKTFGPANTSPLISAATRGHTEVVKLLLELDDFGLVEMAKDNGKNSLHFAARQGHVEIVKALLEKDPQLARRNDKKGQTALHMAVKGTNCDVLRALVDADPAIVMLPDKNGNTALHVATRKKRAEIVAVLLRLPDTHVNALTRDHKTAYDIAEALPLCEESSEIKDILSQHGALRSRELNQPRDELRKTVTEIKKDVHTQLEQTRKTNKNVHGIAKELRKLHREGINNATNSVTVVAVLFATVAFAAIFTVPGGNANNGVAVVVQAASFRIFFIFNAIALFTSLAVVVVQITVVRGETKSERKVVEVINKLMWLASVCTTISFIASCYIVLGRHFQWAALLVSLIGGITMAGVLGTMTYYVVKSKRMRKIRKKEKMSRRSGSSSWYDNTELSETELNQVYAL

SEQ ID NO: 15881 - protein, 619 aa, Oryza sativa
  Clone ID: TF_OSC401044j.C1.p4.fg
MGEPGGAEAAVSARLLELAADDNAAGLGELLAAWPSLADEPAPWYTPARGAEPLTPLMVAAVYGSVGCLDALLSPPYLVDPNRASASSLSTPLHLAAAGGSASAPAAVSRLLAAGADPALLDHLQRRASDLVALPPNSLPLKNHLLSLLGARKEWPPDPSLPDIKNGAYASDDFRMYSFKVRACSRAYSHDWTECPFVHPGENARRRDPRKYHYSCVPCPEFKKGAGCRRGDMCEYAHGVFESWLHPAQYRTRLCKDGVGCARRVCFFAHTPDELRPLYVSTGSAVPSPRGALEMAAAAAAMGMGLSSPGSSSFTPPLSPSAGGGGGGGGGSGGGGAWPQQPSVPALCLPGSAGNLHLSRLRTSLSARDMAVDELLAAAAAAADYDGLVASPASIRSARGKALVPSNLDELFSAELAAAAASRSPRYADQGGAAFSPTRKATVLNQFQLQQQHSLLSPRAAAVTPEPVSPMSSRLLAALAQREKMQQQTLRSMSSRDLGNAASLLVGSPVSSSMSKWGFPSGNPDWGADDEELGRLKRCSSFELRSGAANGNHEPDLSWVNTLVKEPTPEKMMTTTSAMDSIGILGQNTSRDHIVGGEDDTAGVISSWLEQLQLDEMVV

SEQ ID NO: 15882 - protein, 482 aa, Oryza sativa
  Clone ID: TF_OSC404797j.C1.p18.fg
MSGAEEEAAAARGGGSGSESGGSGGGGRGGGGGGAGSSGSSGARRRFDDKGLVARTSLILWHTHQNDAGAVRKLLEEDAALVNARDYDSRTPLHVAALHGWHDVAECLIANGADVNAQDRWQNTPLADAEGAKRHAMIELLKEHGGLTYGKTGSHFEPKTIPPPLTNKADWEINPLELDFSKAVIIGKDDLFRCYMQIEIVGCSKLAIILAGSFGEILKANWRGTPIAVKRILPSLSDDRLVIFFGVCRQDFKHEVNLLIKLRHPNIVQFLGAVTETKPLMLVTEFLRGGDLHQYLKEKGALAPATAVNFALDIARGMAYLHNEPNVVIHRDLKPRNILLVNSAANHLKVGDFGLSKIIKAQHANDVYKMTGETGSYRYMAPEVFKHRKYDKKVDVFSFAMILYEMLEGDPPFSNYEPYEAAKLIELCWSGDIHLRPSFLEILKRLEKIKEYLAAHDHHWHLFSQFPALFMFLENQYSGYRK

SEQ ID NO: 15883 - protein, 384 aa, Oryza sativa
  Clone ID: TF_OSC900309j.C1.p12.fg
MAARRSRLAAPTSSSAAAASMQHELLEAAASGDLRHLKRLVRALDKVRGRLQEVVEAARTDGGIWALQLAAGNEQLEVCRYLVEGLRVDVNAADDEGRTPLVFAVIGENAAIVKYLLDHGADPDKADDDGLTPLHSAAGIGDCEMIETLLAKGADIDPAVNVSSVECVKLLVEAGADVNSDCISTAALDSAMGNDGSTECLNFLMEAGANYGGPNDFRVYSVCGCSLPHFWQPKFGNILVEDMIHQPWHQDQHVNKKKIEELKTSGNKAVDREDYISASAFYTKAMDLDPNDATLFSNRSLCWLCMGDGKKAFLDALECREMRPDWPKACYRLGAALMTLKDFESACDALFDGFKLDPDNAEIERALREAMESLKISSKGTKAT

SEQ ID NO: 15884 - protein, 575 aa, Oryza sativa
  Clone ID: TF_OSC32693j.C1.p1.fg
MGGPYRSIVPEPVAHEQCNLLEVTAERNTVLHVAAEKGHIELIKELYHRFIKDNNFLSRRNSALNTPLHCAAREGHTGTVTTLVHLAQDRVENIMGCQNTAGDTALHLAARHGHGATVEALVAAHAKATELNKVGVSPLYLAVMSRSVPAVRAIVTTCSDASAVGPSSQNALHAAVFRSLEMVHLLLQWKPELASQVDCNGSTPLHFAASDGNSKIIRAIMATAPPGTVYMKDSDGLSALHVAAKLGHADVVKQLIGIRPDAVELRDSHGETFVHSAVREKRSSIVSLAIKKHKQVGGLLDAQDGDGNTPLHIAVVAGAPGIVNALLQKGKVQTDVLNDDGHTPLDLASTSPSLFNMVREGDREDFGQPRGGGRAHRHRCLAAGFNMPGGYTNDGSASLEGMSLFRWFVVLDPIAVASSVIAVILLVYGKASRSTGSWKSFVAALHCIWVSLVSLILAFFAASRAVMRTSTAESIVYIVIYVGIIVLSLFVAQWIGPVTTARAFWRFLWLSHRAHTVRRQYPFAVASIYNWLLFLHITYIMFAGLGVVHNHSNSDRGGLSSSWNPNHISPAPAPM

SEQ ID NO: 15885 - protein, 1385 aa, Oryza sativa
  Clone ID: TF_OSC401914j.C1.p21.fg
MEMRRRIFRPPHAAPLQPPADCRPSPAGPLPLSSAHRTPHAGPLRLPAAPLLPPAARRFSHAGVIEGEISREEVELVFVFREKFVSVFVPDHIRFLFVFEIIRIRFRIRAIHIRFRIRFARRASPRRLRRFPSISREVGAVVLLLPPPESKPERMELRFKAPDYATWKKEAAACDKNNGNDKDGSIPVRNKYPRHPPPRFELAEGLDYKKIDKFMDERAISIAKTIANDIIIPDPAPEWMCHTFLDKHDELEPIFVKDSPRCFLRYFKNCGCYGMSWNLTITAQTLTCMVSFNALRCAKVVLEGRAPELFGMHANPNCVTKYGYFPLHEAAERFSVEMIKLLLRFGASANVRTVGDDVIEDLLPLHIAIENTCLHKYLEDNLSPSQNHLDYIYKLIHLLCLPEMKIFLDTIRLLAGKTNNLLEELWYYIEDGKLIQSAILLLAAQEQIRGGCSSKINGSSKKDGFGIISKRILRLSFALRWEKGSNGMAQKLREEKRALIDCTGLLVDVISQAGEPLSAYVQAHSEAPHVEVLEHVSTILKEYGFYPTAEVIDTMNLQPYDCEMERESCSKGWEKGSRRRMGSHVYKEKFFPILEISFTNPVSCEVGRIPPFANNHQSKRSFSTCATGAFRLLKLLKSSVTDLAWGLRYPCPLDLEAQQLGKYIVKYSLLFCQFQNVMVTIYWCSRQKVAWSATGCTLLISLLFFFSGSPHRILLNKKPLNFKTAPSRLLREISISSSRVQRVNNSSAEFVANLNDRNVEIVQHMEDNDHNIINATANVTSDWSIVKEEFTFPAGSAPFNSCHASTIVETEKDSFLVAYFGGSKEGAPDVKIWLQRYSPFLVEDGRLLCGSSVESWNSWGAWLEVTKDAGRTWRKYGPIYIEGETLGVIQPVPYMTANGTIRVLLRSFETIGRVCMADSADGGVTWSYVHETDLPNPNSGIDGVKMKDGRVLLAYNTFSRGTLKVAVSMDDGDSWNDVMTLEDTEGMEFSYPAVIQTMDDLIHITYTYNRTQIKFDLPTLSSQGSKDHGLILHIQEKCDKMTNKWSVLREEFTFSEGNVPFKTCHASTIVEVQKNMFLVAYFGGTQEGADDVKIWLQRYYNGSWHSPEVVDEVPNVPLWNPVLFQLPSGEILLFYKVGKTVESWSGCMKCSSDGGVIWSKREQLPPGILGPIKNKVTKDHGKTWKKYGPIYVRGKTMGVIQPVLYQTSSGTIRMLLRPSDEVGRICVAESKDSGVNWSYAQPTELPNPNSGIDGVKLKDGRVVLVYNSTSRGVLKVAVSQDDGDKWEDVLTLEETHGVEFSYPAVIQTSDGLVHVTYTYKRTQIKVVLPMLFGLLMVITSFIIFHVKNEFLLVTALCSMSFYNQARFDAVSNQTCGFVSGVKFEL

SEQ ID NO: 15886 - protein, 108 aa, Oryza sativa
  Clone ID: TF_OSC3475j.C1.p1.fg
LAAALDEEGKGVAAVAAAVKDANKRTALHFAAREGRTHVCHFLISDLALPVDPKDDDGNLDLMKLFLSKGVDVESESDAGTPLIWAAGHGQQEAVKLLLQHDAKVAPQ

SEQ ID NO: 15887 - protein, 232 aa, Oryza sativa
  Clone ID: TF_OSC900390j.C1.p19.fg
MEITPAGCDHEIPEHLFMCSRLYIAAFRGYTDEVFSLLAGSSGAAVEPANSRPSPAAQEHANHHGGCSIREVTAERSKLLHIAAGEGHGELIAELCSHDSSLLSSSSSSGNTPLHCAARAGHASAVRGIVRLARANVEEDRLKAMLRGMNATGDTALHLAARHGHGEAVEELMEVAPETALELNGGGVSPLYLAVMSRSVRAVRAILSCRDASAAGPSSQNALHAAVLQSSG

SEQ ID NO: 15888 - protein, 260 aa, Oryza sativa
  Clone ID: TF_OSC400831j.C1.p4.fg
MGRRHGGGGGGGGGRGRGGRGRGGGEEDDLHLHKAARSGDLAAAESLCEANPLALNSRDRLSRTPMGWHVELVKCLCKHKADVGAAAMDDTAAIHFASQKGHVEVVRELLASGASVKAKNRKGFTALHFASQNSHLELVKYLVKKGADIAAKTKGGQTALHVAEKDDVRDFLKECEQSLKKGGELPSEKKDDSVSTIAEKPDDDKSSGEATKDEDEAGFGEKRKSDGIAAALRSPELKKAKVSLGHLISANDMEEEEEAD

SEQ ID NO: 15889 - protein, 403 aa, Oryza sativa
  Clone ID: TF_OSC415629j.C1.p25.fg
MGHGVSCARTGDEHDFFRAAQLGDLDALAALLAADPSLARRATLYDRLSVLHIAAANGRIEVLSMFLDRGAPPDAVNRHKQTPLMLAAMHGKIDCVLKLLQADANILMFDSVHARTCLHHAAYYGHVDCLQAILAAAQTTPVADSCFPGSTSLHLAARSGNLDCIRKLLAWGADRLQRDSAGRIPYSVALKRNHGACAALLNPTSAEPMVWPSPLKFISELEPEAKALLEAALMEANREREKKILNGTKYSLPSPSPGDDSADDDACSEVSDTELCCICFDQACTIEVQDCGHQMCAPCTLALCCHNKPNPTTLTPPSPACPFCRGSISRLVVAQTRSACDPDKPSSLQLTRKRSRRSHNLSEGSSSFKGLPSAMGSFSKLGRGSSRMADSDSSNLDKPEHDL

SEQ ID NO: 15890 - protein, 411 aa, Oryza sativa
  Clone ID: TF_OSC413065j.C1.p12.fg
MAPPHACSPGATQRLLLHAAADGDLRLFKRIASRLDGGEGRLKEAVEAVKDRGAGALHQAARNGRTAMCVYLVEELQVDINAANESEVEKFEIYGICGIVGCGNFATLEPHPHVLGGIVYTVSYLLDHGANPDKPNEQGRAPLHLAVEQGNCEILKVLLVKGADVDSSSDCGTPLHIAAVKSHDGCMKILLDHHADCNKVFSTFYTPLIAALMVRSLKCVKLLIKAGADIKGVGTFTPLIAAATEGLTDFYKCLLEAGADPNVPDENRRKDVEILLPVTSRIPSVYDWSVDGIITYVNKNVQATNLEPEDGTCTRIGAFAWLKMGEGMKALTDAHLCRMLCPDWPKACYREGAAHMFLKAKSFFICNNYFVFRTDKACDAFLDGLKLDPANMEIENGLREAFKSLKKSRAA

SEQ ID NO: 15891 - protein, 749 aa, Oryza sativa
  Clone ID: TF_OSC401482j.C1.p8.fg
MNGTPISASAAAGVDGVGAAVALAAATKKSAAAAAAVAEMAKTLTVDTDDAFAGLLELAADDDAEGLRRALERAPPAAADEAGLWYGRRKVLEHRTPLMVAATYGSLAVLRLLLSLPSVDVNRRCGSDGTTALHCAASGGSPSCVEAVKLLLAAGADADATDASGYRPADVISVPPKMFDAKIALQDLLGCPKAGHGVLRVVTRAANSMLSPVSSPTAEDARSPSAAVMMTTKFADLPRVVTSEKKEYPVDPSLPDIKNSIYASDEFRMYSFKIRPCSRAYSHDWTECPFVHPGENARRRDPRKYHYSCVPCPDFRKGVCRRGDMCEYAHGVFECWLHPAQYRTRLCKDGTSCNRRVCFFAHTTDELRPLYVSTGSAVPSPRASATATMEMAAAMGLMPGSPSSVSAVMSPFTPPMSPSGNGMPPSLGWQQPNVPTLHLPGSSLQSSRLRTSLSARDMPADDYSLMQDIDSQLINDLCYSRIGSSTGNHTSRTKSLNPSNLDDLFSAEMVSSPRYSNADQGGMFSPSHKAAFLNQFQQQQQALLSPINTVFSPKSVDNQQLPSHSSLLQASLGISSPGRMSPRCVESGSPMNSHLAAALAQREKQQQTMRSLSSRDLGPSAARASGVVGSPLSSSWSKWGSPSGTPDWGVNGEELGKLRRSSSFELRSGGDDPDLSWVHTLVKESPPEKQVTTAESINSVGPSPLMPPSVSNGEGPSLNAPLDGHDQAAVIGALLEQMQLDQHIGSLAT

SEQ ID NO: 15892 - protein, 341 aa, Oryza sativa
  Clone ID: TF_OSC900351j.C1.p1.fg
MGKQEQEKMLLQAAYDDNLRLLRKMARGLDTGQGEAAVVAAVAGRADGNRALHLAAARGSMDVLRYLVEDLHLSVNQFNAKVCIVEGSIHMTIRVPYGPYAIFFLAGHCEIVELFLSRGVDVDLDSITGTPLLTAAMNGQYSTMKILLEHHADVGADVNFRDPNGVTCVMVAANHGSPVIMKCLLDAGANSNIPDEFNRTPIEVAANRGRRDIVKMLFPLTSPISTLPDWSIDGVISHVQTFGLKPRDNDLSKRKSAELKLQAREAFEREEYMLAGQHYTNAIELTTNAHDKATLLANRSLCWLRLSTGNGALADANMCRMLRPSWPKACYRQGAAFMFLK

SEQ ID NO: 15893 - protein, 145 aa, Oryza sativa
  Clone ID: TF_OSC401693j.C1.p5.gp
AARYAHSEAHHAVATRDHAALRRVLDALPRARRPEEIRTEADSVAEEARAEAASAVIDRRDVPGRETPLHLAVRLGDAAAAEMLMAAGADWSLQNEQGWSALQEAICAREEALARVIVRHYQPLAWAKWCRRLPRVVAAMRRMRD

SEQ ID NO: 15894 - protein, 656 aa, Oryza sativa
  Clone ID: TF_OSC401693j.C1.p8.gm
MAGVDAARYAHSEAHHAVATRDHAALRRVLDALPRARRPEEIRTEADSVAEEARAEAASAVIDRRDVPGRETPLHLAVRLGDAAAAEMLMAAGADWSLQNEQGWSALQEAICAREEALARVIVRHYQPLAWAKWCRRLPRVVAAMRRMRDFYMEITFHFESSVIPFISRIAPSDTYRVWKRGANLRADMTLAGFDGFKIQRSDQTILFLGEGSDDGKVPPGSLCMINHKDKEVMNALEGSGAPASEAEVQQEVTAMSQTNIFRPGIDVTQAVLLPQLTWRRQERTESVGPWKAKVYDMHHVMVSVKSRRVPGAMTDEEFFSACNENDTESEGFDDVLTEEEKKQLEAALKMDSPDGAGGEGQSDTFVGPRHSCVEPREREIPIEDLSISGNGDSKHDKKGWFGHWGKRVQSSKLEGTKKMAPPRSSLCVDEKVSDILIESPSNVQTRPGRHSVDVVRGDESRRGKERDYRRPAASSECGHRRKEGSKESEYKKGLRPVLWLSPNFPLRTEELLPLLDILANKVKAIRRLRDLLTTKLPPGTFPVKVAIPVVPTIRVLVTFTKFEELQPLEEFTTPPSSPDNSKSPVAQSSSSSWIQWIKAPYHQNFSTAPGPSSRVEDIQDPFVIPADYVWTTPEEKKKKTQENKSKSKKGRNAAA

SEQ ID NO: 15895 - protein, 677 aa, Oryza sativa
  Clone ID: TF_OSC900416j.C1.p6.gm
MAGVDAARYAHSEAHHAVATRDHAALRRVLDALPRARRPEEIRTEADSVAEEARAEAASAVIDRRDVPGRETPLHLAVRLGDAAAAEMLMAAGADWSLQNEQGWSALQEAICAREEALARVIVRHYQPLAWAKWCRRLPRVVAAMRRMRDFYMEITFHFESSVIPFISRIAPSDTYRVWKRGANLRADMTLAGFDGFKIQRSDQTILFLGEGSDDGKVPPGSLCMINHKDKEVMNALEGSGAPASEAEVQQEVTAMSQTNIFRPGIDVTQAVLLPQLTWRRQERTESVGPWKAKVYDMHHVMVSVKSRRVPGAMTDEEFFSACNENDTESEGFDDVLTEEEKKQLEAALKMDSPDGAGGEGQSDTFVGPRHSCVEPREREIPIEDLSISGNGDSKHDKKGWFGHWGKRVQSSKLEGTKKMAPPRSSLCVDEKVSDILIESPSNVQTRPGRHSVDVVRGDESRRGKERDYRRPAASSECGHRRKEGSKESEYKKGLRPVLWLSPNFPLRTEELLPLLDILANKVKAIRRLRDLLTTKLPPGTFPVKVAIPVVPTIRVLVTFTKFEELQPLEEFTTPPSSPDNSKSPVAQSSSSSWIQWIKAPYHQNFSTAPGPSSRVEDIQDPFVIPADYVWTTPEEKKKKTQENKRRMSGRFEDFDELQGSIFMVEFVFSVLSGLLF

SEQ ID NO: 15896 - protein, 1003 aa, Oryza sativa
  Clone ID: TF_OSC410211j.C1.p17.fg
MAEGRRYAIAPQLDIEQILKEAQRRWLRPTEICEILKNYRSFRIAPEPPNRPPSGSLFLFDRKVLRYFRKDGHNWRKKRDGKTVKEAHERLKSGSIDVLHCYYAHGEENINFQRRSYWMLEEDYMHIVLVHYLEVKLKFHFLHIYGYDHQAGKLSSRSTGHDDVLQASHADSPLSQLPSQTTEGESSVSGQASEYDETESGSYQGLQATAPNTGFYSHGQDNLPVVLNESDLGTAFNGPNSQFDLSLWIEAMKPDKGTHQIPLYQAPVPSEQSPFTGGPGIESFTFDEVYNNGLSIKDVDGDDTDGETPWQIPNASGTFATADSFQQNDKTLEEAINYPLLKTQSSSLSDIIKDSFKKNDSFTRWMSKELAEVDDSQITSSSGVYWNSEEADNIIEASSSDQYTLGPVLAQDQLFTIVDFSPTWTYAGSKTRVFIKGNFLSSDEVKRLKWSCMFGEFEVPAEIIADDTLVCHSPSHKPGRVPFYVTCSNRLACSEVREFDFRPQYMDAPSPLGSTNKIYLQKRLDKLLSVEQDEIQTTLSNPTKEIIDLSKKISSLMMNNDDWSELLKLADDNEPATDDKQDQFLQNRIKEKLHIWLLHKVGDGGKGPSMLDEEGQGVLHLAAALGYDWAIRPTIAAGVNINFRDAHGWTALHWAAFCGRERTVVALIALGAAPGAVTDPTPSFPSGSTPADLASANGHKGISGFLAESSLTSHLQTLNLKEAMRSSAGEISGLPGIVNVADRSASPLAVEGHQTGSMGDSLGAVRNAAQAAARIYQVFRMQSFQRKQAVQYEDENGAISDERAMSLLSAKPSKPAQLDPLHAAATRIQNKFRGWKGRKEFLLIRQRIVKIQAHVRGHQVRKHYRKIIWSVGIVEKVILRWRRRGAGLRGFRPTENAVTESTSSSSGNVTQNRPAENDYDFLQEGRKQTEERLQKALARVKSMVQYPDARDQYQRILTVVTKMQESQAMQEKMLEESTEMDEGLLMSEFKELWDDDMPTPGYF

SEQ ID NO: 15897 - protein, 456 aa, Oryza sativa
  Clone ID: TF_OSC1309j.C1.p3.gm
MTMEDGSCPPAVAPSGSQAEDYGSWTLKQKLEDLINCDPIHGIMPKNPKYKAYFEEKFEEKLSFMGLGEFLYPDILTNMASQNALRCARVALQGTSPLLRCRRRADPNTRHRYGFAPLHMAAENFSVDMVKLLFRCGASANIRTKGDNVIEGLLPLHVAVENASMHKYIEDHWAHGDHIINLIFLLCLPEMTDNIVDEVWNYIQHEEKHVQAAILLLAAEKQLRGRLNKSSGKASLNGFDIVKSRIGDALSTIHLEGLNMVQEGKNGRALKRLKDKKEALLTALVLVCIVHKAGEALDGYIQTHSQPPPPPRRWFSLAGELSLPNDGAASSATRGLVSGGAEQGGGVVEDREERGGVVEEGEEQANQATTPTAQISFAACPRCGEKTCIPDRGQAAELGCGPRRHVDLNPSWSNEITRQVGALRSRHLLLAHQLRIQLLSAAAHQLLSAAAHHLRR

SEQ ID NO: 15898 - protein, 73 aa, Oryza sativa
  Clone ID: TF_OSC16667j.C1.p1.np
IANFVFTPLVSSLLGGSLECMKLLFQADANVNGAGFNGATPLLLACSHTGSIRFVNCLVESGADPNIPDEVSI

SEQ ID NO: 15899 - protein, 1033 aa, Oryza sativa
  Clone ID: TF_OSC401695j.C1.p21.fg
MAAAADARRFAVVPQLDIAQILKEAQQRWLRPAEICEILKNYKSFRIAPEPPNRPQSGSLFLFDRKVLRYFRKDGHNWRKKKDGKTVKEAHERLKSGSIDVLHCYYAHGEENENFQRRTYWMLEEDFMHIVLVHYLETKGGKSRTRGNNDMHQAAVMDSPLSQLPSQTIDGESSLSGQFSEYEEAESGGTGYHSFTQMQQQQNGIGPVTDASMFSSRVSASSIGNYQGQHAMGHTTNFYSSSQHDSPLVLSDPNLELANNGHESLWNGVMKPDEGTVQMTHLQPPVHPEQGMFTTEGQGVEYLTFDEVYSDGLSLKDIGAAGADVEPFWQFSSNSYLTEAIAFQLSSATADISATENSVQQNDGSLGAAIGFPFLKTQSSNLSDILKDSFKKSDSFTRWMSKELLDVEDSQIQSSSGAYWNTEEADSIIEASSREPLDQFTVAPMVLQDQLFSIVDFSPSWTYAGSKTKVLVTGRFLHANEVTERCKWSCMFGEVEIQAEISADGTLRCYSPPHKPGRVPFYVTCSNRLACSEVREFEFRPSDSQYMDAPSPLGATNKVYFQIRLDNLLSLGPDVYQATITNPSKEMIDLSKKISSLLANNDEWSKLLKLADDNEPLSHDQQDQYAENLIKEKLHVWLLHKVGDGGKGPSVLDDEGLGVLHLAAALGYDWAIRPTVTAGVNINFRDFHGWTALHWAAFCGRERTVVALIALGAAPGALTDPHPNYPAESTPADLASANGHKGISGFLAESSLTSHLQALNLKEANMSEISGLPGIGDVTERNASQPAIGDSLGAVRNAAQAAARIYQVFRVQSFQRKQAVQYEGDKGGISDEHALSLLSMKPSKSGQLDPLHAAASRIQNKYRGWKGRKEFLLFRQRIVKIQAHVRGHQVRKHYRKIVWSVGIVEKVILRWRRRRAGLRGFRPTEGAIESSSGGTSSNLVKDKPAGDDYDFLQEGRKQTEERLQKALARVKSMVQYPEARDQYQRILNVVSKMQESQTVQEKILDESTEMDEGDFMSEFKELWDDDTPLPGYF

SEQ ID NO: 15900 - protein, 149 aa, Oryza sativa
  Clone ID: TF_OSC400782j.C1.p8.gp
MQFGVLENKIDVLKVLLEHDFSLGYIISTSGIPLLGSAAYQGHVGVAMEILKHCPDAPFLVENDGTTCLHIAVQKGHIKFVEFVLQSKELRKLINMRDRNGETALHYAIRKCHPKIVALLLQCKAQDVTVLDSNGNPPIWVPNDAADHA

SEQ ID NO: 15901 - protein, 1073 aa, Oryza sativa
  Clone ID: TF_OSC400432j.C1.p22.fg
MEASISPPGSSKQAGLRRPSPGNSLKDLCLVSKQGSIAEVESALALLKKSGGSIDGRNVFGLCALHLATWRNHLPIVRRLLDAGADPDARDGESGWSSLHRALHFGHLCVASVLLQFGASLALEDTKGRTPVDLLSGPVSQANGDSPDSVAMEVFSWGSGTNYQLGTGNAHIQKLPCKVDALHGSYIKTVAASKFHSVAVSSDGELYTWGFGRGGRLGHPDIHSGQTTAVITPRQVTVGLGRKRVNVVAAAKHHTVIATEAGELFTWGSNREGQLGYPSVDTQPTPRRVSSLKARIISVAAANKHSAAVADTGEVFTWGSNKEGQLGYGTSNSASNCIPRMVEYLKGKAFKCVSAAKYHTVALGTDGEVFTWGHRLVTPRRAVISRCLKKGGNTNLKFHRMERLQVISVAAGVMHTTVLTADGAIFYWVSSDPDLRCRQIFSMCGRNVVNISAGKYWTALATAGGDVFMWDAKKHKDDLPMFTRVHGVKRATSVCVGETHMLVLSSIYHPEYPPKPKIQCKKAMLEWNGGMEELDEDIMFNDVQPDSGISGSDGVIKKGAPSLKSLCEKVAIEHILEPKNSIQLLEVAESLEAKELKKHCEDIAIRNLDYIFTVAAPSVMNASPETLANLERLLDEKSSEPWSHRRLPTVTATYPAVIDSDEEGDEAGGFLRLRDSQKSASKSYGISSYGNFLEKDSNAGQAASKQIRALRKKLQQIEMLEAKQLDGHQLDNQQLAKLESRAALEGELAELGIPTDLRTPVCVTEEKTNKKSSVSKKQKRKNKQAAHSDTPLVKREDRDQIYVKDLQEVLPVHISAEKEASVADSIKPSEHVTFINTKAISCPLENKASQPTSSKKKNRKGGLSLFLSGALDDTPKPSPPTPVVTVTPKHEGPAWGGAKVTKGSASLRDIQSEQRKTNEPITAKAKDRFEDSPDSAGRMRLSSFIPDARSTPITVTPARVVPASEGDKSTLSWSSSATSPNVLRPSLRDIQMQQEKRQTGISHSPKTRTSGFAIPSQGTSPEVGGIKDNVPNRWFKPEADAPSSIRSIQIEEQAMKDFKRFYSNVRIVKPQVQ

SEQ ID NO: 15902 - protein, 236 aa, Oryza sativa
  Clone ID: TF_OSC900400j.C1.p3.gm
MASSNGEQPPESPKEANAAPVAAKLAMASGRDGCERLKDLAEGISATDQQASGAVYSLSLLEGLTLDSDQNSALHVVAASGDSQAWEPLLALAAAAPARDSSGAARVDDQELLARRKNKVGETALHGAVRAGHSKVVEVLMKEDPGLAGVDRHDGTSPLYLAVSLGRFEIAWDLLDMSSRKLSYSGPDGQNVLHVAVQHPQGKEGCVTEREGEEEQVAGGLPLLPANNGMHPRPKP

SEQ ID NO: 15903 - protein, 170 aa, Oryza sativa
  Clone ID: TF_OSC900156j.C1.p11.hg
MDLDGVTTEGNTALHVVATCGDGPGYLRSAGVIYSRSQHLMLVQNNNGDTPLHCAVRAGHSKMVDHLIDLVETKDNSPSSARLEELLRKENCRKETAFHDAVCIGNKDIITNLLKYYSELAGFLMDATDKMHCTQPFYKTKVNMSYTNAKLMLLQVGAHNANRKWVLRSA

SEQ ID NO: 15904 - protein, 687 aa, Oryza sativa
  Clone ID: TF_OSC900348j.C1.p23.fg
MDHVAGVQFAEQIEQALRKADELGDDDLRAALRRARNSPADTAFQLPLLQLPVEDPVHAGAAATQPEQQNAGRRLMCPELYRAAFSGSVDKLQELLVSPSGTAAEEQGRRHDGQCVLDETTAGLNTVLHLAASQGKIGLVRKLCDGDDTAAAAVAALLPKETTKSETALHHAARAGRRDMVSLLIRLAQMHGSGAPGLLVTKNSAGDTALHVAARHGRVAVVKVLMVAAPALSCGVNNFGMSPLYLAVVGRSIGAVKAIVQWKHASASGPKRQNALHAAVLQSVEITRELLSWNSNLAKEPDESESTPLHYAASDGVREIISMLIQSMPSAMYIPDKEGLTPLHVAAKMGHLDVIQDMLKECPDSAELVDNEGRNILHLAIERGHEPVVSYILGDPSLAELFNEQDKKGNTPMHYAVKAGNPRLAILESRNIKLNIVNNEGQTPFDLASNTTGFLHMIGFLLRLSANGARFGAQRQDCISQWSSKNVKEWNEKTTKNLGIVAVLIATIALTAMFNVPGGYNSDGVANLRATTPYNAFLVLDTVAMASSVIATMLLTYGRGAARSSTAWICMSLIFLWMALMSMILAFMAAVVSGLDSTTTKYILWSIFVLPFAFLVALSFVWAVPAPTFTTLLLLPRALAGEDSGWTRRRIGRRFRSVGVYLLVLYLFWFLNAVAFFLTVYVVVNAI

SEQ ID NO: 15905 - protein, 378 aa, Oryza sativa
  Clone ID: TF_OSC900390j.C1.p21.fg
MVSLLLQWKPALLSDYDSSKSSPLHFASSDGDCSIIQEMLTHAPPSTAFMLDNEGLSPLHVAALMGHAAIVHLLLQFCPSSADIRDNYGRTFLHAAAMKGHSSIISYAIKKKILEHLLNAQDKEGNTTLHLAVIAGECKVVSKLLSSGKMQANIMNNVGHAPTDLIKNCKGFYSMDIMKWRETTSKNLAVVSTLVATIAFSAAFNIPGSYGNDGRANLAGNSLYSAFLILDTFSVVTSVMATILLVYGRASRSQRSWLGFMVTMHFLWLSLNSMVLGFFAALAAVMSKEKGIKIAMSQVIYYGMYILTTLLSILAMPGSFTSIVKFLISAPKERQRHTKRQISRQYPFAIFYIVNAVLFVIINSLAMASFEVARNLSY

SEQ ID NO: 15906 - protein, 150 aa, Oryza sativa
  Clone ID: TF_OSC401078j.C1.p13.fg
MGAESEQPTAAAATAEQAQDLIDAARYDDLEDVVALFTAGVSLDSADSQGRTALHMASANGHLAVVQYLIQNGANVNATNSEKNTPLHWACLNGHIEVIKALICAGASVSALNSHEKTPMDEAVTKGKMEVIDAIGAAVAQAELDGVTVS

SEQ ID NO: 15907 - protein, 823 aa, Oryza sativa
  Clone ID: TF_OSC401583j.C1.p5.fg
MSLPRRFGSIVSDSPFGDSAIDSDSRTGSCLFGSVLPGSELTGRARCSTSKLSLVLSNRAGGLGFGGNQEGASGPYFLGGAWFLFNRRVLRYFRNDGYEWRKKKNGKTIAEAHERLKVDNVDALNCYYAHADKNSTFQRRIYWMLDPAYDHIVFVHYRDVQEGSISVSALNDSSTSNQNGSGSRAEAQSSPGLTSELFAPCLNSCSPGSAEEVSSQIMAINNETNSVSQPDWVQHCNQAALRKLKVQLSLEDREDHDVDAKDIPSNSEPITVYGIQNEEPGTCRNLADVFSGLEFSKENHPEETGLPFSSTIDVLKNSDTWLEEDQIEAILHSASMIVTENQWFNIREVSPEWSYCSESTKVIIAGDFLRDPSHGSWAIVFGDVKLLFDGHVSEQFLKFGLPFPNLECGLQVSPSEIMKGASERLNRDTAVNCVMEVLLNNKFEEWLFSKYEQNSEGNHFLPRQYHGVIHTIAALGYNWALKLLLNSGVLVNYRDANGWTALHWAARFGREETVVLLLDAGAAAGALSDPTAQDPAAKTPASVASAYGFKGLSAYLSEAELIAHLHSLESKENGSSGDQISRVVGRISDTSAHAQSGSDDQLALKESLGAMRYAVQAAGRIQTAFRIFSFRKKQQAGLQNRGNHIISIREVGAASHGMLEKAALSIQKNFRCWKKRKEFLKIRKNVIKIQARVRAHQQHNKYKELLRSVGILEKVMLRWYRKGVGLRGFHPGAIAMPIDEEDEDDVAKVFRKQRVETALNKAVSRVSSIIDSPVARQQYRRMLKMHKQNKDDDEKVEVSPASHVYGSGSHHMCWLSHNNKAMH

SEQ ID NO: 15908 - protein, 378 aa, Oryza sativa
  Clone ID: TF_OSC900390j.C1.p23.fg
MEPAGCSTDEVTGDRSTLLHIAAWKGHSDLIAQLCRWGNGSLITSVNSSGYTPLHCAAGAGHAGAVEAIIRALAAGANVEEGRLQEILRGRNEAGDTPLHLAARHGHGEAAEALVRVDPGLAAELNGAGVSSLYLAVMSGSVRAVRAILWCRNASAVGPKSQNALHAAVLQSSGDYFVDNLAFYICTGQRQEEHTGLPERRGREYPQPLEEPPALGLLPSPTLPLVVIVGDHSQRCHGAAIPIDLLSPHRNTATSLFVHIANLGQCQRLGMKRMPLPTASSVATMPRASNECRCHLSTSEVGAIGFDEATATVASSTIGTVSSTAMGERREITVAVVSSGLEPPLCRRANPAAGVASAAISLTAACLPSPLVHPAVEE

SEQ ID NO: 15909 - protein, 675 aa, Oryza sativa
  Clone ID: TF_OSC101199j.C1.p3.fg
MEEESQSQSHFPLRWESTGDQWWYATPIDWAAASGHYDVVRELLRLDANLLIKLTSLRRIRRLESVWDDDMRFADAARNRAAVARRLLHDCEPPRGAAAGGGSRPNRLIRAGYGGWLLYTAAAAGDAAFVRELLGRQPLLVFGEGEYGVTDVLYAAARSDSSEVFRLLLSAVLSPPECSAGGEGDGGTAAIAGGFMFRCEMMNRAMHAAARGGNWRSSGSSCRGAPTRRRSGTLRDRRSCTPRPRGGSLSCHECLVVKDLIASFDIVNSTDEQGNTALHLAAFRGHLPVVKALITASPSLISATNEVGDTFLHMALTGFRTPGFRRLDRQMELMKQLIGGVIMDLSSIINMQNDDGRTVLHLAVIGNLHSSLVELLMTAPLIDLNVRDNDGMTPLDLLRKQPPTASSEILIKQLILAGGIANSMDHETRSAIASQLKMHCIVGSPGTSFKIPDAEIFLHAGIDASDISERTNSFSSVGQSEPEFPESSRKKLNSMQNAAKHLKILLRWPLRKEKKSSSGARNELDDDASSVDSVKSWSHGETPTPLRQKYSRMSSLFNNKRTMAARIGSPSPSMKKSFADGLAHGVMQPESPSGSGSWSSSSLVDRIEAVHLDKNGQASPDTSVVIRRTPKKHGSLNSRLMNQYFCIGAQGIAVEDSTTGQRSSRMFRSSLLSAA

SEQ ID NO: 15910 - protein, 571 aa, Oryza sativa
  Clone ID: TF_OSC900001j.C1.p24.fg
MAEIEVVGDGGGGGGGGGVKQGVVEVREARANGGEGDPVVDVYSAAAYGDLERLRGFVERDGGASLAAPDGNGYHALQWATLNNYPHVALYIIEHGGDVNAGDNAQQTALHWAAVRGAIAAADVLLENGARVEAADVNGYRAVHVAAQYGQTAFLHHIISKYGADFECLDNDGRSPLHWAAYKGNADTIRLLLFMDANQVRQDKNGCTPLHWAAIRGNYEVCTVLVHAGTKEELTLKDSGGFTPVELANDKGHRHLSYILSNATKVTFEDKYCSGRSRKIGYASILFCFLIVLITLFLNSIIFAPNFSRITAAVGIWSWGAISLAFASLVMFYRVSRKNPGYIQANTKRLDPKEPLMEIDLNSSAWTGNWSQLCPTCKIIRPMRSKHCPTCKHCVEQFDHHCPWISNCVGRRNKWDFFVFLCMGTTTAFLGAAIGFHRLWTEPIILSSSESWINFMLSNHPGAVLFMFMDVFLLTGALILTGAQATQLKVFYVSITPLWRKFLEEQMIARNLTTNEAANQSRYAYLRGPDGRFRNPYSRGCRRNCADFLVNGYSNDEEAAWPTLQQTVQRS

SEQ ID NO: 15911 - protein, 690 aa, Oryza sativa
  Clone ID: TF_OSC900367j.C1.p17.fg
MAEIEVVGDGGGGGGGGGVKQGVVEVREARANGGEGDPVVDVYSAAAYGDLERLRGFVERDGGASLAAPDGNGYHALQWATLNNYPHVALYIIEHGGDVNAGDNAQQTALHWAAVRGAIAAADVLLENGARVEAADVNGYRAVHVAAQYGQTAFLHHIISKYGADFECLDNDGRSPLHWAAYKGNADTIRLLLFMDANQVRQDKNGCTPLHWAAIRGNYEVCTVLVHAGTKEELTLKDSGGFTPVELANDKGHRHLSYILSNATKVTFEDKYCSGRSRKIGYASILFCFLIVLITLFLNSIIFAPNFSRITAAVGIWSWGAISLAFASLVMFYRVSRKNPGYIQANTKRLDPKEPLMEIDLNSSAWTGNWSQLCPTCKIIRPMRSKHCPTCKHCVEQFDHHCPWISNCVGRRNKWDFFVFLCMGTTTAFLGAAIGFHRLWTEPIILSSSESWINFMLSNHPGAVLFMFMDVFLLTGALILTGAQATQLKVFYVSITPLWRKFLEEQMIARNLTTNEAANQSRYAYLRGPDGRFRNPYSRGCRRNCADFLEGISPNLLPLFAFPAVMATTTCSKIVSGRCKNEIVYRDDRSCIHSYSLRLGQFDVFESLIFLWIRVAPAEFERAAAGADGQRAKSMALNSEGLEGLVPRAKLLLSLGSTFFLGFAPLILVTVSLFAVLYVDRKCFAPISHA

SEQ ID NO: 15912 - protein, 213 aa, Oryza sativa
  unsure (1)..(213): unsure at all Xaa locations
  Clone ID: TF_OSC4136j.C1.p1.np
LAVATDALSFGXSIRREIMGELADLVVVPSQPPLAGGRRDRLAALLELAAADDVDGLRGALAEGGEEAAELADGVGLWYGRSKASEARTPLMVAATYGIAGVVSLLVGLGGCVDVNRRPGADAALHCAASGGSRNAVAVVKLLLAAGADPATPDSAGRFRAGVILAPPASPDALGDLEVLLGRRRALAVATSVASGSSSPPLSPPDEGNRSPS

SEQ ID NO: 15913 - protein, 657 aa, Oryza sativa
  Clone ID: TF_OSC12505j.C1.p11.fg
MGELADLVVVPSQPPLAGGRRDRLAALLELAAADDVDGLRGALAEGGEEAAELADGVGLWYGRSKAYEARTPLMVAATYGSAGVVSLLVGLGGCVDVNRRPGADGATALHCAASGGSRNAVAVVKLLLAAGADPATPDSAGRFPADVILAPPASPDALGDLEVLLGRRRALAVATSVASGSSSPPLSSSPDEGNRSPSSRSSSLSPITVDRGKKEYPVDPTLPDIKSSVYASDEFRMFAFKVRPCSRAYSHDWTECPFVHPGENARRRDPRKHPYTAVPCPNFRRPGGCPSGDSCEFSHGVFESWLHPSQYRTRLCKEGAACARRICFFAHDEDELRHVPHNSGAGLLSPRASSSIDMTAAAALGLLPGSPTRHFAPPPVSPSAGSNGGAAAAHWLQGSRLRSSFNARDAAVDDLGMLLEWESQYLGALCLPPSSRPQPRLSAGLSIRPTIAPSNLEDMYASDMAMSPRFPNDQGHSVYSPAHKSALLNKLHQQKGLLSPVNTNRMYSPRALDPSSLAHSPFGGMSPRSPRTMEPTSPLSARVGAPATQRPSVGSPRNSSAWGTVGSPMGKVDWGVDSEELVRLRRPAQPGFGEDETDVSWVQSLVSNAELNGKRGEVQGMPGTSALMNRPDLNNQGDLLDQTVIGAWLEQMHLDQK

SEQ ID NO: 15914 - protein, 426 aa, Oryza sativa
  Clone ID: TF_OSC401716j.C1.p83.fg
MATAKPASPSPPPSTAVVPAANTAAAADKPAVEQLLEVAEDEVVIDFKPNAKCRADLRLRSLHPSLPVAFKVQTSSPLKFLVSPPRGAVQPLSSASLRVVLRPQQHAPASFPRSRGDRFLVLSSLSAAHLDSSASSSAATGGTTAIRLRVFFGGPYLLRLAAEAGDAAAVRLILRRQPHLLPLLEPEAAVPDGAEQWAPLHAVAARGDTGEVRRLGPDSMGARDREGRTALHVAAAAGEAEAAAALVDMGADAAATDARGRTPLDVAREKGYQEVVDVLERWELVMTAARRGDLQSLESLLSKRAGVRGRDQYGLTALHLAAIKGHCDVIALLAGSGCMDIECEDVEGHRPLHLAVEGGSAEAVELLLDMGAEVHAATRRGATPLQMAVTMGYEAIALLLRGRGADEAAAPALCIASSSSSSISCA

SEQ ID NO: 15915 - protein, 444 aa, Oryza sativa
  Clone ID: TF_OSC418098j.C1.p3.fg
MSLPDLFEKLLGDEIAATLDDDGEGIAATVARTAFHGMNALHAARSLHVYRYLLEVANMDVNKPDTTPGRKTPLERAIAGGDLPSVRYLIDHGADIHHEREGNITFLHSAAKKGFPATSNLHSVMMSSLTLNVEKNADNTPLKHVPPRVNCSFCVLFRTGRTEIVKLLLSRGAHVDGKSDHGTPLHFAAIKGYESTVKILLEHQADPNKVMPSSQATPLSAALFTTSLPCVKLLIQAGADVNATNNPLARAAGSGLTEAIKLLLKAGANPNCPDTHGRMPIELAAVYGTREDVEILFPLTNPIPTVADWSVDGVITYANLERKKLEDDDYVNTKMSDLKQKGNEAFDEQDYEKASVWYTQALEVDPCDATTLLKRCLCWLRMGEGKKAVKDATTCAKHHPKLSEAYHRLGEALMLEKDYEKACVALTHGIELDPESDEMDKLFW

SEQ ID NO: 15916 - protein, 346 aa, Oryza sativa
  Clone ID: TF_OSC31716j.C1.p1.fg
MEANAPAVLPMDAKLMVATAHGDCQQLKDVVNKEDAAMMVLVMASSNGTPASAAAASPPVAMHPLLHASASSGDWKGVNFLLNREEAYADSSVQPSKKFLKSLEACIPGNCTNGRCRPRRKLLMTYKKSLLEGVTIEGDTALHVVATHGDGHNYLKCVDTICAKGKHLLFKPNNKDDTPLHCAARAGNHEMVNKLIGLAIGPSRREESVDSIANNLILKSDNLSTETFLSDDVRVANNLTVGDSISISEDNVHRGVEYLRMENDSNETALHAAIRIGHSPIVTELLTYDSELALFPQEGTSPLYLAILLKQFDIARTLYQMSRQNILSYSGPSGQNALHVAVLRSR

SEQ ID NO: 15917 - protein, 722 aa, Oryza sativa
  Clone ID: TF_OSC413151j.C1.p12.fg
MAEEYELNEIDDTLHGSVGSRLSLFARELKSRRSSSWHGGTALRLPKDLYESLVIHPNGRWYRIWANMMFLWSIYSTFFTPFEFSFFRGLPDQLLDLECVQLVFLADVAVHFFLAYRDPHTYRMVHDKRHIALRYIKGSFALDVLGCFPWDAIYKVTGRVEAVRWLVWVRLYRGRKVMAFFKRVEKDIRVSYLLTRIVKLITVELYCTHTAACGFYYLATTLPPAREGGTWIGSLSLGDARYINFREVDLLTRYVTSLYLAIVTMATVGGSGYGDIHAVNTREMAFTVVYISFSIVLSAYLIGNMTALIVKGSRTERFRDRMTDLIRYMNRNRLGSAIRSQVKDHLMLQYESSYTRDRVIVDDIPVAVRSKMSQTLYLDMVSRVGLFRGCSDDFLSQIVLKLHEEFFLPGEVILEQGTVVDQIYIVAHGCLEEVANGEDGSEEIISELRPYGIVGDVAVICNIPQPYTVRVCELCSLLRIDKQSLTSILQIYFKDNSQILSNLLKGKETESKRKQLESDITYLLAKQESELVLGVNNAAYHGDIFRLKSLISAGADPSKSDYDGRTALHIAALRGYENIVRFLIQRGANVNSIDRFGNSPLLQAVKSGHDRITSLLVEHGAILNLEDAGGYLCRVVRGGRIDLLKKLLRFGISPNCRNYDQRTPLHIAAAEGLHLVASTLIESGADIQAKDRWGNTPLDEGRRCSSKPLVRILEQARTVATN

SEQ ID NO: 15918 - protein, 724 aa, Oryza sativa
  Clone ID: TF_OSC900133j.C1.p17.fg
MEANAPAVLPMDAKLMVATAHGDCQQLKDVVNKEDAAMMVLVMASSNGTPASAAAASPPVAMHPLLHASASSGDWKGVNFLLNREEAYADSSVQPSKKFLKSLEACIPGNCTNGRLPTPPQASNDIEEGANMPLLLSPESLLEGVTIEGDTALHVVATHGDGHNYLKCVDTICAKGKHLLFKPNNKDDTPLHCAARAGNHEMVNKLIGLAIGPSRREESVDSIANNLILRSDNLSTETFLSDDVRVADNLTVGDSISISEDNVHRGVEYLRMENDSNETALHAAIRIGHSPIVTELLTYDSELALFPQEGTSPLYLAILLKQFDIARTLYQMSRQNILSYSGPSGQNALHVAVLRSRVGEKRTIEIFVQKYPSSAGLRDKRGRTFLHVAVENRRVNVVGYACRNRSFLIFQSTEEMVRFVLTQAGAMNDSCRHDHFREKHKDTHNLKSDSESKELEKLKDATETMAIGSVLIATVTFGATFALPGGYRADDHSNGGTPTLVGRTGAAAGGDGGERRRRGCGVAACEQQRHGSGGGRHWSGDGGGAWAELHRLLTDGDQALEQEDGGRRQDKQAAADRQERRRRRPWWYMVQINVKRWLHRRTMLLLRDNGGMNSLCEDRYIKLTCLGTHRILIHYARQMQCLYYNVLMNEVGMDSWEEYTEQDREDVRALIDKIVDLCRSSIPRPPHDGFVWFSLFCDLYLSPEIVLILDLQGSEDEDLREVTL

SEQ ID NO: 15919 - protein, 399 aa, Oryza sativa
  Clone ID: TF_OSC400284j.C1.p23.fg
MAAAAESKAGKSPEELLCAAAESGDAEAITGLLAEGADPTHFDASGLTPLMHAATGGHAAVVQLLLDAGAPWNALSPTGISAGDLASDSATFDLLLDHALRSELVLGTVARRQAGPADSPAESYLESRVSFSEERVMDADSKAVMMEWERPLMEAHARAVCSGGKVLNVGFGMGLVDTAIQRYEPEEHTIVEAHPEVYARMLKLGWGEKKNVKVVFGRWQDVLPQLGSYDELSVSCFEGIAKQDFYLLDSSQISAASDKYDAILNKIIALDNSVLLIHYYPKMFVHVYFITKQHGIFFDTYGEYYEDMREFHQHLPKLLKPGGIYSYFNGLCGDNAFFHVVYCQLVALELANLGYSTQFIPLPVKDCLSEEIWNGVKQKYWQLDTYHLPVCQAESEPEQ

SEQ ID NO: 15920 - protein, 626 aa, Oryza sativa
  Clone ID: TF_OSC414121j.C1.p6.fg
MANREEPYSTTGGTAAKAPPVAMDAKLLMAECPEDRKLLKELVHKEDASKMMVVLASTTNQPAAEKPAAARAVMNPLLLAAASFGACEVFYFLFCREDAREPLPTMTARAFHAMLAGDASGADGRWPSTHQQALDEVEEGGAGAAVAVGHQSTRRLPPPDAPLLEGITVEGDTALHVVATHGNAANFLECAEIICNRARRLLLATNDKGDTALHCAARARRLEMASRLIALAKAREDHEVERGQAASFGKVLLRTENERNETALHDAVRAGDGDMVRRLMDEDPDLALFPVQGTSPLYLAISLRNGTIAEILHEKSNGNISYSGPHGQNALHAAVLLRHTAVLELLLKWNSNLTKQGDENGSTPVHFAASFPLWHRKFHWRHPWIIRVPHSLSMLLNTGEVDPFYQSDKNGMFPVHVAAAVGAELTVAFLLDKFPNSAGLRDAKGRTFLYVAVEKQSLAVVRFACRTTSLQWILNMQDKDGNTALHLAIQANHHRLFCALLGNPQVNLDLTNHSGHTPLDLSRRMLPRGMKYTANTEELIYLTLKQVGSEHYHDRRDHIEEIYSRRVVSKEDLAEELDKMQESTQTLGIGSVLIVTVTFGAMFALPGGYRADDHPYGGTPTFSGRW

SEQ ID NO: 15921 - protein, 222 aa, Oryza sativa
  Clone ID: TF_OSC19440j.C1.p1.fg
RRKLFTDEEKVLLNKRVPDLEAATSSKWLPLHTIAASGDFYLLDNLLKHNINVNALDKDGLPAIHKAILSKKHAIINYLLRNSANPFIHDKDGATLMHYAVQTACSQTIKTLLLYNVDINRPDDYGWTPLHLAVQTQRTDIVKLLLIKGADRTLKTQDGFTPLELCLRLGHHARTYELIKLLKSFRLPKQHDPVQHLDDRGCSLKGINRLWYAHDNWKAKVP

SEQ ID NO: 15922 - protein, 434 aa, Oryza sativa
  Clone ID: TF_OSC416913j.C1.p38.fg
MPPSLSLHHHLLLFPFPSHVQTLNPLSASPRLHPHSKSLLPRRRPLVTSPSSFAVAAVDEFDEDFAIGDCVVFEDDAFEEPDVDLPSPAPSTTSRPRRKPAAEAGGGGGSSLVPERWRDAAEEINLTKKEKRRIAHGLRFGSRLERRAPPAVAAPDEYRAYREGRLDAELGRVARDYPEPIERSPVPDRVEAPPPPEPGARVAPRNPRLGLGRRKLFTDEEKVLLNKRVPDLEAATSSKWLPLHTIAASGDFYLLDNLLKHNINVNALDKDGLPAIHKAILSKKHAIINYLLRNSANPFIHDKDGATLMHYAVQTACSQTIKTLLLYNVDINRPDDYGWTPLHLAVQTQRTDIVKLLLIKGADRTLKTQDGFTPLELCLRLGHHARTYELIKLLKSFRLPKQHDPVQHLDDRGCSLKGINRLWYAHDNWKAKVP

SEQ ID NO: 15923 - protein, 565 aa, Oryza sativa
  Clone ID: TF_OSC403629j.C1.p29.fg
MDAKNQQSGDGQQRPAQQAAGMDPAKAAAQAATRRKKMTKQLTGKRDDTALHGAARAGQLVAVQQTLSGAPPDELRALLSKQNQAGETPLFVAAEYGYVALVAEMIKYHDVATACIKARSGYDALHIAAKQGDVEVVNELLKALPELSMTVDASNTTALNTAATQGHMEVVRLLLEADASLAVIARSNGKTALHSAARNGHVEVVRALMEAEPSIAARVDKKGQTALHMAAKGTRLDIVDALLAGEPTLLNLADSKGNTALHIAARKARTPIVKRLLELPDTDLKAINRSRETAFDTAEKMGNTESVAVLAEHGVPSARAMSPTGGGGGNPGRELKQQVSDIKHEVHSQLEQTRQTRVRMQGIAKQINKLHDEGLNNAINSTTVVAVLIATVAFAAIFTVPGEYVDDAGSLTPGQALGEANISHQTAFLIFFVFDSVALFISLAVVVVQTSVVVIERKAKKQMMAVINKLMWVACVLVSVAFLALSFVVVGKAERWLAVGVTIMGATILVTTIGTMLYWVIAHRIEAKRMRSIKRSSLSRSRSFSASGMSEAEWVEEEFKRMYAI

SEQ ID NO: 15924 - protein, 624 aa, Oryza sativa
  Clone ID: TF_OSC400525j.C1.p62.fg
MEPSSSITIASSSSYLSNGSSPCSVSLAPPGAGAVAAQAAPVAAGEGGGGGGGGGGGGSSSVEVVSLNRLSANLERLLLDSDLDCSDADVDVADGGPPVPVHRCILAARSTFFYNLFAARGRGGDGAAGGGGGGGGGGGERTGGRPRYKMEELVPGGRVGRDAFLSLLGYLYTGKLRPAPDDVVSCADPMCPHDSCPPAIRFNVEQMYAAWAFKITELISLFQRRLLNFVDKTLVEDVLPILQVAFHSELTPVLEKCIRRIARSNLDNVSLDKELPPEVAVQIKEIRQKSQPNEGDTVISDPVHEKRVRRIHRALDSDDVELVKLLLNESEITLDDANALHYAAAYCDSKVVSELLDLRLANLNLKNSRGYTALHLAAMRREPAIIMCLLNKGAAVSQLTADGQSAMSICRRLTRMKDYNTKMEQGQESNKDRLCIDILDREMIRKPMAVEDSVTSPLLADDLHMKLLYLENRVAFARLFFPAEAKVAMQIAQADTTPEFGIVPAASTSGKLKEVDLNETPVTQNKRLRSRVDALMKTVELGRRYFPNCSQVLDKFLEDDLPDSPDALDLQNGTSDEQNVKRMRFCELKEDVRKAFSKDRADNSMFSILSSSSSSSPPPKVAKK

SEQ ID NO: 15925 - protein, 173 aa, Oryza sativa
  Clone ID: TF_OSC401105j.C1.p1.fg
MAARRSRLAAPTSSSAAAASMQHELLEAAASGDLRHLKRLVRALDKVRGRLQEVVEAARTDGGIWALQLAAGNEQLEVCRYLVEGLRVDVNAADDEGRTPLVFAVIGENAAIVKYLLDHGADPDKADDDGLTPLHSAAGIGDCEMIETLLAKGADIDPVADECGTPLHLATKE

SEQ ID NO: 15926 - protein, 451 aa, Oryza sativa
  Clone ID: TF_OSC900134j.C1.p1.fg
MAKTLDRLKPKKKQGSDTTCRIKTQELSQPEEGSMVAMPKNPNLLRNKKLPSNSTKIGLTEIDLALDDFLNLVATPTVPATLSPSPDGLKGGPASNNGLNTTMGTQQASSSSSSAAAAAGEERACVILYNPVQSPSIPGLARLMVSRLIGLAKTEDDNSGCGSSLKQLLRKENYLHETALQDAVRSGNKEIITEILEFDPELASSPMDGTGTSPMYIAVLLGRVDIAKLLHEMSKGNNPSYSGPEGQNALHAAALQGKDSKLAVAYLIKERPEIAGFRDSKGRTFLHVAVERKKSDIVAHASSIPSLAWILNLQDNDGSTAMHVVVQLAHIKSFCSLLRNTEVKLNIPNNKGQSPLDVSQSNIPRGTFYDSKNNPELQIARALIACNASTGRRMDLFLEQRQKQSDEKTESEKMTYSTQTLGVGSVLIVTVTLGAIFAIPGGYKGDDCYIS

SEQ ID NO: 15927 - protein, 241 aa, Oryza sativa
  Clone ID: TF_OSC900390j.C1.p16.fg
MEITPAGSDHEIPEHLSMCSKLYLAAFRGYTDEVCNLLAGSSGAAVQPANSSPSPAAQERANHQGPCSIREVTAELRTLLHIAAGQGHDDLIAELCLHDSSLLSSASSSGHTPLHCAARAGHALAVRAISLLAGASVEEDRVRDVVRSKNVAGDTALHIAARHGHGKAVEELMEVAPETASELNGAGVSPLYLAVMSRSVRAVRAIISCRDASAAGPNSQNALHAAVLQCSDFQLIFTRVN

SEQ ID NO: 15928 - protein, 250 aa, Oryza sativa
  Clone ID: TF_OSC12219j.C1.p1.fg
MNPKLLMAARHGDIETLKRLLAVNTAQPPPQVVLQVDRPAAAAPSAAANTLLEGVTSEGDSALHVVAAAAVAAACGDDDDDVFLDCAGVIHGAARHLIRARNSNGDTPLHRASRAGSVNMVRRLIAMAKDEAGDDDHDDHDDGGERRRQRAAVELLLRAQNKRGETALHEAIRSNSRDLVVDELLSHDPELARVPGEEGGTSPLYLAISLRRFEVAKKLHERDEQLSYSGPQGRNALHVAVLIGKGLKFG

SEQ ID NO: 15929 - protein, 441 aa, Oryza sativa
  Clone ID: TF_OSC401247j.C1.p9.fg
MGDPNPSFGFRVGLAFLRALPYLNDGGPQSQFFEAATHGDVSRLRGEHGGWSRLAAAGPVLAFSWACVLAMSNFAPSRASCSKKKELASGEDAEGKARLADDISFSGIGPLQAAARLGEVDACRCMVEELGFDINAGRELGHDEVERLLLSRGASVDIAYFHGTPLHIAAAYGKASVMKVLLEHDADAGADINFSDRDTPLVVAITNGLTNCIKYLLKAGADPNIPTCHCGALPIQLAASYGRRKDVELLFPLTSPIRAVSNWTVEGILAHAKSKHARSKCSKPKDKQDDHNKKAQFKLRGEKAIKDKHDEQDKKAQLKLQGEKAVKRKDYHGASIFYTEAIELDPTDATLYSNRSLCHLQMTEALFDADYCIKSRPEWLKGYYRKGAALMLLKEYEKACDAFLAGLKLDPLNAEMEKVFREAVEAMKKHHVTTKSFKPSD

SEQ ID NO: 15930 - protein, 562 aa, Oryza sativa
  Clone ID: TF_OSC401323j.C1.p1.fg
MDPRLHKAAVQGNTASLAALLGEEQGGGKILNSTTPQGNTALHIAAGLGRVAFAEAAAAEHGDLLVARNDQGDTPLHLAARAGKMAVADMLITFITMAGPCWPEEEPLMMMNKTRNTPLHEAVKQRRSAVALRLLEAEPNCGHTPNVDMQTPLHIAAREGLADVVDKILDQPWVPEKFVTADNVSGTALHQAVLGGHTRVVEILLMKTAPGLIDLTDAVGNTALHFAAQKNDKRMVRMLLDHKPDLAHRRNERQQSALHVAAYYGSTAAAAELLRHSPDAAEMLDREGRNAVHVAVSSGKVDALRCLLGRVRPAEVVNRGDNSGDTPLHLAAKMARIKSALMLLRDPRVDPCLLNREGHSARSLVEERVAGGEMDAYVVYLWEKLKKYESRRCKNQQLPPVATYQSLRSRRPGSGSNDEYFELSVGTYTLVATLIATVTFAATFTMPGGYNQNTGLAIHADRAPFKIFVVSNTVAMCSAIVVVFCFIWAWRDPVKFKLDQLTWGHRLTVVACLAMIVSLMTSVYLTVLPTERWLAYLVIAIGACTPAVVILILRWEVFYVPL

SEQ ID NO: 15931 - protein, 43 aa, Oryza sativa
  Clone ID: TF_OSC28368j.C1.p1.gm
VGADMNFRDSNGVTCVMVAANHGSSVIMKCLLDAGANPNIPDE

SEQ ID NO: 15932 - protein, 516 aa, Oryza sativa
  Clone ID: TF_OSC409418j.C1.p2.fg
MAACAASTATIDWELLEAAISGDTRSMKMKYMDSHDPTILLGKNPQGNTCLHISSMCGHLEFCKDVLSLPQDPTVKKKLLTTVNVMNETPLLTAITSGHVTLAAFLLKYCHEQGFSEVILKQDKHKCNALHHAICNGHKDLALELIATQPALSKDVNKYGESPMYIALMMRDSKFTDIFEKLLGIDGSSHSGTYGYNALHAAIRNGNPDIAKRIIVERPNLATEENKDGNTPIQLAMLHIAKKMGGHVFIKLSNQKLVNMRSSKGKTALHYAIQKCDPKIVAALLDKKIDLTILGSDGNAAAWELRDALDSAKTLNWNEVSMLMIKADPPNAKSVYNLHEEAKEKLINASRKDARSLTQTYTSNTSLVAILIATITFAAAFTLPGGYSSDAGSQGLPIMARNVAFKAFLISDTLAMCASLAVAFICIIARWEDLDFLLYYRSFTKKLMWFAYMATTTAFATGLYTVLAPRLLWLAVGICSVAVLVPILTKVLGEWPVLKLRIRLGQAFKSEFLDMV

SEQ ID NO: 15933 - protein, 259 aa, Oryza sativa
  Clone ID: TF_OSC421303j.C1.p1.fg
DCGTVQLLLAKGACVDTVANRGTPLHVAASKGKDGAMKILLDHNADSGVQIPEVLIFVSSFNKMVDGHLTPLATAITAGELKCVNLLIEAGAVVSGDCISTAAKGGSNECNYSMEETGANRNISDNGEPVSKRKATELKSLGNKAVEKKDYLSATGFYSKALDLYPDDATLFSNRSLCWHHMGNGGKALLDAYECRKLRPDWPKAYYRQGAALMLLKDYESACETLYDGLKLDPGNSEMEDALREALASLKASASTEAR

SEQ ID NO: 15934 - protein, 382 aa, Oryza sativa
  Clone ID: TF_OSC420016j.C1.p2.fg
MGQGASCGRPSEEVDFFGAAQSGDLARLAAAVRSRPSLLGRTTLFDRLSALHIAAAHGHLQVVSMALDLCVHPDVVNRHKQTALMLAAMHGRTECVRRLLDAGANIVMFDSSHGRTCLHYAAYYGHADCLRAILSAAQSAPVSQSWRIPYEVAMKRGHVACAALLNPSSAEPLVWPSPLKFISELEPDAKALLEAALMEANREREKRTLKGARSASPLALPSPSRSDDGAHDAAISEEAAAAGGGEVCSICFEQACTIEVRECGHQMCAACTLALCCHAKPSAAAATPCQQPLPTCPFCRGGISRLVVATTKTRAGGDDEEDDEEAGSRLASPLHRRSRRAVNHPSGDGGSTSSIMGSIASSIGKMGRRRTDSSEHVDVDKP

SEQ ID NO: 15935 - protein, 400 aa, Oryza sativa
  unsure (1)..(400): unsure at all Xaa locations
  Clone ID: TF_OSC413853j.C1.p1.np
MNGRNALHLAASYGHLEICKFLVEESGLDVNSGSHRGACTSMISRALGGWEDSYHDGSSSCLGHDEAVRLLLSKGVHVDPLNYRGAPLHLAASKDRVQAMKVLLEHGADVSGGSRCYQLSIISFHHSXWHAAHSLKCVKLLVEAGADVNGNSTNGPTPLTEAVDDSLTDVVKFLVGAGADPNIPDEQEGRIPIMVAAARGQRELVEILFPRTKPIPCLPDWNVDGIIRTMRTRIEPQVCSPVEEQVSDAKSKGKEAFAKGDYLTAIYFYTLAMDKSPLDATLFANRSLCWLRQREGDRALLDAQQCRMLRPGWSKAWYREGAALSFMKDYKGAVDAFGEALKLDPMSDEVKNALREAIECLKRAAXSEDPNNPXAATASSFWPHLTCQTASHLSTVTTND

SEQ ID NO: 15936 - protein, 203 aa, Oryza sativa
  Clone ID: TF_OSC100876j.C1.p4.np
VLRANPVQLYKQDSEGLYPIHVAASSGANLTVKSFIRERPEIAGLRDSKGRTFLHVAVERERWNVVVYACHTQSLARILNMQDNDGNTALHIAVKHGNKAIFCSLLMNKEVNLNISNNKGQTALDISQSKILAGLFALQNPNKLILRALTFCNARGGCRRVDHLQEQYIIHQKQVDEVRESDKMTNSTQTLGIASVLIVTVTF

SEQ ID NO: 15937 - protein, 201 aa, Oryza sativa
  Clone ID: TF_OSC400368j.C1.p21.gm
MEPDQWHGNGKGLSPSCRCRGKLADMPCSCGVMKHWADIEEASYGGGGGGGGGSPLFDELAAAAGRRSISGAGRLKIPVSGKEGRRIMGLLGMVGDSFGCSATGERLVSAARDGDIQEAMALLELNPRLARALRRLINNKSDGGVTPLHLAALHGHAECVQLLLDLGASVSEVQEAHLSTMRPVVEVLYAVNRSKHESSKY

SEQ ID NO: 15938 - protein, 660 aa, Oryza sativa
  Clone ID: TF_OSC415431j.C1.p4.fg
MASPAAETSPPSTPSTASCPTPRPDAAAAAPSMSPSLLRAARSGDERRFVKALLADPAAPDLDAVATAGGNTLLHVAAWGGHPALASLLLRRAPGLLAARNAALDTPLHLAARAGAHKVVALLVAAFSSSSSSSAAADASSPSLRALTRATNRRGETPLHDAVRGGHEAAARALTAADPGLAGLCGGAGESPIYMAAAAGSLGMVRLLTKTYRNDEEEEEELPVLCSCTGPGGRTVLHAAVLTSNVIEMTQGLLQWNPTLVKEVDDSGSTPLHYVASVGNIPALKLLLGYDTSPAYVPDSNGLFPVHIAAKMGYGQLIYELSRYFPDCDEMLDSKGRNFLHIAVEHKKWKVVWHFCGTQELERMLNVMDYEGNTALHLAVKNADQMIVSLLMANKAVLPNIVNNQGLTALDLAVLATDKGISYTLNPQVIILRCLAWTGAVLSPRRLDHFIDEFNIGKASGNELKKFTNISQNLVVGSVLISTVTFAAVFTLPGGYISDGHPHAGAPILWHRYTFKAFVMANTLAFVGSTLSTIWLTYAGSEHVHPLLRALYMFFSVISMEQATRSMVAAFALGAYVVLSPVSERIALVLYLLALKLKSITVGLPPLLQTVPVTVNARVLPQPRRWQEMLQRSFSSSPIKEKNMPKYDSISLSSSAPFSK

SEQ ID NO: 15939 - protein, 158 aa, Oryza sativa
  Clone ID: TF_OSC400431j.C1.p7.fg
MAAPFVRRPTDDGTSGTREDIIKSLDMGKGKARDAVLARKKDGIGLLHAAACQGHLTVCKFLMEELGGFIAHLIHAQDAAGADVNNKGTGITPLMFAALQGCYTYFIKILLETGAIPNIPNVLGWLPVEHVASCDCREGVEMLFPFTSPNSKCPKLEC

SEQ ID NO: 15940 - protein, 546 aa, Oryza sativa
  Clone ID: TF_OSC900398j.C1.p6.fg
MQPVRIQAHDDKIIWAKSHGEDYEVEMAKAEESRWYLARPNASLGEGCMLKDGGFAITSPTLKRPKGPSQPLRPIPDSKATADSPVMDRGLLKAATSGVKPALHDPSLLLGRTVQGNTCLHIASAHGHEEFCKDILMLNPSLLCTVNADGETPLLATVKSGNVALASFLLSYYCRRHDDLDTREAMVRQDKQGCNALHHTIRRGHRKLAFELIEKEPALTKAVNKHDESPMFIAVMRNFTDVFDKLLEVPDSAHGGTSGYNALHAAFRNNNTDIAKKIIETRPKLAREENSARVNPMQFGVLENKIDVLKVLLEHDFSLGYIISTSGIPLLGSAAYQGHVGVAMEILKHCPDAPFLVENDGTTCLHIAVQKGHIKFVEFVLQSKELRKLINMRDRNGETALHYAIRKCHPKIVALLLQCKAQDVTVLDSNGNPPIWVPNDAADHAKTLNWSEVSMRMLKADPEDKGEIYNLIKTIKDQVTEKARKDIRTLTQTYTSNTSLVAILLATITFAAAFTLPGGHSNNAGSEGLPNMGRKLAFQAFLISDT

SEQ ID NO: 15941 - protein, 466 aa, Oryza sativa
  Clone ID: TF_OSC400144j.C1.p1.fg
MASLSRVPPPARGSRRRPPPSSPVPLSPRQEMLLEAASDGDLGFLKRVVRSLDGGRGRPAEAVEAVRECGAGALHLAAGAGKLAVCRVHLYTKFVFSALLGKQLLHQSQFSKGPSSGMEEMEGETPLAYAVNGANVATVRYLLDHGAHPEKADNKGFTPLHFAAEEGYCNVVELLLAKGAQVDSMSVRGTPLHLAATNGQHRVVKILLDHNADCNKIVSAVYTPLLVAIYGSSLKCVKLLIKAGADVNGVGNITPLIASVGSTEIMKCLLEAGADPNVPDEFGRMPIEFAVRCGTLKDVNILFPLTSPMPTVPDWSVRGIIRHVNTLPGQKDYESGLEKEVAGLKLQGVEALKRQDYLAASDLYTKALCLDFNDATLYSNRSLCFLHMGDGDKAYGDAYTCRMMRPDWPKACYRQGAALMLLKEYQKACDALLDGFKMDPGNSEIENALREAMESLKISDGAKLTT

SEQ ID NO: 15942 - protein, 1132 aa, Oryza sativa
  Clone ID: TF_OSC402545j.C1.p5.fg
MDRAKAAAREDKAAAAATGKETAVSRAVAEDDTALLLAAVGSFRKEAMGRLRKGSDASRMLDQEMSTRLLHLACKHDAVQCARLLLEGGHGITASPVDARDQLTRTPLQVAAEAHSARCIELLLSKNARTDLKLVDGRPLVALEIALLSRRAQVKWSLDNSIEDLLSSLQEKDLNAVRLLAEKTREVGEVAYRYAMEGRVTVLAMLLLVAEEKISAPVSVVIEGVRTKKSIYYSIVDEALSIGDAPARDSNERRKALLSEIQLLNQFGAALWRDRNIDKRSLPPLLKAAKVGDVNVTKMLLMGDVDVNEADPEGNTALHWCLSGSSSTQEPRIVWLLLKNGARVFQGNKLGLTPVHSAAAKGNYKALQSLLLHAQDCVDTPSKTKETPLFLAVKNGSLDCVKLLLRSGASTKVQNLRKQRPIDVATSQDMRFILTSANVAPWNRSSHPKKSVTNKESCKEFLEDFGDYDSDDLNESFTGLKTSASHRDFRSSNGSAQGGKSKNHCAPKQGSKFVPRPNHWPKHDYTRKIFVGGLPPSVGAEYLTEFFTAEFGPVEEAVVIGIRMGDRVQSRGFGFVKFKREEDVISAKETHHVYMLGKRVEVKDAVARGSLPAEIQKIAPFRHHSQEVPKVTHHLLDGELKEEHYIRKRRPLPEKCLPSWFFIFRKWLPGFLADATERLGDRYPLSSLKGDFRAICRMELDHGTLGYPKLSDFMRSLPGICRMCVVPVGSGPATHMVLLPPVSRPKYVPLLEPFSFDHDELPESVSDHQSPRSPLTTNITEDSPHNTDSQQGDTCSESNVQSHQGDECCGSNTESQQDSASTDNGSLLGEVTVSTPKPDSIESIPTGKSDLIELVPTRKPHLIDTVTTRKPDLIVTEPTRKPIVIEPVPTRKPSVIEPVPTRKPMAIEPVVPTRKPIVIEPVPTRKPIVIEPVPTRKPIVTEPLPTRKPTVIEPASLTQKIVSEPMRKTDLFESGLARRIGLIGSRPTTCFVDCPVERPAVTPSNCEADMRFSFFQSQWDRFLAPYPKSDYCIICRSYDAVMQLVPCLHKICVACMMRCNVRACMTCGTAGVMERASDQRCQLMVVCRGAEAIVRCSPCMHSIACRGCFLASVTLLKGCTTCGCMIEHFKFC

SEQ ID NO: 15943 - protein, 166 aa, Oryza sativa
  Clone ID: TF_OSC100621j.C1.p7.fg
MVQFRSSLSMSRARTRHGDGDDRGWNQLHVASRKGDLNQVRRLLDDGMDVNAPAWGPKSPGATPLHLAAQGGHVKIMDELLERGANIDARTKGACGWTPLHIAAKERNKRAVRFLIENGAFLPPDMNDHRFNPPLHYCSGLEWAYEMKRMQDESDSTGETSLGSES

SEQ ID NO: 15944 - protein, 1705 aa, Oryza sativa
  Clone ID: TF_OSC413065j.C1.p13.fg
MERVVGRGGPAGAACGEAAAGMQIQVHQDIEGLQTCSNYYVSVLILVLLFFVLSLAENVRALDEGDGRLADKVGAVRDSDGLGALHLAAAREKLPVCHYLVEELRVDVDAVDNKGETALTFAINCGNEDMVRYLLDHGADTEKINNDGLTALHFAAGEGKCKIVEILLSKGAYIDSLTTGGTALHCAAYNGRDAVVKILLDHHADHKKVSWGAYTPLFVAVESGSLKCLKLLIEAGADVKGIGKEIPLITAASKGLTDIIKCLLEAGADPNVRDCLGHMPIEVAARCGERKAIEILFPVTSRIQSVSDWTVDGIINHVKSLPEVKEEDFCEATLDMGKFQGREAVKNKDYLGAMNIYTAAIALNPRDASLFSNRSLCWLHLGEGKKALMDAEACRMMRPDWPKACYRKGTALMLLKDSIYPLAYFSVARTTAVRHMWEAVRYGDVDYDEDRRALDALIVAVPPEMQFSLSQKRTAKEAWDAIAAARIGSDRARKSTLQALRKEWENLAFKPGEDVDDFALHLNTLLQKMERAVEKLFRCVPEKYRQIARSIESLLDLSTISIEEALGRLKVVDGDEPQPLSGPITIGGKLHLTREQWEASQGDGRKGESSSPTGGPAFLHLDEPKVLVSLCNGSSNDKADGWYLDTGATHHMTGRREFFTEFDSSVRGSVKFGDASGVEIKGVGSVTFTAKSGEHRLLTGVYYIPALRNSIISVGQLDENGSRVLVEDGLMRIWDRRRRLLAKVTRGTNRLYILSAQVAQPVCLAARRDDEAWQWHERFGHLHFEALKQLSAKEMLCDICVVTKQRRLPFPQQTSFRAKERLELVHGDLCGPVTPATPGGRRYFLLLVDDLSRYMWVMVLGSKGEAADTIRHAQAAAEAECGRKLRVLRTDNGGEFTAAEFASPQQNGVIERRNQTVVGMARALLKQRGMPAIFWGEAVVTAAYILNRSPTKALDGRTPYEAWHGRKPAVSHLRVFGCLAFAKELGHIGKLDDRSTPGVFIGYVEGSKAYRILDPETQRVRTAGDVVFDEGRGWVWDKAVDDGLTPMYDDFTVEYVHFEGAGGVGSSSSPSVSTPAPESPPTPTPTHPRATTSTTTSSSSIQPQPVTPHAPAPTATPPSTSTPTPARVERSPVEFATPLSHDGERIDAYHDGEQLRYRTMEDLLGDQPVPGLVPRDLEAQLHLACDDGEPRSYVEAEKHAAWRAAMQSEMDPVQENRTWELADLPRGHRAITLKWVFKLKRDEAGAIVKHKARLVARGFVQQEGIDYDDDFAPVARMESVRLLLALAAQEGWGIHHMDVKSAFLNGDLKEEVYVHQPPGFVIPGKEGKVLRLHKALYGLRQAPRAWNAKLDSTLKGMGFEQSPHEAAIYQRGNGGNALLVGVYVDDLVITGTKDAEVAAFKEEMKATFQMSDLGPLSFYLGIEVHQDNSGITLRQTAYAKRVVELAGLTDCNPALTPMEERLKLSRDSMAEEVDATQYRRLVGSLRYLTHTRPDLAFSVGYVSRFMQRPTTEHQQAVKRIIRYVAGTLDHSLYYPRCLGKAHFIGYSDSDHAGDIDTSKSTSGILFFLGKCLVSWQSVKQQVVALSSCEAEYMAASAALTQALWLARLLSDLLGRDTGTVELRVDSKSALALPKNPVFHERSKHIRVRYHFIRSYLEEGSIKASYINTKDQLADLLTKPLGRIKFLELCSRIGMAQLPHKTTHKT

SEQ ID NO: 15945 - protein, 378 aa, Oryza sativa
  Clone ID: TF_OSC400867j.C1.p23.fg
MAERSSSSSESTGNDEKKSSKPQGSSNDHQGFLPGGSPANTFDFASLHSLLNLFYMILPAAYLRFRFYEPSDPSVKEIADQIAKDPAFTQMAEQALEGEGEQGMPAIDPYIETMQKFMESPHFFTMAERLGDALVKDPAMSSLLENLTSPMHNAKIEERVSRMKEDPAVKSIMDELETGDPAALIKYWNDPETFRKISQAMGPLGGPDFAEPSGTEGTEEEGEYEDESIVHHTASVGDDEGLKKALDGGADKDEEDSEGRRALHFACGYGEVSNDKNISLRILCKTDCMYALLVFRKLHLKCAQVLLEAGAAVDALDKNKNTPLHYAAGYGMKGCVDLLLKNGAAVTLENMDGKTAIDVAKLNNQDEVLRLLEKDAFL

SEQ ID NO: 15946 - protein, 404 aa, Oryza sativa
  Clone ID: TF_OSC32697j.C1.p2.fg
MVHLLLQWKPELAVQVDCNGSTPLHFTVSDGNRKIVRAILATAPPGTAYMKDSDGLSALHVAARLGHGGIVEELTGFYPDTAELRDGRCETFLHAAARERRSSVVSLDIKNPIMMGGLVNAQDAGGNTPLHLAVVAGAPDIVEALLREGNVQTDVLNDDGHTPLDLASESNSLFNMAQPQRNDHLKPSSGHDMASGIEKTSDSLALVAVLIAAAVFAVGFNMPGGYGDDGTANLRDNISFKYFMVLDTFAITTSVVAVILLVYGKTAAAAHLAVSWKSFVVTLQCIWVSLVSLILAFFSAIHAVVIATSSSRTVLITMFLVIYVCFNALILWIEKWIDPAATTYRAVWRFVWRGRHAHAIKRRYPFLGDSLYSLLIFSVIIINITAFVVLVVVYYFDVRRLSNN

SEQ ID NO: 15947 - protein, 439 aa, Oryza sativa
  Clone ID: TF_OSC401411j.C1.p8.fg
MALPQAFELLLGRDRDAWPRGAAFLVAAHYGDVREMKRIAKELDEDGKGIEATVANTSFLGMNALHALGWLGKVPAYRYLVEEVKMDVNKADTAQGFTPLEHAVYHGRLPATRYLLDHGADVHQIRSTGNVSLLHSAAVKGFSEVAKFLLSRGVNVDAESEMGTPLALAAFRGYDSTVKVLLEHNADPNKVTNKALGAPLDLALTSSSVSCVKLLVQAGAEVKVEGPNNHLVRAAEKGLTEAIKCMLEAGANPNVPDRLGRMPIELAAEYGTREDVEILFPFSSAIPTVANWSVDGIINHVQSEIKQLEILFTQDDNFIKKRRSDMKQQGDAAFKKQDYLNASVFYTQALKVDPFDGTLFSNRSLCWLRMGDGERALDDANACEKLRPKWAKSYYRQGAALMFLKEYERAHRALGRALELDPESEEIENLYWESMELCG

SEQ ID NO: 15948 - protein, 847 aa, Oryza sativa
  Clone ID: TF_OSC418633j.C1.p8.fg
MGRGIGSKRRVEDDDGENMPGRKKKEEEEEEEDDDGEEEYEVDVVRDRIGSSRGSRLALFGSDLRLGRFRPRRRRVAPVDGDDGIFQDFVIDPDNKWYRLWTRFILVWAVYSSFFTPLEFGFFRGLPRNLFFLDIAGQIAFLIDIVLRFFVAYRDPDTYRMVHNPTSIALRYCKSSFIFDLLGCFPWDAIYKACGSKEEVRYLLWIRLTRAMKVTEFFRSMEKDIRINYLFTRIVKLIVVELYCTHTAACIFYYLATTLPESMEGYTWIGSLQLGDYSYSHFREIDLTKRYMTSLYFAIVTMATVGYGDIHAVNVREMIFIMIYVSFDMILGAYLIGNMTALIVKGSRTERFRDKMKEVIRYMNRNKLGKDIREQIKGHLRLQYESSYTEASVLQDIPVSIRAKISQTLYKPYIESIPLFKGCSAEFIQQIVIRLQEEFFLPGEVILEQGSAVDQLYFVCHGALEGVGIGEDGQEETILMLEPESSFGEIAVLCNIPQPFTVRVCELCRLLRLDKQSFTNILEIFFVDGRRILSNLSESSEYGSRIKQLESDITFHIGKQEAELTLRVNNAAFYGDMHQLKSLIRAGADPKNTDYDGRSPLHLAACKGFEDVVQFLLHEGVDIDLSDKFGNTPLLEAVKQGHDRVATLLFSKGAKLSLENAGSHLCTAVARGDTDFVRRALAYGGDPNARDYDHRAPLHIAAAEGLYLMAKLLVDAGASVFATDRWGTTPLDEGRRCGSRTMVQLLEAAKSGELSRYPERGEEVRDKMHPRRCSGVPAPTRGTAASGGGKGWCSAQEKLGLAGSGEGLRLLGEDGARVLDVDMVHDGQKLYLVVGGGGDDGGTEARQ

SEQ ID NO: 15949 - protein, 368 aa, Oryza sativa
  Clone ID: TF_OSC900156j.C1.p2.fg
MASAVKSKLTVAKTKEDTAKPPMNPWLLLLASRGDCDGITDHILLNMEAATQQKAAKEEGACHRPAPSADSSPLDQANPAIPTMATQQASGDDGHQSCLDLEGVTIEGDTALHVLATSGDGWSYLRSVEIICSKAPHLLLVQNNKGGTPLHCAVRAGHSQMVSFLIDLANNPRSNLQVAARLKEVLRKGTAFLPLHDAIRIGNKEMITKLLEFDPELASSPTDEAGISPLYLAIVLQRSDIAKLLHQMSPENLSYSGLSGQNALHAAVLQGKVTNSVISASPLLISGSFLNATVRFGPMFFPSEREGFLIFCHFHLSGVTSRIASMGGVKKSILPLVDPTTQPQPFPTLLTSVLFKTVLDAYMDGEGT

SEQ ID NO: 15950 - protein, 395 aa, Oryza sativa
  Clone ID: TF_OSC421842j.C1.p8.fg
MPVPGSQNGRPRPAKAETIHGLARAGDLAGVQRKLQENPALINDRNPVMSQTPLHVAAGYNNTGIVKFLLDFQGTDKVELEAKNMYGETPLHMAVKNSSCESAKLLLERGAHIEAKANNGMAPLHLAVWHALQSGDCSTCTESCSHHTLPHQEGKIPSNHIPGGAGKTMVARILGKLLHMVGVLPTDKVTEVQRTDLVGEFVGHTGPKTRRKIQDAEGGILFVDEAYRLIPMQKSDDKDYGVEALEEIMSVMDNGKIVVIFAGYCEPMKRVIASNDGFCRRVTKFFYFDDFTTTELAEILHLKMNNPTESSLLYGFKLDPSCSIEVVGELIARETTEQRRKQMNGGLVDTLLINARENLDLRLDFNCDDANTMITITLEDLEAGLKQISKQRQLQ

SEQ ID NO: 15951 - protein, 844 aa, Oryza sativa
  Clone ID: TF_OSC412194j.C1.p18.fg
MGFLNLVGNSIGCSASGERLVSADRDGDLQEARALLEYNPRLAWYSTFGGRNSPLHYAAAQGHHEIVSLLLESEVEINLRNYRGQRCHAPVSPPSSPARPPPRRRPRPPRPRRRRAHPCGDGDGSAPVPARALNGILAALARAPPSAACGDAPALAIELFKRMDRWACPRHSPPTIHTYNILIDCYRRVHRPDLGLAIVGRLLKNGLGPDDFSYSLIYGFVKDGEVDKAHCLFLEMMEQGVLPKILICNSIIKELCKMKEMDKAESIVQKMVDSGIAPDLFTYSLIIDGLCKSKAMDKAERVLEQMVEAGTRPNSITYNSLIHGYSISGMWNESVRVFKQMSSCGVIPTVDNCNSFIHALFKHGRTNEAKCIFDSMVLKGPKPDIISYSTMLHGYATATDSCLADVHNIFNLMLTKGIAPNKHVFNILINAYARCGMMDKAMLIFEDMQNKGMIPDTVTFATVISSLCRIGRLDDALHKFNHMVDIGVPPSEAVYGCLIQGCCNHGELVKAKELISEMMNKDIPPPGVKYFSSIINNLCKEGRVAEGKDIMDMMVQTGQRPNVVTFNSLMEGYCLVGNMEEAFALLDAMASIGIEPNCYIYGTLVDGYCKNGRIDDALTVFRDMLHKGVKPTSVLYSIILHGLFQARRTTAAKKMFHEMIESGTTVSIHTYGVVLGGLCRNNCTDEANMLLEKLFAMNVKFDIITFNIVISAMFKVGRRQEAKELFDAISTYGLVPNIQTYSMMITNLIKEESYEEADNLFISVEKSGHASDSRLLNHIVRMLLNKAEVAKASNYLSIIGENNLTLEASTISLLASLFSREGKYREHIKLLPAKYQFFEGAWQD

SEQ ID NO: 15952 - protein, 431 aa, Oryza sativa
  Clone ID: TF_OSC400025j.C1.p16.fg
MSLPDLFEKLLGDDRRDAGRRRGGDRGHRGAHGFHGMNALHAARSLHVYRYLLEVANMDVTSRTPLQVGRLPSSEPLPVGTCPLSGISLIMVLISIMNVKETSLFFIQLQRKGNILSSCRIPCYIQSAFCHDEQPYVECGEKCRQYWRTEIVKLLLSRGAHVDGKSDHGTPLHFAAIKGYESTVKILLEHQADPNKVMPSSQATPLSAALFTTSLPCVKLLIQAGADVNATNNPLARAAGSGLTEAIKLLLKAGANPNCPDTHGRMPIELAAVYGTREDVEILFPLTNPIPTVADWSVDGVITYANLERKKLEDDDYVNTKMSDLKQKGNEAFDEQDYEKASVWYTQALEVDPCDATTLLKRCLCWLRMGEGKKAVKDATTCAKHHPKLSEAYHRLGEALMLEKDYEKACVALTHGIELDPESDEMDKLFW

SEQ ID NO: 15953 - protein, 1026 aa, Oryza sativa
  Clone ID: TF_OSC401616j.C1.p29.fg
MAEVRKYGLPNQPPDIPQILLEAQNRWLRPTEICHILSNYKKFSIAPEPPNRPASGSLFLFDRKILRYFRKDGHNWRKKKDGKTVKEAHEKLKVGSVDVLHCYYAHGEENENFQRRTYWLLEEGFMNIVLVHYLEVKGKNNFSRVASKVSAVLKKLKRVQDYLMLIVLHAQTLSLVRASVSKEKFGATDNCRASSRYHPFVEMQQPVDGVMMNNMLGVSAPSAGYHGEMQTTTANSDNHFATHYDIAGVFNEAGAGLRGVSKTLHDSVRFAEPYPECSAEFMEPALYSSNATMESNNLDDNSRLETFMSEALYTNNLTQKEADALSAAGIMSSQAENNSYTDGIRYPLLKQSSLDLFKIEPDGLKKFDSFSRWMSSELPEVADLDIKSSSDAFWSSTETVNVADGTSIPINEQLDAFAVSPSLSQDQLFSIIDVSPSYACTGSRNKVLITGTFLANKEHVENCKWSCMFGDVEVPAEVLAHGSLRCYTPVHLSGRVPFYVTCSNRVACSEVREFEFRDSDARQMDTSDPQTTGINEMHLHIRLEKLLSLGPDDYEKYVMSDGKEKSEIINTISSLMLDDKCLNQAVPLDEKEVSTARDQNIEKLVKEKLYCWLVHKVHDEDKGPNVLGKEGQGVIHLVAALGYDWAVRPIITAGVKVNFRDARGWTALHWAASCGRERTVGALIANGAESGLLTDPTPQFPAGRTAADLASENGHKGIAGFLAESALTSHLSALTLKESKDGNVKEICGLGGAEDFAESSSAQLAYRDSQAESLKDSLSAVRKSTQAAARIFQAFRVESFHRKKVVEYGDDDCGLSDERTLSLVSIKNAKPGQNDGSHSAAVRIQNKFRGWKGRKEFMIIRQKIVKIQAHVRGHQVRKSYRRIVWSVGIVEKIILRWRRKRRGLRGFQPVKQLEGPSPIQQLEGPSQIQPAKEEEEDEYDYLKDGRKQAEGRLQRALARVKSMTQYPEAREQYSRIANRVTELQEPQAMMIQDDMQSDGAIADGGDFMAELEELCGDGDAPMPTIL

SEQ ID NO: 15954 - protein, 493 aa, Oryza sativa
  Clone ID: TF_OSC415309j.C1.p12.fg
MGLQQSKEELVYQQWIDKEGKTPLMVASMRPDLINVVQVLIELGANVNAYRPGSYCGTALHHAAKKGLEQTVHLLLSHGANPFITNDDCHTALDLAREKGHVNVVRAIEGRISLFCGWMRENYGPGFLEAFAPQFLTRKIWAVILPREARNQTRPLKLELTIYPELQASKPQAVIKLWKCQLEEPKFNQANPSVTIFDKGTRTRYKLLPVCEGDKQQLQWFYSACCGIPQVASMVPAQPANAPLPNPSSASSLPSVISTPSKEDAELAMAINASILSAIAEGVPDVQPITTTTATNDWGNPPSNSLNGWGPPDTSAPSKTSGQVPVVTSSSSTYNGWDVPGTSSGQSSSKHNKSQNSTFVVPQEALPSLPVPTAPPLAVGTFYDGPIQYPSIDSTPVDVTMPSADGGTAVSSAKPAENEGDAKPAESDANASNSGNTPPGTCVICLDAPVEGACIPCGHMAGCMSCLKDIESKKWGCPICRAKINQIIRLYAV

SEQ ID NO: 15955 - protein, 439 aa, Oryza sativa
  Clone ID: TF_OSC401914j.C1.p20.fg
MSKRRKKNERVELRFKAPDYATWKKEAAACDKANGNGKDGSITFMDERNISIAKTIANDIIIPDPAPEWMCYTFLDKYDQLEPIFIKDSARCFLRLFKNWKGYTMSWNLTITAQTLTCMVSFNSLRCAKVVLEGRAPELLGVHANPNCVTKYGYFPLHEAAERFSIEMIKLLLRHGASANVRTVGDDVIDGLLLLHIAIENTCLHKYLEDNLSPGQDHLDYIYKLFHLLCLPEMKIFLDTTRLLAGKTNNLLEELWNYIENGKLIQTAILLLAAQEQIRGGCSSKINGSRKKNGYDIMYKRILRLSFALRWGKVSNGMTQKLMKEKRALIDCMGLLVDAISHAGEPLSAYIQAHSEAPHVEVLEHVSTILKEYGFCPTEEVMDTINLQPYDCKMSETKSCSKGFTDANTAVAEMANLHAADKKALEAVEVKHEYKRFYS

SEQ ID NO: 15956 - protein, 630 aa, Oryza sativa
  Clone ID: TF_OSC29958j.C1.p2.fg
MDGSIPPKPPSCRQPQRETHNNSENTGATGNDQAQDEGFLLHVVAANGDGENYRKCATLLSGMDKTRLFARNSENKTALECAANAGYTNMVFHLLDMERKHNFCGLNTKPNEILKKTSGRSETPLHEAVRQRCERKIEELKGKDSGLARVPDINGMSPLYLAIPLGYRDIVDKLTLTFGDANLSYDGPNGQNVLHAAALQSAGRRGDLMNKADWSGSTPLHFAASVGVQGVTTALLDGIDQDRRTDYTQRPDNNGMFPIHIAASVGSMDTITSLVNADQDCATLRDNVKGRTLLHIAIENRKYKVVKLVCKDPRFKETLNLEDNDGNTALHLAVKKRDEYIFTYLLQNKAVELNHVNLEGYTPLDLAKVIRMEDYFASPQNPTEWMVRVLAHSGAVFSPRRRDELIRGGSSQEQEKHGKTLSESTESVLVASALIATLTFAAAFTMPGSYRTTGPKEGTPALGALYGFKVFLVADILAFFCSVAATFSLAEYGNRGTVDPLVRCRYSQRAVWLFHVALRSIIVAFAFGVSVVMWNISLSAISIGGVATIAVVFYGNVPLGQDFRLMLLMHRRFGFSRSWNLYPSTASHLNWTSWQLKSFSATLVWNLMNLFWTYVLIFALAGFAQLKQKH

SEQ ID NO: 15957 - protein, 298 aa, Oryza sativa
  Clone ID: TF_OSC18672j.C1.p1.fg
MTEMLLNWNKDLTEQVDKNRSTPLHFAASLCKDFAASLSEYTVITWMSRTPLIPVLLANPVQLYQQDSEGLYPIHVAASSGAIRTIKYLIEEQPDEIAGLVDFKGRTFLHVAVERGRRNIVEYAHRTRSLARIFNMQDNDGNTAMHIAVRNGNKYIFCILLRNRKNPEKLILLALTHCNASGGCRRADHFQKKQADEAKESEKLTTSTQTLGIGSVLIVTVTFGAILAIPGGYKADDHYNGGTPTLAGRYIFDAFTMANTIAFICSTLAIIHLMYSGMAMVCIWYWLQWLDGLQLQSV

SEQ ID NO: 15958 - protein, 387 aa, Oryza sativa
  Clone ID: TF_OSC900156j.C1.p1.fg
MTEMLLNWNKDLTEQVDKNRSTPLHFAASLCKDFAASLSEYTVITWMSRTPLIPVLLANPVQLYQQDSEGLYPIHVAASSGAIRTIKYLIEEQPDEIAGLVDFKGRTFLHVAVERGRRNIVEYAHRTRSLARIFNMQDNDGNTAMHIAVRNGNKYIFCILLRNRKNPEKLILLALTHCNASGGCRRADHFQKKQADEAKESEKLTTSTQTLGIGSVLIVTVTFGAILAIPGGYKADDHYNGGTPTLAGSSVISLGAAFMLGMYLVLAPVARWTAIAICVMMMIASLCLFTEPLHAPRVAIAMYVRKGNQDIQRTYIINCGTPNNMHGNYRQVILVDRILRALGPLTNSSGLPLFPQAVTTTATVTTRRSIAGRDDDGGDSAWICCRP

SEQ ID NO: 15959 - protein, 797 aa, Oryza sativa
  Clone ID: TF_OSC900138j.C1.p2.fg
MSRRRAAAVAAAAREEEEASPAQRLVEAALRGDVVTMEACLAAAAAAAAADDDTDDGVPAASRVGVARLRVRCAEVALREEAAGEVIVESRELKTDVSPLFAAAHAGHAEVVRTLLSGGGGKVAGVSSCKKVYCSVFEVAGADVNQKLFLGYATTAAAREGNIHILEMLLQAGVTREACEDSLSEAALFAEAEAVRLLVCSEMIQPEAAAHALVTASSRGFDDVVVILLQNGVDVNSMARVLLRSVKPALHANVNCTPLVAAVMSRQISTVKLLIEEGSYLDCLVQVGSWCWDSATGEELRVGACLGEKYNAIWCAVEYYECSGEILKLLLDKAPWLLETPRKGRNLLCHAILCQNPNAVSVLLNAGANPRFPIMMTNGTHVSYPIHFAARLGHAPVLKQLMLDGANINAQTSTGDTPLMVSARCGHSDCFLELIKSGADLGIVNNAGDTAIMLAKKSSFSSTIIDILSRALSCGGCITSSDITVFSPLHFFAASDSAEALLMTLHYSAADLNRPDGSGLTPVMVAAESGHADIFRLLVMAGADIAATSAEGKSAMSIIRSRAPETRDRFEQILLQASLADAIAGQQPSFRPLHYAARIGDTSSLTQLLKMGHDPNAMDEDGYTPLMHAAAAGKLEACRALVSRGGAADAGSETALSVARRSGRSNKATEEWLLDHVARAHVLAGEELTKHTRGGRGPPHRKAVRMMRSGVLTWGATRRRNVACREARAGPSAAFRRNRRIIRTGSEEQLILMVETVTGREIHFEATSASSVELWVRGINLIVQDCAWSRPDEAEQA

SEQ ID NO: 15960 - protein, 792 aa, Oryza sativa
  Clone ID: TF_OSC900205j.C1.p26.fg
MSRRRAAAVAAAAREEEEASPAQRLVEAALRGDVVTMEACLAAAAAAAAADDDTDDGVPAASRVGVARLRVRCAEVALREEAAGEVIVESRELKTDVSPLFAAAHAGHAEVVRTLLSGGGGKVAGVSSCKKVYCSVFEVAGADVNQKLFLGYATTAAAREGNIHILEMLLQAGVTREACEDSLSEAALFAEAEAVRLLVCSEMIQPEAAAHALVTASSRGFDDVVVILLQNGVDVNSMARVLLRSVKPALHANVNCTPLVAAVMSRQISTVKLLIEEGSYLDCLVQVGSWCWDSATGEELRVGACLGEKYNAIWCAVEYYECSGEILKLLLDKAPWLLETPRKGRNLLCHAILCQNPNAVSVLLNAGANPRFPIMMTNGTHVSYPIHFAARLGHAPVLKQLMLDGANINAQTSTGDTPLMVSARCGHSDCFLELIKSGADLGIVNNAGDTAIMLAKKSSFSSTIIDILSRALSCGGCITSSDITVFSPLHFFAASDSAEALLMTLHYSAADLNRPDGSGLTPVMVAAESGHADIFRLLVMAGADIAATSAEGKSAMSIIRSRAPETRDRFEQILLQASLADAIAGQQPSFRPLHYAARIGDTSSLTQLLKMGHDPNAMDEDGYTPLMHAAAAGKLEACRALVSRGGAADAGSETALSVARRSGRSNKATEEWLLDHVARAPRARRGGADEAHARGPGSAAPQGGADDAVRRADVGGDPPEERGLQGGPGGAQRGVQEEQEDHQDGQRGAADPNGGDGDREGDPLRGHLRVQRRAMGQRHQSHRARLRVVKAG

SEQ ID NO: 15961 - protein, 182 aa, Oryza sativa
  Clone ID: TF_OSC26895j.C1.p1.gm
GVQGVTTALLDGIDQDRRTDYTQRPDNNGMFPIHIAASVGSMDTITSLVNADQDCATLRDNVKGRTLLHIAIENRKYKVVKLVCKDPRFKETLNLEDNDGNTALHLAVKKRDEYIFTYLLQNKAVELNHVNLEGYTPLDLAKVIRMEDYFASPQNPTEWMVRVLAHSGAVFSPRRRDELIRG

SEQ ID NO: 15962 - protein, 202 aa, Oryza sativa
  unsure (1)..(202): unsure at all Xaa locations
  Clone ID: TF_OSC418633j.C1.p14.gp
LENAGSHLCTAVARGDTDFVRRALAYGGDPNARDYDHRAPLHIAAAEGLYLMAKLLVDAGASVFATDRWGTTPLDEGRRCGSRTMVQLLEAAKSGELSRYPERGEEVRDKMHPRRCSGVXPHPWDGGERRREGVVVWIPHTIEGLVSSAQEKLGLAGSGEGLRLLGEDGARVLDVDMVHDGQKLYLVVGGGGDDGGTEARQX

SEQ ID NO: 15963 - protein, 417 aa, Oryza sativa
  Clone ID: TF_OSC401428j.C1.p1.fg
MRHIDIYTLCLDRFLYPRKTRGDSLTLTGMLMDADESSAYQPDDKGSFPIHVAAAEGNDGTINILLNKSPNCATLRNAQGRTFLHIAVENGRHTIIMFVRRRRRLAAKIMNLQDNDGNTALHLAIQDGDLHAVLCLLMNPVVKVDCLNKEGLTPLDISRKLIPEGLLHGSHQRIWIKRSLHLANAHHANPSLDHRQEKCICRTVREERDSKIVEKDDDEQEDSKTITESTQVMAVCSTLIATVAFAAAFTLPGGYRADDHTNGGTPTFVGSYGFDAFVLAITFAFVYSLLATFSLVYSGMTKVDYSIRLEHLNSANSLVWLSIRCLLAAFALGLYVVLAPVAHKTALLICLMCSVGLLHGHTSMKTQIRMAVLLQGRIGFKVWWILGRKILRNFLHSFWPFLIIFGWAAYLKWRHQQ

SEQ ID NO: 15964 - protein, 390 aa, Oryza sativa
  Clone ID: TF_OSC900359j.C1.p1.fg
MRHIDIYTLCLDRFLYPRKTRGDSLTLTGMLMDADESSAYQPDDKGSFPIHVAAAEGNDGTINILLNKSPNCATLRNAQGRTFLHIAVENGRHTIIMFVRRRRRLAAKIMNLQDNDGNTALHLAIQDGDLHAVLCLLMNPVVKVDCLNKEGLTPLDISRKLIPEGLLHGSKCICRTVREERDSKIVEKDDDEQEDSKTITESTQVMAVCSTLIATVAFAAAFTLPGGYRADDHTNGGTPTFVGSYGFDAFVLAITFAFVYSLLATFSLVYSGMTKVDYSIRLEHLNSANSLVWLSIRCLLAAFALGLYVVLAPVAHKTALLICLMCSVGLLHGHTSMKTQIRMAVLLQGRIGFKVWWILGRKILRNFLHSFWPFLIIFGWPAYLKWRHQQ

SEQ ID NO: 15965 - protein, 1238 aa, Oryza sativa
  Clone ID: TF_OSC401095j.C1.p7.fg
MAQEYQTMPSSAHDKRYSGLSNGGDKEQLPSQGVCVTLSCLTVGKSEVPLTTRFDGNAMQVDGLLKNVSPTTKIVVKPNEELKSPFLVKRHLFLKRPDPIILDELYSLTTKVTDEESRQSVWVSGNLPINLKLVDIQETIKPEGVMGINCMDLAVRIMSRQDAEIFKNTKCLGWRHYVDSNWKQYINDPNNLRNEYSRLSTMYDPSGSHLVLIPVSSDGHWTLYAFNMHDKKLCILDSRRDTSEGGDQDPVKRHEKIRKEVCHALNETMDVDFNFLSWKHEFPKVPRQQNSCDCGFFVFNFMRLWDGHRLIRWFSTETKELRKNFLAYILSSLDDHSVLPTNVSELIKKLPGETMMNVELLEAARAGNANAFCELVIDPARSINHEPFRSASCSCLLFRSTSSGSYCLCFECTSSRNSDQEKSPNKHNALTRSDAPSTFTRDTRDMLHAIQGVTVEGDGVLHIAASFGVLEPVKTVLEAQNGAFATALLQAENNKGDRPLHCAATTGSIVTVKLIVDEAEKIMRAQSDTFAWFLRAKNLDGQTCLHEAVRHGHEDVVKYLVSKDADLGDVPLPLVQIVDNEGTSPLYLATTLRRDSIVKVLTEAAPSGMPRAASYSGPAGKTALHAAVLFSEELSRTLVNWNHSLIKIRDESGSTPLHYLADGKYTTEPSCISVTELLLKKDPSSGYCEDSEGSLPIHIAAANGTLGIIDQLIKLCPGCESSCNASGQTILHIAVQTESHDVVRFVCSNEMFKMVLNMKDYDGNTALHLAVQKGHNKTFGILMGCKNVSLSIRNRNGYTPLDHAVLNKTSGLTYATYWPGHQRWVCNSLLAAGADFGTFRADHLSSKIPEQAKADREAFSDTLSKSAAVMATCAALLFNAALNIFLNVQAIYHNNNTSTNNNNATQGSDQLKQIQKVKKLSGDSLSISACAILLFAIAGFPILPGVIGRTFALILGLGVLIGSSMISLQALAARLDLAKVYGTGIGAFCVIFSLLCVTLCTNLLRKIVQHARPLWDRCGARGFFRSILNVRRAQNYSAIPLLQVVNLKTVEEITEWELRGGKGNGSTRIWRDEPFFFLNGEVEGKRMYTNGLMGGEQWGSSRLMGFLGPNAVLLRGINAEVFVVGLYRLARLDLAKVYGTGIGAFCVIFSLLCVTLCTNLLRKIVQHARPLWARCGAHGFFCSILNVRRAQNYSAIPLLQVVISVPRNGCFVLLCADGLRSALVNGEDRDYAQRGVEV

SEQ ID NO: 15966 - protein, 296 aa, Oryza sativa
  unsure (1)..(296): unsure at all Xaa locations
  Clone ID: TF_OSC3151j.C1.p3.np
AAQXPIIPSGRPGKPRVYSRQVFPLLWPILEKDSLTRFNRLCQGWSRLMGLRGFIYPEILSSIVANNALRCARVALQGSSPLRGRRADPNGLHPYGYTALHLAAETFSVEMVKLLLRHGASANHRTEGDYVIEGLLPLHVAVENASMHKYLEDNWADPLSNLISLLCLPEMKMYLDTTRLIAQHTHNIVDELWDYIDKKKFVQLAILLLASQKQLRKANLNGFESIRRRTYEAISGLHLQMKGKNGSALKKLKEKKEALLTADALVGIIDKAGQDLEDYIQTNSEVVLIPPFVILM

SEQ ID NO: 15967 - protein, 375 aa, Oryza sativa
  Clone ID: TF_OSC3151j.C1.p6.fg
METPSAPAPGDGNSAPASSRVTFEDMLRSCDQSYYQMLGFPDAASYFEAKERNLLAQYSRQVFPLLWPILEKDSLTRFNRLCQGWSRLMGLRGFIYPEILSSIVANNALRCARVALQGSSPLRGRRADPNGLHPYGYTALHLAAETFSVEMVKLLLRHGASANHRTEGDYVIEGLLPLHVAVENASMHKYLEDNWADGHSPNNLISLLCLPEMKMYLDTTRLIAQHTHNIVDELWDYIDKKKFVQLAILLLASQKQLHGPINRSRGKANLNGFESIRRRTYEAISGLHLQMIAMVNEGKNGSALKKLKEKKEALLTADALVGIIDKAGQDLEDYIQTNSEPTVCTNMYRQKSQWILDRSDSVLQNRGKNEIIPTI

SEQ ID NO: 15968 - protein, 308 aa, Oryza sativa
  Clone ID: TF_OSC414138j.C1.p10.fg
MAMETPPPFQESAHCDVCRCTFTTFRRRHHCRNCGRTLCHEHSSYHMALPQYGIYTDVRVCYDCFNKSSSRGGVGNAGSPGSVSSAADSFSGLNLGEDDASSPMKNSAFHSAPAVIECKCGMPLCICEAPKPEPVPVKFCVPPPNEHMQQSISTTSSSAQSNPRPKKSSTNQQSAESSVKKASATSSSNSSSFLNLGLMSNDTNDKGPSEYDVTGEGLREAIKSGDIKAVKKLLSQGVDSNYCDKQGFALLHLAALFNQTEIALILMDNGANIQSKNGQGETPLDCAPAMLQYKMRQRMEELAASQRP

SEQ ID NO: 15969 - protein, 191 aa, Oryza sativa
  Clone ID: TF_OSC100669j.C1.p3.fg
MTTQQASGADAESGMDLDGVTTEGNTALHVVATCGDGPGYLRSAGVIYSRSQHLMLVQNNNGDTPLHCAVRAGHSKMVDHLIDLVETKDNSPSSARLEELLRKENCRKETAFHDAVCIGNKDIITNLLKYYSELAGFLMDATGTSPLYLAVLHQQVDIAKLLHQMTDGNLSYSGPNRQNALHAAVLQDQGV

SEQ ID NO: 15970 - protein, 234 aa, Oryza sativa
  Clone ID: TF_OSC28292j.C1.p6.fg
MDPKLLRAAGRGDCAVLEALLLGAAAAAAATPNQQVAIDVGSGQQSPLLLDAATTPQGDSALHVVAASGDGEGSLRCARTIYSHAARLLDRPNARGDTTLHCAARAGNAAMVRCLLDMAREEELAGSAGRVAEVMERQNGRRETALHDAVRLGDKQLVDHLISVHPRLARLPGGDGMSPLYLAVSLGHDHIAEALHQQGDELSYAGPAGQTALHAAVLRGAEFSFIYAIHVTQE

SEQ ID NO: 15971 - protein, 473 aa, Oryza sativa
  Clone ID: TF_OSC28292j.C1.p4.fg
MTEKMLQWNDGLSGEADASGSTALHFAASAEGPEIELEKSSLLRRLALRWPCSRNGRRRRRTSTQVLLKADPSLACRPDSNGEYPIHVAASMGNLKLVALLLHRCPECAGLRDARGRTFLHVAVDRGREEIVGFATDDRRRRDGSQLATPILNAQDDDGNTALHLAVASGVLNVFCYLLRNRRVCLDLANNDGLTPADLSRCTIPAGLNYKTNARTWILWSLVVAKALSGNIRRDHFQQQYVPKLDEIAESKKMTESTQILGVGSVLVATVAFAAAFSPPGGYAAGDGNNNNGRGNVVVVAGSPALSGRYAFDAFMYAVTVAFTCSMLATFSLIYAGTAAVDWKIRHRYFKHSLSWMRKSTRSLLVAFALGVYLVLAPVSRATAVGVCVFTTGTLLFRNREVVRMLICAYVLQRRMGITVLAKIGVPITVDLVKSNLVYLVIFGGPLCTPLCVLFFVWRLAPVIMRYVHRKLI

SEQ ID NO: 15972 - protein, 329 aa, Oryza sativa
  Clone ID: TF_OSC401769j.C1.p15.fg
MEDQKKNAKPEGSSGSQRGAPPAPDAGLPNPFDFSQFSNLLNDPSIKEMAEQIASDPVFTQMAEQLQKSAHVTGEQGGPALDPQQYMETMTQVMQNPQFMSMAERLGNTLMQDPGMSSMLESLTSPSHKELLEERMSRIKEDPSLKGILDEIESGGPSAMVKYWNDPEVLQKIGQAMSINFPGDAATSTTLSGPEETEEDGGDDDESIVHHTASVGDAEGLKKALEDGADMDEEDAEGRRALHFACGYGELKCAEILLEAGAAVNALDKNKNTPLHYAAGYGRKECVDLLLKHGAAVTPQNLDGKTPIEVAKLNNQDEVLKVLEMDAFL

SEQ ID NO: 15973 - protein, 174 aa, Oryza sativa
  Clone ID: TF_OSC400284j.C1.p44.fg
MGGDAAASVVNGKDEEGWAPIHTAASSGKAEIISILLDQGANVDLTTDAGRTALHYAASKGRLNIAETLIAHSANVNKKDKFGCTPLHRAASTGNAELCEFLIEEGADVDAVDKTGQTPLMHAVISEDKAVALLLVRHGADVAIEDKEGYTVLGRASDSFRPALIDAAKAMLEG

SEQ ID NO: 15974 - protein, 416 aa, Oryza sativa
  Clone ID: TF_OSC34032j.C1.p41.fg
MGNSLGCVGLGERLAAAAKDGDAAEAQRLLAANPGLARCTTFGNLNSPLHVAAAKGHHEIIYCNNMLNDQITDEIAALLLENGADVNARNIYGQVWRVENLSGRTALHMAAAGGHVKCVRLLVADAAGDRDGYVNKAANGGVTALHLAALHGHVECVHLLIDERASLAAQTLPCAAPPMASIGAGSTPLHYAACGGEVKCCQILVSRGADRTAINCNGIVVVRWLPIDAARIWGCNWLEHVLSPKSHLPIPKFPPSGYLSQPLPSLIAIAREQGLNLSSEVSDGFDEGADACAVCLERPCTVAAEGCDHELCVKCAMDLCSVIKSYDSAGIAGEIPCPLCRTGIASFRTTAAPPPPSLAGSPARRSRRNNSGGGGGEHEASNSGGSEKGYGSIDPDAGAVVPLYYAPPFAPSAILT

SEQ ID NO: 15975 - protein, 792 aa, Oryza sativa
  Clone ID: TF_OSC9742j.C1.p4.gm
MDFGPCNETLDTELLHVLTSGDEVRMADLLGRERRGHGHSLSQVAIRVDDDDDGRAPAGASRLLGVTTGNGNTALHVAATRGHAALAALVCATAPALAATRNRFLDTPLHCAAKSGHRDVAACLLSEMLRAGGAASAALPLRRATNCLGATALHEAVRNGHAGVVALLMAEAPELASVANDGGVSPLYLAATVGSVDIVRALLHPLPDGTPSPASAAGPDGRTALHSAATTSKEPSLALVCDIQGSFPLHVAAVMGSVRIVVELIQKCPNNYNDLVDDRGRNFLHCAVEHNKESIVRYICRDDRFGILMNAMDNEGNTPLHLAAEYGHPRMVSLLLETMSVDVAITNRDGLTAADLAYRHLQPGLHYFLNPRAVVKNLFYCTRAPVTLEGDHARTGIPSAMEDADAPKDSGGVTSTGTVASVLIATVTFAAALTVPGGYVADDHPNAGTAASAGRFAFRAFAVSDTMAFLCSIVGTCLLVVGEAREVRPSRGRLRAYQGSAWALVTAGAQFMVAAFAFGLQVALGGGADSRWLVVFVHALCSASVLLCFPGIWAPFCLGKACVDLEPATRAWRSPKCAAASARKEACHAGTRRSYNWRFSFFQRFRSASTWLALGLLGHGRRPPLPALILAIGATAGSLPPYQRLPVANASLPQLPSPAQRQLHGGSLVGGRATAKVSKLSRGSTEEWRKVTSEARKLSKHNVFCWACLVDDKAVPWLLCFLSSTTAAIQDNAVASLLNLLKHPAGQMTIMEVGGVGLVVDVINVVAKAVAQHNVAAILFYLSSNNPDASRR

SEQ ID NO: 15976 - protein, 785 aa, Oryza sativa
  Clone ID: TF_OSC400283j.C1.p61.gm
MAVLLRPAAAIAGGRQVWPVAEDHHRQLRDEAEAEAASQRLVEAVARGDAREAGELLASGRADVNYAGVVWLKARRVAEAALRDGAAAELRAAHEEIRADVSPLFLAAGNGDAALVRALLADELARATAMRASAKGADVNGKVFRGYPATAAAREGRAEVAALLVRAGASQPACEEAVVEAALQGQAALAVIFMGSDLVRPRVAVHALVSAAARGFVDVVDSLIKCGADPNATSRVLLRSLKPSLHANVDCTALFAAIVSRQIAVVRQLLQAGVKRDTKVRLGAWSWDTATGEELRVGAGLADPYDAVWCAVEYYESTGAILRMLLQNGYSSGATHLGRNLLHHAVLCGSAGAVQTLLASGVDHEVAVKTSRSSRSRPVHMAARLGQPEILEMLIGKGCDVNARAEGGDVAAILAARHKREDCLRILVSAGADVALLNSAGESAASVACSGGWKAGFERAVLGVIRSGTIPRSSDRNVFSPMMFTARCGDAAAMEVLLAQPDVDVDEQDVDGCSPIMAAAKEGNVDAFRALVFAGANVKLSNKRGETAIGLAQQSKKRDLFEQVMLEFALEKGMPGGFYALHCASRRGDTAAVRHLASAGCDVNIPDGDGYTPLMLAAREGHAAVCELLISYGARCDTRTPRGETALSLARATAAFNKAEDVIMDELGRQLVLGGAHVKKHTKCGRGKPHGKSLRMVAAAGVLRWGGSGRRNVVCREAELGGSSAFQLHRQRRGCDAYEPGLFRVATATGREVHFVCQGGEEEAELWVRGIRAVTRAVYGKRGKE

SEQ ID NO: 15977 - protein, 695 aa, Oryza sativa
  Clone ID: TF_OSC900133j.C1.p13.fg
MDSKKTTTQSEPNDGVQAPHRPELLMAARHGDRDRLKRLLGTVSPPVALPVGEVVLHVEDVETVGVGVDDDDDAEPTAAVVTSAEAVTVALDSVLHVVASSGDEPAFLESATAVHARASHLLDAGNGKGDTPLHCAARAGMVRMVSHLLDLARRGGGGGVAGDAAARAFARRRNSKGETALHEAVRLGSKAMVEALMSADPELARVVAADGGSPLYLAVSLGRRDDIARLLHEHDRGLSYAGPDGNNALHAAVQKGKERYEFNDLSISETTKMILGWNKDLIKQADRHRGSTPLHVAASWGHHDVISLLLDADPSAAYQPDHDGAFPIHVAAYDGQVRAVSILLGLDNHRKCAGLCSGERRRRDLRGCAELRDGRGRSFLHVAVEEQRQSVVAYACKLGNLSPAVMNMQDDDGNTALHLAVKAGNMWIFNPLMERRQVELNLTNNKGETPLDISWIEKPVGVYFGLNQRVKIYKLLKDANAKQGNHRWDLFLKKHNKKVDEEVEGKKLTESTQTIGVGSVLIATVAFAAAFAPPGDYGDDGAPRLAGRYAFDVFIIANTLAFICAGLSVISLTYAGVAAVDMRTRMISFVFSASFMACSARSLGVAFAFGMYVVLAPVARTTAIAACVITGLALADVAWFVFVVAAGEVMLLKRLGIARAWWRLPFAIMATLLMQFWPYIVIVVVVLYSKIRGVH

SEQ ID NO: 15978 - protein, 943 aa, Oryza sativa
  Clone ID: TF_OSC400795j.C1.p4.fg
MARWGAARMAACGPWGRNRRVGAGDAFEASEVRRDGRSRMMPACGPWGAGHGGGDPALERELSRDGSHYSISSAILPSLGARSNRRIKLRRFIISPYDRRYRIWETFLIVLVVYSAWVSPFEFGFIPKPTGALATADNVVNAFFAVDIILTFFVAYLDKMSYMLEDDPKKIAWRYSTTWLVLDVASTIPSEFARRILPSKLRSYGFFNMLRLWRLRRVSSLFSRLEKDRHFNYFWVRCAKLICVTLFAVHCAACFYYLLADRYPVPTSTWIGNYMADFHERSLWIRYVTSVYWSITTLTTVGYGDLHAENTREMIFNIFYMLFNLGLTAYLIGNMTNLVVHGTSRTRNYRDTIQAATSFGVRNQLPPRLQDQMISHISLKYRTDSEGLQQQEILDSLPKAIKSSISQYLFFHLVQNVYLFQGVSNDLIFQLLRTVTEYAYLVLLLDFVFEVSEMKAEYFPPREDVILQNEAPTDFYILVSGSVVIQVATSGEVVGEIGVLCYRPQLFTVRTRSLCQLLRLNRTAFLSIVQSNVGDGTIIMNNLIQFLKEQKENSVMAGVVKEIESMLARGNLDLPITLCFAVTRGDDFLLHQLLKRGMDPNESDNDGHTALHIAASKGNEQCVRLLLEYGADPNARDSEGKVPLWEALCEKHAAVVQLLVEGGADLSSGDTGLYACIAVEESDTELLNDIIHYGGDVNRARRDGTTALHRAVCDGNVQMAELLLEHGADIDKQDGNGWTPRALAEQQGHDDIQLLFRSRKAATASGHHHVPSSTTTRVAPAAAAASLIGRFNSEPMMKNMIHEDADLPSRVLPEKLRRKRVTFQNSLFGVISSSQAQRETDHPLSRGGLAATGSPNPSSGSRNAVIRVTISCPEKGNTAGKLVLLPQTLDMLLELGAKKFDFAPTKVLTVEGAEVDEVELIRDGDHLVLVSNEWDAEKMKGKS

SEQ ID NO: 15979 - protein, 777 aa, Oryza sativa
  Clone ID: TF_OSC4903j.C1.p2.fg
MSRRRAAAVAAAAREEEEASPAQRLVEAALRGDVVTMEACLAAAAAAAAADDDTDDGVPAASRVGVARLRVRCAEVALREEAAGEVIVESRELKTDVSPLFAAAHAGHAEVVRTLLSGGGGKVAGVSSCKKVYCSVFEVAGADVNQKLFLGYATTAAAREGNIHILEMLLQAGVTREACEDSLSEAALFAEAEAVRLLVCSEMIQPEAAAHALVTASSRGFDDVVVILLQNGVDVNSMARVLLRSVKPALHANVNCTPLVAAVMSRQISTVKLLIEEGSYLDCLVQVGSWCWDSATGEELRVGACLGEKYNAIWCAVEYYECSGEILKLLLDKAPWLLETPRKGRNLLCHAILCQNPNAVSVLLNAGANPRFPIMMTNGTHVSYPIHFAARLGHAPVLKQLMLDGANINAQTSTGDTPLMVSARCGHSDCFLELIKSGADLGIVNNAGDTAIMLAKKSSFSSTIIDILSRALSCGGCITSSDITVFSPLHFFAASDSAEALLMTLHYSAADLNRPDGSGLTPVMISLPRVPKGNPRCRSSEAELLNQDRFEQILLQASLADAIAGQQPSFRPLHYAARIGDTSSLTQLLKMGHDPNAMDEDGYTPLMHAAAAGKLEACRALVSRGGAADAGSETALSVARRSGRSNKATEEWLLDHVARAHVLAGEELTKHTRGGRGPPHRKAVRMMRSGVLTWGATRRRNVACREARAGPSAAFRRNRRIIRTGSEEQLILMVETVTGREIHFEATSASSVELWVRGINLIVQDCAWSRPDEAEQA

SEQ ID NO: 15980 - protein, 401 aa, Oryza sativa
  Clone ID: TF_OSC406054j.C1.p11.fg
MRQQEGGDHRHVAADDELLARLSSQRDNDNGSTPLHLAASINGLPSALYIPICSPRVLAPLRRPKPVELLLKANEFAAYQPDNQGMYPIHAAASAGSLETVKILLEKHPDCATLRDARGRTFLHAAVEKKRFGVVKYVCHWKRKESMMPLKCYYAWDLRVHIRTLLLKLGAPYGESQSHIFNKKRHAIIVDPKFKGGEEKMLENVTAATQVLALFSVLITTVTFASVFTLPGGYRSAGDGGSAAGTPLLAGRGCYAFDAFILSDALAFVCYFMATSVLLYAGVPAYKLEVRLRHINFAYSLMMNSGRSLAAAVALGLYVVLLPPVGRTIAIAIAAAMVMLALLLSKASEGIESLFGIAIARNRKLSIRDSVVGFTIYVGERYWSFILIFGLPAIRKWARAG

SEQ ID NO: 15981 - protein, 467 aa, Oryza sativa
  Clone ID: TF_OSC406019j.C1.p1.gm
MLCSASEQAQLLLNDNLRRVLLRIPPLLMLQLEALLLNLMRVMMWIPPLLLLTYQITALLMEKKKKVKPLMALLIHNLKPSTALIMQKIKPSTTFQLHKLLSTKKLEELKIFTVIRMKIRKELKAKLEPSTPNFITTPWHFVRNRVAIARREQYESRIDAVTAEGNTVLHIAASRGHAHAPGPDGTSQQEDLITVLYKARWHLLSSLNSEGETPLHRAARAGHVHAVQRIIAGVKENLEKLAENQLMDIIATRNCAGENALHLAAMHGDAQVVTTLLKYARDARLSSVLTEANNASALYLAVMSTSWPPSKHYSLTNAMIRQLKVQKGRMLYMLPQFSRIEDSEGSTALHIAALMGHVNVVRLLIKASPDSADIRDKQGRTFLHIACADEGWQRPTVRYVVKNPMLHDLLNSQDKEGNTPLHLAANHGKFVDVYALISSGKVHPDIMNAEGETAFDIAKNTVSFFFM

SEQ ID NO: 15982 - protein, 732 aa, Oryza sativa
  Clone ID: TF_OSC400867j.C1.p7.fg
MLFAKLDDSPMLRTQIQSLEESAEILRERCLKFHKGCRKYTEGLGEAYDGDIAFASSLETFGGGHNDPISVAFGGPVMTKFTIALRELGTYKEVLRSQVEHMLNDRLLNFVDIDLHDVKDARKRFDKASLLYDQVRDKYLSLKKGTRADITTAIEDGYDLLHQMEPYINQVLAYAQQSRERANKEQASLVERMHEYKKQIDREIRLSNGLTDAHNGDGIQTIARSSHKMIEAVMQSASKGKVQTIRQGYLSKRSSNLRADWKRRFFVLDSRGMLYYYRKQINRTPGGCSSHPRSIGNPTEHGSGLLSRLFSSHYHGIIHDEKSVARHTVNLLTSTIKVDAEQSDLRFCFRIISPTKVYTLQAESAIDQMDWIEKITGVIASLLSSQSPEQCFLLSPKSCGHDGSASESSSFTSQDLEPSMYDDLTLEKNTGNGQHDVRGTHYHKTNMKPEKPIDLLRKVDGNIICVDCGSMEPDWASLNLGALLCIECSGVHRNLGVHISKLISTTLFRSAHGLDTAWHFTVSKPKHSDPFSAKEKFIHAKYADKEFVRKYSMDEIQLAQQMWDNVTANDKRAVYSLIVQSRANVNLVYGEMSYSSRSTTGRSSQQEHSSSPSDGSPVFFDCHSHEKVSPREPLSPASTSSRVDDGEERCEDVGMVELLLQYGANVNAIDSRGRTPLHQCILKGRHIHAKLLLSRGANPQVADQDGRTALQCAIDGGTSDDEILVLLEDYTR

SEQ ID NO: 15983 - protein, 415 aa, Oryza sativa
  Clone ID: TF_OSC401493j.C1.p1.fg
MCDKKLSILDSLPDASEGGQDSLKRHEEIRKIVCGALNKTMDVAFCFFSWEYEFPKVPRQQNSYDGGFFVFNFMRLWDGHRLIRWFSTETMDMRKSFLACILSSKNNDATMPTNVSELIKTLPGEAMMTPELVQATRQGNTNAFRELRCPARREGSYGGHTSISINRAACCSCVFFESTSSRRSCFRLDCKSSCRSDEQENQIMRSPLRLDATSTVTSDRGPPEPYSIRGVTVDGDGVLHIAASFCHFELAKSILEGQEDKALIVMLLQQENKRGDRPLHCAAATESKEMVQLIVERAKCITEPSNFTTNLLRARNLEGQTCLHKAILLGHTEIVKYLVSQDEGLAQIVDNEDISPLYLAIALRRGDIVQELTIKASCGPAGAVSYCGPAGKTVLHAAVLFSEGTDAISSFVVKF

SEQ ID NO: 15984 - protein, 292 aa, Oryza sativa
  Clone ID: TF_OSC900166j.C1.p2.fg
MAGMTPLACAVSKGKAIAVRYFLDKGADPNKQDNIGFTPLHYATKEGYDGLARLLLSKGASVDVISSKGTALHLAASSWKSGIMKILLEHNADPNKVSADSETPLAATLIASDGLNEPAVLKCIKLLVKAGANLNRAIPDTPLVIATNKDFVECVEYLLEAGANANIPTNNGGKTPIEIAAKSGRRKLVEILFPCTLPIKGVSNWTVEGIITHVKSKKSKKKACAQDKESGTDKKAQLKSLGASAVQGKDYVGASKFYSEMRVRGVATGISLVRLNMEEDEKVPGSSNTSYI

SEQ ID NO: 15985 - protein, 486 aa, Oryza sativa
  Clone ID: TF_OSC400090j.C1.p61.fg
MVILDRYCEAVEYLVKNLDHSMPMQTTDKTDAVKSMLSGENSEGSDGSKSSDTVEWDPWDPPHPPCPTLPPTASLMSQVEMVKQHHFQVLAVLAASRATNIIAPDRTPQEVRRKFAEICSELADILEKDSVRRFLNLYRRNMRIMGWGLVITSQTMDFIVSFNALRCAKVVLEGKAPKLCQIRANPNYMTSYGYFPLHKAAEKFSVDMIKLLLCYGASANLRTSGQKVIEGLLPLHVAIENTCMHKYLEDNLLTDRKLKQVDLDFIYKLIHLLCLPEMKIFLDTTRLLADNTDNIVDELWNYIKEGRLVHAAILLLAAQRKIRTCASSNRNISCNLNGFDIIRDRVMGSIVSIEREGRGLTSGKNSKAHKQLEEKRKFFHNSLMLIFVISKTGEALDEYIQSHSEVSHQEVLEGVSSILDDHGFAPTGKGISIGDLECRPYDCNASNSVPKCNYEDSGTTKAVGESPNLNVKAKKSAPVVMLYGFG

SEQ ID NO: 15986 - protein, 749 aa, Oryza sativa
  Clone ID: TF_OSC402265j.C1.p11.fg
MEKPASCCCYFPLRWESTGDQWWYASPIDWAAADGHYDIVRQLLHLDPNLLIKLTSLRRIRRLEALWDDDARFAGAAGHRAGVARSLLLECECSKNGGAAAAAENTLLRAGYGGWLLYSAASAGDMAFVQELMERDPLLVFGEGEYGVTDMFYAAARGGNAEVFRLLLDHAMSPRCSTNCPNGGEGARGGGGGRSSVFRLEMMSRAVHAAARGGSVEMLRELIERRSDVSEYLDFRGSTVLHAAAGRGQLEVRHLLLGHCLLHYFCKMHHSELLFVPICMDDKVVKYLMATFDIVDSTDNQGNTALHVAAYRGHLPVVEALVAASPSTISAVNRAGDTFLHSAIAGFRTPGFRRLDRQMELMRHLIRGRTSNIQKIINLKNDAGLTVLHMAVVGCVHPDLVELLMTTPSIDLNAEDANGMTPLALLKQQLRSSTSDKLIRQIVSAGGVLNSTVLRTRSAIVSQIKMQGGIASSPGTTFKISDAEIFLYSGIGTAESRRPSSCSSNGKCDHAHHGDAKCGNAENHGSSEKRLSSASRAKDRLKLMLKWPRQKMSRGHKKSDDGDAMDSIKKLSEQAVETPAPLRQTFTKTTALNNKRTLAVKTSTPSSATKKKLNSKLIHGIMEAMPHLASSSPASAFPRSSTPPPPQSGKMKGVCLELDDENSMTTPVFGKLKDIVLNNDDDDDAMGEPSSSGSSVNDDASAEMPARRHGCGNGRLINICFGAQGLTVEDSASGQQTSKMFKQQCLRVS

SEQ ID NO: 15987 - protein, 572 aa, Oryza sativa
  Clone ID: TF_OSC407936j.C1.p23.fg
MADATAALSELAAALDEEGKGVAAVAAAVKDANKRTALHFAAREGRTHVCHFLISDLALPVDPKDDDGNLDLMKLFLSKGVDVESESDAGTPLIWAAGHGQQEAVKLLLQHDAKASLCLALNHLSISRSCGLSLTFLLKLVIAWQPNTENDDGITPLLSAVAAGSLPCLDILIQAGAHPNIRAGGATPLHIAADGGNMEIINCLLKAGSDPNACDDDGLKPIQVAALRNNREVVELLLPLTSPIPGVSSWSIDGIIEYTKSVEEKAQVKEATTQKADRLQVPQLVEVSSEAKERSLEAKSRGDDAFRNKDYLVAVDAYTQAIELNPNDATLHSNRSLCWLRAGQAERALEDARACRALRPDWAKACYREGAALRLLQRFEEAANAFYEGVQLEPENGELISTKLIDQLARDDEKIKKKTRKPKPKKTVKQHQQEPQDNSRELPASEPKAPPGWPLQPPMYLPVTPAPPPPPPAFSELEAIRAVLEESEKVQEKLDKQHAGMRDELIKKSKDLRDKEFKLPYQNPTPCTEERSNCRQCYVSNAQDPLKCAEAVKRFEACVRLARQRGNTKVAQ

SEQ ID NO: 15988 - protein, 443 aa, Oryza sativa
  Clone ID: TF_OSC409221j.C1.p5.fg
MAEELPFPANIEVMRHTPRFKLMQAAFHGDLRGLKRQAKILDMGRGRLRKAVEDVRVEGVPGEEGTGVLHMAASHGHMEMCKYLVETLQVDVDDADDKENFKIDSLVSCFFNKRFWPNAQTHKGGLARQSTPGRTSLLKAVHSGHRGIAKYLLNHDANPDLAMCCGLTPLHSAAGLGDCESVKLLLAKGAYVDPMSTFGTPLHLAAKEGQDGTMKILLDNNADCNKMVNGITPLLLAMKAASAKCMELLVEAGADATYSDVIWNYMSTTFMDDEDSGSSVFSDSEPEEIDANHHIPVNDKPVNRRKIAEFKSLGLEAVEKKDYLSAAGFYSEAMDLDPDDATLLSNRSLCWLYLGEGGKALVDAHKCRKMRPDWPKACYRQGAALMLLKMVFNVSLIFFWQDYVSACEALFDGFKLDPEDVEIENALREALEFLKVSQSTSAN

SEQ ID NO: 15989 - protein, 109 aa, Oryza sativa
  Clone ID: TF_OSC421294j.C1.p1.fg
MATLLDDGRGRIGEAVQAARVRGAPMGGMGALHLAAGKGRLEVCRYLVEELRLDVDDADQEGRTALIIATLCKHLSTVKYLLDHGADVNKASHDGRTPLHYATHLGAPL

SEQ ID NO: 15990 - protein, 446 aa, Oryza sativa
  Clone ID: TF_OSC401721j.C1.p26.fg
MGHGLSCSRDTDEYDLFRAAQLGDIHALSALLAADPALARRATVYDRFTALHIAAANGRLQVLSMLLDRDGDVDVLSRKKQTPLMVAAMRGNTECVVRLLRGGANVLTFDSPRARTCLHHAAYYGHAECLQAILGAAAQAQGPVAASWGFARFVNVRDERGATPLHLAARHARASCVRLLLDKGAIVSAPTAVYGFPGSTALHLAARAGSMECIRELLAWGADRLQRDSAGRIAYAVAMRRGHRACAALLNPAAAEPIVWPSPLKFIGELEADAKALLEAALMEANREREKRILHGSDINIKGGDEEEESEDEEEACNICFEQACSMEVKECGHQMCAACTLAICCHSKPNPKTLLLHPPACPFCRTTISRLVVATTNSNKTNSRRRSRSRSSSFKGGLSSAMGSFSRIGRGSGRLVVDGSSVGELADKPDHDFSSVAAAAAICDT

SEQ ID NO: 15991 - protein, 349 aa, Oryza sativa
  Clone ID: TF_OSC18816j.C1.p2.fg
MTSFQHYKCQKLICTDFVAISTDVICNWGKKRSPNTVPTPEGRRPHDDVEQWREAAHTAAAAAAATANEAVPSSATTEQQEARPDDERAPKDHTGCECKPKVVMLPELLRAASHGDLQRLRVLLGVLHDDESPAPTTTTTTTSQDDDAVVLEVYRSAPLLPPPSTTAGEGEDEGTLSLLEGTTFQGDSALHVVASSGDDGDFLKSARLIYGKARHLLEATNNNGDTPLHCAARAGNVKMVTHLLELAGGDGAGDQRKKLILRKKNHQHETVLHEAVRLGNKDLIDKLMTEDPELARHPSNGATSPLYLAVILPNPQVAMQLHGYDKMLSYSGPDGQNVLHAAVLRQRGT

SEQ ID NO: 15992 - protein, 716 aa, Oryza sativa
  Clone ID: TF_OSC900348j.C1.p4.gm
MVDTKARVQCTWKVKDTSGQTGDIRAVRPAAAARQQQEYIKFEMKPGEALDDYLGRYNKILSDLRSVDSSYDVNYTQYEVSRHFLNGLDMMEDKGDEKTNDNKPNSIVKGGKKIRETLKKAFDQVYAPFGPLSDVDDESGDEDKGKNISVDPTVGPATGQTGSSASVRPAPGQTSSYVAYYGFDFCLCVDFGGEEGEHVDHGFRLFAAHDWYIVTGSGEDGRIFEDESDDDDDGEVGSAVRVQNVKQLQKSLLLCTFNDDIRRNKLLVEGLEFDETFGPVARIEAIRLLLTFAQGFEAIRPAQTASNRQDTNGQTGGIAAVRPAATVPTPEGRRPHDDVEQWREAAHTAAAAAAATANEAVPSSATTEQQEARPDDERAPKDHTGCECKPKVVMLPELLRAASHGDLQRLRVLLGVLHDDESPAPTTTTTTTSQDDDAVVLEVYRSAPLLPPPSTTAGEGEDEGTLSLLEGTTFQGDSALHVVASSGDDGDFLKSARLIYGKARHLLEATNNNGDTPLHCAARAGNVKMVTHLLELAGGDGAGDQRKKLILRKKNHQHETVLHEAVRLGNKDLIDKLMTEDPELARHPSNGATSPLYLAVILPNPQVAMQLHGYDKMLSYSGPDGQNVLHAAVLRQRGVAVAGNGAPSPPPDLAGGEVVDLGDGRAVVRWRRLRRPRPPLRQIRPERRQRTSAEAAQRLAADLGGGGWRRPCPPLR

SEQ ID NO: 15993 - protein, 439 aa, Oryza sativa
  Clone ID: TF_OSC9745j.C1.p1.fg
MAAASAATVEFGPQILWLDKELLQVLAAGNKVLLEELLRGEGGTHPPRTNGQVAISFHGTSEPAARRGTSRLLGVTSNGSTALHVVASHGHAELAALICERAPSLAATRNRSLGTPLHCASKAGHRDVAACLLRVMDQATPRSRNLTGATALHEAVRHGHVEVVDLLMTTDPWLASVTTNGGVSPLYMAFRSLNSVNFNCKPEIAQEILNWPEGPSLLTRADSSGRTPLHFAVIYGRLDTVKLFLGGDAASPRLTSISDSDGSYPVHAAAMFGRTKIIDELVKKCPNYYELVDDKGRNLLHIAVESEQEMVVRHICGNDMFAMLLNATDYDGNTPLHLAVKQGYPRIFGLLLGTRGVDMCIMNKDGHTARDISCCASTLEHGRLRYFLLFVGSRNQATRWELGAPVDTATAPTISPSTLDLVTGRRPTAVVRSLRRRGG

SEQ ID NO: 15994 - protein, 402 aa, Oryza sativa
  unsure (1)..(402): unsure at all Xaa locations
  Clone ID: TF_OSC900351j.C1.p6.np
DEPNPLRXPFYLGIIIPWCRTRPEFKCXLCFSDRCSPVDIEMARGLDGQGEAAVVAAVEGSGFGHRALHMAASGGSVDVLRYLVEDLCLGVNQSCFSSGQTPLFLSSIHGRAAATRYLLDHGSNPAIDKIVLPLHGAAVKGHCEIVELFLSKGVDVDLYSIAGTPLLAAAISGQHSTMKILLEHHADPNRVFNLDGTPLIMSIVSGSLECVKLLIKVGADMNFRDSNGVTCVMVAANHGSSVIMKCLLDAGANPNIPDEQFNTTPIEVAANHGRRDIVEMLFPLTSPISTLSDWSIDGIISHVENFGLKPRVFVPLSAHLQLISLFIIIISFPYYPTLLGSGKYGREARHLEGARAERAAMAARASELEVREKALASRAAQXHRSSXPARHAGRTRRSGTPD

SEQ ID NO: 15995 - protein, 974 aa, Oryza sativa
  Clone ID: TF_OSC400431j.C1.p4.np
MPIKRLEIEKVKAQDAVLAFKNDGIGLLHAAACQGQLNVCKFLVEELGGDVNIAGAQGLTPFMAAAESDDVPTVKYFLDHGGDVTKADVRGCTVLHHAAGTGCCKVTEFLLSKGIPVDIDCGLGTPLLHAANDDKDKTLKILLDHKADAGADVNGKGALVSPLMFAASQGCYTNFIKFLLKAGANPNIPDDLGWLPVEHAALRDCREDVERLFPLTSPIPNVPEWSVNGIISHAKVKDIRPMTIDHGPTTVLYTNRSICRLLMGDGEDAQSDGNRSRMMRPNWEKACYRWSAGHMLLKEYKQLWDALMDAQKLDPGSVEIEKEQREYDIQESKDVVESKVGLYDKPTASYGVKPPNVSSVMGKTQIDTCKDVVFLKEEVEKRMRLDVSGSFFVYQMSTLEAGIPLSSYAGKTWNGNIDMDGLIVVHGRVRIKKKPWKGLNSSKMNSDCTKLTSMIREMFVKKNVHPPYLKHLLGKLEALAVDVFTVRQQLAFDYHISLIPSLNRVNLVYQIKRCYDGWDDREKMYFRFVADNCTVPEDWCNTLMSKHLFRLVILEGQKRNIIYGSNGMSAFHLVRNYNTHAPEHSWIHVFVDSKIEHYQWFQCDSGIELMVPKYLGDFLAEAVFKFIEDEFDLTHVKPNITKCNSGIPTLLRHNFHEGSECNSHDKLSSPFDGGIPTLLRHNFHEGSECNSHDKLSSPFDGMGQKVMPSETFDRSVVYVAIIYGEALDRLASSSAMCSNGDFSVCSQVTRINEFMDRPTCISKCGKSDHDVKTHGLSLILHINAVLALNKHGIGVLHAAAVLALNKHGIGVLHAAACQGHLNVCKFLVEELGGDVNIAGKEDITPFMAAAESGDVPTVEYFLDHSGDVTKADVRGCTVLHHAAGTDLWPISFIAGCCKSNVIVNNGAGSPLMSSLIYRSLKCMKLLIKAGADVNGKGTVVTPLMLAASQGGYTNFIQFLLKAGANPNIPDDVCF

SEQ ID NO: 15996 - protein, 613 aa, Oryza sativa
  Clone ID: TF_OSC28294j.C1.p1.gm
MAMLALPPAGHTRHTGCNARQDPVSMDRRLLRAARGGHREWLEAVLLGAAPAPNHVTVHVAAAGEPQPPTAAALLLDVATTPQGDSALHVVAASGDSEAFLSCARTIYRSAMALLDRANARGDTPLHCAARAGNAAMVRCLLDMAMEEDEERGGARFRVADVLEKQNGRRETALHDAVRLGDERLVGHLMAVHPRLARLPGGDGMSPLYQAISLGHDRIAELLHQQGGDELSYSGPAGQTALHAAVLRGAEMTEKIMQWNAGLSGEADASGSTALHFAASADGPKIDIENSSLLRWLLLPCPFQCRRTPTELLLETDPSLACQPDGDGDYPIHVAASAGNLRLVALLLDKCPECAGLRDARGRTFLHVAVDRRRQEVVGFASDVDGRANALSGGNIRRDHFLQRHVPKLDESAESKKMTESAQVLGVGSVLVATVAFAVAFSPPGGYVAAGAPALAGRYAFDAFMYAVALAFTCSMLATLSLMYAGTAAVEMNVRHRYFKNSVWWMRLSMRSLLVAFALGVYLVLAPVSRATAAGVCALAAGTMLFRNRELVLMVSCAHVVRRRMGIRVVLRIGAPIGIDLLISNIVYLIIFGAPFCTPLCVLILFWRVAPTE

SEQ ID NO: 15997 - protein, 203 aa, Oryza sativa
  Clone ID: TF_OSC400151j.C1.p24.fg
MAAPFVYCRPTDDGTSESALLRAAFDGNLGRLKGILKSLGIEKGKTQYAVLALNKHGIGMLHAVACQGHLNVCKFLVEELGGDVNIAGKEDITPFMAAAESGDVPTVQYFLDHGGDVTKADVRGCTVLHHAAGTGCCKVTEFLLSKGIPVDIDCGLGTPLFHAANNGKDKTLKILLDHKADWRSQDKIIVGAPQTFGPSNNLR

SEQ ID NO: 15998 - protein, 1659 aa, Oryza sativa
  Clone ID: TF_OSC418872j.C1.p2.fg
TVGCHSVSALRKNFPILSLLSSSPSSPSFLHSDSGGSSSDGSDDDDDDFFGRPSRRSSAAGAGAGAAAPSLQPAGCASFDLASHPDLKLARRIGSGPPGPAGQEVWSGTLSRGGGGGGAKRCKHPVAVKRVPVTAGDVLEGVQEEVERLRRAATWCRNVTTFHGAVRVGGHLCFVMDRYAGSVQTEMRQNGGRLTLEQILRYGADIARGVAELHAAGIVCMSIKPSNILLDTNGHAVVSDYGLSAILKNLTSRRVSDDSNMVGLDATLLSPNYTAPEAWVPLKKSMNLFWDSANGILPESDAWSFGCTLVEMCTGAVPWAGLSAEEICKSVVKERKPPPQYSRVVGVGLPGELWKMIGDCLQFKPSRRPSFQDMLKTFLRHLLDIPRSPPASPENDFTNASMPNGTDVPPASVLDMVQDNPNALHHLVCEGDAAGVRNLLAEAASDGNGRLIRSLLEAQNADGYTALHLACRRGSAEIVEAIVAYQENVDLLDKNENPPIIFAMAAGSPQCVRALVRRSSDVNSRLREGLGPTLAHVCAHHGQPECMRELLMAGADPNAIDGEGESILHIAVAKRYTDCAIVLLENGGCRSMGIPNSVNKTPLHLCIKTWNADVVKRWVEVASEEEIAEAIDVPSPVGTALCMAAALKKEHEKEGRELVRVLLSAGADPTAQDDPHCRTALHTAAMINDAELVKIILEAGVDVNIRNAQNTTPLLVALNRGANSCVGLLLAAGANCNLQDDDGDNAFHIAADAAKMIRENLSWIVQMLQQPSPAVDVRNHRQVYDVSGVKLNLLQYNVMQSKRGWTLRDFLERLPREWISEELMETLEEKGVHLTPTIYEFADWVKFRRTVTEPAFGWQAHARFRSVLIMIVLKVYTDVLDVVKNDGILVVPKKENDARCKCCSSAYCKKANFKNLIIGATVLIFMSMLMRIPSINILTEDLWRMSHGSNNKFTHLSRFGWRGQSRDSIGTVLCVDDDGILRVGFPGASRGWRADPAEIVRVEEYKVGNWVRIRPSLTVAVHGMESITPGSVGIVYSIRPDSSLLLGLCYLSSPWLCEPEEVEHVDPFKCEAHVSSNFQIGDQVCVKRSVAEPRYAWGGETHHSVGKIIDIESDGLLIIDIPNRAVHWQADPSDMEKIEKFKVGDWVRVKAAVPSPKYGWEDVTRSSIGVVHSLEEDGDMGVAFCFRSKPFSCSVADVEKAQPFEVGEKIHVLPSISQPRLGWSNETAATIGAISRIDMDGTLNVKVSGRNSLWKVAPGDAERLSAFEVGDWVRLKSSIGSRPTYDWSVGKISIAVVHSIQDSGYLELAGCFRKGKWLTHNTEIDKVEPLKIGHHVRFRAGITEPRWGWRDAKPDSRGIIAGVHADGEVRVAFFGVPGLWKGDPADLEIEQVYEVGEWVRLRNNADDWKSLKPGSIGVVHGIGYEDDVWDGTIHVAFCGEQERWIGPSSQLEGVSKFVVGQRVRVKLCIHQPRFGWSNHNHSSIGTISSIDADGKLRIHTPAGARAWLIDPAEVEKVEEEEEVCVGDWVKVKDCVATPTYQWGDVNHNSIGVIHRAEDGELWVAFCFCERQWLCKRWEVEKVRPFRLGDRVRIRPGLVTPRWGWGEETYESKGEVVGVDANGKLRIKFRWRDGLWIGDPADIVLDDIPSLTEASNGFCS

SEQ ID NO: 15999 - protein, 359 aa, Oryza sativa
  Clone ID: TF_OSC401048j.C1.p4.gm
MTLTTAAPLEARQSAVGSGDRLHDIQIHGAGEGRARWPRWSVSAAGRHGARWSEELRIKGRRSIPESSRGGWGRGRLRSRRWTSSSVLADGAEVGTGRGGSGGGEEAPAPAAGMQWQSTRGRSTGSGGGEEEESEAPAAAVHAGRISSEDAAARRQNIRGGGGASEEEKRSLRDGWTPLHLAIQSRNRDITMILLVNGADETRRNKELSLAVTDVLTCAYAVLLSSLRRSWSRGICYQISKSRVGGADTRSPSVGDIAPGPLWTGTTVVVHHRSTGTGAQLGTSRPDDGERRHGKEREEEKRRASPTTTATSTGRTTTMAARGVQAPERPREEDQRGLRGHGGNHCRPEAVDMEGSPAN

SEQ ID NO: 16000 - protein, 611 aa, Oryza sativa
  Clone ID: TF_OSC900035j.C1.p5.fg
MERAQPDQPVAAAAPGHVVLCFGASTAVAERQPEEGPAADSPVADAATGGAAAEPYARHDVDPPAAFAHVHALDHPAASIDAALPPRMPKHLYLAVFNGEKANVIEMLQLPNNGAPHGEEEEGQATDGASHSQPQTIDGAHHAEDQTVYDFPIAQVAINEEVGGAQNIHRDPHENKEGAQGQGHFVRNRVAIARREQYESRIDAVTAEGNTVLHIAASRGHAHAPGPDGTSQQEDLITVLYKARWHLLSSLNSEGETPLHRAARAGHVHAVQRIIAGVKENLEKLAENQLMDIIATRNCAGENALHLAAMHGDAQVVTTLLKYARDARLSSVLTEANNASALYLAVMSTSVATVKALLAHECNDTSAQGPKGQNALHAAAVLQNREMVNILLEKKPELASGVDDMKSTPLHFASSDGAYSIVHAILYPKSKSLFGDPAGQSLVAMQDSEGSTALHIAALMGHVNVVRLLIKASPDSADIRDKQGRTFLHIACADEGWQRPTVRYVVKNPMLHDLLNSQDKEGNTPLHLAANHGKFVDVYALISSGKVHPDIMNAEGETAFDIAKNTVSFFFMLHDPYTPATYNDQLGFSVEVRLMEGGVESSLHYTGQGHL

SEQ ID NO: 16001 - protein, 1066 aa, Oryza sativa
  Clone ID: TF_OSC401685j.C1.p224.np
MVSPTLFLPVHWCRLPAATRRVEFNTRSGTFPHMPRRRHPLGADEDRAWRGHHDAYADGQAIVRWEAQRKRDGLRLLHQAHGLLLAMALLAVALLAAALHADAAPASAAPGSSFPDAYGDRARAAQLPPRKQQPQVAYALRRASATSSAHLHGATSRSFTGVATEDLVARHGGVLVARHGGVGEAGLREENGDRSSVEASGGGHWPTIVKLASSIGTVVPVALSIVPYFYQVYTGNFERTIEVYGAPAMLAGSINSIIWLTYSIMASKKDLNLALILMHALLCMSTFTYLMCICACKRATKEGSVPKRSQKVATGFDLILSCITNLVTFIITFHDHPEHTTSLITSGVGFVLNVVEIVLLVIVTIMVRGLLPDFAMLFVEVIQRTMMRIERDHYIQILLQASGIAGQEPDASPSIRGRKRGGSVPLLVYYRCAAVLDVDTARAQAGETPLLLVATFGHTARRGGRPTYLLERAAGPSTPDPDVRRRHHNAAAASCLALQAPSKQAMSPMAMPAANLPGAPRRVVSESAARRRAGLGMGCRTRENGLHNCIVVYSFVSGENVTNGSSSSEMNVLCPSSSAATPPPPAPAAGAPGVGVAVGGEAREEERRRQCYYYRCAGALLRAAVLGDLHHLARMAAEVDAAMAAEVDAAAPGGGEGAGGVRSRCGRGALHLAAANGRTHVCRFLLEGLGLPVDALSASGAPPSRPAAAARSSHVSSMLAERLISCFVFDAAAHAGETPLLLAATFGHTSTAAYLLDRGADPSTPDPNGGDTPLHWAAYNGDRELAKLLLLRGADVGAANPRGTALHVAAARGHAAVVSVLLNHGADVRGRAQQDCQYRLHTVGFFTFGGIIGMHEVAHSACSRTGSIGFIKCLVESGADPNIPDELDRLPIEIAAIHAEREVIEVLLPLTHQVPTLLDWSVGGIIRYVKYPAYKEWARNASCKRKDELKLQGNSSFNNEDYDAAILLYSMVTTFAHSRFFMLMFGCKCFFSSKGAKYCFAMKFDNTDAKLYSNRSACWLNLGIGDEALSDAQICSKMQPDWAKGYYRQGMAFSLLQVTIMYHPCS

SEQ ID NO: 16002 - protein, 201 aa, Oryza sativa
  Clone ID: TF_OSC12692j.C1.p1.hg
VDSRGSPGGPTCHVTEARLTRVSGEWSGEEELKKPFVLERAAIRSNLSPLCLAHQIEQEKSRGRCGFLCWSVARIDGGGGRRRGDGGGDEGASDAAAAAGVVEEFVLCCKFARQTEPSKVLAGQSRVDVDAARKKKQARAKNGDTPEPDAAGGARARASRRAKRGPGSYRGVRQRRWGKWVSEIREPNRGKRHWLGTFGSA

SEQ ID NO: 16003 - protein, 161 aa, Oryza sativa
  Clone ID: TF_OSC900276j.C1.p6.gm
MVGGEVMCEAAAPRYRGVRKRPWGRFAAEIRDPANGRATNFPLVSSLPLPSPHYHLPGKAAAAAPPVAGPACSASSTVESSSGPRGPRPAATAAAVPRRRVPRPAPPAPDAGCHSDCASSASVVDDADDASTVRSRVAAFDLNLPPPLDRDHVDLCTDLRL

SEQ ID NO: 16004 - protein, 1124 aa, Oryza sativa
  Clone ID: TF_OSC401273j.C1.p2.fg
MARYPAPTSSRAIGAPIQPTEPHAPLPNTGGEGAPPPARTMPPPSSQAATSTPPAAATPLQRPPAQATAQPSTQRYYVGVQRDKGTGKWAACVVDPSNPTKHRLVGAFPDEHAAALAHDRLDLAFRGGGHRGAGDNFRPAFHAVELEFLRLCAATSSPGSHCGLVAGGDKYDEKYSEFLRKIYHGVMDNSPSYKKFFDVILDFFIARAREIGREALEDGGDMLVERFVAMHKNKAVTPRWRAWYRSDSRKVLQIPLSLRGGGGEIDHSTQKEARMDSDSCKRRKHESGHDSSSRVQSQSSILSRNRILCHQLLEQCDDLKYGSSTNDYKAISMKRLELISILQKLQEVPIQLPYASPLKSSETNRLVQDGRNSSCRNIIDLDSDNDEDYTFANVDNIGANTTVVLVDSDDGDSVASFVDEKSSDSKQNANYIEESVLPEQHAQQQEISMLDNENISSEAQAVKKGKDSMDINDVIYNKSGHEEIGEEEAQAENVQIKGNLKKEIISVASDELACEVMRSQSPTNGNFDQYDNSSPVDELEGLWMDMYLAMACSKTVGSDHNIVPSENSCEQAEDECQHDFLMKDDLGIVCRVCGLIQQRIENIFEYQWKKRKQSYRARPSEHRNSSDADAIDKTSGAILEVVPDALCLHPQHSQHMKPHQVEGFNFLVKNLADENNPGGCILAHAPGSGKTFLIISFVHSFLAKYPAGRPLIILPKGILSTWRTEFLHWQVDDIPLYDFYSSKADKRSEQLKVLNLWEESRSILLLGYQQFACIVSDHTSDTEAIMCQEKLLKVPSLVILDEGHTPRNEETDLLTSLENIRTPRKVVLSGTLFQNHVREVFNILKLVRSKFLKMDKSRAIVNCILSKVDLMGKSARSKNISDKDFFDLVQEHLQKDGNDKMRAVIIQNLRELTADVLHYYQGKLLDELPGIVDFTVFFNMSMMPREGKVLVFSQYVRSLIFLEKLVSRMKGWKSEVHIFRVTGGSTQDQREQAVHRFNNSPDARVFFGSIKACGEGISLVGASRIVILDVHENPSVMRQAIGRAYRPGQSKMVYCYRLVAADSPEEDDHHTAFKKERVSKLWFEWNELCSSDDFELATVDVSDSEDRFLESSALKQDIKALLKR

SEQ ID NO: 16005 - protein, 1197 aa, Oryza sativa
  Clone ID: TF_OSC410066j.C1.p4.fg
MARYPAPTSSRAIGAPIQPTEPHAPLPNTGGEGAPPPARTMPPPSSQAATSTPPAAATPLQRPPAQATAQPSTQRYYVGVQRDKGTGKWAACVVDPSNPTKHRLVGAFPDEHAAALAHDRLDLAFRGGGHRGAGDNFRPAFHAVELEFLRLCAATSSPGSHCGLVAGGDKYDEKYSEFLRKIYHGVMDNSPSYKKFFDVILDFFIARAREIGREALEDGGDMLVERFVAMHKNKAVTPRWRAWYRSDSRKVLQIPLSLRGGGGEIDHSTQKEARMDSDSCKRRKHESGHDSSSRVQSQSSILSRNRILCHQLLEQCDDLKYGSSTNDYKAISMKRLELISILQKLQEVPIQLPYASPLKSSETNRLVQDGRNSSCRNIIDLDSDNDEDYTFANVDNIGANTTVVLVDSDDGDSVASFVDEKSSDSKQNANYIEESVLPEQHAQQQEISMLDNENISSEAQAVKKGKDSMDINDVIYNKSGHEEIGEEEAQAENVQIKGNLKKEIISVASDELACEVMRSQSPTNGNFDQYDNSSPVDELEGLWMDMYLAMACSKTVGSDHNIVPSENSCEQAEDECQHDFLMKDDLGIVCRVCGLIQQRIENIFEYQWKKRKQSYRARPSEHRNSSDADAIDKTSGAILEVVPDALCLHPQHSQHMKPHQVEGFNFLVKNLADENNPGGCILAHAPGSGKTFLIISFVHSFLAKYPAGRPLIILPKGILSTWRTEFLHWQVDDIPLYDFYSSKADKRSEQLKVLNLWEESRSILLLGYQQFACIVSDHTSDTEAIMCQEKLLKVPSLVILDEGHTPRNEETDLLTSLENIRTPRKVVLSGTLFQNHVREVFNILKLVRSKFLKMDKSRAIVNCILSKVDLMGKSARSKNISDKDFFDLVQEHLQKDGNDKMRAVIIQNLRELTADVLHYYQGKLLDELPGIVDFTVFLNMSSKQEHIIKGLDGINKFAKRSRCNAVSLHPCLKNANKADADDGNVTNRKIGSIISGIDINDGVKAKFVHNLLSLSEATGGKVLVFSQYVRSLIFLEKLVSRMKGWKSEVHIFRVTGGSTQDQREQAVHRFNNSPDARVFFGSIKACGEGISLVGASRIVILDVHENPSVMRQAIGRAYRPGQSKMVYCYRLVAADSPEEDDHHTAFKKERVSKLWFEWNELCSSDDFELATVDVSDSEDRFLESSALKQDIKALLKR

SEQ ID NO: 16006 - protein, 277 aa, Oryza sativa
  Clone ID: TF_OSC900257j.C1.p13.fg
MSELAYSPTQEVKVNSLFCNGITERSSRFSPSIWLAPDITEGYRKCQRQVFWYSFLKLHVTLEVFQQEGWKDSLPVDFPKPSDNENSVEVAHPNIKPFSVHPLPLTKNSDVLLESSNGSDSLKEEKNHYYPGKEIKRRKRHRRKQYVDQEPCIMRGVYFKNMKWQAAIKVDKKQIHLGTVGTQEEAARLYDRAAFMCGREPNFELSEEEKKELQNYTWKDFLDMTRDTITSKKQRKVGLIRRNKTDSLVGQSDGDTEMINGGGSSHSEDGDAETSAS

SEQ ID NO: 16007 - protein, 82 aa, Oryza sativa
  Clone ID: TF_OSC400795j.C1.p54.gm
MAMMRRGGLTSPDRARDPHRAVAGRCAGADVVPERKFRGVRKQPWRKYGAEIHISQQSVRMWLGVFDTTEEATRDKTGIKTA

SEQ ID NO: 16008 - protein, 227 aa, Oryza sativa
  Clone ID: TF_OSC400138j.C1.p12.fg
MAGDGTGDDDDVHARVKYKGVARTADGRWRGFITNKFGRRYGVGDHGTPEEAALAHDRAILAILGAHASPAALNFRAAFSDTELRFLRGPHAPSRRAAGVVAAVMRGAAFDAALERFAARAYDAHTDPELALDVAAFRLATRDAGTPLAQPDAERAAFVAAARNKVHDAAWLRSYLRRRRLVGATFEDENRWPPVVPPAVADVGDGFAGNELVYLPYGSCHVDEMMI

SEQ ID NO: 16009 - protein, 189 aa, Oryza sativa
  Clone ID: TF_OSC19001j.C1.p5.np
ALPGSRGERLWVGTFDTIEEDAHAHDAAMLALCGASASLNFSNSAWLLHIPRAPAPRRLRPLAARHAARRQRGRRRVPAPGKTATSGDAASTAPPPTPVLQTKQCDFISVSSLDCWMLMSKHISSSIAKGSLCLQKNPISFCMVTNSYPSLLLEYIILQMNSFVLCISRLQRTLSILTNTTNSIHTYSY

SEQ ID NO: 16010 - protein, 312 aa, Oryza sativa
  Clone ID: TF_OSC900259j.C1.p16.fg
MVAFRRIRISYSDPDATDSDSDSDSADAGDHDISSRSSRTNAAARRKVIVISLSRKKGRSLSQSGRHYRRRRSEIPAAAAKAVEAEDWPSSSDGMRRGAVAAARSASAAAKKGSRGGVYQRQPGRWAVDFRDSQLKVRQWLGTFPSEEEARAAYDAFEVQVRASLSRGGAGASSPAVAIAPSPARVKIQLPAPRRASGRRKKTQTTATVTTTTTTESLSQVTASSASPSSKEAPPPSSSASAATPPPLNPPPFVVDTFLGEDDHLAADEDDRFGFGLADLGHLPLPFLDDNDMDFKLSDSDDLSFLFDIGFM

SEQ ID NO: 16011 - protein, 110 aa, Oryza sativa
  Clone ID: TF_OSC1021j.C1.p1.fg
LEEYEKERSEMEGVSREEYLASLRRRSSGFSRGVSKYRGVARHHHNGRWEARIGRVLGNKYLYLGTFDILYNLSQNYRFKNLFYKNTDSVASFITKLQFCDRLYKLPVVL

SEQ ID NO: 16012 - protein, 180 aa, Oryza sativa
  Clone ID: TF_OSC400824j.C1.p4.fg
MSACHVNPPLPLFSSFLPSLSLTLLSQAGRRSRDAERRWRQAGTRAAAGGGGGPLAAGMVVVGALSRRRPYCAALAHAAPPRWGMVVRRATRRPIRRGPRSRSSQYCGVKFYRRTGRWESHIWTYDLAAIKFRGVEGWRPTSISAWRIMGDDLKQVRTSLTRSLWMSNLTKEEFVHVLRR

SEQ ID NO: 16013 - protein, 156 aa, Oryza sativa
  Clone ID: TF_OSC411132j.C1.p6.fg
MDVNGIITVLITYELLVRRVSHRPHYPDIAGTTFHPRVAGHAARCLLLRLRPPLTSAGRNGQPRCSSLQYPNGLVPPSHSDLVAPVLITAGLIDAMKGIGKEENGCCSSQGSEPGKKTQIWLRTFESPKMAAVANYVASLRLHGLEPRLNFLALII

SEQ ID NO: 16014 - protein, 242 aa, Oryza sativa
  Clone ID: TF_OSC1032j.C1.p1.hg
LISTNVPLFTDTQEEAAKAYDLAAIEYRGANAVTNFDISCYLDQPQLLAQLQQEPQLLAQLQQELQVVPALHEEPQDDDRSENAVQELSSSEANTSSDNNEPLAADDSAECMNEPLPIVDGIEESLWSPCLDYELDTMPGAYFSNSMNFSEWFNDEAFEGGMEYLFEGCSSITEGGNSMDNSGVTEYNLFEECNMLEKDISDFLDKDISDFLDKDISISDRERISPQANNISCPQKMISVCN

SEQ ID NO: 16015 - protein, 154 aa, Oryza sativa
  unsure (1)..(154): unsure at all Xaa locations
  Clone ID: TF_OSC1342j.C1.p1.gp
TFNTAEEAALAYNQAAYRLRGDAXRLNFPDNAXSRGPLHASVDAKLQTLCQNIAAAKNAKKSSVSASAAATSSAPTSNCSSPSSDDASSCLESADSSPSLSPSSAATTAETPATVPEMQQLDFSEAPWDEAAAFALTKYPSYEIDWDSLLAANX

SEQ ID NO: 16016 - protein, 113 aa, Oryza sativa
  unsure (1)..(113): unsure at all Xaa locations
  Clone ID: TF_OSC31818j.C1.p1.np
ACGSRVPVTACPRCPAPRVVCRHERPHRAREVGGAPRHRDDERVHHHSSSSTSTNKDAQSEIDXENKKLCVQRRTRRSSRWRGERRTLYRGIRRRPWGKWEAEIRDPVEVLQR

SEQ ID NO: 16017 - protein, 693 aa, Oryza sativa
  Clone ID: TF_OSC29687j.C1.p13.gm
MGECGFRWREEFLETLGEAQKKATRFGVADLFPLSRLLPVVRSPSGDGRRELTRELAGAAGGGSLWRGAVSTVAATQAPPVAASFCSASTRVSSNPPPLQLPPAASTSAPAPPPLQPCSRGRGRPSGRAPAPMPTACSASALAWGLGLGGFGFGSALSLFGSGGGIAGTREGSWTPERRGEEEKEEERVLGSWPVAFKVSAPSTSESESCSCSCRRTAGELHPRARTPASSSPGARTAGELHPRARTPARGRQASSTPARGRQASSSPGAQTAGELHPRARTAGGLLPRVWTAGELLPRASSPSPPPRFYYWKISDTSTTRETKTGSTLPREGPLGGESTDAGYRGSFHGTWEFASAGKLGLDRPCVNSLACRRSGGSSGPAASWSPRRITTVHSQSPTVQSQTESHRRTPHLLIGRRRRRRALSAPPRGQAVVASSLRGQAAAAVGTNRLLAQSPHRRRRSNQRRLCRAPSPPRAVTRHITAAGPSQRRRRGAPSPPRLPSPLACHIAAAGARRRRRRAKPTSPPSSLSDLPKKCERSTAAPLPPGKVDGRDDVRSPPLRRPSGLLERSPASAIDVRGAVGVRGPRAGAPRLQALARQFDGADTVTRAHDAAMPALRGRAACLNFSNSAWLLAYAALYAALLSGGGADHARRRCRSSPAAPPTRAVRCPGRREGKGKERGVRLTWGPYIFVT

SEQ ID NO: 16018 - protein, 379 aa, Oryza sativa
  Clone ID: TF_OSC400151j.C1.p86.gm
MVGPCGPLLLGEGPLGGESTDAGYRGSFHGTWEFASAGKLGLDRPRVLVTTADHYWFVERARSYAEGIKKCEWDGELEFHETEGEGHSQTESHRRTPHLLIGRRRRRRALSAPPRGQAVVASSLRGQAAAAVGTNRLLAQSPHRRRRSNQRRLCRAPSPPRAVTRHITAAGPSQRRRRGAPSPPRLPSPLACHIAAAGARRRRRRAKPTSPPSSLSDLPKKCERSTAAPLPPGKVDGRDDVRSPPLRRPSGLLERSPASAIDVRGAVGVRGPRAGAPRLQALARQFDGADTVTRAHDAAMPALRGRAACLNFSNSAWLLAYAALYAALLSGGGADHARRRCRSSPAAPPTRAVRCPGRREGKGKERGVRLTWGPYIFVT

SEQ ID NO: 16019 - protein, 142 aa, Oryza sativa
  Clone ID: TF_OSC401865j.C1.p18.fg
MAARAHDVAALAIKGRAAHLNFPDLAHELPRPATAAPKDVQAAAALAAAADFPASSANAGASNNPDGSDDASAGSASPPPPPDAADDALFDLPDLLLDLRYGPPSSGLSCASSWEDEVGLISGAGAAAAGVFRLEEPLLWEY

SEQ ID NO: 16020 - protein, 253 aa, Oryza sativa
  Clone ID: TF_OSC100569j.C1.p2.fg
MAACAYDVAARAMRGTRARTNFPVPAAAGFPGGGGGGCWPWVNIPPQGAAAAASHQQPLNTLLLHNLLMSSSPHGCLLLHHAGHGHGHAHSHSHSHSRAHNPSTRPPTSAPPPPPPAAASSATTAPATTTGAAATSAPGADDDAWGFLLRREPPEAGLLQDVLHGFYPTRRPHDDAGPAPKLERPYEATSSYRVSSPWGAVEDCDDGDGDGDDDYRGFPMMPQGLLEDVIQCPPYMEVLAAPSAAVGRVSRRG

SEQ ID NO: 16021 - protein, 156 aa, Oryza sativa
  Clone ID: TF_OSC401894j.C1.p11.fg
MAAVAYDVAARALRGPDAALNFPDLAASRTAPPASSSADDIRAAAAAAAASLQHDRAGGGIAPAASGSAHQQRGGSSAAARTTAGSGGAQQEGSSGAGAGSHQYFLDEEALFETPQFLRNMAAGMMMSPPRLSPSSSDDSPDPSEAGGSLWSYRDP

SEQ ID NO: 16022 - protein, 163 aa, Oryza sativa
  Clone ID: TF_OSC12713j.C1.p1.gm
AVDAALAYDKAAASILGPRAVLNFPAFSPPAAAIAAPEQCEPPFCSPATTAAATAPEQRQTPGCSPAAVAGSGGGAVFEERDVKPVVLPLPLPAILQDGGGTEAMAQHWDWEWDASWPELEMFECLDDIAMYLDVDAVMTTRDCKVEELDADIVDSPLWTLSD

SEQ ID NO: 16023 - protein, 241 aa, Oryza sativa
  Clone ID: TF_OSC900118j.C1.p25.fg
MGTNPSLHELAAGAAPRGRVVRILVRDADATDSSSSEDEAVAVAQPRPRRRGKVGGGGGGGGGVKRRVMEAGAGEARPTARFRGVRQRPWGRFAAEIRDPHLRRRLWLGTFDTAEEAAAAYDAASVRLRGSSAATNFASVRCYSLPPELPKPTISPPEAAVRPITLPIGTAKPTLLPRVKEEGESCGGRVKEEASSCEVQVLAPEPMWTMISGKRKKRSGCGTRVRAFHAVSACVEEVGGA

SEQ ID NO: 16024 - protein, 498 aa, Oryza sativa
  Clone ID: TF_OSC400325j.C1.p3.fg
MDMDTSHHYPWLNFSLAHHCEMEEEERGAAAELAAIAGAAPPPKLEDFLGGGCNGGSSGGACPPVQTTAPTAAELYESELKFLAAGFQLSGAAGAAPPVPALLPAAALEQTDETKQLALPPQAAVAPPPEQKKAVDSFGQRTSIYRGVTRHRWTGRYEAHLWDNSCRREGQSRKGRQGGYDKEEKAARAYDLAALKYWGPSTTTNFPVAEYEKELEEMKHMTRQEFVASLRRKSSGFSRGASIYRGVTSLASHVWPLARKSQVKNIYFDQDLIVACFLLSGTEEEAAEAYDIAAIKFRGLNAVTNFEIGRYNVESIISSNLPIGSMAGNRSTKAGLELAPSSSADAIAATEANHTGVAPPSTLAFTALPMKYDQADYLSYLALQHHQQGNLQGLGFGLYSSGVNLDFANANGNGAMSNCYTNVSLHEQQQQHQHQHQQEQQQDQQDDQSQSSNNSCGSIPFATPIAFSGSYESSMTAAGTFGYYPNVAAFQTPIFGME

SEQ ID NO: 16025 - protein, 330 aa, Oryza sativa
  Clone ID: TF_OSC401715j.C1.p5.gm
MATARGTAGGSGAARGARRGLAARGDETARGAAAAMGRARRRDVDGDGDSAVLARLSLVPHQFPPHDENVPREPSSRRLRVRLAGDAPFRTTMVPRVERGGGGFHLPNSEREDSLFIRALISVVSGDTTVPTLLPEPTMATVVAGAATDEEDEGECTTGAVASGGVTGGVGKRRPRRRSGGEGSRYRGVRRRPWGKWAAEIRDPRRAVCKWLGTFDTAEDAARAYDVAALEFRGQRAKLNFPASTAAQQPRPLLHHNLRENCGSNASSPVHAPEHARTAAAAKDQEIWDGLREIMMLDDGSFCVQRDGMAASLYATASSIPCGHVAVAAV

SEQ ID NO: 16026 - protein, 284 aa, Oryza sativa
  Clone ID: TF_OSC418226j.C1.p6.fg
MEADASHTPTTSSSVSVSFSSSSLSTSSSTSSLVDNGAQDRPKSSKPKHAAKKRKRAAAEEPANAAHGAGEDTSSCSTDDNAAASGKAQAGGGGGGVDSSSTCTAASAPRSGFKHPSYRGVRRRSWGKWVSEIREPRKKSRIWLGTFPTAEMAARAHDVAALAIKGRNAHLNFPDSAHELPRPESTSPADIQAAAAKAAAEVRCEEESSPSSSPTAEQPEEEAACPDTVHADGGQDNALFDLPDLLLDLRDGLWWSPVWPAALAAEEYDGGDAVVLNEPLLWAE

SEQ ID NO: 16027 - protein, 444 aa, Oryza sativa
  Clone ID: TF_OSC400851j.C1.p68.fg
MAPSKQQQMLLKKVMAKKPKTKRLSGFGLKPSAAFSRPHVPSAAASLQPSRRVRVVFEDPDATDSDSDDDEDAGAASKKRYFELFIGKPASSTKQASPASTVAAYANIGKVGSTCYRGVRLRKWGKWAAEIRNPFTGHREWLGTFDTADAASAAYQSASRNFAEEKRRRGVASSASPASSATPTPTASSSSSTSAAPFAHPSPSSVLEATKPAPKPESPPLPEQAATPLLVEATNETAELPDDPEFYKDILRGLQLPDIDPMDFRAGLDALDISDVPAYMNGEQDVLFTEDMLLGDFAEEDDLDLDDIGDDFCEDFPEIPSGYDFGRGDMFRQDSHASAHLGRGTAQLEATLRRWSEIRIYTNPARVLTGSMLRVADQEYTTATIPLAIAAYGEDKTSKSQTCPYTTTAGDKSVLLREDPKLPRLTDQLPVDMVSSAPDFSTFS

SEQ ID NO: 16028 - protein, 224 aa, Oryza sativa
  Clone ID: TF_OSC900408j.C1.p14.fg
MDVSAALSSDYSSGTPSPVAADADDGSSAYMTVSSAPPKRRAGRTKFKETRHPVFKGVRRRNPGRWVCEVREPHGKQRIWLGTFETAEMAARAHDVAALALRGRAACLNFADSPRRLRVPPIGASHDDIRRAAAEAAEAFRPPPDESNAATEVAAAASGATNSNAEQFASHPYYEVMDDGLDLGMQGYLDMAQGMLIDPPPMAGDPAVGSGEDDNDGEVQLWSY

SEQ ID NO: 16029 - protein, 184 aa, Oryza sativa
  Clone ID: TF_OSC900408j.C1.p23.gp
MDVSAALSSDYSSGTPSPVAADADDGSSAYMTVSSAPPKRRAGRTKFKETRHPVFKGVRRRNPGRWVCEVREPHGKQRIWLGTFETAEMAARAHDVAALALRGRAACLNFADSPRRLRVPPIGASHDDIRRAAAEAAEAFRPPPDESNAATEVAAAASGATNSNAEQFASHPYYEVMDDGLDLG

SEQ ID NO: 16030 - protein, 199 aa, Oryza sativa
  Clone ID: TF_OSC102044j.C1.p3.fg
MRRGGAAEEDAEAARFRGVRKRPWGRYAAEIRDPAKKARVWLGTYDSAEDAARAYDAAARALRGAKAKTNFPLSLPHAQPQLHHHHHHHLTYPAAAVVAARPATSSLSSTVESFGTRPRPVLPPRPPPPPPIPDGDCRSDCGSSASVVDDDCADAAASPSCRLPFQFDLNLPPGGGGGGGGGFGCAYDDEELRLTALRL

SEQ ID NO: 16031 - protein, 255 aa, Oryza sativa
  Clone ID: TF_OSC400075j.C1.p16.fg
MCGGALIPNDYGDKPPPPPSESSEWDATTKMKKKKKRGGGGDDDWEAAFREFIAGDDDDDDGGVSMFPSGAGTMETTTEVAPAAAVVERPRRRRRVRRSYPYRGVRQRPWGRWASEIRDPVKGARVWLGTFDTAVEAARAYDAEARRIHGHKARTNFPPDEPPLPAPSQAPFCFLLDDDDDDDGVARGNSPASSSAPDRASACTTSSTVASGERGDELILLECCSDDVMDSLLAGFDVSSEPRRFWEWLISSAHA

SEQ ID NO: 16032 - protein, 222 aa, Oryza sativa
  unsure (1)..(222): unsure at all Xaa locations
  Clone ID: TF_OSC400766j.C1.p23.gp
MAPRNAAEAVAVAVAEGGGAGMEPRFRGVRKRPWGRYAAEIRDPARKARVWLGTFDTAEAAARAYDSAALHFRGPKAKTNFPXPSRTPTTTPRRRRCPRRRRWPSSXTSSTVESSSRDTPAAAPVAAAAKAQVPASPSLDLSLGMSAMVAAQPFLFLDPRVAVTVAVAAPVPRRPAVVSVKKEVARLDEQSDTGSSSSVVDASPAVGVGLDLNLPPPIEEAX

SEQ ID NO: 16033 - protein, 236 aa, Oryza sativa
  Clone ID: TF_OSC416364j.C1.p3.fg
MAPRTSDKTMSPAAAATGLALGVGGVAGAAAVGTGQHFRGVRKRPWGRYAAEIRDPAKKSRVWLGTFDTAEEAARAYDAAAREYRGAKAKTNFPYPNGAPAAGVNSGSSNSSTVESFGSDVQAPMKAMPIPPSLELDLFHRAAAAAAAGAGGMRFPFEGYPVSHPYYFFGQAAAAAAASGCRMLKIAPAPVTVAALAQSDSDSSSIVDLAPSPPAALAKKAIAFDLDLNCPPPMEV

SEQ ID NO: 16034 - protein, 250 aa, Oryza sativa
  Clone ID: TF_OSC900129j.C1.p28.fg
MCGGALIPNDYGDKPPPPPSESSEWDATTKMKKKKKRGGGGDDDWEAAFREFIAGDDDDDDGGVSMFPSGAGTMETTTEVAPAAAVVERPRRRRRVRRSYPYRGVRQRPWGRWASEIRDPVKGARVWLGTFDTAVEAARAYDAEARRIHGHKARTNFPPDEPPLPAPSQAPFCFLLDDDDDDDGVARGNSPASSSAPDRASACTTSSTVASGERGDELILLECCSDDVMDSLLAGFDVSSEPRSVLGMVN

SEQ ID NO: 16035 - protein, 466 aa, Oryza sativa
  Clone ID: TF_OSC400220j.C1.p29.fg
MDAPSGESGGGGGGGGGRRWKGKGVTPIQPRRQLGTVLEDSSAALLRPLKKIGRSPDRLLRSASSLSTSSSAPPSPRSSSASDAPVRVISSSPSSPSPPSARHIFPFAYEASTTTVGGSPRLHPLSWQQSSMSQPASPQQQQQQPLQHQQMISFGASPPCSTTQFVVPENAQQQQMLLRYWSEALNLSPRGGPGGVPPWLYQQLLRVPPPPQKLYRGVRQRHWGKWVAEIRLPRNRTRLWLGTFDTAEDAAMAYDREAFKLRGENARLNFPDRFLGKGRAGGKGRTSVSSSAAAAASCSSSSLSPPETPDDANTQQQAPQQREQRDTAGVSMEKKQPQPPAPTSRQEGCSGGDAAAPYPAEMLHAPAACGGMWVAPDESWFSTWGPGSSFWDDYDMDSARGLFLHPRFTGDETSMDHSGTQATVPAVAATAAGMSMPCDDVPVTSSSSDLPPQGTPQTPTFMWKED

SEQ ID NO: 16036 - protein, 191 aa, Oryza sativa
  Clone ID: TF_OSC20641j.C1.p1.hg
DTAEAAAAAYDDACLRLRGPGAALNLPSRRCVAPAPPPPPPPPPPTAEEKKLLLFPPPLPPRKKAMLFPLPLPPRKKPLLYPPPLPPKKKPLPPPSPPPQPPLPEKENTPLPPLLLPPKKKPLPPPSPTAAAKEEPIELEHAAPPPPFVPRPVWPLLASGGGGKRKKQSGCGGRIPALNTAAAAVEETGRA

SEQ ID NO: 16037 - protein, 1473 aa, Oryza sativa
  Clone ID: TF_OSC407093j.C1.p8.fg
MDPEERVAEAMKGLLVEYSQQSARLAVQVRGNEYRRAAAAGGGGGFLLSPGERERLRAGSGLELVIVPVMEGDQVVSSSASAEVLVSPLVEGEVRVVPAVERRRWRRQAAAEEWEEIDPETKYRGVRVRFGTRYVAEIHNPTGAGRLWLGTFDTAEQGAWAYDAAARVLRGEAAATNFGDPAQTPSPLSAEMRSMLAFFDRARARRERVVEERGAAAAEAEASEAPAPAPLLLLPAPPPSSDVSPVTVQVAAPPSSSDAAPVPATLLSDASPVIVQVPVPPSSDAAPVPAPTLSDASPVPVQVPAPPSSDVALVPVPVQVPAPTSSGSDEAAFVGGRGRGAGAGVGGGRGLGRGGGGGRGRGGKRAPTTAVTVVAPPPPVPTPAAGAAAPTLAPASAAAHAPALSVEPDALVSPASIAPAYAAPAPAPAPAALEALAPPPPAAPASLSASGGERGCVAIANAAVAGRGRGRGSGAKRAPTAVTVGAPPPQARTPAAAPAKAFVSAPAPAPSSVISPVLAASASAAAAFAPAPAPAAAEVIPPPPLPAAASTAAAPAAERKRKLLTASSLSSSGGERGRGRARGRGRVADAAIAGGSRGRGRGCGLTPAVVTVGAPPPPSAAPAPAPASAPSLEPNDIIAPVVSSTLAPGASAAAAAAPAVAPPAAALEAILIPMPPPAAAAAAAAPVPKKRKVRTASTLSGSGGPGRGRGRVAEATFVGRGRGVWSVRGRGRGRIPTEVTVGTPSPSAPTPAPASATAPLIQSNVVISPVPPTLAASGVAAWPPVPAIPELTTAAAAPLPEKPVLTAHDVVMATLFPNGVFSYTAGSSHAPPPPVASGSFFQEVIPPGGVPTNYAIHEAPDFDPNVFFADVPDGEQDELVLLSLTSTLLDIDNSLTLVADDAASSAQAAVDVASSSAQAAIDVPSSSVLAVVDIPSSSAQAAIDVPASLAQAATDVASSSTQGAFVGGRGSGRGASVGVGGGRGLLRGVGTGHGRGGGGGRGRGGKCAPTAVTVVAPPLPVPTPAVHAPAPPVEPNAVISPPSSALAPAYAVPAPAPSLAALEALAPPPATPATLSASSREHGLGRGRGCVAIANAAGRGHGRGSETKCAPTVVIVGAPPPPAPIPAATPAKALVSAPAPAPISTVSSTLAASASAAAAFAPAPVAAEAIPPPPPPLPAAATAVAAPAPDRKRKLQTASTLFASGGERGRGRARGRGRVADAAVAGGNRGRGRGCGLTSAVVTAGAPLPPSAAPVPVPASAPTMEPNATISPGSSTLAPGASAAAPAVAPPTAVPEAILVPMPPPAVAAAAAAPVPKKRKLQTASTLSKSGGPERGRGRVAEATFASRGRGVWNGRGRGRGRIPTAVTVGTPSPSAPTPATEPALVPASASALATAPLMQPNVVISPVPSTLAASGAAAPPPVPAKLELATAAATTLPEKPVLTAHEVVMATLFPNGVFSYIAIACATATAGG

SEQ ID NO: 16038 - protein, 496 aa, Oryza sativa
  Clone ID: TF_OSC900368j.C1.p22.gm
MSFQDLLRDMEAGVLQPAAPPAQEVAHGVFQLNTKVEALRYMAGALGTPRDTPSLRGRLRGTRAGIKRLATSTSQALRQAAAAADDDESVSSCSKLAMDFEAAVNEYQKIERRIAAVERQETAAAARRSPPPPTPGFNHINNNGDHTFPEQKQTQLAVLRDINLLDSEIELHEAIIAEREQGILEVQQEIADIHEIFRDLAVLVHDQGECIEIVTANIEMTEAATSQAEVQISKAAGIRGEKEELLTGAGTEDNSPSKCLLLAVLGLFLFIVGRRKLYSSGCPSKRGITDNQTKNTAAPAPEKKYKGVRLRQWGKWVAEIRLPNSRERVWLGSYDTPEKAARAFDAAFVFLRGAGAADAAGLNFPDSPLPVVARTRDLREVYAFAVSHANRPPPVAGETAATALAAMAALEHNEVRENIAPSSPLSAVQVAAPPAGSFDWSQLMANSPPLYSPIVIGSHAYDDLAVWPTTQPVEEFSEEDNENEGATSDELWSFDV

SEQ ID NO: 16039 - protein, 315 aa, Oryza sativa
  Clone ID: TF_OSC400585j.C1.p9.fg
MELNFQVQPPVFQLQDYCYYYSQEVAAAASPAAKPTKPRGRKKGSTSHSKFVGVRQRPSGRWVAEIKDTTQKIRMWLGTFETADAAARAYDEAARLLRGAEARTNFAPRISPDCPLAVRIRGILHHKKLKKARSAAAATAGSPGAASKKRSTTAAAAAATPTITTTSNSNSDGAGSACGGSSSSSSSTDSCDGAVKQGGGGGGAPTDASEVYRPDFVHAGAEEFDSWMFDTAFGPFPELDSFAAVDAVTPPPATASPEESSAGTPPVEMAEFERIKVERRISASLYAMNGLQEYFDKVFDASACDPFWDFSPLCH

SEQ ID NO: 16040 - protein, 145 aa, Oryza sativa
  Clone ID: TF_OSC102007j.C1.p2.fg
MSTTNSSSSVSVPAMDAHGQEEEEEPMQVQQQQAFRGVRKRPWGKFAAEIRDSTRNGVRVWLGTFDSAEEAALAYDQAAFAMRGSAAVLNFPMEQVRRSMDMSLLQEGASPVVALKRRHSMRAAAAGRRRKSAAPDRRIRKAEEG

SEQ ID NO: 16041 - protein, 166 aa, Oryza sativa
  Clone ID: TF_OSC401268j.C1.p16.fg
MDAHGQEEEEEPMQVQQQQAFRGVRKRPWGKFAAEIRDSTRNGVRVWLGTFDSAEEAALAYDQAAFAMRGSAAVLNFPMEQVRRSMDMSLLQEGASPVVALKRRHSMRAAAAGRRRKSAAPAPADQEGGGGVMELEDLGPDYLEELLAASQPIDITCCTSPSHHSI

SEQ ID NO: 16042 - protein, 297 aa, Oryza sativa
  Clone ID: TF_OSC410211j.C1.p10.fg
MATTVDWCGRGSNLPAAMYDMVVDSKELMGALAPSMVSFSYPCSEQSASSLLAGANYLTPAQVLHVQAQLQRLRRPGAASGCLAAAPPLPMKRHGAVAVAAAAAARAPVKLYRGVRQRHWGKWVAEIRLPRNRTRLWLGTFDTAEEAALAYDSAAFRLRGESARLNFPELRRGGAHLGPPLHAAVDAKLHAICHGMDLPQPQPQTQSNATTTTMSTTATNTPSPFFSSESPVVKSEPVCSASESSSSADGDVSSTGSSDVVPEMQLLDFSEAPWDESESFLLHKYPSLEIDWDAILS

SEQ ID NO: 16043 - protein, 399 aa, Oryza sativa
  Clone ID: TF_OSC21837j.C1.p4.fg
METYGLVKDELLHGIGGGQGRLYCEVKPTAAPAVITAAGGGAKSVKRRKREPSAAAMSAVTVAGNGKEAGGSNAANKRSSRFRGVSRHRWTGRFEAHLWDKGTWNPTQKKKGKQVYLGAYNEEDAAARAYDLAALKYWGPTTYTNFPVADYEKELKLMQGVSKEEYLASIRRKSNGFSRGVSKYRGVARHHHNGRWEARIGRVFGNKYLYLGTYSTQEEAARAYDIAAIEYRGINAVTNFDLSTYIRWLKPPSSSSAAGTPHHHGGGMVVGADRVLAPAQSYPISAAADDDVAGCWRPLPSPSSSTTTALSLLLRSSMFQELVARQPVVEGDDGQLAVVSGDDADADADSDVKEPPPESEYGEVFASDEAAAAAAYGCSMYELDDSFALIDDSVWNCLI

SEQ ID NO: 16044 - protein, 601 aa, Oryza sativa
  Clone ID: TF_OSC401520j.C1.p13.fg
MVKSGQEAAPGSGGNAAAAAARQGGGGGGRGRQYKGVRMRSWGSWVSEIRAPNQKTRIWLGSYSTAEAAARAYDAALLCLKGSAADLNFPVHLPFHIPAAAMSPKSIQRVAAAAAANATSPLQHHSGAPSFATATGGYNPAAAPTTPPCSYGDMSSCSAVSSPETANYYGADHDMVAREDDVDYAALADIDAFFQSPKCMDYSMMDPCSTFFSPAPESLAAEWEDEASHPNPRGRDSLAFALLVSFLPSAAAAAAARAMGYTKEQLLARLQELNIEFSCYDHPVVLTVEEQAKHVGHLGGALSKNLLLKDKKHRLYVVSALAGTKVDMKILSQRLGLGKGGLRMAPEENLLEVLQVPLGCVTPFALLNESASFFHGYAIAFLTDSYNCVFASSAVSLLLDQGFKSKQSCYFHPLTNDVTIALSSSNLDKFLMSIGRQPAYVDLEASPVVGKDNPPDLADFVPSGVPNSAEPIEKVTPTNVPRQNDVPKEKTCLPEVKAKPKVQNKGAEKTQSKIPTNGANVEKFVNDVFDIMSPLFLSEVSKKLNVKQEELSSIFDGFKEQATIDLESVTTSLKNAAYTAGFEAGFETMLNSGLKGQASRK

SEQ ID NO: 16045 - protein, 404 aa, Oryza sativa
  Clone ID: TF_OSC403248j.C1.p1.fg
MATMNNWLAFSLSPQDQLPPSQTNSTLISAAATTTTAGDSSTGDVCFNIPQDWSMRGSELSALVAEPKLEDFLGGISFSEQQHHHGGKGGVIPSSAAACYASSGSSVGYLYPPPSSSSLQFADSVMVATSSPVVAHDGVSGGGEEVRRHVRPENIDLPRRDKICRIYHYVIIMWDMIVVINKVVISFGLVIGIDGQGGGYDKEEKAARAYDLAALKYWGPTTTTNFPVNNYEKELEEMKHMTRQEFVASLRRKSSGFSRGASIYRGVTRHHQHGRWQARIGRVAGNKDLYLGTFSTQEEAAEAYDIAAIKFRGLNAVTNFDMSRYDVKSILDSAALPVGTAAKRLKDAEAAAAYDVGRIASHLGGDGAYAAHYGHHHHSAAAAWPTIAFQAAAAPPPHAAGLYH

SEQ ID NO: 16046 - protein, 235 aa, Oryza sativa
  Clone ID: TF_OSC400993j.C1.p33.fg
MAPRAATVEKVAVAPPTGLGLGVGGGVGAGGPHYRGVRKRPWGRYAAEIRDPAKKSRVWLGTYDTAEEAARAYDAAAREFRGAKAKTNFPFASQSMVGCGGSPSSNSTVDTGGGGVQTPMRAMPLPPTLDLDLFHRAAAVTAVAGTGVRFPFRGYPVARPATHPYFFYEQAAAAAAAEAGYRMMKLAPPVTVAAVAQSDSDSSSVVDLAPSPPAVTANKAAAFDLDLNRPPPVEN

SEQ ID NO: 16047 - protein, 236 aa, Oryza sativa
  unsure (1)..(236): unsure at all Xaa locations
  Clone ID: TF_OSC400993j.C1.p38.gp
MAPRAATVEKVAVAPPTGLGLGVGGGVGAGGPHYRGVRKRPWGRYAAEIRDPAKKSRVWLGTYDTAEEAARAYDAAAREFRGAKAKTNFPFASQSMVGCGGSPSSNSTVDTGGGGVQTPMRAMPLPPTLDLDLFHRAAAVTAVAGTGVRFPFRGYPVARPATHPYFFYEQAAAAAAAEAGYRMMKLAPPVTVAAVAQSDSDSSSVVDLAPSPPAVTANKAAAFDLDLNRPPPVENX

SEQ ID NO: 16048 - protein, 289 aa, Oryza sativa
  Clone ID: TF_OSC422332j.C1.p15.fg
MAMAKELQETSSSSSSSAASTSSCSSAVTDAWSSPARPNAVAGGKRKKEVVGEADEAAGGGAGEEEEEEAEAAAAGKSSAATKKRKRSSDGKHPVYRGVRMRAWGKWVSEIREPRKKSRIWLGTFPTADMAARAHDVAALAIKGRAAHLNFPDLAGVLPRAASASPKDVQAAAALAAAFTTSPSSSPSSSLSADDVAPCVVHADADEQPAAAAKNDDDDGSTTAPVAAAAAAAAADEQQLFDLPDLLFDIQDGPFGFPAMWAPLADVDEVNAELRLEEPLLWDLGVTDA

SEQ ID NO: 16049 - protein, 377 aa, Oryza sativa
  Clone ID: TF_OSC400789j.C1.p4.gm
MAGGGGQAAGGAARGRGRRGRAWRRPAGKLLAAAVPSQRSMCCTGDEVAGPGEQRRRPLDADAGGDKGAVATTSSSLLAAPMLSRRRQAEEMAAMVSALASVVAGGGGTSLPAKRPAEREPEEGAAVEGVWWSYCSELAAAAAAPSPAAPFPAGYVPSPGQHSPASAAAGDEEELPSPSSADSSGGTARKRYRGVRQRPWGKWAAEIRDPHKAARVWLGTFDTAEDAARAYDGAALRFRGSRAKLNFPEHATLPPPPTTTTAAAHRCPPPPRTDALLESQELSPGAGGGDPYSQYARFLQGSGGDGGEAAARPGGGASQRTPPATTLLYSFEGDAASAACLWQPESGGGGMGWPATSPAAWLEYGFYPPPERRDTDT

SEQ ID NO: 16050 - protein, 167 aa, Oryza sativa
  Clone ID: TF_OSC4060j.C1.p1.fg
MDDSSFGSEPTTSSSGGEAPASPPSTASSSSDGAGGKKKRPRKDGHHPTYRGVRMRSWGKWVSEIREPRKKSRIWLGTFATAEMAARAHDVAALAIKGRAAHLNFPDLAHELPRPATAAPKDVQAAAALAAAAASRPPPPMRAPAITPTDRTTRAPVRLAAPAAGRR

SEQ ID NO: 16051 - protein, 217 aa, Oryza sativa
  Clone ID: TF_OSC418226j.C1.p2.fg
MDDSHDLASPTSPDTASSSSSSTSTSSSSATVAPKKRPRNDGRHPTYRGVRMRSWGKWVSEIREPRKKSRIWLGTFATAEMAARAHDVAALAIKGRTAHLNFPDLAHLLPRPATAAPKDVQAAALLAAAAADFPSVSVDANAKSPDTCSVASAASPQPPPPDAEADPDSTLFDLPDLLLDLRYETSSSLSCGASWAVDDDVAGGVVFRLEEPMLWDY

SEQ ID NO: 16052 - protein, 286 aa, Oryza sativa
  Clone ID: TF_OSC900314j.C1.p20.fg
MAAMVSALASVVAGGGGTSLPAKRPAEREPEEGAAVEGVWWSYCSELAAAAAAPSPAAPFPAGYVPSPGQHSPASAAAGDEEELPSPSSADSSGGTARKRYRGVRQRPWGKWAAEIRDPHKAARVWLGTFDTAEDAARAYDGAALRFRGSRAKLNFPEHATLPPPPTTTTAAAHRCPPPPRTDALLESQELSPGAGGGDPYSQYARFLQGSGGDGGEAAARPGGGASQRTPPATTLLYSFEGDAASAACLWQPESGGGGMGWPATSPAAWLEYGFYPPPERRDTDT

SEQ ID NO: 16053 - protein, 198 aa, Oryza sativa
  Clone ID: TF_OSC900007j.C1.p7.fg
MCGGAIIADFVPPAGARRAAASDISDNAVLSAAGAGDESFAAAKAPAPGRKTAYRGIRRRPWGRWAAEIRDPRKGARVWLGTYATAEEAARAYDVAARDIRGAKAKLNFPPTIGAAAAPPPPKKRRKAAAAANHHHHHHQQESSGSSSASSLPPTPPPAAEHQLRECMSGLEAFLGLEEEEDDGGAGEPWDAVDMMLE

SEQ ID NO: 16054 - protein, 318 aa, Oryza sativa
  Clone ID: TF_OSC404155j.C1.p16.fg
MTARSMLRNHPEASVLDTIRQHLLEEPRGGGGGEAAEASFGSLVADMWSDSLPFRDDDADDMVVFGAMRDAFSCGWLPDGVFAEVKPEPLLSPDSSSYDGSSCCFGFADVSEPVTPSDAASGAAEAAAAAAAATAEHGKEEEAAAAVARGKHYRGVRQRPWGKFAAEIRDPAKNGARVWLGTFDTAEDAALAYDRAAYRMRGSRALLNFPLRIGSEIAAAAAAAAAAAAGDKRPSPEPATSESSFSSSSSCTTTTTSSSTSSSGSPKRRKRGEAAAASMSMPLVPPPSQLNWPVQAWYPAAAPVEQVAITPRVEQLVI

SEQ ID NO: 16055 - protein, 196 aa, Oryza sativa
  Clone ID: TF_OSC24031j.C1.p2.fg
MAALFEAAETAAIVAALTRVIADGGRGGSGAGVPPPAPSLVVPPLAGTGGGRRVDVAREEEMVGVVSAGDHTGEASVAAAAPVGQVAGVDQGPEEAARVWLGTFRTAEDAARAYDAAALRFRGRRAKLNFPEEVSRPWQGHDVDHMSCSPPSISNARFLGSWTFGPPQPPSRSVAAAATTLLGGSHGGNGAENGRE

SEQ ID NO: 16056 - protein, 107 aa, Oryza sativa
  Clone ID: TF_OSC404155j.C1.p19.gp
IRDPAKNGARVWLGTFDTAEDAALAYDRAAYRMRGSRALLNFPLRIGSEIAAAAAAAAAAAAGDKRPSPEPATSESSFSSSSSCTTTTTSSSTSSSGSPKRRKRGEA

SEQ ID NO: 16057 - protein, 323 aa, Oryza sativa
  Clone ID: TF_OSC900036j.C1.p3.fg
MCGGGPDNHHAITVAADLPPPPPSVVAVEMAPPRGHRPGKEVEYNEEEEDDDDEYDGREFEEEFLRFSMMVDEEDDDGDDDDEVEVEIIAVVSPPHRPLVGARGTTSAVESVTNLQARTSPLPNPVVPQTGTKASKRGDSGAKAKPAAAKKRRSKHGFLGVHQRTYGRWSAEIRDNVIKGSRFWIGTFDTALDAALAYDAVSRRLYGLNAKTNFPAAAGEDDLPPPPPPAKPCSSTKRPKKCNTSGDLGAAAAPPQAVDTPAAAAAGVELTSLLCSVAAQAQEVSDGWEFIQELLLLGGGVSPLDYLNGQELAGAAVGDLWSF

SEQ ID NO: 16058 - protein, 392 aa, Oryza sativa
  Clone ID: TF_OSC407093j.C1.p2.fg
MGRPVKQKTTTWLVELLREYCQRAAAQATAGNGAVAAAAAVEGEINTDGLAALAVEAEGFAAANGEGWVAPAVEGEGEGFVGAPVVEGEEGLTAELLVAAERKYRGARKRPWGKYAAEIRIRNTMGVKERVWLGTFGTAEEAAWAYDTAATVIHGDKATTNFPRAPLRPATTPVMRSMLVFFGIAHLVRSLVPRARGPRGRGGGARGRGRSRRRRAAAAAAPSAPASEAPPPPPPSSALVPEPELQVQGGRGERGRGRGRGRGGGRGGRRGRGRTPARVVAEDSPMLQATTPAAAPAPAPALAPAPANQAIFQPMIIPPGGVVVAPDDFLLSAISDDEPVLPHKKPKLLGVYTPPDSPDQFVMEFFADLGDGDDILSSSFWQDPAGDGEDTQ

SEQ ID NO: 16059 - protein, 178 aa, Oryza sativa
  Clone ID: TF_OSC400825j.C1.p36.fg
MARPQQRYRGVRQRHWGSWVSEIRHPLLKTRIWLGTFETAEDAARAYDEAARIMCGPRVRTNFPHDVADEAAPPPPPHSAAAASSSFLSAALVAKLHRFNLASVQAAQRGNSNDDDSTTSSSAAASSRAVIPSLPAAAGALGNAAATAEWSGGFLEEQYVDQMIEELLDSNFSMEISC

SEQ ID NO: 16060 - protein, 321 aa, Oryza sativa
  Clone ID: TF_OSC900006j.C1.p4.fg
MDRQWRCLAAAASTSGNSKLPPLPMALGGAVEYGQLVHGAAAPVAPFFVDAEQQSLSPATAMVLGAGWYNYNLVTPSQAAQLHHRLRRAVGAAPCSMKRCGGMAAAAAGRLALVGPAPVQAKLYRGVRQRHWGKWVAEIRLPRNRTRLWLGTYDTAEDAALAYDGAAFRLRGDAARLNFPELRRGGRHHAPALSASVDAKILQATTTTTADTAAAAAPASTNTTPPPSPRVVKTEPGCCSVSEASTTTTADAADVSSTGSSPSPTSSNQAATATPPAPRPPPPLPETIQQLDFTEAPWDEADGFALRRYPSWEIDWDAILS

SEQ ID NO: 16061 - protein, 247 aa, Oryza sativa
  Clone ID: TF_OSC418226j.C1.p5.fg
MEQEQVMSQESNSCTCSSSSNDASSAACSSLNASSPSSVDSGSAGGGGGGKKRPRSDHLKHPTYRGVRMRSWGKWVSEIREPRKKSRIWLGTFDTAEMAARAHDVAALAIKGRTVHLNFPDLAHLLPRAASASPKDVQAAAALAAATASPAPALSPTPCHDVDAAADDEPEPAEPEQATAPVCIVENGTLQQDGGTGLDYTYFTMPDALLEFGFTLPPPPPPYYCGSPWDDDADDFFFGEPLVLWEH

SEQ ID NO: 16062 - protein, 221 aa, Oryza sativa
  Clone ID: TF_OSC401961j.C1.p10.fg
MEQHSHCWYYGGGMAVTAAAGAGAASSTSSESQPSGYDYETAGSAEVSAPGGGAGRERAARKEEGGAGAAAAAAGFIGVRKRPWGRFAAEIRDSTRNGVRVWLGTFETAEAAAMAYDQAALSARGAAAALNFPVERVRESLRALALGAAGGSPVLALKGRHSKRKRRKRSELAGATATANKTTTTTSATTGGEHKQIVLELEDLGADYLEELLWMSEQTSH

SEQ ID NO: 16063 - protein, 299 aa, Oryza sativa
  Clone ID: TF_OSC421444j.C1.p10.fg
MAFSEPPKPASQPSPPSSPMSERPPSGRSRRRAQEPGRFLGVRRRPWGRYAAEIRDPTTKERHWLGTFDTAQEAALAYDRAALSMKGAQARTNFVYTHAAYNYPPFLAPFHAPQYAAAAAAPSSVQYGGGVGAAPHIGSYGHHHHHHHHHGHGAASGASSVGECSTMPVMVPVDPHRSSMSSSLLDMDRNGHDFLFSGADDNSGYLSSVVPESCLRPRGGGAAADHQDMRRYSDADAYGMMGLREDVDDLAQMVAGFWGGGDAADQLGACGFPASGGAADMVASSQGSDSYSPFSFLSH

SEQ ID NO: 16064 - protein, 219 aa, Oryza sativa
  Clone ID: TF_OSC401894j.C1.p9.fg
MEWAYYGSGYSSSGTPSPVGGDGDEDSYMTVSSAPPKRRAGRTKFKETRHPVYKGVRSRNPGRWVCEVREPHGKQRIWLGTFETAEMAARAHDVAAMALRGRAACLNFADSPRRLRVPPLGAGHEEIRRAAVEAAELFRPAPGQHNAAAEAAAAVAAQATAASAELFADFPCYPMDGLEFEMQGYLDMAQGMLIEPPPLAGQSTWAEEDYDCEVNLWSY

SEQ ID NO: 16065 - protein, 373 aa, Oryza sativa
  Clone ID: TF_OSC401369j.C1.p98.fg
MEEGFVALKRTEHVEVTSLAVAVEATPSAKGGKGKVVVGGGGAGGGVGPTRVRVFCDDFDATDSSSDEDEEEVTARRRVKRYVQEIRLQRAAAVAVPPVKVKGEEVFPAAVSAKMAEAAKARVVLAAGRKRKAGGVDGAEPRFRGVRRRPWGKYAAEIRDPWRRVRVWLGTFDTAEEAAKVYDTAAIQLRGRDATTNFNQSGDSASLDVPPEVAERVPQPPGASKNASPATSYDSGEESHAAAASPTSVLRSFPPSAVVATADTANKKQPPPPPLVVRETDESVDVFGCSFSDDGGFAGELPPLYTDFDLLADFPEPPLDFLSNLPVEPFSLAPFSSNNGSPDLHLDDAPSPAAAQVDDFFQDITDLFQIPVV

SEQ ID NO: 16066 - protein, 419 aa, Oryza sativa
  Clone ID: TF_OSC400957j.C1.p1.fg
MATTTWCCGCCCSCLATARSRSSVLNSGDAGGGGGGGGGGGLFRFDLLASSPDDDECSGEQHQLPAASGIVTRQLLPPPPPAAPSPAPAWQPPRRAAEDAALAQRPVVAKKTRRGPRSRSSQYRGVTFYRRTGRWESHIWAYDRAAIKFRGLEADINFNLSDYEDDLKQMRNWTKEEFVHILRRQSTGFARGSSKFRGVTLHKCGRWEARMGQLLGKKYIYLGLFDTEVEAARAYDRAAIRFNGREAVTNFEPASYNVDALPDAGNEAIVDGDLDLDLRISQPNARDSKSDVATTGLQLTCDSPESSNITVHQPMGSSPQWTVHHQSTPLPPQHQRLYPSHCLGFLPNLQERPMDRRPELGPMPFPTQAWQMQAPSHLPLLHAAASSGFSAGAGAGVAAATRRQPPFPADHPFYFPPTA

SEQ ID NO: 16067 - protein, 361 aa, Oryza sativa
  Clone ID: TF_OSC900118j.C1.p3.fg
MATTTWCCGCCCSCLATARSRSSVLNSGDAGGGGGGGGGGGLFRFDLLASSPDDDECSGEQHQLPAASGIVTRQLLPPPPPAAPSPAPAWQPPRRAAEDAALAQRPVVAKKTRRGPRSRSSQYRGVTFYRRTGRWESHIWAYDRAAIKFRGLEADINFNLSDYEDDLKQMRNWTKEEFVHILRRQSTGFARGSSKFRGVTLHKCGRWEARMGQLLGKKYIYLGLFDTEVEAARAYDRAAIRFNGREAVTNFEPASYNVDALPDAGNEAIVDGDLDLDLRISQPNARDSKSDVATTGLQLTCDSPESSNITVHQPMGSSPQWTVHHQSTPLPPQHQRLYPSHCLGFLPNLQVLLSTPLAYQF

SEQ ID NO: 16068 - protein, 692 aa, Oryza sativa
  Clone ID: TF_OSC400032j.C1.p34.fg
MATMNNWLAFSLSPQDQLPPSQTNSTLISAAATTTTAGDSSTGDVCFNIPQDWSMRGSELSALVAEPKLEDFLGGISFSEQQHHHGGKGGVIPSSAAACYASSGSSVGYLYPPPSSSSLQFADSVMVATSSPVVAHDGVSGGGMVSAAAAAAASGNGGIGLSMIKNWLRSQPAPQPAQALSLSMNMAGTTTAQGGGAMALLAGAGERGRTTPASESLSTSAHGATTATMAGGRKEINEEGSGSAGAVVAVGSESGGSGAVVEAGAAAAAARKSVDTFGQRTSIYRGVTRHRWTGRYEAHLWDNSCRREGQTRKGRQGGYDKEEKAARAYDLAALKYWGPTTTTNFPVNNYEKELEEMKHMTRQEFVASLRRKSSGFSRGASIYRGVTRHHQHGRWQARIGRVAGNKDLYLGTFSTQEEAAEAYDIAAIKFRGLNAVTNFDMSRYDVKSILDSAALPVGTAAKRLKDAEAAAAYDVGRIASHLGGDGAYAAHYGHHHHSAAAAWPTIAFQAAAAPPPHAAGLYHPYAQPLRGWCKQEQDHAVIAAAHSLQDLHHLNLGAAAAAHDFFSQAMQQQHGLGSIDNASLEHSTGSNSVVYNGDNGGGGGGYIMAPMSAVSATATAVASSHDHGGDGGKQVQMGYDSYLVGADAYGGGGAGRMPSWAMTPASAPAATSSSDMTGVCHGAQLFSVWNDT

SEQ ID NO: 16069 - protein, 118 aa, Oryza sativa
  Clone ID: TF_OSC18348j.C1.p1.fg
MENLSCLISSPLPMPMPEYELAACSPASPSSSASSTSTPPSPGGEAAARCGEKRGRGGGGGRHPTYRGVRMRAWGKWVSEIREPLKKSRIWLGTFPTPEMVAHAHELFALVVNMIISL

SEQ ID NO: 16070 - protein, 244 aa, Oryza sativa
  Clone ID: TF_OSC401762j.C1.p9.fg
MALSEPDLAAETEAIVSALTHVVAYGGGGPPPSEETAASAVTRTAPWRADGARQGAVPAARKYRGVRRRPWGKWAAEIRDPHRAARVWLGTFATAEDAARAYDAAALRFRGGRARLNFPEDAAAADERRATDAAAAAAAASSAPAALLESQPGDVADCLDYSRILAGAPERPTSSTVPDGFFGGGGNGRFLHSWSIGTSPSPSGSGSGGAGGGGGGGGGGAPVRPLFHGGNGWEQRGDSAYNGF

SEQ ID NO: 16071 - protein, 247 aa, Oryza sativa
  Clone ID: TF_OSC401286j.C1.p8.fg
MPELEVCSPASSGGASPPESPVEGRRGGGGGEKRGRSGDGGRHPSYRGVRMRAWGKWVSEIREPRKKSRIWLGTFPTPEMAARAHDAAALVVKGPAAVLNFPDMAASLPRPASASPRDVQAAAARAAAMEPPQPPPSSLTVQADSAAAAFLTPKNGGVSGAGAADDELEAIVELPRLDELDAAELVFGAAFQDTAAEHPWCDPVWIDGGYAAAAAAAAAAAAHDDLFGLDADHHGWAQSVGALLWNL

SEQ ID NO: 16072 - protein, 136 aa, Oryza sativa
  Clone ID: TF_OSC419098j.C1.p8.fg
MDGDGGGGWDDQGNGGGETTKYRGVRRRPSGKFAAEIRDSSRQSVRVWLGTFDTAEEAARAYDRAAYAMRGHLAVLNFPAEARNYVRGSGSSSSSRQHQQRQVIELECLDDQVLQEMLKGGDDQYRSAAGSKRNNY

SEQ ID NO: 16073 - protein, 216 aa, Oryza sativa
  Clone ID: TF_OSC401153j.C1.p10.fg
MCGGAIISDFIPQREAHRAATGSKRALCASDFWPSASQEAADFDHLTAPCTFTPDQAAEEPTKKRERKTLYRGIRRRPWGKWAAEIRDPAKGARVWLGTFATAEAAARAYDRAARRIRGAKAKVNFPNEDPPLDDPAADGHSHGGAAIPCREFMDYDAVMAGFFHQPYVVADGVPAVPAEEAPTVAYVHHHLPPQPQQDAGLELWSFDNIHTAVPM

SEQ ID NO: 16074 - protein, 639 aa, Oryza sativa
  Clone ID: TF_OSC401980j.C1.p10.fg
MTNSNNGNGGTNAAASGWLGFSLSPHMASSTMDEHHHVHHHQQQQQQQQQQQHHQQQQHGLFFPSVTTAAAAAAYGLAGDVVAATNGYYSQLASMPLKSDGSLCIMEALRRTDQDHHGPKLEDFLGAAQPAMALSLDNTSSFYYGGGGAAAAGHGQHGYLQACDLYGGPAAPSLVTAADEEAAAAAAAMASWVAARGAATAYATGAADANAAENVLPSATAAQHLHHPLALSMSSGSLSSCITAGEYGMAAVAAADGGRKRGGAGGGGQKQPVHHRKSIDTFGQRTSQYRGVTRHRWTGRYEAHLWDNSCKKEGQTRKGRQGGYDMEEKAARAYDLAALKYWGPSTHINFPLEDYQEELEEMKNMTRQEYVAHLRRKSSGFSRGASMYRGVTRHHQHGRWQARIGRVSGNKDLYLGTFSTQEEAAEAYDVAAIKFRGLNAVTNFDITRYDVDKIMASNTLLPADLARRNAATTTSKDDHSAAGAGAIVSVHSAADIAVADTLWKATTAPRQQQQHHDDVVLSGADQAAFSVLHDLVAVDAAAAHQQQQQQQHMSMSAASSLVTSLSNSREGSPDRGGGLSMLFAKPSPAVAASAQQQASTKLMAAPLPLGSWVSSPPASARPPAVSIAHMPLFAAWTDA

SEQ ID NO: 16075 - protein, 379 aa, Oryza sativa
  Clone ID: TF_OSC401446j.C1.p16.fg
MAKPRKNSTTTNTSSSGVAAAAAAAAVKPKRTRKSVPRESPSQRSSVYRGVTRHRWTGRFEAHLWDKNSWNESQNKKGKQVYLGAYDDEEAAARAYDLAALKYWGPDTILNFPLSAYEGELKEMEGQSREEYIGSLRRKSSGFSRGVSKYRGVARHHHNGRWEARIGRVFGNKYLYLGTYATQEEAAMAYDMAAIEYRGLNAVTNFDLSRYIKWLRPGADGAGAPQNPHPMLGALSAQDLPAIDLDAMASSFQHDGHGAAAAAAQLIPARHSLGHTPTTSALSLLLQSPKFKEMIERTSAAETTTTSSTTTSSSSPSPPQATKDDGASPQCSFPEDIQTYFGCAAEDGAAGAGYADVDGLFFGDLAAYASPAFHFELDL

SEQ ID NO: 16076 - protein, 207 aa, Oryza sativa
  Clone ID: TF_OSC21386j.C1.p4.fg
MSSSSSATTTKYRGVRLRKWGKWVSEIRLPNSRERIWLGSYDTPEEAARAFDAAFVCLRGGGEAAGNGINFPGSPPAVARTSDPQEVYAAAVSHANNRPPPPPSARATSSALPWEEAPVVAAQEAAADMAPDVVVLPSSPVNVLAAAGSFEYWSQQPLYSPTAASLDLQRWMTAAAAAEESIMEDDDDEGTSDGLWSFHYSPTRSKW

SEQ ID NO: 16077 - protein, 177 aa, Oryza sativa
  unsure (1)..(177): unsure at all Xaa locations
  Clone ID: TF_OSC416986j.C1.p7.np
GEGWRRRREVVRVATALRRWRGEMERSEARSVADGGGSKSRKCCPLRRSRKGCMKGKGGPENQRCPFRGVRQRTWGKWVAEIREPNRGARLWLGTFNTALDAARAYDSAARALYGDCARLNLLLAGICCXQLIHTFMYMHVVYVRIASVILLRVMXYTLSISKYLTPLISLIYLTVH

SEQ ID NO: 16078 - protein, 173 aa, Oryza sativa
  unsure (1)..(173): unsure at all Xaa locations
  Clone ID: TF_OSC900118j.C1.p39.gp
WRRGRGRRGRXRFRGVRQRPWGRFAAEIRDPHLRRRLWLGTFDTAEEAAAAYDAASVRLRGSSAATNFASVRCYSLPPELPKPTISPPEAAVRPITLPIGTAKPTLLPRVKEEGESCGGRVKEEASSCEVQVLAPEPMWTMISGKRKKRSGCGTRVRAFHAVSACVEEVGGAX

SEQ ID NO: 16079 - protein, 232 aa, Oryza sativa
  Clone ID: TF_OSC900129j.C1.p30.fg
MRRRVSSSSSSSSSSSPARHHKARRSRRKLAVDEDWEAAFREFLSRDHDDDDDDHDGQHVVVAPLIRGSDKCVHGHEVVASTVGGGASGGRRRADDDDGERRRRRRREKRSYPYRGIRQRPWGRWASEIRDPVKGIRVWLGTFDTAEGAARAYDDEVRRIYGGNAKTNFPPSPPTPPPPEKPAAERSPSTTPTTTTEDSGDSRILIECCSDDLMDSLLAAFDMTTGDMRFWS

SEQ ID NO: 16080 - protein, 738 aa, Oryza sativa
  Clone ID: TF_OSC31530j.C1.p6.fg
MKNGARKDAGGGGGGVFVPCVDIKSFVLSLAFLTVFVALWQLQPYGSLLTAARSTASVSASPCSLIATPAAAAASAGVIRSENSTADTAKTAPAAVASAVPARLARAARPARVEDPNKRELRPYGSAAALFVQMGAYRGGPRTFAIVGLASKPTHVFSNPYFKCEWLPNPTAGNPSPRPVRTKAYKMLPDWGYGRVYTVVVVNCTFPSNPNADNAGGKLLVHAYYSTTSRRYERFVALEEAPGSYDESRFSPPFPYDYLYCGSSLYGNLSASRMREWVAYHAHFFGPRSHFVFHDAGGISPEVKAVLDPWVRAGRLTVQDIRAQAEYDGYYYNQFLVVNDCLHRYRHAANWTFFFDVDEYIYLPNGQTLDQVLGKLSGYSQFTIEQNPMSSKLCVQDPSKDYSREWGFEKLVFRNSITKVRRDRKYAIQARNAYSAGVHMSQNVYGRTTHKTESLIRYYHYHNSINVMGEPCREFVPVPVNGSKLMFEGIPYVYDDNMKRLAGQIKREELGGLEEEEGEPVVGEAALGGGAGGGRVEGGVDVGEEGVGDGDVDEEEEGEREDEGGGDAGEERAVGDDDDELRRRRLEGERGAGGGRPALTSPASRRRRCPRPDPASPGRIWPPRRHSDDDDPAVFYLRGRSARLNFPEEISLLASPSEGGGAGEPREPDGGTLSAASIRKKAIEVGSHVDALQTGMMVAPTHHREQQKHHHHPHLQPHGEEQHHHEDWISSKYEDIHT

SEQ ID NO: 16081 - protein, 182 aa, Oryza sativa
  Clone ID: TF_OSC989j.C1.p1.fg
MAKRRSNGETAAASSDDCSAGVCGGGGGGEVEPRRRQKRPRRSAPRDCPSQRSSAFRGVTRCAPVDGRFEAHLWDKNTWNESQSKKGRQGAYDGEEAAARAYDLAALKYWGHDTVLNFPLSTYDEELKEMEGQSREEYIGSLRGRAVASQEGCPSTEELQGIITTANGRLGLGVCSATNTST

SEQ ID NO: 16082 - protein, 216 aa, Oryza sativa
  Clone ID: TF_OSC900306j.C1.p12.fg
MATVQPAASDPAPPPPPETEEQPAAAGGEEIAALDEQLAVADGGGDDGKAAAAAEGGGGGGGGKLVAETMRKYAAPRSSRYHGVTRLKWSGKFEAHLWDNSSQVEGRKRKGKHGSYVTEENAARAHDLAALKYWGAGPNTKLNFNVSDYEKEIERMKTMSQDEFVVYIRRQSSCFSRGTSSYRGVTRRKDGRWQARIGRIGESRDTKDIYLGTFGE

SEQ ID NO: 16083 - protein, 364 aa, Oryza sativa
  Clone ID: TF_OSC401190j.C1.p4.fg
MCGGAILADFTPARVPRRLTAAELLPVTPTPPAAERRTTRKRKSDVDFEAEFELFEDDDDDDEFELSDDGDESLAVSCVSSPKSKAVPSFSCTMRWRNLACFLEGFSPDGNLNFTRFLLLLLISSIAGGSFVGCLLELQAAAARGGGGGRSSEGEQEEQVQGRRRRPSGRFAAEIRDPKKGRRVWLGTYGSAEEAAMAYDREARRIRGKGARLNFPRDGDGSPRRSNDRPCWTIDLNLPAAAVSGDDDDAMAVDAADADAGSAGRAAAYADQEALSAAKCKIKQCPRDEQMASATPELMEEDASSSRNMVPLSMALQLQYAAMIAECDREMEEIAAVERDLERRRRQVFERRGHLVRQASLLLD

SEQ ID NO: 16084 - protein, 175 aa, Oryza sativa
  Clone ID: TF_OSC30077j.C1.p2.fg
MADAAEQHHRQEETAAATTTPQQMMMRRRRARASSEYLGVRRRPWGRYAAEIRNPYTKERHWLGTFDTAEEAAVAYDLSAISISGAAAARTNFLYPDMHHHHPSPPQHALSPAVPPPPPPPPPSPLYDDDYLSPAAAEEEVEAGDDESLTIATILQSFQYQQSVPPASSGSMFYY

SEQ ID NO: 16085 - protein, 292 aa, Oryza sativa
  Clone ID: TF_OSC405965j.C1.p10.fg
MMNFSSYFYSSSAAAAGGGGGGGEKKSSSSSASKKKQQQAAAAEGGNNQTRYLGVRRRPWGRYAAEIRDPATKERHWLGTFDTAEEAAVAYDRAARSLRGARARTNFAYPDLPPGSSVTPYLSPDLSADASDQLLQPFYANPSAAAALPTPAAVMAGGGGVEFGGEYMYGGGVDMSSLMDDIAAMPDDLPPSVTGGGGGFASSDEYSSGGGGMVDDVSMYCGGNGGGSSWCDASDFASYSSSSPAAAAAAGSHGMYFEEGYVHSPLFSPMPAVDDAGADGFQLGGSSSSYYY

SEQ ID NO: 16086 - protein, 44 aa, Oryza sativa
  Clone ID: TF_OSC417134j.C1.p8.gm
MRKSKQPQPQPSPEIRYRGVRKRPSGRYAAEIPGPGEEDPDSGW

SEQ ID NO: 16087 - protein, 394 aa, Oryza sativa
  Clone ID: TF_OSC900225j.C1.p16.fg
MDSTSCLLDDASSGASTGKKAAAAAASKALQRVGSGASAVMDAAEPGAEADSGGERRGGGGGKLPSSKYKGVVPQPNGRWGAQIYERHQRVWLGTFTGEAEAARAYDVAAQRFRGRDAVTNFRPLAESDPEAAVELRFLASRSKAEVVDMLRKHTYLEELTQNKRAFAAISPPPPKHPASSPTSSSAAREHLFDKTVTPSDVGKLNRLVIPKQHAEKHFPLQLPPPTTTSSVAAAADAAAGGGDCKGVLLNFEDAAGKVWKFRYSYWNSSQSYVLTKGWSRFVKEKGLHAGDAVGFYRAAGKNAQLFIDCKVRAKPTTAAAAAAFLSAVAAAAAPPPAVKAIRLFGVDLLTAAAPELQDAGGAAMTKSKRAMDAMAESQAHVVFKKQCIELALT

SEQ ID NO: 16088 - protein, 329 aa, Oryza sativa
  Clone ID: TF_OSC101030j.C1.p16.fg
MCGGAILAELIPSAPAARRVTAGHVWPGDANKAKKKGARADDFEAAFRDFDNDSDDEEMMVEEAEEEEATSEHKPFVFRAKKAAAAASSRRRKPAQYRGVRRRPWGKWAAEIRDPVKGIRVWLGTFTNAEAAALAYDDAARAIRGDRAKLNFPSATTPDTRKRGRATAAAAPAVKATPVINLVEEEDEEEVAAAMASIKYEPETSESSESNALPDFSWQGMSASDEFAVAAAALSLDSDDDLAKKRPRTEPEDTTDSGSGDDTDALFDALLFADQYNHFNGGAYESLDSLFSADAVQTTAAAAAADQGMGLWSFDDGCCLVDVEASLSF

SEQ ID NO: 16089 - protein, 330 aa, Oryza sativa
  unsure (1)..(330): unsure at all Xaa locations
  Clone ID: TF_OSC101030j.C1.p28.gp
MCGGAILAELIPSAPAARRVTAGHVWPGDANKAKKKGARADDFEAAFRDFDNDSDDEEMMVEEAEEEEATSEHKPFVFRAKKAAAAASSRRRKPAQYRGVRRRPWGKWAAEIRDPVKGIRVWLGTFTNAEAAALAYDDAARAIRGDRAKLNFPSATTPDTRKRGRATAAAAPAVKATPVINLVEEEDEEEVAAAMASIKYEPETSESSESNALPDFSWQGMSASDEFAVAAAALSLDSDDDLAKKRPRTEPEDTTDSGSGDDTDALFDALLFADQYNHFNGGAYESLDSLFSADAVQTTAAAAAADQGMGLWSFDDGCCLVDVEASLSFX

SEQ ID NO: 16090 - protein, 707 aa, Oryza sativa
  Clone ID: TF_OSC17489j.C1.p1.fg
VTTSSMIEHMKNLLKIPGSKVLFGGEPLENHSIPEIYGAFKPTAVFVPLSEILKSGNFELVTREIFGPFQVVTEYSDDELELVLEACERMNAHLTAAVVSNDPLFLQEVLGRSVNGTTYAGIRARTTGAPQNHWFGPAGDPRGAGIGTPEAIKLVCDPNFNGSNWIGIPVHDTNSGEPRHNENSVHGALRLQMRPLYDTAKYADNKQVTNSVASQCNQYINTPAVIQIATCYIGGQEPSYIMMVKNEIENYSGSSPAMIINALEGGAEAGPVVRRRRREPSLLAPINGDGDTNGGGIGKSSLSGITVKRSSRFRGVSRFRACRDDKKMLSCRHRWTGRFEAHLWDKNSWNPTQRKKGKQVYLGAYDEEEAAARAYDLAALKYWGPTTYTNFPVMDYEKELKIMENLTKEEYLASLRRKSSGFSRGVSKYRGVARHHQNGRWEARIGRVFGNKYLYLGTYSEYKNSAYTLFYIVNWYSNASKTSHLNIGPSAILPKSFSPGTQEEAARAYDIAAIEYKGVNAVTNFDLRSYITWLKPTPAHVAMNPAEALAMQIPVDHFLPMETQMMMLPQSNPFTSYHNAQSLGGGDGGSSSTNNQEASMIISPSGSSRKRSSSTALSLLLKSSMFRQLVEKNSDAGEENGGEMREPGAHPGEGYEYHNFFQGDAAPDMDMCDLLSSGNVHAASGSAGFEEDIACYSGFGSMQSLQQ

SEQ ID NO: 16091 - protein, 292 aa, Oryza sativa
  unsure (1)..(292): unsure at all Xaa locations
  Clone ID: TF_OSC417300j.C1.p3.gp
MAAAIDLSGEELMRALEPFIRDASGSPPVCSQFSPTSPFSFPHAFAYGGGLAQQPELSPAQMHYIQARLHLQRQAAQAGPLGPRAQPMKASSSSASAAGAAATPPRPQKLYRGVRQRHWGKWVAEIRLPRNRTRLWLGTFDTAEEAALAYDQAAYRLRGDAARLNFPDNAASRGPLHASVDAKLQTLCQNIAAAKNAKKSSVSASAAATSSAPTSNCSSPSSDDASSCLESADSSPSLSPSSAATTAETPATVPEMQQLDFSEAPWDEAAAFALTKYPSYEIDWDSLLAANX

SEQ ID NO: 16092 - protein, 291 aa, Oryza sativa
  Clone ID: TF_OSC417300j.C1.p4.fg
MAAAIDLSGEELMRALEPFIRDASGSPPVCSQFSPTSPFSFPHAFAYGGGLAQQPELSPAQMHYIQARLHLQRQAAQAGPLGPRAQPMKASSSSASAAGAAATPPRPQKLYRGVRQRHWGKWVAEIRLPRNRTRLWLGTFDTAEEAALAYDQAAYRLRGDAARLNFPDNAASRGPLHASVDAKLQTLCQNIAAAKNAKKSSVSASAAATSSAPTSNCSSPSSDDASSCLESADSSPSLSPSSAATTAETPATVPEMQQLDFSEAPWDEAAAFALTKYPSYEIDWDSLLAAN

SEQ ID NO: 16093 - protein, 487 aa, Oryza sativa
  Clone ID: TF_OSC400651j.C1.p26.fg
MAKRSSPDPASSSPSASSSPSSPSSSSSEDSSSPMSMPCKRRARPRTDKSTGKAKRPKKESKEVVDPSSNGGGGGGGGKRSSIYRGVTRHRWTGRFEAHLWDKNCSTSLQNKKKGRQGAYDSEEAAARAYDLAALKYWGPETVLNFPLEEYEKERSEMEGVSREEYLASLRRRSSGFSRGVSKYRGVARHHHNGRWEARIGRVLGNKYLYLGTFDILYNLSQNYRFKNLFYKNTDSVASFITKLQIKDHETKIPSYTQEEAAKAYDLAAIEYRGANAVTNFDISCYLDQPQLLAQLQQEPQLLAQLQQELQVVPALHEEPQDDDRSENAVQELSSSEANTSSDNNEPLAADDSAECMNEPLPIVDGIEESLWSPCLDYELDTMPGAYFSNSMNFSEWFNDEAFEGGMEYLFEGCSSITEGGNSMDNSGVTEYNLFEECNMLEKDISDFLDKDISDFLDKDISISDRERISPQANNISCPQKMISVCN

SEQ ID NO: 16094 - protein, 219 aa, Oryza sativa
  Clone ID: TF_OSC401719j.C1.p17.fg
MDTEDTSSASSSSVSPPSSPGGGHHHRLPPKRRAGRKKFRETRHPVYRGVRARAGGSRWVCEVREPQAQARIWLGTYPTPEMAARAHDVAAIALRGERGAELNFPDSPSTLPRARTASPEDIRLAAAQAAELYRRPPPPLALPEDPQEGTSGGGATATSGRPAAVFVDEDAIFDMPGLIDDMARGMMLTPPAIGRSLDDWAAIDDDDDHYHMDYKLWMD

SEQ ID NO: 16095 - protein, 197 aa, Oryza sativa
  Clone ID: TF_OSC101807j.C1.p6.fg
MEKKYKGVRRRKWGKWVSEIRLPNSRDRIWLGSYDSPEKAARAFDAAFVTLRGHGAAGADLNFPDSPPSCDARSSDPRQVQAAALSHANRAHVTPQQAAAALMSPPSLSPPPGFATGSEVVAPAVRADGSIDWRPVMAHPPPLYSPPGWGGGHAYDFLQPPPPSPPLPSCDDDMVDVVDESSASLWSFDTRDSYFRY

SEQ ID NO: 16096 - protein, 622 aa, Oryza sativa
  Clone ID: TF_OSC404117j.C1.p14.fg
MASADNWLGFSLSGQGNPQHHQNGSPSAAGDAAIDISGSGDFYGLPTPDAHHIGMAGEDAPYGVMDAFNRGTHETQDWAMRGLDYGGGSSDLSMLVGSSGGGRRTVAGDGVGEAPKLENFLDGNSFSDVHGQAAGGYLYSGSAVGGAGGYSNGGCGGGTIELSMIKTWLRSNQSQQQPSPPQHADQGMSTDASASSYACSDVLVGSCGGGGAGGTASSHGQGLALSMSTGSVAAAGGGGAVVAAESSSSENKRVDSPGGAVDGAVPRKSIDTFGQRTSIYRGIDGQEDMKLICGIIAVGEKAKVARGDRMSNYEKELEEMKHMTRQEYIAHLRRNSSGFSRGASKYRGVTRHHQHGRWQARIGRVAGNKDIYLGTFSTEEEAAEAYDIAAIKFRGLNAVTNFDMSRYDVKSILDSSTLPVGGAARRLKEAEVAAAAAGGGVIVSHLADGGVGGYYYGCGPTIAFGGGGQQPAPLAVHYPSYGQASGWCKPEQDAVIAAGHCATDLQHLHLGSGGAAATHNFFQQPASSSAVYGNGGGGGGNAFMMPMGAVVAAADHGGQSSAYGGGDESGRLVVGYDGVVDPYAAMRSAYELSQGSSSSSVSVAKAANGYPDNWSSPFNGMG

SEQ ID NO: 16097 - protein, 342 aa, Oryza sativa
  Clone ID: TF_OSC401545j.C1.p27.fg
MVEVIVEKKARRIVRGRWHVEASNEAAAAAPAVAAPAPRVVRVLCRDHDATDSSGDDDGEDDAPRRARLLVHEIHVARQPVAMSPAAASSSQRRRVGPMKRTESAVDATMDATAAAPERKFRGVRKRPWGKYGAEIRVSQQSARVWLGTFDTAEEAARVYDHAALRLRGPSATTNFPMTPAAPSPPPSRATYAGAASGYDESSDESQLVGSPVSVLRPMPARATAKKEAKEEDDSAPDILGISAGDGLISPFTCDVLNFPPPDEDMFGGGISFGEPTPPPMVFDDDCMARLGHAPNDDEHPVTSSSFLDGDLGDLPSWTEVDGFFSDVGGDDLFAAEPFPAL

SEQ ID NO: 16098 - protein, 192 aa, Oryza sativa
  unsure (1)..(192): unsure at all Xaa locations
  Clone ID: TF_OSC401249j.C1.p62.gp
MVGGEVMCEAAAPRYRGVRKRPWGRFAAEIRDPAKRARVWLGTYDSAEAAARAYDVAARNLRGPLARTNFPLXLLPPAPVAPLPPPREGGGGGAAGGRPXACSASSTVESSSGPRGPRPAATAAAVPRRRVPRPAPPAPDAGCHSDCASSASVVDDADDASTVRSRVAAFDLNLPPPLDRDHVDLCTDLRLX

SEQ ID NO: 16099 - protein, 190 aa, Oryza sativa
  Clone ID: TF_OSC401249j.C1.p42.fg
MVGGEVMCEAAAPRYRGVRKRPWGRFAAEIRDPAKRARVWLGTYDSAEAAARAYDVAARNLRGPLARTNFPLVSSLPLPSPHYHLPGKAAAAAPPVAGPACSASSTVESSSGPRGPRPAATAAAVPRRRVPRPAPPAPDAGCHSDCASSASVVDDADDASTVRSRVAAFDLNLPPPLDRDHVDLCTDLRL

SEQ ID NO: 16100 - protein, 243 aa, Oryza sativa
  Clone ID: TF_OSC401517j.C1.p1.fg
MDHIGISGGGEGGVVSPAQPSSPERRYKGVRLRKWGRWVSEIRMPNSRERIWLGSYESAEKAARAFDAAAVCLRGSRGAGSLNFPESPPPDVRRRFPGAALTVEQIQAEAARHANRPFPANTAAAGGSSSSYSISQRQEAAAPARSTSNDDTAMSSVPSTDGGAADYDGGDDVIDWSFMDTLPAMSSSAASTNADLVPAMDDFMYGFLHTMPPSPCEDGGEDVMIDGNCNMDQTFFSVDLWRF

SEQ ID NO: 16101 - protein, 529 aa, Oryza sativa
  Clone ID: TF_OSC410095j.C1.p16.fg
MDMNSGWLGFSLSSSSARGYGDGCGEGNGGGDGDGSCSSPVAASPLVAMPLHSDGSVHYDAPDWRHAEAKDPKLEDFMSVSYSNKSSSNLYGSSSSSSCGHADQIKYHHVHDVQAFSTPYFYGHGGSGVGIDINMNAPPAGCTGVLPDHRPPPPQQDHIFLPPHGQYFLGPPNPMAPAPMYNAGGGGGGVVDGSMSISGIKSWLRQAMYVPERSAAALSLSVPAAPPSEAPLPPAAMPVVRKPAQTFGQRTSQFRGVTRHRWTGRYEAHLWDNTCRKEGQTRKGRQGGYDKEEKAARAYDLAALKYWGPTTHINFPLSTYEKELEEMKHMTRQEFIAHLRRHHQHGRWQARIGRVAGNKDLYLGTFSTQEEAAEAYDIAAIKFRGLNAVTNFDISKYDVKRICSSTHLIGGDLACRRSPTRMLPPDAPAGAAGVDVVVAPGDHQQISAGGGGASDNSDTASDGHRGAHLLHGLQYAHAMKFEAGESSGGGGGDGATTNWMAAAAAAARPVAGIPTTVHHQLPVFALWND

SEQ ID NO: 16102 - protein, 192 aa, Oryza sativa
  unsure (1)..(192): unsure at all Xaa locations
  Clone ID: TF_OSC900276j.C1.p5.gp
MVGGEVMCEAAAPRYRGVRKRPWGRFAAEIRDPXERARVWLGTYDSAEAAARXYDVAARNLRGPLARTNFPLXLLPPAPVAPLPPPREGGGGGAAGGRPXACSASSTVESSSGPRGPRPAATAAAVPRRRVPRPAPPAPDAGCHSDCASSASVVDDADDASTVRSRVAAFDLNLPPPLDRDHVDLCTDLRLX

SEQ ID NO: 16103 - protein, 1040 aa, Oryza sativa
  Clone ID: TF_OSC414535j.C1.p7.gm
MEDNRSKDTATKYRGVRRRPWGKFAAEIRDPERGGARVWLGTFDTAEEAARAYDRAAYAQRGAAAVLNFPAAAAAGRGGGAGGAASGSSSSSSAQRGRGDKIEFEYLDDKVLDDLLDDEKYRASAQRGTRREGRRGCRRWGGQEPRPRRWRRLPLPARSHGPRVDCPFRCLTTGLRLGLLRPLRALSSVSRSSTRNCAPPRCLLKPWRLTAHPIRFASSATVELPRFHPLYSITAASFYDDGGLKTSEAKEMPLYVLGDRLVEVYMHMTNAKELWDALNTKFGATDASNDLYIMEQFHDYRMADNRSVVEQAHEIQIMANANVVHKAQNKCKGKYKAQQTTNFKKQKKKNNKPNQDERTCFVCGQPGHLARKCPQRKGMKAPAGQTSKSANVTIGNTGDGSGYGNLPTVARGSTVLMGNGSHASAHGVGTVDLKFTSGKIVQLKNVQHVPSIDRNLVSGSCLTRDGFKLVFESNKVVVSKHGYFIGKGYGEAPRRSKRQRMAKSFGDDFIVYLVDDTPKSISEAYASPDADYWKKAVRSEMDSIITNGTWEVTERPYGCKPVGCKWVFKKKLRPDASHGLLVHQMDVKTAFLNGELDEKIYMDQPDAFVVEGFAVNEVDKCVYYRYGGGEGVIPCLYVDDILIFGTNLRVINENFLERTHLCELDCWSQSMKILDYSILLAGVHRRSGEQVSGTSAFDVLHREKAAIMFLESASRDCSLFIRDGSSSSPFACCALSSTPATASSSCRVTGLSATSRLSARRPLARALDSTPPAANCRDLNSAPLRRCPAPSRLAAPAASAATTVPSPSRAARPQLQHSASPRRRRRCHCRPRRPLPSSAPAPRVLSSGLPAVRAELPTSRRATVPSPPLLSPDNDIVSLFRKHEAKKIATSSSSSNGFIGDEAPVPEEEPPQAPTIDDEAPVPEVNAPHYPIYDVNRLESDPGLRLPISSYPANDQDSVRRAYILKGPWQKSSLRACQLATPQVASLLASSLPAPPPLAGLCRFHLRRASALARWPASARDSRICGTRGKGEKEKEDWSR

SEQ ID NO: 16104 - protein, 189 aa, Oryza sativa
  Clone ID: TF_OSC1014j.C1.p1.fg
MAKRSSPDPASSSPSASSSPSSPSSSSSEDSSSPMSMPCKRRARPRTDKSTGKAKRPKKESKEVVDPSSNGGGGGGGGKRSSIYRGVTRHRWTGRFEAHLWDKNCSTSLQNKKKGRQGAYDSEEAAARAYDLAALKYWGPETVLNFPLEEYEKERSEMEGVSREEYLASLRRRSSGFSRGVSKYRGVAR

SEQ ID NO: 16105 - protein, 243 aa, Oryza sativa
  Clone ID: TF_OSC414122j.C1.p5.fg
MAAIDLYKYQLSSSSSSSSSDQELMKALEPFIRSASPTSTSTSTPLFYSSSSISTTTTTPFSYSSPLPQESYYLPASSSYAAIVPPPTTTTNTTTSFSELPPLPPSSSSFASPANAAAVGLAHLGPEQIQQIQVQFLMQQQLQQRGMAASASASAAASYLGPRAQPMKQAGAAAAAAAGGKMYRGVRQRHWGKWVAEIRLPKNRTRLWLGTFDTAEDAALAYDKEALRLRGDYVLLTSALFAL

SEQ ID NO: 16106 - protein, 395 aa, Oryza sativa
  Clone ID: TF_OSC900238j.C1.p1.fg
MEPNYSDYHPNSVPFDAYYEHGHGHLDDHGHGHHHLIPAHPEPSYSYGNWSFLHADATATSSSESSSASASSGAAHIVGASGPSASFVRQLHFGGEYYDDDAADISALMEAASISCWTTNGGAGASTSQTTGLEGVEVMRRAAAPAPDNGSSDKEEAARPLIGVRKRPWGKYAAEIRDSTRNGARVWLGTFNTPEQAALAYDQAALSVRGPGAVLNYPLHRVRESLRTLELGAAAAASESPVLTLKRRHRIRKRSTTKKALAGKEADEAPATTSSEGKKKRQVNTTSHSHDGAWRRHLLSSGRLSMEGSTAAGGHGGLAGGRGEAAGSNVRAADDDEDGEAAAGSSVHVANDDDDGSEAAAVSSMHAADNDDEAVAGSGVRMTTTTAARRRSGAG

SEQ ID NO: 16107 - protein, 509 aa, Oryza sativa
  Clone ID: TF_OSC400090j.C1.p33.fg
MELDLNNVAEGVVEKHETAARSDSGTSESSVLNGEASGAAIAPAEEGSSSTPPSPPPPPAAVLEFSILRSSASASGENDADDDEEEEATPSPPPHHQHQQLLVTRELFPSAAPSPQHWAELGFLRPDPPRPHPDIRILAHAPPPAPPPPPPQPQPQAAKKSRRGPRSRSSQYRGVTFYRRTGRWESHIWDCGKQVYLGNFIEHIIFLLSIQRDIAMNNLTNTFIFSQTITGGFDTAHAAARAYDRAAIKFRGVEADINFNLSDYEEDMRQMKSLSKEEFVHVLRRQSTGFSRGSSKYRGVTLHKCGRWEARMGQFLGKKAYDKAAIKCNGREAVTNFEPSTYDGELPTDAAAQGADVDLNLRISQPAASQQSPKRDSGSLGLQIHHGSFEAPSELASRPHRFPLLTEHPPIWTAQPHPLFPNNEDASRSSDQKRKPSEGVAVPSWAWKQFGASYQVASRANTRDGNCARLPVYPRVKTLLGLGLFSILYPWVSYWFKSYARWVNGHGYG

SEQ ID NO: 16108 - protein, 344 aa, Oryza sativa
  Clone ID: TF_OSC415507j.C1.p9.fg
MDFSGDIDDLISLQLLHDQLLGVEADACLPVAVHHDGVAAFAEHQQGFHPAAFLPQQPMTMTPAGYVDMANDQYLGAHAAAGEAEAVYRAAAAEPVMIRFGGEVSPVSDPRRPPLTISLPPTSHAWAAAEAVHPAALLQAQTAAAAADPNDFRKYRGVRQRPWGKFAAEIRDPKKRGSRVWLGTYDTAIEAARAYDRAAFRMRGAKAILNFPNEVGSRGADFLAPPPPPPPPTTSTHGKRKRHETAAADPDVEVIGESSKSVKTETYTSPASSSLASTTTSTVTSSSTSPSPSSEAAACGGGGGELFVPPMPSSWSWDQLEGFFGILSPLSPHPQMGFPEVAVN

SEQ ID NO: 16109 - protein, 426 aa, Oryza sativa
  Clone ID: TF_OSC401001j.C1.p62.fg
MVSMRKKKKAFAVAAATTLLSPPRSSSSSSSTASSCIVPPRTESGKKKSKHRKRAKDGTGGDDDDAAVAAAPRKGSSIYKGVARHRGSGKYEAHLWDKQGWNPNQTRKRGRQGAYDTEEAAARTYDLAALKIWGSDHVLNFPIDTYRKELERMQRMTREEYLATLRRKSSGFSRGVSKYRGVAKHHHNGRWEARIGRAVGKKYLYLGTFDTQEEAATAYDLAAIQLRGRSAVTNFDASCYTYTDHLPPPPPPQPPSVCKTEPELEPPQPAAPPGSESLLRPKMEPCDDWEPPAICPSLRDADDADHAIAEILPALCMDRADFEARYPARRARDAAADGWSTSSDDVAAASVDDDVLRSLPDDVGFVDDVESLFLDAPGPAAAAAAAAMPDDVERAVQRAPSAASRRANAAAVSYAISSLASGRWWY

SEQ ID NO: 16110 - protein, 273 aa, Oryza sativa
  Clone ID: TF_OSC413093j.C1.p2.fg
MDASLRTLPPAIFPGEVRSAVSSLLLSPGGSALDTVFSHLPPPVTIPPLGSSVYYRQSELLRHFAASQAAQAQSATAAASSSSAAAAGLDDGAPRKLYRGVRQRQWGKWVAEIRLPQNRVRVWLGTYDSPETAAHAYDRAAFKLRGEYARLNFPGVMDGRDCPDNLRQLRDAVDAKIQAIRVRMARKRARARRQREESKKSQRAEDAKAATPSRPVASERAASETTTTTTTTSSSYGSPDGVLSMSAASVDGDCPLERMPSFDPELIWEMLNF

SEQ ID NO: 16111 - protein, 233 aa, Oryza sativa
  Clone ID: TF_OSC407922j.C1.p8.fg
MQGEYHRSSSEDSAASAAAAAAAAAAAMAPLAAAAAAVAAKEEQAAAAAVLPLQQQQPRRQYRGVRMRKWGKWVAEIREPHKRTRIWLGSYATPVAAARAYDTAVFYLRGRSARLNFPEEISSLASLSEGGGASEPREPDGGTLSAASIRKKAIEVGSRVDALQTGMMVAPTTHHRERQKHHHHHHHHHPHLQPHGEEQHHHHEQKHQRTAWSGRAKNPDLNQAPSPENSDAE

SEQ ID NO: 16112 - protein, 232 aa, Oryza sativa
  Clone ID: TF_OSC900281j.C1.p6.fg
MQGEYHRSSSEDSAASAAAAAAAAAAAMAPLAAAAAAVAAKEEQAAAAAVLPLQQQQPRRQYRGVRMRKWGKWVAEIREPHKRTRIWLGSYATPVAAARAYDTAVFYLRGRSARLNFPEEISSLASLSEGGGASEPREPDGGTLSAASIRKKAIEVGSRVDALQTGMMVAPTTHHRERQKHHHHHHHHPHLQPHGEEQHHHHEQKHQRTAWSGRAKNPDLNQAPSPENSDAE

SEQ ID NO: 16113 - protein, 330 aa, Oryza sativa
  Clone ID: TF_OSC900393j.C1.p17.fg
HRWTGRYEAHLWDNSCRREGQSRKGRQGGYDKEEKAARAYDLAALKYWGPTTTTNFPVANYETELEEMKSMTRQEFIASLRRKSSGFSRGASIYRGVTRHHQHGRWQARIGRVAGNKDLYLGTFSTQEEAAEAYDIAAIKFRGLNAVTNFDMSRYDVDSILNSDLPVGGGAATRASKFPSDPSLPLPSPAMPPSEKDYWSLLALHYHHHQQQQQQQQFPASAFDTYGCSSGVNVDFTMGTSSHSGSNSNSSSSSAIWGTAAGAAMGRQQNGGSSNKQSNSYSGNNIPYAAAAAMTSGSALYGGSTGSNGTWVASNTSTAPHFYNYLFGME

SEQ ID NO: 16114 - protein, 1742 aa, Oryza sativa
  Clone ID: TF_OSC900383j.C1.p18.fg
MDRQWMYADRRSKEFIDGVHYFLRVAEANRQRGFICCPCNKCKNQKEYSASRTIHFHLFESGFIPSYNCWTSHGEQGVEMEEDEVEDDNIPDFAQYVGFEGNQTGEEEIAADGNDVADDLGQMLQDAREDCESEKEAHKLDKMLEDHRTSLYPGCEQGHKKLDTTLELLQWKAKNGVSDKAFGDLLKLVKNILPGGNKLPETTYEAKKIVCPLGLEVHKIHACPNDCILYRGEEYENLEACPVCKALRYKIRRDDPGEVDGQLTKKRIPAKVMWYFPIIPRLRRFFRNKGNARMLRWHAEERQQDGMLRHPADGSQWRNIDRKFKEFGKDARNIRFGLSTDGMNPFGEMSSGHSTWPITMCIYNLPPWLCMKRKYIMMPIIIQGPKQPGNDIDVYLRPLVEDLKLLWRKEGVPVWDEDKQEEFNLRALLFVTINDWPALSNLSGQSNKGYKACTHCMDETESTYLKHCRKVVYMGHRRFLAANHPVRKKGKHFEHKADHQFRNSENVNENENDRTNESENENDRTKTSENEGTNVNENKRTNVNENERTNMNELGNMADRDEEQILYDTIAEGSSQYWNEEEGNEDPNQYLNEEGNVERDAEGNQQGHVERDVEGNQEEEASGSQPSVGQKRARGQRGAAKKLEGRHIITEVEEDGRPSAPAEAAKNYVRHSGWVVRDNVPVSTVYWRRIRARGDHESFVPDSEKEMLWTTMLETFTLPAGTEDKVKRWTLKKMAEQFQSFKGDLYQKYILKGQTPNFDTFPKLRDHWDEFVAYKTGEQGQAMMERNKENAAKKMYHHHLGSGGYSVAMPNWEQMEASLIERGIEPATANWPERSKFWYYAHGGTLNPADGSLVFGDQMREAARRLTDAVEASSQGTFRPDRDRDELTLALQTPEHPGRTRGKGVIPWKIGFKEDIYTYRSRMRSKRDTEAKIADLEFRVSSYELNMQEEVARKVDERMAAHRSHDPQPTIPPAMVSPLGNRSSCASMGQVGSQSMDAMQTQDESTRPVDDITQRTPCELHIPFKNLSIKVASGMAIPTDPSGTYHCRPIPAGYSKVEVELVEGAYEDLELDYPGGDGETHLRDTCHAIILRRRRYIILPGRQAASRALSPPAPPSPPQDPAPSPPHAPPAPSPAQAPASTPPQDPAPTPPRAPTPTPPQAPLPAPSKSRAPPAPPPAHTRATKKAKVDAAKNKDPGYDCTQEELDAYVASEIKRQFKPRSPEKKIPIDPSVRNFFRGMSASVKEAIKLSDYERTLKKASSGKSKPVPQLGEQPNQEIEPLVTGKEMTIEQFITDTGLTTDQLLGVAPIEKAEVKYMYELGKPLVKPELLQSLPTQMYKFHQLYMEMSATGREMIGVRIRDTDFLQGDDILWINFRGIYELYQLDALDVSIMSCWILMEIQRARRRRVFDTGFIDPRKVNVAMLDQYPQETEDNLVHLLKAQHYKTFILLPYNTEFHWVLLLIDLEACTVNVYDSMDKKESTFDKVFELIDSFKLHVVRGKWRERLRRKFKFPCAKQKQGTNLCGYYVCEYCHCLADQIITTRELDFIRMRDNLTTHKEFIAAVQEQLMGFINEEILDPKGGGKTRGEMNKDDEVIGTFDTAVEAALAYDATARWLYGSKAVTNFPTTTGDGDDGLPVAEPAVVVVAAPAFAGEEMDKQVAPAAATAAETVAADPGAGELGPVVLCHELEATNGWQYEAYGYGYSMGLELLENYAYAGDVQPLGLGGSTSNAAAANDCLWMF

SEQ ID NO: 16115 - protein, 261 aa, Oryza sativa
  Clone ID: TF_OSC900408j.C1.p17.fg
MADLTEHPSPTAPPQVQTAGLPAAASPGPASPHSPSEQGDKTAPGAATASTMTTASSGEPSPRSSGKHAFYRGIRCRSGKWVSEIREPRKARRIWLGTYPTAEMAAAAYDVAARALRGADAVLNFPGATASRPVPASASPADIRAAAAAAAAAAAHLERPHGPTGTAYPATAAAEHHQQQQQQQYGSGSPAADDVSGYPPMEGGIGNDDFMDEEAIFELPQLLRNMAAGMMMSPPRLSPTTSDVSPEPSEAGESLWSYRDP

SEQ ID NO: 16116 - protein, 402 aa, Oryza sativa
  Clone ID: TF_OSC423200j.C1.p1.fg
MAFHLQPHSLTQAKLAIDRSSSMPPSMATARVASPSTDRKRKASSEDDIDAAAAAAALTSPLAPARGRKRFVGVRQRPSGRWVAEIKDTIQKIRVWLGTFDTAEEAARAYDEAACLLRGANTRTNFWPRPSPPPAAVAPPETTTTPALPSKVTNLLLLRLKARNQQVVDAGAAAPQEAALLQLQQQTPASCQEVFVRSHGEEYGFHVDDFLSDACSNEQYSGDSSLGLDDDDGEVEDEEEEELDFQFMDVAPGASSAAAEAGLGGEGALCSPFEMVAAELGGAVDVAAHDAMRQMDYERKISASLYALTGVSECLRIRAAAGATAAARDHLTGLREACRKKQKFAAAAAAPPQQQEPSPPPQQPETPASSGGGMSETASGGGGDGDVLMWSSLDLAPICHMA

SEQ ID NO: 16117 - protein, 205 aa, Oryza sativa
  Clone ID: TF_OSC401241j.C1.p1.fg
MVQPKKKFRGVRQRHWGSWVSEIRHPLLKRRVWLGTFETAEEAARAYDEAAVLMSGRNAKTNFPVQRNSTGDLATAADQDARSNGGSRNSSAGNLSQILSAKLRKCCKAPSPSLTCLRLDPEKSHIGVWQKRAGARADSNWVMTVELNKEVEPTEPAAQPTSTATASQVTMDDEEKIALQMIEELLSRSSPASPSHGEGEGSFVI

SEQ ID NO: 16118 - protein, 303 aa, Oryza sativa
  Clone ID: TF_OSC415507j.C1.p6.fg
MLLNPASREVAALDSIRHHLLEEEEETPATAPAPTRRPVYCRSSSFGSLVADQWSESLPFRPNDAEDMVVYGALRDAFSSGWLPDGSFAAVKPESQDSYDGSSIGSFLASSSSEAGTPGEVTSTEATVTPGIREGEGEAVAVASRGKHYRGVRQRPWGKFAAEIRDPAKNGARVWLGTFDSAEEAAVAYDRAAYRMRGSRALLNFPLRIGSEIAAAAAAAAAGNKRPYPDPASSGSSSPSSSSSSSSSSSSGSPKRRKRGEAAAASMAMALVPPPPPPAQAPVQLALPAQPWFAAGPIQQLVS

SEQ ID NO: 16119 - protein, 304 aa, Oryza sativa
  unsure (1)..(304): unsure at all Xaa locations
  Clone ID: TF_OSC415507j.C1.p7.gp
MLLNPASREVAALDSIRHHLLEEEEETPATAPAPTRRPVYCRSSSFGSLVADQWSESLPFRPNDAEDMVVYGALRDAFSSGWLPDGSFAAVKPESQDSYDGSSIGSFLASSSSEAGTPGEVTSTEATVTPGIREGEGEAVAVASRGKHYRGVRQRPWGKFAAEIRDPAKNGARVWLGTFDSAEEAAVAYDRAAYRMRGSRALLNFPLRIGSEIAAAAAAAAAGNKRPYPDPASSGSSSPSSSSSSSSSSSSGSPKRRKRGEAAAASMAMALVPPPPPPAQAPVQLALPAQPWFAAGPIQQLVSX

SEQ ID NO: 16120 - protein, 217 aa, Oryza sativa
  Clone ID: TF_OSC900404j.C1.p1.fg
MAALFEAAETAAIVAALTRVIADGGRGGGGGVCVPPPAPSLVVPPRAGTGGGRRVDVAREEEMVGVVSAGDHAGGANVAEAAAAVVVAAPATARRYRGVRRRPWGKWAAEIRDPRKAARVWLGTFRTAEDAARAYDAAALRFRGRRAKLNFPEEVSRPWQGHDVDHMSCSPPSISNARFLGSWTFGPPQPPSRSVAAAATTLLGGSHGGNGAENGRE

SEQ ID NO: 16121 - protein, 266 aa, Oryza sativa
  Clone ID: TF_OSC413120j.C1.p7.fg
MAAARQDSCKTKLDERGGSHQAPSSARWISSEQEHSIIVAALRYVVSGCTTPPPEIVTVACGEACALCGIDGCLGCDFFGAEAAGNEEAVMATDYAAAAAAAAVAGGSGGKRVRRRRKKNVYRGVRHRPWGKWAAEIRDPRRAVRKWLGTFDTAEEAARAYDRAALEFRGARAKLNFPCSEPLPMPSQRNGNGGDAVTAATTTAEQMTPTLSPCSADAEETTTPVDWQMGADEAGSNQLWDGLQDLMKLDEADTWFPPFSGAASSF

SEQ ID NO: 16122 - protein, 268 aa, Oryza sativa
  Clone ID: TF_OSC404645j.C1.p13.fg
MVTALAHVIRAAPDLHLPHHPSSSASAAAHPQQASSFYPTAAAAASSPSDQLAAAAAAEEQGRRRHYRGVRQRPWGKWAAEIRDPKKAARVWLGTFDTAEDAAIAYDEAALRFKGTKAKLNFPERVQGRTDLGFLVTRGIPPAATHGGGYYPSSSPAAGACPPPRQQQTVVPYPDLMRYAQLLQGGVGGSYMPFGGAATMSSSTVSSSSAPQILDFSTQQLIRAGPPSPMPSSGSGSATAAASSTTSASSPGAWPYGGSERKKKDSSS

SEQ ID NO: 16123 - protein, 236 aa, Oryza sativa
  Clone ID: TF_OSC401008j.C1.p5.fg
MEKNTTAMGQLMSSSATTAATATGPASPKRPAGRTKFQETRHPVFRGVRRRGRAGRWVCEVRVPGSRGDRLWVGTFDTAEEAARAHDAAMLALCGASASLNFADSAWLLHVPRAPVASGHDQLPDVQRAASEAVAEFQRRGSTAATATATSGDAASTAPPSSSPVLSPNDDNASSASTPAVAAALDHGDMFGGMRTDLYFASLAQGLLIEPPPPPTTAEGFCDDEGCGGAEMELWS

SEQ ID NO: 16124 - protein, 210 aa, Oryza sativa
  unsure (1)..(210): unsure at all Xaa locations
  Clone ID: TF_OSC400832j.C1.p8.np
LYXLRWTMTILGPTIFRYFSSGGRCTRFRGVQKRPWGRYMAVICDPVKKARVWLETYDSAEEDTXAYDAARAYDVAARALGPKAKTNFTLSLPHAQPQLHHHQHHHHHLTHPTPLPSLARPATTSLSSTIESFGTRPRPVLLPRLSPSILDGDCHNDCGLSASMVDEDCTDATASLSCQLTFQFDLNLPPIGAIWLDRGGWRLHITARRL

SEQ ID NO: 16125 - protein, 362 aa, Oryza sativa
  Clone ID: TF_OSC400736j.C1.p6.fg
MCGGAILSDLIPPPRRVTAGDLWLEKTKKQQQQKKKNKGARRLPLRQEEEDDFEADFEEFEVDSGEWEVESDADEAKPLAAPRSGFAKGGLKNTTVAGADGPAARSAKRKRKNQFRGIRQRPWGKWAAEIRDPRKGVRVWLGTFNSPEEAARAYDAEARRIRGKKAKVNFPDGAPVASQRSHAEPSSMNMPAFSIEEKPAVMSAGNKTMYNTNAYAYPAVEYTLQEPFVQIQNVSFVPAMNAIEDTFVNLSSDQGSNSFGCSDFSQENDIKTPDITSMLAPTMTGVDDSAFLQNNASDAMVPPVMGNASIDLADLEPYMKFLIDGGSDESIDTLLSSDGSQDVASSMDLWSFDDMPVSAEFY

SEQ ID NO: 16126 - protein, 237 aa, Oryza sativa
  Clone ID: TF_OSC401539j.C1.p112.fg
MSLSLGFSAGAGVGADRLAAAPALQAAGALPPRVDVSLSLARAANGQPSSYLPLNENDSLDMVLFDVLREASAVAALSSSSSSSPELGARTTAPVVAGHPAGRKGGGGGGGGRGAAARGGAAGGRHYRGVRRRPWGKYAAEIRDPTRHGARLWLGTFGTAEEAAAAYDRAAFRMRGAKALLNFPPAVAGDGARRGAAAAAKQVGMSDVVPRACHVVCYSVLSAHIFYDIFRGVIPIP

SEQ ID NO: 16127 - protein, 100 aa, Oryza sativa
  Clone ID: TF_OSC6566j.C1.p6.np
QIEGEIKSRTERDHGEVDLSSPEEAMSRAECGGGEEEERCRYRGVRRRRWGKWVSEIRVPGPGRLWLGSYATPEAAAVAHDTAVYFLRGQGNYLNFGFLC

SEQ ID NO: 16128 - protein, 490 aa, Oryza sativa
  Clone ID: TF_OSC410566j.C1.p16.fg
MSPPTNGAISLAFPPMGPLPADALIYPFDGLSYDDFVLPVAAAPQHPLPVAVADPAPLLLLPPPSSCTCNGASSGMGAVAPRTLALGATTDGSVMTPTSWGSDGGGGGSSSARAVRSPSPVLPLVQGTGQRTSCYRGVTRHRWTGRYEAHLWDNTCRREGQKRKGRQVTTPVELFLLSVLVDWHLATNFCTLLDTLAELHSAVVPFFFLRKDYQWFHDSDTMTCCFFAFSGYDIEDKAARAYDLAALKYWGANATTNFPKESYVKEIEEMQKMSKQELVASLRRKSSGFSRGASIYRGVTRHHQHGRWQARIGRVAGNKDLYLGTFATEEEAAEAYDVAALKFRGANAVTNFEPSRYNLEAISQSDLPISVSGRRHNSSSNSNNPAPEAGGQITLMSSPPISQQSSSAPPYLIHNLLQFQPCGPPYAPPPPPPPPPPPPQALPLPGSYNFAEPVGFYWPYGDGEEQKVQLNSNMVGMASGGFLHLANAAN

SEQ ID NO: 16129 - protein, 417 aa, Oryza sativa
  Clone ID: TF_OSC415455j.C1.p7.fg
MEDFLGGLGGGGGAVAAAPAAAPEDQLSCGELGSIAAGFLRRYPAPENAGGVTIAMATDAAAELADPARRTAETFGQRTSIYRGVTRHRWTGRYEAHLWDNSCRREGQSRKGRQGGYDKEEKAARAYDLAALKYWGPTTTTNFPVANYETELEEMKSMTRQEFIASLRRKSSGFSRGASIYRGVTRHHQHGRWQARIGRVAGNKDLYLGTFSTQEEAAEAYDIAAIKFRGLNAVTNFDMSRYDVDSILNSDLPVGGGAATRASKFPSDPSLPLPSPAMPPSEKDYWSLLALHYHHHQQQQQQQQFPASAFDTYGCSSGVNVDFTMGTSSHSGSNSNSSSSSAIWGTAAGAAMGRQQNGGSSNKQSNSYSGNNIPYAAAAAMTSGSALYGGSTGSNGTWVASNTSTAPHFYNYLFGME

SEQ ID NO: 16130 - protein, 358 aa, Oryza sativa
  Clone ID: TF_OSC417508j.C1.p10.gm
MELLAYKEGIALAIQWTLKPIVVESDCLEAAHAKVGVAAAEILVPRRPVITGKGMWHLQLFHLHDSRLDKVFIVVALIMFAYREITMVWLRVLSPPSWTALSPPVAAGSRVGGHLPVLSMDFYFFSSSAPAPEKKTRRQQQQQQQREQEGGGGGNEARYLGVRRRPWGRYAAEIRDPATKERHWLGTFDTAEEAAVAYDRAARTIRGAAARTNFAYPDLPPGSSLTPYLSPDLSTNDLHRHYYGAGAGADTQTAAALPAPAQPAHGGDAQEMAYGGGGGQNVGGVFDVVGGGGGAAWCDASELEFGGYDDAGASAAAAAVYFEEGYVHSPMFSPMPAADEVAADGFQLGGSSSSSYYY

SEQ ID NO: 16131 - protein, 225 aa, Oryza sativa
  unsure (1)..(225): unsure at all Xaa locations
  Clone ID: TF_OSC900102j.C1.p14.np
GTAGTTAVRPAGTRSSSFHGVTRHRWSGKYEAHLWDSSCRMEGRRRKGRQDYAGSYDTEEKAARSYDVAALKYWGQNTKLNFSSEYERELEDIRDMSREECVTYLRRRSSCFSRGASRSSCFSRGASIYRGVTRRRQKDGRWQARIGLVAGTRDIYLGTFKTEEEAATEEEAAEAYDIAAIEIRGKNAVTNFDRSNYMEKALLYGIFYXERSVPNKLKDYKNLVV

SEQ ID NO: 16132 - protein, 483 aa, Oryza sativa
  Clone ID: TF_OSC407922j.C1.p4.fg
MRSSSSKATPTTSPAFRVLCSPPSAKSPRPNKGEDGGGEAEASHRRGKGDAMWDLNDSPAAEAAPPPLSPSADDSGASSSSAAAVVEIPDDADDDSAAVVVVTRQFFPPAVPGGGGDPAPGNARAGWLRLAGAAPPVAATGPAASAAVSKKSRRGPRSRSSQYRGVTFYRRTGRWESHIWDCGKQVYLGGFDTAHAAARAYDRAAIKFRGVEADINFSLEDYEDDLKQMSNLTKEEFVHVLRRQSTGFPRGSSKYRGVTLHKCGRWEARMGQFLGKKYVYLGLFDTEEEAARAYDRAAIKCNGKDAVTNFDPSIYAGEFEPPAAATGDAAEHNLDLSLGSSAGSKRGNVDGGGDDEITGGGGGGAGSDQRVPMAFDLDWQTAAARSTKAKFLSNGDPGTAGGLSLTIGAGMAGHWPPQQQQGWGNAGGMSWPHPPHPPPPPTNAAAAATATAAAASSRFPPYIATQASTWLQKNGFHSLTRPT

SEQ ID NO: 16133 - protein, 471 aa, Oryza sativa
  Clone ID: TF_OSC900281j.C1.p2.fg
MESFSFHVFPHTAKSPRPNKGEDGGGEAEASHRRGKGDAMWDLNDSPAAEAAPPPLSPSADDSGASSSSAAAVVEIPDDADDDSAAVVVVTRQFFPPAVPGGGGDPAPGNARAGWLRLAGAAPPVAATGPAASAAVSKKSRRGPRSRSSQYRGVTFYRRTGRWESHIWDCGKQVYLGGFDTAHAAARAYDRAAIKFRGVEADINFSLEDYEDDLKQMSNLTKEEFVHVLRRQSTGFPRGSSKYRGVTLHKCGRWEARMGQFLGKKYVYLGLFDTEEEAARAYDRAAIKCNGKDAVTNFDPSIYAGEFEPPAAATGDAAEHNLDLSLGSSAGSKRDNVDGGGDDEITGGGGGGTGSDQRVPMAFDLDWQTAAARSTKAKFLSNGDPGTAGGLSLTIGAGMAGHWPPQQQQGWGNAGGMSWPLPPHPPPPPTNAAAAATATAAAASSRFPPYIATQASTWLQKNGFHSLTRPT

SEQ ID NO: 16134 - protein, 213 aa, Oryza sativa
  unsure (1)..(213): unsure at all Xaa locations
  Clone ID: TF_OSC100759j.C1.p1.np
IAMIYLHSPASFSCSNKPMANSSNRSAIQRVRRRGAKXSVRPYKGVRMRSWGSWVSEIRAPHQKRRIWLGSYATPEAAARAYDAALLCLKGSDAVLNFPSSASSRPSTSTGGARTRLSPRSIQRVAAAAAGHSTPPPPPSSSGGGDVLDSGGGDVLDHATTPSSSSSAAANVCSPPLEGDHELWTELDAFASKFMDLMAPAARRSRVGGARGG

SEQ ID NO: 16135 - protein, 284 aa, Oryza sativa
  Clone ID: TF_OSC401685j.C1.p143.fg
MERGEGRRGDCSVQLCGIIELPHWVRKKRTRRKSDGPDSIAETIKWWKEQNQKLQEENSSRKAPAKGSKKGCMAGKGGPENSNCAYRGVRQRTWGKWVAEIREPNRGRRLWLGSFPTALEAAHAYDEAARAMYGPTARVNFADNSTDANSGCTSAPSLMMSNGPATIPSDEKDELESPPFIVANGPAVLYQPDKKDVLERVVPEVQDVKTEGSNGLKRVCQERKNMEVCESEGIVLHKEVNISYDYFNVHEVVEMIIVELSADQKTEVHEEYQEGDDGFSLFSY

SEQ ID NO: 16136 - protein, 358 aa, Oryza sativa
  Clone ID: TF_OSC401827j.C1.p10.fg
MPMPAAAGEGPWPRRAADLGVAQSQRSPAGGKKSRRGPRSRSSQYRGVTFYRRTGRWESHIWDCGKQVYLGGFDTAHAAARAYDRAAIKFRGLDADINFNLNDYEDDLKQMRNWTKEEFVHILRRQSTGFARGSSKYRGVTLHKCGRWEARMGQLLGKKYIYLGLFDSEIEAARAYDRAAIRFNGREAVTNFDPSSYDGDVLPETDNEVVDGDIIDLNLRISQPNVHELKSDGTLTGFQLNCDSPEASSSVVTQPISPQWPVLPQGTSMSQHPHLYASPCPGFFVNLREVPMEKRPELGPQSFPTSWSWQMQGSPLPLLPTAASSGFSTGTVADAARSPSSRPHPFPGHHQFYFPPTA

SEQ ID NO: 16137 - protein, 216 aa, Oryza sativa
  Clone ID: TF_OSC900301j.C1.p3.fg
MAALFEAAETAAIVAALTRVIADGGRGGSGAGVPPPAPSLVVPPLAGTGGGRRVDVAREEEMVGVVSAGDHTGEASVAAAGVVVAAPATARRYRGVRRRPWGKWAAEIRDPRKAARVWLGTFRTTEDAARAYDAAVLRFRGRRAKLNFPEEASRPRRPWKGHDVDHMSCSPPSIANARFLGSWIFGPPPPSRSVAAATTTLLGGSHGSNGADNGRE

SEQ ID NO: 16138 - protein, 276 aa, Oryza sativa
  Clone ID: TF_OSC405795j.C1.p6.fg
MSPADSLAAGRSRRVGASMPRPKRVRVYFVDADATDTDSSGDERSRPRVREVIDIDVGAASPAPAPKHPRRLVPTATAALARRRAGMAASRRFRGVRRRPWGRFSAEIRDPSLQKRLWLGTFDTAEEAAAVYDDAALRIKGSHAVTNFPSDSDTPSAKAKQMKLHPRRHTTPDKTPSSSTAAAAKASVPDPTPAPPEEDRANDSSFNPFASPTSVLRYAAADEVTAPSFEHLLVELGDLSAPPPSTKAAEFDWLPWWEGEDFVTAGLTASNAVSVK

SEQ ID NO: 16139 - protein, 318 aa, Oryza sativa
  Clone ID: TF_OSC410095j.C1.p5.fg
MESYGRKRAWKKGPTRGKGGPQNAACEYRGVRQRTWGKWVAEIREPNKRTRLWLGSFATAEEAALAYDEAARRLYGPDAFLNLPHLRAASAAAAHQRLRWLPASAAAAAARGGAAAVPAYGLLNLNAQHNVHVIHQRLQELKNSSSSPTKPPPRTPTRANPPPPPLPTSSPCSTVTNSVGSAALPPPMSCFQALEQAMAATAAMESAPCDDDAAVVGFGADKPQLDLKEFLQQIGVLKADDDGATGKNGAVHGDDGELADAFGFGGSGEFDWDALAADMSDIAGGHGGALGANGGFQMDDLHEVEQFGGCMPIPIWDI

SEQ ID NO: 16140 - protein, 294 aa, Oryza sativa
  Clone ID: TF_OSC22414j.C1.p4.fg
MPPCAAGKRSSIYRGVTRHRWTGRYEAHLWDKSTWNQNQNKKGKQGAYDDEEAAARAYDLAALKYWGAGTQINFPAYVHYVFAYLGKDITLDGKFAGTFGLERKIDLTNYIRWWLPKKTRQSDTSKMEEVTDEIRAIESSMQRTEPYKFPSLGLHSNSKPSSVVLSACDILSQSDAFKSFSEKSTKLSEECTFSKEMDEGKTVTPVPATGHDTTAVNMNVNGLLVQRAPYTLPSVTAQMKNTWNPADPSADPLFWTNFILPASQPVTMATIATTTFAKNEVGDNILHVYGFPSS

SEQ ID NO: 16141 - protein, 28 aa, Oryza sativa
  Clone ID: TF_OSC24042j.C1.p1.np
DGGRGGGGGRKYRGVRRRPLGKWAAEIR

SEQ ID NO: 16142 - protein, 189 aa, Oryza sativa
  Clone ID: TF_OSC401180j.C1.p8.fg
MVPPAAHAPKNLGLRGVRRRLWGRWAAEIRVPRGHRAAARLWIGTFPSPAAAALAYDAALYCFHGGAPPGNRAFNFPHAPRLRIDDRRRHALTPGHVRAIAERYAHDVGSVLFRPLPPPPPPVAAAAVPVFAAPAPPMAPAPANHAADPYYCNEPDTTTDEDVMAAADRLLSMDIEEVAALIAIVQQGE

SEQ ID NO: 16143 - protein, 282 aa, Oryza sativa
  Clone ID: TF_OSC900397j.C1.p2.fg
MAMEGEVEGGGRRRVVRIIFRDEDATDSSSSEEEGEGEVVAARRVVVKRTRLRCQEVERRFTGVRRRPWGRWAAEIRDPKENGRRVWLGTFDTAEAAAAAYDDACLRLRGPGAALNLPSRRCVAPAPPPPPPPPPPTAEEKKLLLFPPPLPPRKKAMLFPLPLPPRKKPLLYPPPLPPKKKPLPPPSPPPQPPLPEKENTPLPPLLLPPKKKPLPPPSPTAAAKEEPIELEHAAPPPPFVPRPVWPLLASGGGGKRKKQSGCGGRIPALNTAAAAVEETGRA

SEQ ID NO: 16144 - protein, 111 aa, Oryza sativa
  Clone ID: TF_OSC6563j.C1.p1.gm
MSRAECGGGEEEERCRYRGVRRRRWGKWVSEIRVPGTRERLWLGSYATPEAAAVAHDTAQMMTLYHLNQSFHVSNYNDDYHPMRTVLLDAMQLPIGSVLVIQTCMHLHFHL

SEQ ID NO: 16145 - protein, 342 aa, Oryza sativa
  Clone ID: TF_OSC414138j.C1.p23.fg
MCGGSILGDLHLPVRRTVNAGDLWGDAGKGRDGGDGLKKRKGSSWDFDVDCDDDDDDDFEADFEEFEDDYGDDDDVGFGDDDQESDMNGLKLAGFSTTKLGLGGSRKRKTRYRGIRQRPWGKWAAEIRDPRKGVRVWLGTFGTAEEAAMAYDVEARRIRGKKAKVNFPDAAAAAPKRPRRSSAKHSPQQQKARSSSSSPASLNASDAVSKSNNNRVSSAGSSTDATAAAIAIDDGVKLELLSETDPSPPMAAAAAAWLDAFELNDLDGSRCKDNAFDHQIHKVEAAVADEFAFYDDPSYMQLGYQLDQGNSYENIDALFGGEAVNIGGLWSFDDMPMEFRAY

SEQ ID NO: 16146 - protein, 201 aa, Oryza sativa
  Clone ID: TF_OSC22139j.C1.p2.fg
MALSEPDLAAETEAIVSALTHVVAYGGGGPPPSEETAASRAARVWLGTFATAEDAARAYDAAALRFRGGRARLNFPEDAAAADERRATDAAAAAAAASSAPAALLESQPGDVADCLDYSRILAGAPERPTSSTVPDGFFGGGGNGRFLHSWSIGTSPSPSGSGSGGAGGGGGGGGGGAPVRPLFHGGNGWEQRGDSAYNGF

SEQ ID NO: 16147 - protein, 86 aa, Oryza sativa
  Clone ID: TF_OSC100668j.C1.p5.np
RRYRGVRRRPWGKWAAEIRDPRKAARVWLGTFRTAEDAARAYDAAALRFRGRRAKLNFPEEVRHCRRRTWRWRDVGRRCAALPAPS

SEQ ID NO: 16148 - protein, 312 aa, Oryza sativa
  Clone ID: TF_OSC101030j.C1.p20.fg
MCGGAILADFTPARVPRRLTAAELLPVTPTPPAAERRTTRKRKSDVDFEAEFELFEDDDDDDEFELSDDGDESLAVSFSSDVSSSSRPRRRVAAAAAGRRKASKKSKYRGVRRRPSGRFAAEIRDPKKGRRVWLGTYGSAEEAAMAYDREARRIRGKGARLNFPRDGDGSPRRSNDRPCWTIDLNLPAAAVSGDDDDAMAVDAADADAGSAGRAAAYADQEALSAAKCKIKQCPRDEQMASATPELMEEDASSSRNMVPLSMALQLQYAAMIAECDREMEEIAAVERDLERRRRQVFERRGHLVRQASLLLD

SEQ ID NO: 16149 - protein, 387 aa, Oryza sativa
  Clone ID: TF_OSC400468j.C1.p6.gm
MGPQCSGPGGSFARTGRSPTEEAISEDREFQSLLVSGVLICSWCKIIEGNLMRALGEAPSPQMQKIAPPPFHPGLPPAPANFSSAGVHGFHYMGPAQLSPAQIQRVQAQLHMQRQAQSGLGPRAQPMKPASAAAPAAAAARAQKLYRGVRQRHWGKWVAEIRLPRNRTRLWLGTFDTAEEAALTYDQAAYRLRGDAARLNFPDNAASRGPLDAAVDAKLQAICDTIAASKNASSRSRGGAGRAMPINAPLVAAASSSSGSDHSGGGDDGGSETSSSSAAASPLAEMEQLDFSEVPWDEAEGFALTKYPSFRRLLAGVVFVSGVSDVYLVFGNSGLNFIQKNSGLGKTEATPTLEVEPRREEAAPALEAMPRREEVTPAPEAEAEAEA

SEQ ID NO: 16150 - protein, 396 aa, Oryza sativa
  Clone ID: TF_OSC900362j.C1.p6.fg
MCGGAIISGFIPPSAAAAAAAAVAKKQQGRRVTADVLWPGMLRKGKAAAAEEDFEADFREFERGMSDDEAEGGGGEEEEDDDDVVVVVPPPAAARFVVRAAAKAAPPTADGMLTTKLVQHDGPTARSAKHKRKNQYRGIRQRPWGKWAAEIRDPSKGVRVWLGTYNTAEEAARAYDAEARKIRGKKAKVNFPDEPAVAQKLSLKQNAAKQEKLAPPLKTCGDDAFFQLNSSDNDLFAMLAKVPAKPAEPVDLMPPVKPLASTETFEMNMLSDTSSNSFGSSDFGWEDDTLTPDYTSVFVPNAAMPAYGEPAYLTGGAPKRMRNNYGIAVPQGNGMPNLAQNMPTFDPEMKYLPLPYVESSSDESMDNLLQNDATQDGASNEGIWSLDELLMAAGAY

SEQ ID NO: 16151 - protein, 266 aa, Oryza sativa
  Clone ID: TF_OSC407938j.C1.p7.fg
MELQFQKPTQGQSQQQQCHYQVPTVTVAKNKAKTKCSSSKFVGVRQRPSGRWVAEIKDTTQKIRMWLGTFETAEEAARAYDEAACLLRGSNTRTNFATQAAPDSPLASRIRTILTHKKLKKSMPQPTITFSTAVYHHARSTVPAAATSTSTSGVSPSRSNSSSLNFATNLSNFAMSGGEELQLASSQQQYDQSWALNTSLLPIGDGCDMSGSNACPVASDQDKMKAEKQGSHGMNGIQEQETFDMGNDLCDSLWDLPPICQLSCKY

SEQ ID NO: 16152 - protein, 278 aa, Oryza sativa
  Clone ID: TF_OSC401961j.C1.p15.gm
MAGRAATWGRGVGARRGAEKAAARTVSAAVAVVGLAAGGRGRPDSHAGMYIGYTADAAASSSSSSSSSSSSSSEMLRFDTGWPDETPAPSSVAGRRRSAGGDHRQGRGQTEAAAAFIGVRRRPWGRFAAEIRDSTRNGARVWIGTFDSAEAAAMAYDQAALSARGAAAALNFPVERVRESLHALSLGAAGGSPVLALKRRHSKRKRRKKAELLAAAAATAATANATPQTRRISKSTELTTATTDEQKRFVVELEDLGAEYLEELLWLSEINGGSDPAD

SEQ ID NO: 16153 - protein, 282 aa, Oryza sativa
  Clone ID: TF_OSC413563j.C1.p9.fg
MAIGAAPASNQPHDTSNILENVWASIMTSSSSPAVSSSVAVSSSAVTGQEENSAILQRLPSLGRWISMGAEEWDELLLSGAALASESSGELQLVAASPGDHNQVVGGGGGANYRTTATAAARRSYRGVRRRPWGKFAAEIRDTRRRGARVWLGTFATADEAALAYDMAALRMRGHRAHLNFPLATVQKHLERDLAGGRSSSDQTSTRARRRRRPRANTTTDAAARSVVFSGVQTATNCDHMVSFASEKDQVSMQECSKSDAGVIDFEEIGGEYWDYLFPPLV

SEQ ID NO: 16154 - protein, 120 aa, Oryza sativa
  Clone ID: TF_OSC18525j.C1.p1.gm
DSGRERRDCVWLGTFTSEAEAGHAYDVAARQFRGHDTVTNFRPSSSLTRRLPSSSVSSPPGQRPRASSWQERPSRWRRRCEAHGGGGVSRRQELLEVVLSAAVAADGGRGIRSVHSGSRP

SEQ ID NO: 16155 - protein, 321 aa, Oryza sativa
  Clone ID: TF_OSC101030j.C1.p17.fg
MCGGAILANIIPATPPRPATAAHVWPGGDGEKRRKVGGGGCDDDFEAAFERFGREDSEMEEEEVEEVVVGKKAAVRRRRATPAAGRRARPSKYWGVRRRPWGKWAAEIRDPVEGVRVWLGTFATAEAAAHAYDAAARDLRGATAKLNFPSSSSSTAATPRPRKCRPTTATATPKATTPNVVVVVNLVDKEAEVSESSGASSSALPDFSWQGMSASSDDDAAAQQALLDAAGGAKKRPRSEPHVTSDDEVLPASFDSDNNTAAAGLLPLDDPFLFGDQFGDLNGGAFASLMDGLFAAGEANVAGESVGLWSFGDDFLNASYY

SEQ ID NO: 16156 - protein, 207 aa, Oryza sativa
  Clone ID: TF_OSC400325j.C1.p13.hg
MDDRRRGADATWPPFPADTFLCTHPRGPFGLVEQQHYSGSIHPIQPSKTLLSLAALPSSGTVYKAYLQVQHLIPAKQRHWGSWVAEIRHPLLKTRIWLGTYGTAEDAARAYDEAARLMSGPAARTNFPLSSSGGNARSCLSPTLRARLEKCCGAGSSAQAQQGAVAGQDNDDAAAAAAAMGVDDGDEYVEEMIQELTFYGSIEIVQP

SEQ ID NO: 16157 - protein, 277 aa, Oryza sativa
  Clone ID: TF_OSC412549j.C1.p4.fg
MEGVQHMEATSKCQTRHTHTEQQQQQQQHQTARHNERSLAFQAIKRFDMVKTAASNGAAAARRVGGGGDGKRAAYKGVRMRSWGSWVSEIRAPSQKTRIWLGSYSTAEAAARAYDAALLCLKGSAAADLNFPVRLPFDLPAAAMSPKSIQRVAAAAAANANANASSSCSAAVFAGVDDSGGASASEASTPACSSSDGAASPSPVSSPETVISDVDVDYSLLADIEAFFQSPKCMEYAMMDPCSAFFAPPPPPAMAMEEECGWEEEGDIALWSFSSLD

SEQ ID NO: 16158 - protein, 200 aa, Oryza sativa
  Clone ID: TF_OSC900026j.C1.p24.fg
MDRDESLGTQPLTGRRVRADTRHPVYRGIRLRSGKWVSEIREPGKSSRIWLGTYPTPEMAAAAYDAAALALRGADAALNFPGTATSRPAPASGSPDDIRAAAAAAAAMIGSGHRGNQRAADASTSRAATAAPEAAVAAGAGDQKRVVDEDDVFEMPRLLVSMAEGLMMSPPRLSPSTDGVGGVSPEDDEDEDGMSLWNHS

SEQ ID NO: 16159 - protein, 228 aa, Oryza sativa
  Clone ID: TF_OSC401367j.C1.p10.fg
MAASEQSSESSSTASTSSCGKKQQVAGKRKREDVGGGGEQAAAVAYRGVRMRAWGKWVSEIREPRKKSRIWLGTFPCPEMAARAHDVAALSIKGARAVLNFPDLAPALPRPASLAPRDVQAAAALAAVMHHHKHPSSSTSTSSPPAAPPPDEHHPRHEPQQPESSREDDQQQQPAAAAAAQMAVAELVFDELAPLWVEDVVEFGTSDHCWTAYDALDPIGFQPLLWEY

SEQ ID NO: 16160 - protein, 179 aa, Oryza sativa
  Clone ID: TF_OSC18350j.C1.p8.fg
MAARAHDAAALVVKGPAAVLNFPGAAASLPRPASAAPRDVQAAAARAAAMALDAVVPAPPSPPPPLMPPQASPSEAARAHALVAQVDQDDDDEELEEIVELPPIDELDAAAELVFASSGATTFHYDPAADQPWYDQPAACLQDGGGGGIAVHDALGFELDHVWADGVVASGFGALLWNM

SEQ ID NO: 16161 - protein, 318 aa, Oryza sativa
  Clone ID: TF_OSC403609j.C1.p3.fg
MCGGGKVASPPGPRLPRLAGAGGEEEEEEAAAGMLSRHGQAREMSVMVSALARVVAGGGGGEAEEWWPPAYGAAPLPPSTSPASHEHAAAMAAGQYAPATSSAMASPREQASSPSSGDAAGGGGGGGRKRYRGVRQRPWGKWAAEIRDPVKAARVWLGTFDTAEAAARAYDDAALRFRGCRAKLNFPEDAALLPPPPPPPAPAPAPPQSQGMVGVGEEYSEYARFLQGAGEPPHFLEQIMEDSPRPSTAAGASSSSSGQSSFPLFYSFAGHELGGNEANLARPPESGGAGGDGGRGSSPPVTWPGYGWGAPPPWDPSR

SEQ ID NO: 16162 - protein, 442 aa, Oryza sativa
  Clone ID: TF_OSC400189j.C1.p6.gm
MADQRRRFRGGGDWQASVDDVVDDGGELEAAAAAAARGSVLSGEYQAQEMSTMVSALTWVVAAGHDDHGGGQWSGLVDVPATTLAGGGGGDYGHGAQGSYYYYGAAPTSTPEFVAGGQQEQLSSDVPQGGASLGLAMDEHSPTYTVEASSSADQHGGGGGGRRYRGVRQRPWGKWAAEIRDPHKAARVWLGTFETAEAAARAYDEAALRFRGSRAKLNFPEDARLSSPPAGAGAGGATAAAQTVPVAYPASAVSDYLHGGAAAAMSSSLGPYSSIPTSSVTVASVPSSSSAASSSSGYGAPAEHGEAVQWTSWPDAQLQPAPARAEQTTGGATTPTTRAHAGFFVLFFFFFFFHPRDPPPPPRRSSWPPPPSTSTATSYHLEASGSFGKEAAPRAALPGLAMPEEKEYAPVPLGQAPEAVDPEDPVKSPPRPTSPANSTRKV

SEQ ID NO: 16163 - protein, 393 aa, Oryza sativa
  Clone ID: TF_OSC401948j.C1.p30.fg
MDSSSCLVDDTNSGGSSTDKLRALAAAAAETAPLERMGSGASAVVDAAEPGAEADSGSGGRVCGGGGGGAGGAGGKLPSSKFKGVVPQPNGRWGAQIYERHQRVWLGTFAGEDDAARAYDVAAQRFRGRDAVTNFRPLAEADPDAAAELRFLATRSKAEVVDMLRKHTYFDELAQSKRTFAASTPSAATTTASLSNGHLSSPRSPFAPAAARDHLFDKTVTPSDVGKLNRLVIPKQHAEKHFPLQLPSAGGESKGVLLNFEDAAGKVWRFRYSYWNSSQSYVLTKGWSRFVKEKGLHAGDVVGFYRSAASAGDDGKLFIDCKLVRSTGAALASPADQPAPSPVKAVRLFGVDLLTAPAPVEQMAGCKRARDLAATTPPQAAAFKKQCIELALV

SEQ ID NO: 16164 - protein, 172 aa, Oryza sativa
  Clone ID: TF_OSC1745j.C1.p11.fg
MARPQQRYRGVRQRHWGSWVSEIRHPLLKTRIWLGTFETAEDAARAYDEAARIMCGPRARTNFPLADATAAAAAAAASSSFLSAALVAKLHRFNLASVQATQRQREAAATAAAASSASATTPPLGNAAAADDDARTTTTYGAEWSGRFLEEQHVEQMIDELLDSNFSMEICY

SEQ ID NO: 16165 - protein, 128 aa, Oryza sativa
  Clone ID: TF_OSC407709j.C1.p1.gm
GVRRRRWGKWVSEIRVPGTRERLWLGSYATAEAAAVAHDAAVCLLRLGGGRRAAAGGGGGLNFPARALAAAAAASSYGGAGGLLSPRSVQRVASDAGMAADAQLVDLRRDHPPAAAAASSSGSGVAGD

SEQ ID NO: 16166 - protein, 260 aa, Oryza sativa
  Clone ID: TF_OSC900060j.C1.p3.fg
MSSRQPIGSGGGGAPPDWHDVEPQWQPVDDVVTVAAAAAYLAAPAGATLSSESADRRWRPVGPSAAAAAAALQAVEAQGAAAAERHYRGVRRRPWGKWAAEIRDPNKAARVWLGTFDTAEAAAAAYDDAALRFKGAKAKLNFPERVRGRTGQGGFLVSPAVPRPPPHGVPAPAPAVAPAPFPDLIQYARLLRSGEDAAAAAAVAGIAATAAPAAQILDFAAQRLVGVSPAMAPRPPSTLPTTTTAASSPSAWPHGGGHGS

SEQ ID NO: 16167 - protein, 233 aa, Oryza sativa
  Clone ID: TF_OSC400143j.C1.p10.fg
MGLTHLGPAQIQQIQAQFLAQQQQQRALAGAFLRPRGQPMKQSGSPPRAGPFAAVAGAAQSKLYRGVRQRHWGKWVAEIRLPKNRTRLWLGTFDTAEDAALAYDKAAFRLRGDLARLNFPTLRRGGAHLAGPLHASVDAKLTAICQSLATSSSKNTPAESAASAAEPESPKCSASTEGEDSVSAGSPPPPTPLSPPVPEMEKLDFTEAPWDESETFHLRKYPSWEIDWDSILS

SEQ ID NO: 16168 - protein, 339 aa, Oryza sativa
  unsure (1)..(339): unsure at all Xaa locations
  Clone ID: TF_OSC400143j.C1.p13.gp
MAAAIDMYKYNTSTHQIASSDQELMKALEPFIRSASSSSASSXATTTTLLLLPXSQDSYMPTPSYPTSSITTAAATTTSSFSQLPPLYSSQYHAASPAASATNGPMGLTHLGPAQIQQIQAQFLAQQQQQRALAGAFLRPRGQPMKQSGSPPRAGPFAAVAGAAQSKLYRGVRQRHWGKWVAEIRLPKNRTRLWLGTFDTAEDAALAYDKAAFRLRGDLARLNFPTLRRGGAHLAGPLHASVDAKLTAICQSLATSSSKNTPAESAASAAEPESPKCSASTEGEDSVSAGSPPPPTPLSPPVPEMEKLDFTEAPWDESETFHLRKYPSWEIDWDSILSX

SEQ ID NO: 16169 - protein, 299 aa, Oryza sativa
  Clone ID: TF_OSC401580j.C1.p12.fg
MSRSRTVRIFWDDPDLTDSSGEDEGCGGRRVGSMVRELPPAQMPVAQAGFAPAAAAAAAALPEQCSGGDGDMGRRVVGGGCTVGVGRRRLTKDGGPGAPSTKFRGVRRRPWGKFAAEIRDPWRGVRVWLGTFDTAEEAARVYDNAAIQLRGPSATTNFSASTNSAGAQDPVAVGYESGAESSPAVSSPTSVLRKVPSLCSLAEDKDDYEAGPCEPATAAGSNLTVLEEEELGEFVPFEDAPVYGGSSFWDFEPESGFLYAEPSSPETPWDAGATSSGEAQDYFQDLRDLFPLNPLPAIF

SEQ ID NO: 16170 - protein, 207 aa, Oryza sativa
  Clone ID: TF_OSC400601j.C1.p37.fg
MCGGAIIYDYIPARRRLCASDFWPDADDSDPHTPAPEKPPRAKRERKNQYRGIRQRPWGKWAAEIRDPVKGVRVWLGTYPTAEAAARAYDRAARRIRGAKAKVNFPNDFGAAPAPAAAAAKAVPRVAPTPAVLPPPKMEAVSEGAGACSSDEVKELSEELLAYENYMSFLGIPYMEGGAASAAGAEEAAAPAGLWTFEDYELPSLAL

SEQ ID NO: 16171 - protein, 315 aa, Oryza sativa
  Clone ID: TF_OSC400903j.C1.p14.np
MDNHAVAVQQRDTAPRPRARARASVSSIQGGGGPGWADHVALPRPPRCHPRRPPTPCRRPLAFASSSIHPHRAVLPSGAPPHVSAGARDTGGAAGLARPHHSFPQEKKPKPRHAGVASPRLALAPLRNSARMDRREATVFLPPPPPPQPTQPQQQPAAAAVRAPVGGRGGGGGRQYRGVRMRKWGKWVAEIREPNKRSRIWLGSYSTAVAAARAYDTAVFYLRGRSARLNFPDQLDGAGGGGAGAGGAEDHRELTAAVIRKKAAEVGARVDAQHSVVGAAAPVPLQPPQPPPPQRRRTKNPDLNREPTPDTSDDE

SEQ ID NO: 16172 - protein, 443 aa, Oryza sativa
  Clone ID: TF_OSC400466j.C1.p4.fg
MAKRSSPDPASSSPSASSSPSSPSSSSSEDSSSPMSMPCKRRARPRTEKSTGKAKRPKKESKEVADPSSNGGGGGKRSSIYRGVTRHRWTGRFEAHLWDKNCSTSLQNKKKGRQGAYDSEEAAARAYDLAALKYWGPETVLNFPLEEYEKERSEMEGVSREEYLASLRRRSSGFSRGVSKYRGVARHHHNGRWEARIGRVLGNKYLYLGTFDTQEEAAKAYDLAAIEYRGANAVTNFDISCYLDQPQLLAQLQQEPQLLAQLQQEPQVVPALHEEPQDDDRSENAVQELSSSEANTSSDNNEPLAADDSAECMNEPLPIVDGIEESLWSPCLDYELDTMPGAYFSNSMNFSEWFNDEAFEGGMEYLFEGCSSITEGGNSMDNSGMAEYNLFEECNMLEKDISDFLDKDISDFLDKDISISDRERISPQANNISCPQKMISVCN

SEQ ID NO: 16173 - protein, 334 aa, Oryza sativa
  Clone ID: TF_OSC101030j.C1.p19.fg
MCGGAILAEFIPAPSRAAAATKRVTASHLWPAGSKNAARGKSKSKRQQRSFADVDDFEAAFEQFDDDSDFDDAEEEDEGHFVFASKSRVVAGHDGRAAARAASKKKRGRHFRGIRQRPWGKWAAEIRDPHKGTRVWLGTFNTPEEAARAYDVEARRLRGSKAKVNFPATPAAARPRRGNTRATAVPPPATAPAAAPPRGLKREFSPPAETALPFFTNGFVDLTTAAAPPPAMMMTSSFTDSVATSESGGSPAKKARSDDVDSSEGSVGGGSDTLGFTDELEFDPFMLFQLPYSDGYESIDSLFAAGDANSANTDMNAGVNLWSFDDFPIDGALF

SEQ ID NO: 16174 - protein, 56 aa, Oryza sativa
  Clone ID: TF_OSC422801j.C1.p1.fg
MAGVGVGEGEVRYRGVRRRPSGRYAAEIRDPAKKTPIWLGTFDSAEAAARAYDAAA

SEQ ID NO: 16175 - protein, 322 aa, Oryza sativa
  Clone ID: TF_OSC401103j.C1.p24.fg
MSQTQSNSNQTHLPTPNPSRARAMCGGAILADLIPSPRSGGHTKKNKRRRISDDEDFEAAFEEFDAGDDDSDSDSESEEVDEYDVVVDDDDSEDGVVVLPPPPPPPPVIPHERHGARRFRGVRKRPWGKWAAEIRDPVRGVRVWLGTFPTAESAARAYDAAARRLRGAKAKPNFPSAPPPSAAAHRRKKRRAHAATRSPSSPPATSEVTAASASASSDVPAPAFASFVGEPGHGGAKSMPTTSHTSQPAPPATVASENVDDPEVFDPYDVHGGLASYFAGGAYESLESLFAHGGDSAAVDQAASDHWPAALWSFADDGSFCF

SEQ ID NO: 16176 - protein, 351 aa, Oryza sativa
  Clone ID: TF_OSC400259j.C1.p124.fg
MTVAGASELMSGYYQAQEMSTMVSALARVVAGGGGGGGDGDGDQWAWSSPSPSSSAAAAAARGVQERRREEQAMHELAGYACGGAPSPEFAGSEQSSDTQSASAATMDEHHSPVGGGGNAEGPDTPRRRYRGVRQRPWGKWAAEIRDPHKAARVWLGTFETAEAAARAYDEAALRFRGSRAKLNFPEDARLYPTAATTTTAAPPPAPVAAASPSAAIYPGASQSAEYLRYQMLLQGRLTTATPNQGTLLPFYGGGGGGGSMTNPYGGGGGGAMSGFLGSYYSFPTPSVSVATVPSSTSSAPGNYYSSHGGSHQSMSAAEEWNWENALVYPATAASWSESSYHHHPPPPHTQ

SEQ ID NO: 16177 - protein, 328 aa, Oryza sativa
  Clone ID: TF_OSC418226j.C1.p20.fg
MDFHHGDADDFALEFIREHLLGVDGATATATEPADLEVVEPAAAYPPMSWQEQRQQEQHGCHVELTDEHLESAPAAEAAAAFRTAPAQPAAEVMIKFGGEPSPVRPSSSLTISLPPSSFGSWASAAAPAAAAVEDFRKYRGVRQRPWGKFAAEIRDPKRRGSRVWLGTYDTPVEAARAYDRAAFRMRGAKAILNFPNEVGTRGAELWAPPPPPPAHSAAASTTNKRKRQPSEDPDDGVEVIGVVSKAVKTEAPTSNSSSLSSSLTSRDTTPATSSAGAEHAGAAAESSPATPSSWSWEQYWEALLGGLPPLSPLSPHPALGFPQLTVN

SEQ ID NO: 16178 - protein, 318 aa, Oryza sativa
  Clone ID: TF_OSC418226j.C1.p21.fg
MDFPGDAEDFALEFIREHLLGGDAPVLPPAAVPAAAAYLPTSTMFLPQQQRGYAGLTPQEYVVDSAPAADQAAFRDDQPDPAADVMIMFGGERFPAVKPSSSSSPSLTVTVPPSSFGSWAPAAVPAVAATAAAVEDFRKYRGVRQRPWGKFAAEIRDPKRRGSRVWLGTYDTPVEAARAYDRAAFRMRGAKAILNFPNEVGTRGAELWATPPPTNKRKRQPEDDTAAADDVEVIGVANKAVKTEAPTSAYSSSSLSSMSRDTTATTSSAGTSTGSSEPTSFPVVTPSSWSWDQYWDGLPPLSPLSPHPALGFPQLTVS

SEQ ID NO: 16179 - protein, 193 aa, Oryza sativa
  Clone ID: TF_OSC400698j.C1.p29.fg
MEQRAAAAAQQRQGRRQSAAACGIRRARAETRHPVYRGVRFRAGKWVSEIRELRKPSRIWLGTYATPEMAAAAYDAAALALRGRGAALNFPDAARSRPAPASASADDVRAAATAAAAAMAHQEEDDDSRRQLEDGGGGGGVVDEDDVLEMPRLMVSMAEGLMISPPPVMLGLQADGGGIMDEGGGVVRLWDHS

SEQ ID NO: 16180 - protein, 365 aa, Oryza sativa
  Clone ID: TF_OSC409411j.C1.p25.fg
MCGGAIIHHLKGHPEGSRRATEGLLWPEKKKPRWGGGGRRHFGGFVEEDDEDFEADFEEFEVDSGDSDLELGEEDDDDVVEIKPAAFKRALSRDNLSTITTAGFDGPAAKSAKRKRKNQFRGIRQRPWGKWAAEIRDPRKGVRVWLGTFNSAEEAARAYDAEARRIRGKKAKVNFPEAPTTAQKRRAGSTTAKAPKSSVEQKPTVKPAFNNLANANAFVYPSANFTSNKPFVQPDNMPFVPAMNSAAPIEDPIINSDQGSNSFGCSDFGWENDTKTPDITSIAPISTIAEVDESAFIKSSTNPMVPPVMENSAVDLPDLEPYMRFLLDDGAGDSIDSLLNLDGSQDVVSNMDLWSFDDMPVSDFY

SEQ ID NO: 16181 - protein, 241 aa, Oryza sativa
  Clone ID: TF_OSC400766j.C1.p8.np
MAPRNAAEAVAVAVAEGGGAGMEPRFRGVRKRPWGRYAAEIRDPARKARVWLGTFDTAEAAARAYDSAALHFRGPKAKTNFPVPSRTPTTTPRRRRCPRRRRWPSSARSSTVESSSRDTPAAAPVAAAAKAQVPASPSLDLPRDVGHGGRPAVPVPRPLGVRPGRRRRAENRGTNDHLRRRRLAGPVENESTRAQACAAGAELVGRRAAPRRVAQGRGRSRRGHAHTVTLAPTARQPRSQS

SEQ ID NO: 16182 - protein, 196 aa, Oryza sativa
  Clone ID: TF_OSC400555j.C1.p42.gm
MEDDKSKEGKSSSSYRGVRKRPWGKFAAEIRDPERGGARVWLGTFDTAEEAARAYDRAAFAMKGATAMLNFPGDHHHGAASRMTSTGSSSSSFTTPPPANSSAAAGRGGSDRTTDKVELECLDDKVLEDLLAETNYLRGERDAAGFATAHTQAGPVMGCVGAHAIRRRPLESPPPASDSPTPLRHATTAMLQTLPL

SEQ ID NO: 16183 - protein, 275 aa, Oryza sativa
  Clone ID: TF_OSC401067j.C1.p3.fg
MGGNQEYMIRFDGHIDDASPSSATAEPPPPLPPPRPFAGRAISAEREHSVIVATLLHVISGYRTPPPEVFPAARAEVCGVCGMDQCLGCEFFAGESGVVSFDGAEKVAAAAAAAAAGAAAGQRRRRKKKNKYRGVRQRPWGKWAAEIRDPRRAVRKWLGTFDTAEEAARAYDRAAVEFRGPRAKLNFPFPEQLSAHDDSNGDASAAAKSDTLSPSPRSADADEQVEHTRWPQGGGGGGGGGGGETGDQLWEGLQDLMQLDEGGLSWFPQSSDSWN

SEQ ID NO: 16184 - protein, 317 aa, Oryza sativa
  Clone ID: TF_OSC900147j.C1.p10.fg
MVPSSRKVRVFCSDPDATDSSDEDDQNKKERRFSREILIPMENSKASKPVKTLVQCGTKTVKDSEKEPTSKYRGVRRRAWGKWAAEIRDPVRKSRKWIGTFNSEEEAAAAYLAQSNQFHEELMALKIQSSVSEQEDLSSSVTISCVSSSQSCDQKIQAKPQEHKRVSVVVNRETVEQKFKAQPQAQKIKAQPEVQKRVSVKISHETEDEHLLNLPSTPKGKEISMGAVLGRIDEIPVSNCVGHIDEFPPDDFTRLADAFPVSDFIGMADVPLGDDYIGLADISHLPLPITDLKFDLNAELNWDGFDFASLEQELNCL

SEQ ID NO: 16185 - protein, 867 aa, Oryza sativa
  Clone ID: TF_OSC401715j.C1.p2.fg
MSSFILPFLLPPSLSSLPLFSSPFERLGGSGGRGPEWRRRPRHRLPCLQAGLPSRKLRQGLRRGRGMGARAQPTPSWAREPLFEKAVTPSDVGKLNRLLVPKQHAEKHFPLRRTSSDASATAAAATCNSARACSSTSRTARGSSQSYVLTKGWSRFVREKGLRAGDTIVFSGSAYGPDKLLFIDCKKNNTAAATGDEKPITSGEATRVVRLFGMDITGGGGDCRKRERAVEMGQEAFLMKRQCVCTTLHRPLSEGDITAMQVQQRKPKACAESAAAARGADQQQCDGRPLEAGEESLERSVPRKRKPAAAVAAAEKRWSSVAYVVLAAFVMATVFAVLGGRRPAVWIAATKALRRGSDDKSIPLARSAADKLLGGLLPEGFDEKSCRSRYESYLYRRNPGRRPSPHLVARLRMHEELQRRCGPNTESYNRAVQRLRDGGAAEADAHSPDDEQCKYVVSISYRGLGNRILAAASAFLYAVLTGRVLLVDPSNEMDELFCEPFPGTTWLLPRDFPLASSYANFSADTAESYGNMLKNKVLGTDGSTDGDMPAAQMPAFAYLHLDHDYGDGDKMFFCDDDQRLLSNIQWLVMRTDTYIVPSLFLVTTFQDELDALFPERDAVFHHLGRYLFHPANHVWGLVARYYRAYLATARQLVGVQVRVFDHRQAKSPHVVLEQITSCAWKEKLLPEVLDAVEDAAMPTPPTTPHGGSNNSKAVLITSLRPWFYERVKAMYWERATATGEDVSVHQPSHEEYQHFGEKSHDGKAWAEMYLLSLCDVLVTSGWSTFGYVAQGLGGLRPWVMYKPVNITAVPDPPCGRDVSMEPCFHSPPFYDCKTKRGVDTGTILPHVRHCDDVSWGLKLVDPNGSPN

SEQ ID NO: 16186 - protein, 85 aa, Oryza sativa
  Clone ID: TF_OSC900114j.C1.p17.gm
MRGGGGGGDSEVNCHGEHEAAADAGSSAVTAAAAASSSATAPWPHAKGSEGGGDQLGAVARVRRPVVSLPPVGSLVVYFPQGTAS

SEQ ID NO: 16187 - protein, 964 aa, Oryza sativa
  Clone ID: TF_OSC400188j.C1.p2.fg
MAGMAAAAAALVAAKRCMNAACGAPAPSPAGGEWRKGWPLRSGGFAVLCDKCGLAYEQLVFCDIFHQKESGWRDCSFCGKRLHCGCIASKNSFDLLDSGGVQCVTCIKNSAVQSVPSPVVPKLFSSQNNQRLFGKSDDLLSGRPLETSSLMVDARNDDLTIIAKNNLPFMVKNVEAGQSSNILRQKELENGARQIKWELPTLSIGDMGRIPFLTRSQSALESRRDENKDPTTESTTSESLSEACLNMSLGIASNGNKLEATSTVERPMLSPTTGFPEGRELTTALSPFQHAQRARHFLTRPPRVGEGAVFDPTKDMLPHLRVARPPAEGRGRNQLLPRYWPRITDQELQQISGEYPYYIYQLLGDIMHNSNSTIVPLFEKVLSASDAGRIGRLVLPKACAEAYFPPISQPEGRPLTIQDAKGKEWHFQFRFWPNNNSRMYVLEGVTPCIQSLQLQAGDTVTFSRIEPGGKLVMGFRKATNTVSLPDSQISAIANGSILGDTLFSSTNENLAIVSGYSGFLQSIKGAADLHTSSIYDHHVNSADGDVSWLKTDKFGSRPDEGSLQFLKRGRNIGSKSRRLSMDAEEAWELKLYWDEVQELLRPAPTAKPTVVMIEDYEIEEYDEPPVFAKRSIFTIRSTGEQDQWIQCDDCSKWRRLPLNVIVASKWTCADNTIDSKSCSCSAPEELTPKELHIVLQQYEDMRRRRNSFGFKQNIPEMDAVSLDAFATAAVYGDVGNQGSPSVATTTKHPRHRPGCTCIVCIQPPSGKGPKHNPACTCNVCMTVRRRFKTLMMRKKQRQSEREEAEASKKIAWMNRDEPEGSSLSRSPQTVDTTRDGDVTMFDKVDINKGHIDLNFHPTAVRDEERHGGQPRVSMVSLLEVANRPLENYMKQNGLTSLAGEQGSSSTCTGAATVPQPALVESEERTSNNDGGRVATAEQPESMAVDEAGDNQPDKAAGDSAAALA

SEQ ID NO: 16188 - protein, 375 aa, Oryza sativa
  Clone ID: TF_OSC100150j.C1.p1.fg
MEFTTSSRFSKEEEDEEQDEAGRREIPFMTATAEAAPAPTSSSSSPAHHAASASASASASGSSTPFRSDDGAGASGSGGGGGGGGEAEVVEKEHMFDKVVTPSDVGKLNRLVIPKQYAEKYFPLDAAANEKGLLLNFEDRAGKPWRFRYSYWNSSQSYVMTKGWSRFVKEKRLDAGDTVSFSRGIGDEAARHRLFIDWKRRADTRDPLRLPRGLPLPMPLTSHYAPWGIGGGGGFFVQPSPPATLYEHRLRQGLDFRASTPPPRWGGRAAGSPVVLDSVPVIESPTTAAKRVRLFGVNLDNPHAGGGGGAAAGESSNHGNALSLQTPAWMRRDPTLRLLELPPHHHHGAESSAASSPSSSSSSKRDAHSALDLDL

SEQ ID NO: 16189 - protein, 311 aa, Oryza sativa
  Clone ID: TF_OSC400240j.C1.p9.fg
MEFITPIVRPASAAAGGGEVQESGGRSLAAVEKEHMFDKVVTPSDVGKLNRLVIPKQHAEKYFPLDAASNEKGLLLSFEDRTGKPWRFRYSYWNSSQSYVMTKGWSRFVKEKRLDAGDTVSFGRGVGEAARGRLFIDWRRRPDVVAALQPPTHRFAHHLPSSIPFAPWAHHHGHGAAAAAAAAAGARFLLPPSSTPIYDHHRRHAHAVGYDAYAAATSRQVLFYRPLPPQQQHHPAVVLESVPVRMTAGHAEPPSAPSKRVRLFGVNLDCANSEQDHAGVVGKTAPPPLPSPPSSSSSSSGKARCSLNLDL

SEQ ID NO: 16190 - protein, 234 aa, Oryza sativa
  Clone ID: TF_OSC408625j.C1.p9.fg
MSSSTAASIGPPQPPPPPTSPEEEKCLNLELWHACSSPLVCLPSVGTRVVYFPQGHSEQVSWLSAMGCSLLSRGNHQRPWWIALPSSCWCFFSKTLAEREAFYYVVDNAAVMDFITVNTSGSILINMLKPEYRKFGEWGNRCIWFTTIQFSVISKDLASYISIQPVSGQTICVGLLWEYIIGHFLSSTALVSFICCSKTHGYIASAFYNAPQELKKDIELMIVMTRSYLRKKNK

SEQ ID NO: 16191 - protein, 317 aa, Oryza sativa
  Clone ID: TF_OSC100150j.C1.p1.np
FTTSSRFSKEEEDEEQDEAGRREGEAEVVEKEHMFDKVVTPSDVGKLNRLVIPKQYAEKYFPLDAAANEKGLLLNFEDRAGKPWRFRYSYWNSSQSYVMTKGWSRFVKEKRLDAGDTVSFSRGIGDEAARHRLFIDWKRRADTRDPLRLPRGLPLPMLTSHYAPWGIGGGGGFFVQPSPPATLYEHRLRQGLERFNPAAAIGDGVRAAGSPVVLDSVPVIESPTTAAKRVRLFGVNLDNPHAGGGGGAAAGESSNHGNLPPHHHHGAESSAASSPSSLPPHHHHGAESSAASSPSSSSSSKRDAHSALDSICSDLKR

SEQ ID NO: 16192 - protein, 762 aa, Oryza sativa
  Clone ID: TF_OSC101706j.C1.p7.fg
MAAAAAALADDGDGIVDRAMWLACAAPNSGRLPAVGSMVFYFVDGHAEQFCQFPAPLLEQLAVPGPRVFLCTVAAVRLRADALTNEAYADITLDPVADHDVPRLLPAPAPAAAAGGQQQQLRYFVKTLMSSDAEYRDRFAVPMDVAKDVFPPLVDAKAVQPLIVKDLQGSPMTFDYGRNGNRVTLAKVWKKFRDDMDFVDGDSVIFMRRRDDDELYVGVRRQRTLDKPLRTRRSRPPTPLPVAVQEVIAAAGRAAAGEQFTATYRSRQDGDEFVVPREVVEEGLRLRSRFTPEMEVEFVWALEDGAPPSVGPHGKITAIHDTTWMWRSVEIGWTGGSEMNKYANFWQVRLVGSDDFASAAPPPPLSPKRLKSSEQCPSRPPEPLPGRVFLCKVTAVRLDATRNELFATMSLIPVARDQAIQPQAPADPGPSSPQVQTTLVSFVKPLTCTDAVKNRYRFIVPKRETAMGVLPQLQLNEHVPLYIKDMHGKEWVINYTWKEYTHMLSSGWIKFANANRLVTGDNVVFMRSMDSGERYMGLRRTLKPEPVSVDEVIEAVWRAARLEPFEVTYLSRQDGDEFVVPCGIVHNALRAKFTPGMVVNFVWAVEEDRLPNVGPQGKVIAIENYATSIWRMIQVEWPSCAGMNRYVNFWQIREVLGESSFEASTCIVRSQDYSPAPQRNLVNALQLPDGTKQLQQNKKSVSSSSTFRLFGKKMTPGVPPRRDTSGLSGQVSLFSHYLPHDEDDGQVPTMRQRLETLFPDNI

SEQ ID NO: 16193 - protein, 407 aa, Oryza sativa
  Clone ID: TF_OSC101706j.C1.p6.fg
MAAAAAPLADDGDGIVDRDMWLACAAPNSGRLPAVGSVVFYFVDGHAAQFCQFPAPLLEQLAVPGPRVFLCTVAAVRLRADALTNEAYAEITLDPVADHDVPRLAPAPAPAPAAAAGGQQLRYFVKTLMISDFDFRIRFSAPMADAKGVFPPLVDAKAVQPLLVKDLHGSPMTFDYGRKGKRVTLAKVWKKFRDDMDFVDGDSVIFMRRRDDDDDDGELYVGVRRQRTLERPLRNTMRRYRPPTPPQAAVQEAVLAAAGHAAAGERFTVAYRSRKDGDEFVVPREAVEEGLRARLTSLAEVEFVWAVEDGAPPIVGPRGKVTAIATGQLWRNLEIVWDGNSEMDMSANFWQVRPVEEVDISPSTPPPKRLKNCEIDDTASTSVSVDNGDEQVPTMRQRLEALIPDNI

SEQ ID NO: 16194 - protein, 925 aa, Oryza sativa
  Clone ID: TF_OSC400219j.C1.p15.fg
MAAAATAAASPVEGLTGGGGGGGGGVDGLFVELWRACAGPLVTVPAVGERVFYLPQGHIEQVEASTNQVAEQQGAPLYNLPWKIPCKVMNVELKAEPDTDEVYAQLTLLPEKQQDGNGSGNGNVSKDKVEEEEVVPPAATERPRVHSFCKTLTASDTSTHGGFSVLRRHADECLPPLYSFFDRLIVAMPLTSLLDQDMSQHPPTQELVAKDLHGVEWRFRHIFRGQPRRHLLQSGWSVFVSAKRLVAGDAFIFLRGENGELRVGVRRAMRQQANIPSSVISSHSMHLGVLATAWHAVNTGTMFTVYYKPRTSPSEFVVPRDLYKESLKRNHSIGMRFKMTFEGEEAAEQRFTGTIVGVGDSDPSGWADSKWRSLKVRWDEAASVPRPDRVSPWQIEPANSPSPVNPLPAPRTKRARPNVLASSPDLSAVNKEVASKVMANSQQNGLPRAFHSQENMNLRSRFGDSNELNTSQKLTMWSSGSNQEKNNVSVQRELGSQSWMQMRRPDGSSEILSGFQPLKDTRNPLSSFPSQISGNRSNTWNTINVHYPDQNANHNMYPGTWSLMPPNTGFGVNQQNYLMTPDITLPQRSLNAKFGGNGAFTSLRAHGIDQRSSGWLGHIEPSSHIDDASSSLIKPQPLVIDHNVQKAKGSSCMLFGISLDSPAKPELLISPPSVAFDGKLQQDALEEDECSDPSKTVKPLDGAQHDSAREKHQSCPDGTKNIQSKQQNGSSRSCKKVHKQGIALGRSIDLTKFTCYDELIAELDQMFDFNGELNSSSKNWMVVYTDNEGDMMLVGDDPWNEFCNMVHKIFIYTREEVQKMNPGALNSRSFVVCKNRRRHIHGRKESFRGVVVVAGALYVSGKPRSTPFVDGACPGISCPLFVFDKFWVCFVEVLSYCMICPVVVKGAEAKLPRPVRLLACALPPS

SEQ ID NO: 16195 - protein, 412 aa, Oryza sativa
  Clone ID: TF_OSC1558j.C1.p4.gm
MTGIDLNTVEEDQEEAAEEVAANGSSPAPAKAGAVCLELWHACAGPVAPLPRKGGVVVYLPQGHLEHLGDAPAAAAAAAAVPPHVFCRVVDVTLLANAATDEVYAQLSLVPEKEEVARRADHGEGEDGDGMKQRFARMPHMFCKTLTASDTSTHGGFSVPRRAAEDCFPPLDYSQQRPSQELVAKDLHSTEWRFRHIYRGGGGCPDFAESAQFHKVLQGQELLGFKSHGDSKRSCKVKNYFVPTEELWLMRLWVVMGFINKIVLVHQQANSKMPRLEFGHGQLDKHENDRRVRFGPSEGIERREQRIPLQPYPTSGEVIDGQVTVEKSHSPGRHGKDGPDNKAVGTNSCKIFGISLTEKVPAREELDDGDANYSLQSLKQVPKSLGNSCATVHEQRPVVGRVIDISTMDMMI

SEQ ID NO: 16196 - protein, 1037 aa, Oryza sativa
  Clone ID: TF_OSC400924j.C1.p6.fg
MASSGGGGGGGEEGEGRGATKVNQELWYACAGPLVSLPPQGSLIVYFPQGHSEQADPDTDEVYARMTLQPVSNVTQCDKETLLASELALKQTRPQTEFFCKTLTASDTSTHGGFSVPRRAAERIFPRLDFSMQPPAQELQARDLHDNVWTFRHIYRGQPKRHLLTTGWSLFVSGKRLLAGDSVLFISDSMHIGILAAAAHAAANNSQFTIYYNPRASTSEFVIPFAKYQKAVYGNQLSLGMRFRMMFETEESGTRRYMGTITGISDLDPVRWKTSHWRNIQVAWDEAAPTERRTRVSLWEIEPIIAPFFIYPSPLFTAKRPRLPGMTDDETEMDGLLKRAMPWVGEEICKKDLNIQNSVVPGLNLAQWMNMQHSSSLPGTVVQPELLNSLSGKPVQNLAAADLSRQISFHPQFLQQNNIQFNTALVPQQNQQTEQLAKVIPTPNQLGSVIIPQKVVQDCNSEQRQHVVTQPVQGSQPNINIPQPQLVVQAQLQQPQVILQAQLQQPQVVVQAQLQQTQPSVQSHTVLQGGLQQIQLLQQQQPHVQHQQIPQQLHHQQQQTQQLQPVQQVQQSVQEHQQIKIQPVHVSMDASMNTQVADHQMKLQLLKALQPQQPLISEQQKMLLDLQQQVINSQSAPQQCVQQKVQSHQVQDLTGNVIPNSKSDIATSMGASSLHVAGGRQLLKTDDVPSTSTSPSTNSNPVLLQSIPSSSKNQSLTTAGKTSQSSVVLGPTIEQDTKPYQNVKQTVMIPKTTEQRPATGQDCINNNPQMDYLDTSSSATSVCLSQADGSLQQNFPPSSFHQHHLLKDTVPDSEFEVTDPRNNLLFGVNIDGQLGLPLNADLLANDIGTDKYMDQLPGNGISNFISSKDSQQELSSSMISHSFGVADMAFNSIDSAINDTPFLNRNSRSAAGPAHQRMRTYTKVHKRGAVGRSIDINRYSGYDELKHDVARMFGIEGQLGDQNRVGWKLVYEDHEKDVLLVGDDPWEDFVKCVRCIRILSPQEEMQMRLVGDFGDSFLPNQACSSSDGGHPWRITGD

SEQ ID NO: 16197 - protein, 515 aa, Oryza sativa
  Clone ID: TF_OSC900261j.C1.p1.fg
MSSSSAASIGPPQPPPPPAPPEEEKKCLNSELWHACAGPLVCLPTVGTRVVYFPQGHSEQVAASTNKEVEGHIPNYPNLPAQLICQLHDVTMHADVETDEVYAQMTLQPLNPVRRLGFLHDVCSAEVLMQEQNDAYLPAEMGIMSKQPTNYFCKTLTASDTSTHGGFSVPRRAAERVFPPLDFTQQPPAQELIARDIHDIEWKFRHIFRGQPKRHLLTTGWSVFVSAKRLVAGDSVLFIWNEKNQLLLGIRRASRPQTVMPSSVLSSDSMHIGLLAAAAHAAATNSRFTIFYNPRYMGTITEVSDADPVRWPSSYWRSVKVGWDESTAGERPPRVSLWEIEPLTTFPMYPSLFPLRVKHPWYSGVASLHDDSNALMWLRGVAGEGGFQSLNFQSPGIGSWGQQRLHPSLLSSDHDQYQAVVAAAAASQSGGYLKQQFLHLQQPMQSPQEHCNLNPLLQQQILQQASQQQIINPDAQNIQTMLSPSAIQQQLQQLQQMQQVQNDQKQKIQPDQSYQ

SEQ ID NO: 16198 - protein, 829 aa, Oryza sativa
  Clone ID: TF_OSC900260j.C1.p14.fg
MSSSSAASIGPPQPPPPPAPPEEEKKCLNSELWHACAGPLVCLPTVGTRVVYFPQGHSEQVAASTNKEVEGHIPNYPNLPAQLICQLHDVTMHADVETDEVYAQMTLQPLNPVRRLGFLHDVCSAEVLMQEQNDAYLPAEMGIMSKQPTNYFCKTLTASDTSTHGGFSVPRRAAERVFPPLDFTQQPPAQELIARDIHDIEWKFRHIFRGQPKRHLLTTGWSVFVSAKRLVAGDSVLFIWNEKNQLLLGIRRASRPQTVMPSSVLSSDSMHIGLLAAAAHAAATNSRFTIFYNPRYMGTITEVSDADPVRWPSSYWRSVKVGWDESTAGERPPRVSLWEIEPLTTFPMYPSLFPLRVKHPWYSGVASLHDDSNALMWLRGVAGEGGFQSLNFQSPGIGSWGQQRLHPSLLSSDHDQYQAVVAAAAASQSGGYLKQQFLHLQQPMQSPQEHCNLNPLLQQQILQQASQQQIINPDAQNIQTMLSPSAIQQQLQQLQQMQQVQNDQKQKIQPDQSYQVPTSAVLPSPTSLPSHLREKFGFSDPNANSSSFITSSSSDNMLDSSFLQGSSKAVDLSRFNQPVASEQQQQQAWKQKFMGSQSVSFGGSVLHNSPTSKDGSVENKIGRDVQNQSLFSPQVDSSSLLYNMVPNLTSNVSDGNLSTIPSGSTYLQNAMYGCLDDSSGLLQNTGENDPATRTFVKVYKSGSVGRSLDITRFSNYAELREELGQMFGIKGQLDDPDRSGWQLVFVDRENDVLLLGDDPWEFINIYMNVRNAKKSYIMKRREYNTLVSWFPQLIAYRGKTVLPSIICVGQSLHVDAQLPKTLRESKHQT

SEQ ID NO: 16199 - protein, 1093 aa, Oryza sativa
  Clone ID: TF_OSC401881j.C1.p3.fg
MASMKQQQTPASSAVTAAAAASSSATAAVAACEGERKAAAINSELWHACAGPLVSLPPVGSLVVYFPQGHSEQLLITVLVHYQSGWEHWAYWLPFSVALLVWSIDSLGRTNPAIIRAFLFRKMRKKVYKSNIILRNAFSMLLETAEYLLNLSFLFQVAASMQKDVDAHVPSYPNLPSKLICLLHGVNLHADPDTDEVYAQMTLQPVNTYGKEALQISELALKQARPQMEFFCKTLTASDTSTHGGFSVPRRAAEKIFPPLDFSMQPPAQELQARDIHDNVWTFRHIYRGQPKRHLLTTGWSLFVSGKRLFAGDSVIVVRASPTEFVIPFAKYQKALYSNQISLGMRFRMMFETEELGTRRYMGTITGISDLDPVGWDESAAGERRNRVSIWEIEPVAAPFFLCPQPFFGVKRPRQLDDESEMENLFKRAMPWLGEEVCIKDTQNQNSTAPGLSLVQWMNMNRQQSSSLANTAAQSEYLQALGNPAMQNLAADELARQLYVQNNLLQQNCIQFNSPKLPQQMQTMNDLSKAAIPLNQLGAIINPQDQKQDAVNHQRQQNSIQVIPLSQAQSNLVQAQVIVQNQMQQQKPSPTQNPQRINGQRLLLSHQQKDQNLQLQQQLLLQQKQQLQQQQQQQQQNQQQLNKSLGQLVNLASQQSKLFDEELQLQILQKLQQQSLMSQSTSTLSQPPLIQEQQKLITDMQKQLSNSHSLAQQQMMPQQEIKPSLQATPLLPTVQQEQQQKLLQKQVSLADVSGVAFQPISSTNVIPKTGGAMIISGATQSVVTEEMPSCSTSPSTANGNHFTQSTKNRHCINTERLPPSTAPMLIPTSIDAVTATPLMTKELPKPNNNVKQSVVNSKLPNVAPGPQNCINHALQTDNLETSSSATSLCPSRTDGLVHQGFPSSNFNQHQMFKDALPDVEMEGVDPSNSGLFGINNDNLLGFPIETEDLLINALDSVKYQNHISTDVENNYPMQKDALQEISTSMVSQSFGQSDMAFNSIDSAINDGAFLNKNSWPAAPLLQRMRTFTKVYKRGAVGRSIDIGRYSGYEELKHALARMFGIEGQLEDRQRIGWKLVYKDHEDDILLLGDDPWE

SEQ ID NO: 16200 - protein, 400 aa, Oryza sativa
  Clone ID: TF_OSC102151j.C1.p2.fg
MEFTTSSRFSKEEEDEEQDEAGRREIPFMTATAEAAPAPTSSSSSPAHHAASASASASASGSSTPFRSDDGAGASGSGGGGGGGGEAEVVEKEHMFDKVVTPSDVGKLNRLVIPKQYAEKYFPLDAAANEKGLLLNFEDRAGKPWRFRYSYWNSSQSYVMTKGWSRFVKEKRLDAGDTVSFSRGIGDEAARHRLFIDWKRRADTRDPLRLPRGLPLPMPLTSHYAPPSPPATLYEHRLRQGLDFRAFNPAAAMGRQVLLFGSARIPPQAPLLARAPSPLHHHYTLQPSGDGVRAAGSPVVLDSVPVIESPTTAAKRVRLFGVNLDNPHAGGGGGAAAGESSNHGNALSLQTPAWMRRDPTLRLLELPPHHHHGAESSAASSPSSSSSSKRDAHSALDLDL

SEQ ID NO: 16201 - protein, 679 aa, Oryza sativa
  Clone ID: TF_OSC100243j.C1.p9.fg
MSSQGDALPLVLVLFLFLFLFCFVCRELQEPTDPALLAEQIKMFQVPYKILCKVVNVELKAETETDEVFAQITLQPDPDQENLPTLPDPPLPEQPRPVVHSFCKILTPSDTSTHGGFSVLRRHANECLPPLDMSMATPTQELITKDLHGSEWRFKHIYRGQPRRHLLTTGWSTFVTSKKLISGDAFVYLRSETGEQRVGVRRLVQKQSTMPASVISSQSMHLGVLASASHAIKTNSIFLVYYRPRLSQSQYIVSVNKYLAASKVGFNVGMRFKMSFEGEDVPVKKFSGTIVGEGDLSLQWSGSEWKSLKVQWDEVTNVNGPERVSPWEIETCDGTAPAINVPLQSATKNKRPREPSETIDLQSLEPAQEFWLSGMPQQHEKTGIGSSEPNCISGHQVVWPGEHPGYGAVSSSVCQNPLVLESWLKDFNSSNKGVSPTLSEISQKIFQVTSNEARIATWPARSAYQAEEPTSKLSSNTAACGYRTEEVAPNASKVVEGKKEPAMFRLFGVDLMKCTSISTTTDDKSSVGAGEASAKGTGSHEDSGQLSAFSKVTKEHIAADESPQEIQSHQNYTARTRIKVQMHGNAVGRAVDLANLDGYEQLMNELEEMFNIKDLKQKWKVAFTDDEGDTMEVGDDPWLEFCQMVRKIVLYPIEDEKKIEPHPKLLSSANPEQDQKTGF

SEQ ID NO: 16202 - protein, 477 aa, Oryza sativa
  Clone ID: TF_OSC421067j.C1.p1.fg
HAEQCPAPLPDPLPSAHRFFLCTITAVDLSADTTTGEPYATISLLPLRHDAPAPAPAPAPAAAELAEAESQEFRYYAKQLTQSDANNGGGFSVPRLCADHIFPALNLDDDPPVQSLTMGDLQGDSWEFRHIYRGTPRRHLLTTGWSKFVNAKQLVAGDTVVFMWCGAPAPERKLLVGVRRAARYSGESACNARGRVQPQEVMEAVRLAAEQAAFRVTYYPRHGAGEFVVPRVEVDKGLTTPWRCGMQVRAQVMEAEDTRRLAWLNGTLTNLRHQQIWRTLEVEWDASAASSSMKNRFVNPWQVQPVDFPPLPMGLKISNNNISAPVCNGDSLLVPPILMHPQPQPPADIQGARHNNGHAYADIPSSSTPSMVRTQQLFPRDLQILVPHTDIVTPQNGSPPDNPVNTPLSASDGMKTIQLFGVTITSPVQGDTNGAFASAQVNQVPEGVDDETATEEASDTSLPDSLTNGHNQDGARL

SEQ ID NO: 16203 - protein, 347 aa, Oryza sativa
  Clone ID: TF_OSC900237j.C1.p1.fg
VRWDDSTDSSHQNRVSPWEIERVGGSVSVTHSLSSGSKRTKLHFPQGSLDTPFLNGNGHPDSMGTENFHRVLQGQEFRGSRSHGVVCSESPGVPNFQSPDNRRFSADMRGYMMPASGPPQRNTEFTYQPIGFSESLGFPEVLQGQEMSQVVPLFRGATFGARTQNDRVVSANSVHRSAAQSGLLASTLGHPISQFTLSSSKVSSPSSVLMFNQATAPNHETVSGTNNKGMHVSQFASQEMLSETVTWPGTQRQTPSEITSNQFALARIPAPPSGAESGLPKRDAGRSSCRLFGFSLTGNMLGEDGEGLDDGAIEAGCENPPVLELFGHSHSTPGALHALCAAAPLGM

SEQ ID NO: 16204 - protein, 729 aa, Oryza sativa
  Clone ID: TF_OSC400500j.C1.p18.fg
MVISRTLVVRGFDELWETIRPVLVSSDGPASMSKNGLLLVVSEEFWIGKVWWVSGDRIWGLEMKEVGEVEEVRCLDPQLWHACAGGMVQMPAPRSRVYYFAQGHAEHADGGGGAAAAAAELGPRALPPLVLCRVEGVQFLADRDSDEVYAKIRLAPVAPGEAEFREPDELCPLGAAGDAAEPSPEKPTSFAKTLTQSDANNGGGFSVPRYCAETIFPKLDYRADPPVQTVLAKDVHGVVWKFRHIYRGTPRRHLLTTGWSTFVNQKKLVAGDSIVFLRTRHGELCVGIRRAKRMACGGMECMSGWNAPGYGGGGFSAFLKEEESKLMKGHGGGGYMKGKGKVRMADVVEAASLASSGQPFEVAYYPRASTPDFVVKAASVQAAMRIQWCSGMRFKMAFETEDSSRISWFMGTISSVQVADPNRWPNSPWRLLQVTWDEPDLLQNVKCVSPWLVELVSSIPPIHLGPFSSPRKKLRVPPHPDFPFEGHLLNPIFHGNPLGPSNSPLCCYPDTAPAGIQGARHAQFGLPLTDHQLNKLHLGLLHSGSFNRLDAITPPSRISKGFVVSSAPAHDNISCLLSISTPQVAEKSDDRKTTPHIMLFGKAIFTEQQITSSGSTETLSPGVTGNSSPNGNAHKTGNASDGSGSSICIGFSSQGHEASDLGLEAGHCKVFMESEDVGRTIDLSVFGSYEELYGRLADMFGIEKEEIINHLHFRDAAGVVKHPGEVPFR

SEQ ID NO: 16205 - protein, 908 aa, Oryza sativa
  Clone ID: TF_OSC401589j.C1.p17.fg
MKLSPSAGGVSDQPPSPPEVAEEQKCLNSELWHACAGPLVSLPAVGSRVVYFPQGHSEQVAASTNKEMESQIPNYPNLPPQLICQLHNVTMHADAETDEVYAQMTLQPLSPQELKDPFLPAELGTASKQPTNYFCKTLTASDTSTHGGFSVPRRAAEKVFPPLDFTQQPPAQELMAKDLHGNEWKFRHIFRGQPKRHLLTTGWSVFVSAKRLVAGDSVLFIWNDSNQLLLGIRRANRPQTVMPSSVLSSDSMHIGLLAAAAHAASTNSRFTIFYNPRASPSEFVIPLAKYVKAVYHTRISVGMRFRMLFETEESSVRRYMGTITGISDLDPVRWMNSHWRSVKVGWDESTAGERQPRVSLWEIEPLTTFPMYPSPFPLRLKRPWPTGLPSLYGGKEDDLASSLMWLRDSQNTGFQSLNFGGLGMSPWMQPRLDSSLLGLQPDMYQTIAAAAALQNTTKQVSPAMLQFQQPQNIVGRSSLLSSQILQQAQPQFQQMYHQNINGNSIQGHSQPEYLQQPLQHCQSFNEQKPQLQPQQQQQESHQQQPQHQQMQQQKHLSNFQTVPNALSVFSQLSSTPQSTPSTLQTVSPFSQQHNFPDTNISCLSPSNVSSMHDTLRSFPSEAASDLPGVPRITPVPVSDPWSSKRVAVESTITSRPHDISSQIENFDLTPSSIPQNSTLAPLPGRECLVDQDGSSDPQNHFLFGVNIDSQSLLMQDGIPSLHNENSSSTIPYSTSNFLSPSQDDYPLSQTLTTPGCLDESGYVPCSDNADQVKRPHATFVKVYKSGTVGRLLDITRFSSYHELRSEVGRLFGLEGQLEDPLRSGWQLVFVDREDDVLLVGDDPWQEFVNSVSCIKILSPQEVQQMGKPGIELFSTSARRLGNSCDNYMSRQESRSLSTGIASVGSVEF

SEQ ID NO: 16206 - protein, 397 aa, Oryza sativa
  Clone ID: TF_OSC400860j.C1.p2.fg
MEQEQDEEEEEAEASPREIPFMTSAAAAATASSSSPTSVSPSATASAAASTSASGSPFRSSDGAGASGSGGGGGGEDVEVIEKEHMFDKVVTPSDVGKLNRLVIPKQHAEKYFPLDSAANEKGLLLSFEDRTGKLWRFRYSYWNSSQSYVMTKGWSRFVKEKRLDAGDTVSFCRGAAEATRDRLFIDWKRRADVRDPHRFQRLPLPMTSPYGPWGAARGRSSCRPATLFEHHRFRQGFDFRNINPAVPARQLVFFGSPGTGIHQHPPLPPPPSPPPPPHQLHITVHHPSPVVTAGLPMVVDSVPHVNNPAAASKRVRLFGVNLDNPHPDGGQSSSGHDANALSLRMPGWQRPAPLRSLELPPHMPAGAAGAESSAASSPSSSSSSKREAHSSLDLDL

SEQ ID NO: 16207 - protein, 843 aa, Oryza sativa
  Clone ID: TF_OSC401583j.C1.p40.fg
MAPPPPPQGSSTGDPLYDELWHACAGPLVTVPRVGDLVFYFPQGHIEQVEASMNQVADSQMRLYDLPSKLLCRVLNVELKAEQDTDEVYAQVMLMPEPEQNEMAVEKTTPTSGPVQARPPVRSFCKTLTASDTSTHGGFSVLRRHADECLPPLDMTQSPPTQELVAKDLHSMDWRFRHIFRGQPRRHLLQSGWSVFVSSKRLVAGDAFIFLRGENGELRVGVRRAMRQLSNVPSSVISSQSMHLGVLATAWHAINTKSMFTVYYKPRTSPSEFIIPYDQYMESVKNNYSVGMRFRMRFEGEEAPEQRFTGTIIGSENLDPVWPESSWRSLKVRWDEPSTIPRPDRVSPWKIEPASSPPVNPLPLSRVKRPRPNAPPASPESPILTKEAATKVDTDPAQAQRSQNSTVLQGQEQMTLRSNLTESNDSDVTAHKPMMWSPSPNAAKAHPLTFQQRPPMDNWMQLGRRETDFKDVRSGSQSFGDSPGFFMQNFDEAPNRLTSFKNQFQDQGSARHFSDPYYYVSPQPSLTVESSTQMHTDSKELHFWNGQSTVYGNSRDRPQNFRFEQNSSSWLNQSFARPEQPRVIRPHASIAPVELEKTEGSGFKIFGFKVDTTNAPNNHLSSPMAATHEPMLQTPSSLNQLQPVQTDCIPEVSVSTAGTATENEKSGQQAQQSSKDVQSKTQVASTRSCTKHMKFFLLVVDMLKFSFCKFLAKSQFYPLCGMVHKQGVALGRSVDLSKFSNYDELKAELDKMFEFDGELVSSNKNWQIVYTDNEGDMMLVGDDPWEEFCSIVRKIYIYTKEEVQKMNSKSNAPRKDDSSENEKGSVKRDDTRDGGSTPESCLY

SEQ ID NO: 16208 - protein, 899 aa, Oryza sativa
  Clone ID: TF_OSC417639j.C1.p11.fg
MKLSPPASADMPQALPENDGEQRCLNSELWHACAGPLVSLPVVRSRVVYFPQGHSEQVAASTNKEVDAQIPNYPNLPPQLICQLHNVTMHADAETDEVYAQMTLQPLSPEEQKEPFLPMELGAASKQPTNYFCKTLTASDTSTHGGFSVPRRAAEKVFPPLDFSQQPPAQELIARDLHDNEWKFRHIFRGQPKRHLLTTGWSVFVSAKRLVAGDSVIFIWNDNNQLLLGIRRANRQQTVMPSSVLSSDSMHIGLLAAAAHAAATNSRFTIFYNPRASPSEFVIPLAKYVKAVYHTRVSVGMRFRMLFETEESSVRRYMGTITSISDLDSVRWPNSHWRSVKVGWDESTTGDKQPRVSLWEIEPLTTFPMYPSAFPLRLKRPWASGLPMHGMFNGGGNDDFARYSSLMWLRDGNRGTQSLNFQGHGVSPWLQPRIDSPLLGLKPDTYQQMAAAALEEIRYGDPSKQHPATLQYQQTHNLNSGLNSLFASHVLGQVQFQPQQSPLQVVQQGHCQNTGDSGFLQGQLPRLQLHNTQQLLKEQELQQQQRQHVLQEQSSQEMQQQLPSSDHHVADVASESGSAPQAQSSLLSGSSFYNQNLLEGNSDPPLHLHNNFHNFSNQEASNLLILPRSSQLMASDGWPSKRLTLESAVHPEAPSMHPKIEKVNHQGISHFPGAFPPQSARGCSIVQDCRADAENRLLSSSFELQDGMTSIITDANRETDTMAIPLLRYSGADLTTENTLATSNCLGESGTFNPLNNISVNPSQGATFVKVYKSGSLGRSLDISRFSSYCELRSELERLFGLEGQLEDPVRSGWQLVFVDRENDILLVGDDPWQEFANSVWCIKILSPQEVQQLVRGGDGLLSSPGARMQQSNACDDYSASHNMQNIAGNIASVAPLDY

SEQ ID NO: 16209 - protein, 783 aa, Oryza sativa
  Clone ID: TF_OSC413089j.C1.p8.fg
MITFADLAEPAPGAERCVDRQLWLACAGGMCTVPPVGAAVYYFPQGHAEHALGLAAPELSAARVPALVPCRVASVRYMADPDTDEVFARIRLVPLRAAEDGDVEEDGAAAGEEHEKPASFAKTLTQSDANNGGGFSVPRYCAETIFPRLDYAADPPVQTVVAKDVHGVAWNFRHIYRGTPRRHLLTTGWSTFVNQKKLVAGDSIVFLRGDGGDLHVGIRRAKRGFCGGGGGAEEASLPGWDQYGGLMRGNASPCAAAKGRGKVRAEDLVEAARLANGGQPFEVVYYPRASTPEFCVRAAAVRAAMRVQWCPGMRFKMAFETEDSSRISWFMGTVASVQVADPIRWPQSPWRLLQVTWDEPDLLQNVKRVSPWLVELVSSMPAINLSSFSPPRKKPRILAYPEFPFEGQLLNPAFPPNPLAHGHHHYHHNHPSFFPFPDVSAPAGIQGARHAQFGPSLSDLHLTHLQSSLMYPGLRRPDHVGPTSIPPPRISTDLTMGSSPPARALSMGAKKPDDAKPPGLMLFGQRILTERQMSLSGTTSPAATGNSSLNWNTEKGASEGSGSGVIQNSPTDNTSSERLQWFRENSTVSELGLEPGQCKVFIESDTVGRNLDLSSLASFEQLYGRLSEMFCIDSAELRSRVLYRGATGEVRHAGDEPFSRDFNKKAQSAQVSYCSPVSFFIIINNDQLRVLVDSRVLRCKNPVTTHQRLECRGPLAQGTSACSMQTQTQRCAISDLSGGLTSRLQPPGEAIPLGSLALAASSLTHDDEICDLHRAAYPWLVES

SEQ ID NO: 16210 - protein, 917 aa, Oryza sativa
  Clone ID: TF_OSC414152j.C1.p3.fg
MRLSSSSGSVLPAQAASPEAVEEQKCLNSELWHACAGPLVSLPAVGSRVVYFPQGHSEQVAASTNKEMESQIPNYPNLPPQLICQLHNVTMHADAETDEVYAQMTLQPLSPQELKDPYLPAELGSANKQPTNYFCKTLTASDTSTHGGFSVPRRAAEKVFPPLDFTQQPPAQELIAKDLHGNEWKFRHIFRGQPKRHLLTTGWSVFVSAKRLVAGDSVLFIWNDNNQLLLGIRRANRPQTVMPSSVLSSDSMHIGLLAAAAHAASTNSRFTIFYNPRASPSEFVIPLSKYVKAVYHTRISVGMRFRMLFETEESSVRRYMGTITGISDLDAARWPNSHWRSVKVGWDESTAGERQPRVSLWEIEPLTTFPMYPSPFPLRLKRPWPTGLPSLHGGKDDDLTSSLMWLRDSANPGFQSLNFGGLGMNPWMQPRFDASLLGLQPDMYQTIAATAFQDPTKQVSPTILQFQQPQNIGGRANTLLPSQILQQVQPQFQQQQYLQNINETTIQGHAQSEFLQQQLQRCQSFTEQKPQLQTQQQQQESQQQQQQQSQCMQVPQHQQMQQQKNMTNYQSVPNALSPFSQLSSPSQSSPMTLQTVLPFSQPQSYPDTSMSSLSPSNTSTMHNALRPFSSEAPSHLSMPRPTAVPVPDPWSSKRVAVESLLPSRPQVTSQMEQLDSTAPSIPQSSALAPLPGRGCLVDQDGNSDPQNHLLFGVNIDSQSLLMQGGIPSLQGENDSTAIPYSTSNFLSPSQNDFPLDQTLSSADCLDESGYVPCSQNSDQVINRPPATFVKVYKSGTYGRSLDITRFSSYHELRRELGRLFGLEGQLENPLRSGWQLVFVDREDDVLLVGDDPWQEFVNSVSCIKILSPQEVQQMGKPFELLSSAPGKRLGSSCDDYVSRQESRSLSTGIASVGSVEF

SEQ ID NO: 16211 - protein, 756 aa, Oryza sativa
  Clone ID: TF_OSC404615j.C1.p10.fg
MAGSVVAAAAAAGGGTGSSCDALYRELWHACAGPLVTVPRQGELVYYFPQGHMEQLEASTDQQLDQHLPLFNLPSKILCKVVNVELRAETDSDEVYAQIMLQPEADQNELTSPKPEPHEPEKCNVHSFCKTLTASDTSTHGGFSVLRRHAEECLPPLDMTQNPPWQELVARDLHGNEWHFRHIFRGSPHHSLILGQPRRHLLTTGWSVFVSSKRLVAGDAFIFLRGENGELRVGVRRLMRQLNNMPSSVISSHSMHLGVLATASHAISTGTLFSVFYKPRTSQSEFVVSANKYLEAKNSKISVGMRFKMRFEGDEAPERRFSGTIIGVGSMSTSPWANSDWRSLKVQWDEPSVVPRPDRVSPWELEPLAVSNSQPSPQPPARNKRARPPASNSIAPELPPVFGLWKSSAESTQGFSFSGLQRTQELYPSSPNPIFSTSLNVGFSTKNEPSALSNKHFYWPMRETRANSYSASISKVPSEKKQEPSSAGCRLFGIEISSAVEATSPLAAVSGVGQDQPAASVDAESDQLSQPSHANKSDAPAASSEPSPHETQSRQVRSCTKVIMQGMAVGRAVDLTRLHGYDDLRCKLEEMFDIQGELSASLKKWKVVYTDDEDDMMLVGDDPWPLMRWTLTTLLQCLILLSRVLVNAALLILYIQRAVLFNGLCFQIHWINAGGFGGWKEGYSTKRASGVCREPVVDAIDVEGPQGIDMLAIALRKHSLNVAQGSNLEALPFITELIIEILVVQTQRKTYIEVLS

SEQ ID NO: 16212 - protein, 668 aa, Oryza sativa
  Clone ID: TF_OSC900189j.C1.p13.fg
MGIDLNTVEEEAEEGAAAAVCGELWHACAGPGVALPRRGSALVYLPQAHLAADGGGGEVPPAGAAAVPPHVACRVVGVELRADAATDEVYARLALVAEGEMLQRNFREGGGEDGAGEMEGCDAEKKPRMPHMFCKTLTASDTSTHGGFSVPRRAAEDCFPPLVIHLKEKLVTFNDYKTVRPSQELIAVDLHGTQWKFRHIYRGDDGQLRLGVRRAVQLRNEALFEPVNSSDSKLRILSSVASSLENKSVFHICFNPRSGASEFIVPYWRLLKSLNHPFSIGMRFRVCYESEDANERSAGLISGISEVDPIRWPGSRWKCLLVRWDDSTDSSHQNRVSPWEIERVGGSVSVTHSLSSGSKRTKLHFPQGSLDTPFLNGNGHPDSMGTENFHRVLQGQEFRGSRSHGVVCSESPGVPNFQSPDNRRFSADMRGYMMPASGPPQRNTEFTYQPIGFSESLGFPEVLQGQEMSQVVPLFRGATFGARTQNDRVVSANSVHRSAAQSGLLASTLGHPISQFTLSSSKVSSPSSVLMFNQATAPNHETVSGTNNKGMHVSQFASQEMLSETVTWPGTQRQTPSEITSNQFALARIPAPPSGAESGLPKRDAGRSSCRLFGFSLTGNMLGEDGEGLDDGAIEAGCENPPVLELFGHSHSTPGALHALCAAAPLGM

SEQ ID NO: 16213 - protein, 719 aa, Oryza sativa
  Clone ID: TF_OSC1558j.C1.p2.fg
MTGIDLNTVEEDQEEAAEEVAANGSSPAPAKAGAVCLELWHACAGPVAPLPRKGGVVVYLPQGHLEHLGDAPAAAAAAAAVPPHVFCRVVDVTLLANAATDEVYAQLSLVPEKEEVARRADHGEGEDGDGMKQRFARMPHMFCKTLTASDTSTHGGFSVPRRAAEDCFPPLDYSQQRPSQELVAKDLHSTEWRFRHIYRGQPRRHLLTTGWSAFVNKKKLVSGDAVLFLRGDDGELRLGVRRAAQLKNGSAFPALYNQCSNLGTLANVAHAVATESVFNIYYNPRLSQSEFIVPYWKFMKSLSQPFSVGLRFKMRYESEDATERRYTGIITGSGDTDPMWHGSKWKCLLVRWDDDAEFRRPNRVSPWEIELTSSVSGSHLSTPHSKRLKPCLPHVNPEYMVPRGGGCPDFAESAQFHKVLQGQELLGFKSHGGTAAATSQPCEARHLQYIDERSCSSDASNSILGVPRLGDRAPLGNPGFSYHCSGFGESHRLQKVLQGQELFRPYRGTLVDASMGSNGFHQQDSPRAPGVVNKWQAQLHGRAAFHGPPALALPSQSSSPPSVLMFQQANSKMPRLEFGHGQLDKHENDRRVRFGPSEGIERREQRIPLQPYPTSGEVIDGQVTVEKSHSPGRHGKDGPDNKAVGTNSCKIFGISLTEKVPAREELDDGDANYSLQSLKQVPKSLGNSCATMVAEYQGDGGTDDSDIFILDVGVGALIM

SEQ ID NO: 16214 - protein, 655 aa, Oryza sativa
  Clone ID: TF_OSC401539j.C1.p103.fg
MGIDLNNTASGGEEDAPAPGPVCRDLWHACAGPVVSLPRRGSAVVYLPQGHLSAAGAGGGIRGEVAVALPPHVACRVVDVELCVFERNLHGGGIEREDDMEDGDEERKSRMLHMFCKTLTASDTSTHGGFSVPRRAAEDCFPPLDHKQLRPSQELVAKDLHGAKWRFRHIYRGQPRRHLLTTGWSSFVNKKKLVSGDAVLFLRGDDGELRLGVRRATQLKNEAIFKAFSSESSKMRTLSAVADSLKHGSVFHICYNPRATASEYVVPYWKFVKSFNHPVCIGMRFKFHFESEDVNERRSGMIAGVSEVDPIRWPGSKWRSLLVRWEDATDCNSQNRVSPWEIEIVGGSISVAHSLSASSSKRTKLCPQGNLDVPALYGNGRPDSVETEKFPRVLQGQELMGSRTHRATCSPQSIDITKSKSFDAWRFLTDTRSCMLGSSTSRLPVQYSGYTHQSVSFGESIGFPEVLQGQEISQTVPPFQGMLPDACSAKSRYELKNYVCTPATMNGLSSANEGYCLSLSTVPPSPPSSLMLYQTGVPQLELASKNNDKSGNDSQPALRQHKLLSETSWDQFKIGKASTPGNATKPGNGGREVDRTSCRLFGFSLTEKIIPTDKDGEKEVSYETDCQNPRMLDLFGYNCSTPGALHALCAAPLGI

SEQ ID NO: 16215 - protein, 73 aa, Oryza sativa
  Clone ID: TF_OSC8547j.C1.p1.fg
MASMKQQQTPASSAVTAAAAASSSATAAVAACEGERKAAAINSELWHACAGPLVSLPPVGSLVVYFPQGHSEQ

SEQ ID NO: 16216 - protein, 1055 aa, Oryza sativa
  Clone ID: TF_OSC21386j.C1.p1.fg
MKDQGSSGVSPAPGEGEKKAINSELWHACAGPLVSLPPVGSLVVYFPQGHSEQVAASMHKELDNIPGYPSLPSKLICKLLSLTLHADSETDEVYAQMTLQPVNKYDRDAMLASELGLKQNKQPAEFFCKTLTASDTSTHGGFSVPRRAAEKIFPPLDFTMQPPAQELIAKDLHDISWKFRHIYRGQPKRHLLTTGWSVFVSTKRLLAGDSVLFIRDEKSQLLLGIRRATRPQPALSSSVLSSDSMHIGILAAAAHAAANSSPFTIFYNPRASPSEFVIPLAKYNKALYTQVSLGMRFRMLFETEDSGVRRYMGTITGIGDLDPVRWKNSHWRNLQVGWDESTASERRTRVSIWEIEPVATPFYICPPPFFRPKLPKQPGMPDDENEVESAFKRAMPWLADDFALKDVQSALFPGLSLVQWMAMQQNPQMLTAASQTVQSPYLNSNALAMQDVMGSSNEDPTKRLNTQAQNMVLPNLQVGSKVDHPVMSQHQQQPHQLSQQQQVQPSQQSSVVLQQHQAQLLQQNAIHLQQQQEHLQRQQSQPAQQLKAASSLHSVEQHKLKEQTSGGQVASQAQMLNQIFPPSSSQLQQLGLPKSPTHRQGLTGLPIAGSLQQPTLTQTSQVQQAAEYQQALLQSQQQQQQLQLQQLSQPEVQLQLLQKIQQQNMLSQLNPQHQSQLIQQLSQKSQEILQQQILQHQFGGSDSIGQLKQSPSQQAPLNHMTGSLTPQQLVRSHSALAESGDPSSSTAPSTSRISPINSLSRANQGSRNLTDMVATPQIDNLLQEIQSKPDNRIKNDIQSKETVPIHNRHPVSDQLDASSATSFCLDESPREGFSFPPVCLDNNVQVDPRDNFLIAENVDALMPDALLSRGMASGKGMCTLTSGQRDHRDVENELSSAAFSSQSFGVPDMSFKPGCSSDVAVTDAGMPSQGLWNNQTQRMRTFTKVQKRGSVGRSIDITRYRDYDELRHDLACMFGIQGQLEDPYRMDWKLVYVDHENDILLVGDDPWEEFVGCVKSIKILSAAEVQQMSLDGDLGGVPPQTQACSASDDANAWRG

SEQ ID NO: 16217 - protein, 206 aa, Oryza sativa
  Clone ID: TF_OSC416737j.C1.p22.fg
MEQEQDEEEEEAEASPREIPFMTSAAAAATASSSSPTSVSPSATASAAASTSASGSPFRSSDGAGASGSGGGGGGEDVEVIEKEHMFDKVVTPSDVGKLNRLVIPKQHAEKYFPLDSAANEKGLLLSFEDRTGKLWRFRYSYWNSSQSYVMTKGWSRFVKEKRLDAGDTVSFCRGAAEATRDRSSSTGSAAPTSATRTASSAYRSP

SEQ ID NO: 16218 - protein, 720 aa, Oryza sativa
  Clone ID: TF_OSC401045j.C1.p15.gm
MSVTRDRTKSPGGHPTSPEEMITFVDSAAKERERESDKCLDPQLWHACAGGMVQMPPVSSKVYYFPQGHAEHAQGHGPVEFPGGRVPALVLCRVAGVRFMADPDTDEVFAKIRLVPVRANEQGYAGDADDGIGAAAAAAAQEEKPASFAKTLTQSDANNGGGFSVPRYCAETIFPRLDYSADPPVQTVLAKDVHGVVWKFRHIYRGTPRRHLLTTGWSTFVNQKKLVAGDSIVFMRTENGDLCVGIRRAKKGGVGGPEFLPPPPPPPPTPAAGGNYGGFSMFLRGDDDGNKMAAAARGKVRARVRPEEVVEAANLAVSGQPFEVVYYPRASTPEFCVKAGAVRAAMRTQWFAGMRFKMAFETEDSSRISWFMGTVSAVQVADPIRWPNSPWRLLQVSWDEPDLLQNVKRVSPWLVELVSNMPAIHLAPFSPPRKKLCVPLYPELPIDGQFPTPMFHGNPLARGVGPMCYFPDGTPAGIQGARHAQFGISLSDLHLNKLQSSLSPHGLHQLDHGMQPRIAAGLIIGHPAARDDISCLLTIGSPQNNKKSDGKKAPAQLMLFGKPILTEQQISLGDAASVDVKKSSSDGNAENTVNKSNSDVSSPRSNQNGTTDNLSCGGVPLCQDNKVLDVGLETGHCKVFMQSEDVGRTLDLSVVGSYEELYRRLADMFGIEKAELMSHVFYRDAAGALKHTGDEPFSEFTKTARRLNILTDTSGDNLAR

SEQ ID NO: 16219 - protein, 1134 aa, Oryza sativa
  Clone ID: TF_OSC400589j.C1.p1.fg
MEMAANPGGSGTCSDALFRELWHACAGPLVTVPKRGERVYYFPQGHMEQLEASTNQQLDQYLPMFNLPSKILCSVVNVELRAEADSDEVYAQIMLQPEADQSELTSLDPELQDLEKCTAHSFCKTLTASDTSTHGGFSVLRRHAEECLPQLDMSQNPPCQELVAKDLHGTEWHFRHIFRGQPRRHLLTTGWSVFVSSKRLVAGDAFIFLRGESGELRVGVRRLMRQVNNMPSSVISSHSMHLGVLATASHAISTGTLFSVFYKPRTSRSEFVVSVNKYLEAKKQNLSVGMRFKMRFEGDEAPERRFSGTIIGIGSVPAMSKSPWADSDWKSLKVQWDEPSAIVRPDRVSPWELEPLDASNPQPPQPPLRNKRARPPASPSVVAELPPSFDVDSDQISQPSNGNKSDAPGTSSERSPLESQSRQVRSCTKVIMQGMAVGRAVDLTKLNGYGDLRSKLEEMFDIQGDLCPTLKRWQVVYTDDEDDMMLVGDDPWEKFQCFFITASCAEDATPFCLELWWYLNCKCQEVPKTGKTAWKRHSGKCMPFQIVLCFGRSLGVLVWCPDLGDSVGGGAERRRTGGVERRRREPVTRRRGGKERRRPSWRALAANRRRGEAANQRRGEAATQRGGSDPAGGLRRRGEAAKRRHGEAANRWREEAVRRGGDPSERWRTGGVERRRREPATRRTGSSGVGFFHASSSSLIAGANGGSDGGGGARTLSWGTWWRRLGRLAPTVALGWCGRWSTREEGIIDVGKRIHVGPPFGEGNRRRSTLVLPHVRSAPFHAVVPGAVGGQRRQIVAAAVAEADGNENGNKHFTCHRENANYGLKSASENKIELLRGAHSWADSNLIEDVLASVNNDVGEASALLKAMASPCFPIREDGLPDQLSSEINKTHGLPSGNGTAENNLVNDSQLLPLPMNMSSVPIEPEVEELDDDYFNHRKDALKIMRAATKHSQAASNAFLRGDHAAAKELSLRAQEERSAAEELNKKAAKEIFRLRNSNNSIWKLDMHGLHASEAVEVLERHLHRIEFQPPGNNAASSDEVARSEPRVSGPSIEPGPGKVVFVRPIQAILEVITGIGKHSKGQASLPVAVRGFLIENGYRFDELRPGHKLLTSQPEVKNHKGIKVKEEFFSILS

SEQ ID NO: 16220 - protein, 1430 aa, Oryza sativa
  Clone ID: TF_OSC32301j.C1.p3.fg
MPPRTRHGRREPTPDPVSENEDSSGDEYVQSDDDNMENVEGDEMEVSDDGDDNESGNGEDDEASDDRSPLDSTIQFVLNLRNAQQYTILRHHNQFRRPNDCNDPRFHTRFQKSVYAQVYANKAFAEHKWISWKHIGETPEFENLQEMFRTVGIDRIVTMKQPFDEDLIRQFYATVWVSGDCDAMKWMSRTLRCSINRRESKELLHIRFNNGDDLHDEHTHNPFPIDHFSQFYEEGGRHTYGKVAGLRALPSVINRIVRATILPRCGNNDDIRGVAWHVIDAIMDGRRFDVINLMMKEIAISKGTLGQGIYYAPYIMRLIQSKLGQIGHNLKEHKEYKPRLQLSSPRAPRVRQPTFDQGASSSAAPPSPQGYDPSAFFHLQYAYFGMQPNDFFNPVLGAIHTLSESIQRLSTGHEALHEDVRGLCTDVGNLNTSVGRLHTRGRSDRPHSGGLTGVPWPVVCEASQILVAHYECPKVYTLHNCTVHYTDGVCNCARCEFCPKKTAFGYNAKEKAKTGVLRNAAALLDEMQLMGETQGAKKVINSELWHACAGPLVCLPQRGSLVYYFPQGHSEQVAATTRKIPNSRIPNYPNLPSQLLCQVHNITLHADKDTDEVYAQMTLQPVNSETDVFPIPTLGAYTKSKHPTEYFCKNLTASDTSTHGGFSVPRRAAEKLFPQLDYSMQPPNQELIVRDLHDNMWTFRHIYRGQPKRHLLTTGWSLFVGAKRLKAGDSVLFISMHIGVLAAAAHAASSGSSFTIYYNPRTSPSPFVIPVARYNKATYMQPSVGMRFAMMFETEESSKRRYTGTVVGISDYDPMRWPNSKWRNLQVEWDEHGYGERPERVSIWDIETPENTLVFPSSTLNSKRQCLPGYGVSVPGMEIGSANMSSFPRAQGNPYGSLQHIPAVGSELAIMLLNQSGQTLGSPLSFHQSSYSSIIQNVKQNYIPPLTVSTSACLTKQESLPSDDAQHQFHMANMQNGDLEGSEVQPVIDSISESKLNATSRDPRNTDSYTSRSTSEQNSKGEPRGKTRRSKKGLPHKTVSEKSDLSSAPSWICDNQQVGLESKLVGCDEQVNCGNIEDSSGALTQGNFVGQPHGHQVEQKGVLSPPKVESSKSPDGGKSVNSFPNQGCFSQFIDGLDWMTQPSYYQDSNVIQPAGVSENIFSSSADIPPSMIADTMETFQASCLSDCLPNSIQEFISSPDLNSLTFLSPDMQNLEVQLQHDGSNLPSTSNSFVQMSFSEESASQSANLSGLHMESTHRSINTTSCSQPMSTGGFDAGMYSKLPRLKESQILSLPEIHTNSMGTSACSMDATEYSLDRSAKPMKPPVRTYTKVQKQGSVGRSIDVTGFRNYHELRSAIACMFGLQGKLEHPGSSEWKLVYVDYENDVLLVGDDPWEEFINCVRCIRILSPSEVQQMSENGMHVLNDCIQAA

SEQ ID NO: 16221 - protein, 863 aa, Oryza sativa
  Clone ID: TF_OSC401249j.C1.p16.fg
MSSSSAASIGPPQPPPPPAPPEEEKKCLNSELWHACAGPLVCLPTVGTRVVYFPQGHSEQVAASTNKEVEGHIPNYPNLPAQLICQLHDVTMHADVETDEVYAQMTLQPLNPVRRLGFLHDVCSAEVLMQEQNDAYLPAEMGIMSKQPTNYFCKTLTASDTSTHGGFSVPRRAAERVFPPLDFTQQPPAQELIARDIHDIEWKFRHIFRGQPKRHLLTTGWSVFVSAKRLVAGDSVLFIWNEKNQLLLGIRRASRPQTVMPSSVLSSDSMHIGLLAAAAHAAATNSRFTIFYNPRTSPHYLWEFYNWASIKIHNILMRPMHTLMKHRYMGTITEVSDADPVRWPSSYWRSVKVGWDESTAGERPPRVSLWEIEPLTTFPMYPSLFPLRVKHPWYSGVASLHDDSNALMWLRGVAGEGGFQSLNFQSPGIGSWGQQRLHPSLLSSDHDQYQAVVAAAAASQSGGYLKQQFLHLQQPMQSPQEHCNLNPLLQQQILQQASQQQIINPDAQNIQTMLSPSAIQQQLQQLQQMQQVQNDQKQKIQPDQSYQVPTSAVLPSPTSLPSHLREKFGFSDPNANSSSFITSSSSDNMLDSSFLQGSSKAVDLSRFNQPVASEQQQQQQQAWKQKFMGSQSVSFGGSVLHNSPTSKDGSVENKIGRDVQNQSLFSPQVDSSSLLYNMVPNLTSNVSDGNLSTIPSGSTYLQNAMYGCLDDSSGLLQNTGENDPATRTFVKVYKSGSVGRSLDITRFSNYAELREELGQMFGIKGQLDDPDRSGWQLVFVDRENDVLLLGDDPWEFINIYMNVSNAKKSYIMKRREYNTLVSWFPQLIAYRGKTVLPSIICVGQSLYVDAQLPKTLRESKHQT

SEQ ID NO: 16222 - protein, 749 aa, Oryza sativa
  Clone ID: TF_OSC101706j.C1.p13.gm
MATVERRGSATEDEETAATGGRNAAGRDAAGCDTASRDATGQGAAGTGTGGRGAAAGRGAGGRRDAAGRGAGERGESPGGSISSSHGNERRERQECEIGSDIRENTRPLGGVDGEGAPCAPPPSPIPAGPASSTVSAASSAPATRDYLGGITGHRLGQEDDSGGHEYTSVSGIHVPSSSGVAFVSFGQCPQEVISTDLCLGLGPIAATAPLQPPPPPAAAAAAGSPSATTPEPGHGEATPTTSSSAQFQTQAQQVTRDMWMACAAPKSGRLPTVGSLVYYFPDGHAEQCLSRPQEPLPGRIFLCKVTDVRLGAAATNEALATISLVPIAADDHAFQLQAPADPDPAPAQSQSLVSFVKPLTYTDVTKNRFMVPKDDAAAGVLPHIQLNDDVPLRIKDLSGKEWAFNYTWKAHTRMFRNGWMEFSNANGLVTGDNAVFMRRGNGEMFMAVRRTRNRPAPFSVEEVIEAVWRAARREPFEVSYCLRQDGDEFVVPRDIVDDGLRARFAPGMAVNFVWAVEDGKLPTIGPQGEDVCNACFSELEDQLVACFPETVRTSSKACRASRFLVFWADVIQGGAALTGGPRLSAHKGRRGGSGKWAPLAAAQGGRSTVDRDHAGGPPPVHGTDSPDRPEADRTARAARRPSTCRAERRRTARKAAADVRSGGTAKGGGTAKGGGARGKGRKGRGRESSPEGRRPEREGMSGGSASENGGRERRVLGKGGEGVREKRGAAARRGEMAGDGNNGELTGV

SEQ ID NO: 16223 - protein, 728 aa, Oryza sativa
  Clone ID: TF_OSC101706j.C1.p5.fg
MAQPPDAAAAAAVPPPVVIDRDVWHACAVPYSGVLPGVGTLVYYIPHGHIEQCAEDPALLLSRLPDPIHPVPCTVADLVLDVDAESGEAYATISLLPGSHDDTTARRQVPAHGEPGFRFFEKQLSPADVTSNALVLPAGAEHVLPPLDIAAYQTARLFDVRDLRGKRFEFVHIWDKKRCRYMLGDLGVNDNDGWRGFVKAKRLATRDTVVFMRRGGGDGDGDGELLVGVRRAPRARGGHHPRPGVEDNKVVSEVWLAMQGVTPFEVTYYPREGTFEFVVSRDEYIGFSFSPFYPFVPGTTVHLRMNPLQIAQSISGTVRTFDHLRPWRMLEVDWDQAASPISYRIHRQVNSWQVLRQPQPAATTSAVRIRDAIVATPQVQIMALPRPPPPTTTTGMVPSDDSYAMISLFPGDCYVTHRPLPAARDPVGGQREFCFFDKKLSPSDAAANGGGSGALFVIPKPSAAEHVLPRIPDLRVTNLQGGRWEFGHTWSDADTDRRSSSHTLAAGWSAFVKAKRLCVGDTVIFMRRRPGGEPLVGVRRKPHGGMPVGIPDKHVADAWLDASSAQPFRVTYCPWQGTAEFVVRREEVEGSPPLAPGTRVRLLMNPDDARRRSQPPVYGTVRDVHCRSEWRMLEVDWDRDSPLAPTMNRRVNSWQVQPVQLALPPQGSDEEAAAATTSTAHAGDATTSAPSLALQLQTMASSSSSSAPIIPSRGSAFRIVNPRDGSQG

SEQ ID NO: 16224 - protein, 1105 aa, Oryza sativa
  Clone ID: TF_OSC401793j.C1.p21.fg
MAAAAAAAVVGSGCEGEKTKAPAINSELWHACAGPLVSLPPAGSLVVYFPQGHSEQADPETDEVYAQMTLQPVTSYGKEALQLSELALKQARPQTEFFCKTLTASDTSTHGGFSVPRRAAEKIFPPLDFSMQPPAQELQARDLHDNVWTFRHIYRGQPKRHLLTTGWSLFVSGKRLFAGDSVIFVRDEKQQLLLGIRRANRQPTNISSSVLSSDSMHIGILAAAAHAAANNSPFTIFYNPRASPTEFVIPFAKYQKAVYGNQISLGMRFRMMFETEELGTRRYMGTITGISDLDPVRWKNSQWRNLQVGWDESAAGERRNRVSIWEIEPVAAPFFICPPPFFGAKRPRQLDDESSEMENLLKRAMPWLGEEICIKDPQTQNTIMPGLSLVQWMNMNMQQSSSFANTAMQSEYLRSLSNPNMQNLGAADLSRQLCLQNQLLQQNNIQFNTPKLSQQMQPVNELAKAGIPLNQLGVSTKPQEQIHDASNLQRQQPSMNHMLPLSQAQTNLGQAQVLVQNQMQQQHASSTQGQQPATSQPLLLPQQQQQQQQQQQQQQQQQQQQKLLQQQQQQLLLQQQQQLSKMPAQLSSLANQQFQLTDQQLQLQLLQKLQQQQQSLLSQPAVTLAQLPLIQEQQKLLLDMQQQLSNSQTLSQQQMMPQQSTKVPSQNTPLPLPVQQEPQQKLLQKQAMLADTSEAAVPPTTSVNVISTTGSPLMTTGATHSVLTEEIPSCSTSPSTANGNHLLQPILGRNKHCSMINTEKVPQSAAPMSVPSSLEAVTATPRMMKDSPKLNHNVKQSVVASKLANAGTGSQNYVNNPPPTDYLETASSATSVWLSQNDGLLHQNFPMSNFNQPQMFKDAPPDAEIHAANTSNNALFGINGDGPLGFPIGLGTDDFLSNGIDAAKYENHISTEIDNSYRIPKDAQQEISSSMVSQSFGASDMAFNSIDSTINDGGFLNRSSWPPAAPLKRMRTFTKVYKRGAVGRSIDMSQFSGYDELKHALARMFSIEGQLEERQRIGWKLVYKDHEDDILLLGDDPWEEFVGCVKCIRILSPQEVQQMSLEGCDLGNNIPPNQACSSSDGGNAWRARCDQNSGNPSNGSYEQFE

SEQ ID NO: 16225 - protein, 529 aa, Oryza sativa
  Clone ID: TF_OSC401200j.C1.p58.fg
MARPPAATAPPPPPPPPPPPPPPIDRLVWLACAAPLSRIPVVGTQVSYFPEGHAEQCPAPLPDPLPSAHRFFLCTITAVDLSADTTTGEPYATISLLPLRHDAPAPAPAPAPAAAELAEAESQEFRYYAKQLTQSDANNGGGFSVPRLCADHIFPALNLDDDPPVQSLTMGDLQGDSWEFRHIYRGTPRRHLLTTGWSKFVNAKQLVAGDTVVFMWCGAPAPERKLLVGVRRAARYSGESACNARGRVQPQEVMEAVRLAAEQAAFRVTYYPRHGAGEFVVPRVEVDKGLTTPWRCGMQVRAQVMEAEDTRRLAWLNGTLTNLRHQQIWRTLEVEWDASAASSSMKNRFVNPWQVQPVDFPPLPMGLKISNNNISAPVCNGDSLLVPPILMHPQPQPPADIQGARHNNGHAYADIPSSSTPSMVRTQQLFPRDLQILVPHTDIVTPQNGSPPDNPVNTPLSASDGMKTIQLFGVTITSPVQGDTNGAFASAQVNQVPEGVDDETATEEASDTSLPDSLTNGHNQDGARL

SEQ ID NO: 16226 - protein, 312 aa, Oryza sativa
  Clone ID: TF_OSC401166j.C1.p27.fg
MEFTPISPPTRVAGGEEDSERGAAAWAVVEKEHMFEKVVTPSDVGKLNRLVIPKQHAERYFPLDAAAGAGGGGGGGGGGGGGKGLVLSFEDRTGKAWRFRYSYWNSSQSYVMTKGWSRFVKEKRLGAGDTVSFGRGLGDAARGRLFIDFRRRRQDAGSFMFPPTAAPPSHSHHHHQRHHPPLPSVPLCPWRDYTTAYGGGYGYGYGGGSTPASSRHVLFLRPQVPAAVVLKSVPVHVAATSAVQEAATTTRPKRVRLFGVNLDCPAAMDDDDDIAGAASRTAASSLLQLPSPSSSTSSSTAGKKMCSLDLGL

SEQ ID NO: 16227 - protein, 473 aa, Oryza sativa
  Clone ID: TF_OSC400445j.C1.p23.fg
MAQFRSAPVESEAEPGADGPVDEANAVEEEKSGKGEDGIEEAADTVDSVKDSAKPEGMDAKEEAVEQEGGAAADKAKDIPVTSNGKTDAGGNEVAEMKVEKLENGDGHLKADGDSNGDNKGADGEKQLMLASAGEDVEDPVLSKLASNSFMFDYSCGGDDSGTEEEQAAFMKELERFYREKLMEFKPPKFYGEGLNCLKLVQGPLCLLWRQVTGLGGYDQLHQQVTSCKLWRQVGESFKPPKTCTTVSWTFRNFYEKALLEYEKHKIETGEFQVAASNLTERITSESQVGIHASGSGRARRESATRAMQGWHSQRLLGNGEIADPIIKDKGTVSVLKKDKTPKSSGSAKRKRTPTLEDDRIVPYKPDKLQNDSMVLDLGPPADWVKINVRRTKDCYEVYALVPGLLREEVHVQSDPAGRLIVTGEPEQLDNPWGVTPFKKVISLPSRIDPHQTSAVVTLHGQLFVRAPFEQSK

SEQ ID NO: 16228 - protein, 765 aa, Oryza sativa
  Clone ID: TF_OSC900362j.C1.p9.fg
MSQIQSFSRQNCVLLAVLCGKHAEKRAQARSGLEAKRLRPSYPFPELSSSGRLEVHTLFNPTPEQFLEAQRVVQPNFLYIQGQQLEDEKEIGSLVWGDNDVSDPQAFSCLISPPFPTIVYLEVPIGEKLAQAVHSKGIPYVIYWRNSFSSYAASHFRHALMSVVQSSVSHTWDAFQLAHASFRLYCVRNNHVQSVKLGPRLLGDAPKINITPPENEMVEEEGSSDVFPAIKIYDDDINMKFLLCGVPSTPDPCLLGSLEDGLNALLNIEIRGCKLQNRISASPPPLHAASLPRGMVTMRCDITTCSSSHVSLLVSGSAQTCFDDQLLESHIKDEIIEKSQLVHALPNNDDKLSSSVPFTSMSTACGASTFEVWMTLPKWAAQVLKHLAPDISYRSLVALGIGCINGTPVASFDRRDADRLLFFCTNQHKDLAIENGPYFHLPRWSASLTKERVKVGLESKPNLLGANGIPEDKKRLIEGPSSSSKAKLKPATMRPIPHSRKQQMHPFMGFLEATVHETSQVKPNLPAAPPVKHNSVPAAPATHRKSTSGPSHAQSIIQLNPLPLKKHGCDRLPIQMCSEEDFLKDVMQFLIQRGHNRLVPHGGLAEFPEAVLNAKRLDLYNLYKEVVSRGGFYVGNGINWKGQVFSKMRNHTVTNRMTGVGNTLKRHYETYLLEYELAHDDVDGECCLLCHSSAPGDWVNCGLCGEWAHFGCDRRQGLGTFKDYAKTDGLEYICPHCSLANYKKKPPPQKVANGFANTVSVSRNV

SEQ ID NO: 16229 - protein, 558 aa, Oryza sativa
  Clone ID: TF_OSC4861j.C1.p5.fg
MSAAAEEAAAAAAAEEVEGVEAGKKGVADAKGKGKEKVVVAEEDSAVAAGSGGSGGGRRTLVAYPARVAGYKDVVADAAVFRRALEGLHAQMGTKLKVPIIGGKDLDLHQLFKEVTSRGGIDKKYYMSLLYHFERLYLFEAQGWYQETADSRSISCIEMKAEGQASRKRKRGSNSCSSDPPINLEWTLCSTPLMKVPRYNILAPTIHFGSEKGQAGMKSTWSAQKVLALIGQKLTIKIREIKGKNSQLEHSNPGCRGNHEAIKPLDHLSACYLLYPTSLLSFLYGQRQELVPLTLSDLAASLDNDVQVIIDGKFEHGYIVTVIMGSKSTKAVLYNCTEEPAVPTAVPHVAIDSAEGIRPRRRRRRKKLSTTDPNHPKPNRSGYNFFFQDQHRKLKPEYPGQDRLISKMIGERWNNLGPEDKAVYQEKGVEDKARYQRQLALYREQRTGQPISNAVPIQQRLPQKEVTIDEVDSKVSEGDILLSNQGYSSSTSSSDETADSGEKNVEDDEEFNTETSPEPSMETTDSHGQPDPSADGERFELRRRENPKIDEKRDMPPN

SEQ ID NO: 16230 - protein, 1100 aa, Oryza sativa
  Clone ID: TF_OSC101541j.C1.p11.hg
MNGATAGSGSGSDHDDARAAEEARGEEAAGRAVEVEEEEEEEEAVPVAEERAAWGGGGTPPTPEPKSDADAEGAGSLDRVELNAGAGGGREREDDEGEDEAVGARGVEMNGEDAMSHDGHDGDEDGDDEEDGDDGEEEEEEDDDEEDDDDDSTPDASPRAEAKAEGESSTVMAGCANQPAEPDPFLDGDDSGTEEEQAAFMVELERFHREHGLEFKPPKFYGKGLNCLKLWRQVAHLGGHEQVTICKLWRQVGETFRPPKTCTTVSWSFRIFYEKALLEYEKYKVRTGQLQVPLSALPQPGGTGREEKDSVPSSSRGKNLKDDSMVTDVGEPAEWVKINVRQTKDCFEIYALVPGLLREEVHVQSDPAGRLVITGDPEQPDNPWGITPFKKGPSISSETNPVVGPIRNSPNGRDPTRPHRHRGSGSVRCRLVGGAASSASDYITKILPHPRHIVPASRRQSPSPEPTPPSYQHRTNRSAAPRRAASPAMDSDYGVPRELSEVQKKRALYQPELPPCLQICVLPDRAAPDPAPLRRPDQSISPALVVYTGTTVRVEYGDAAIAADPAGAHVISHAFPHTYGQPLAHFLRKTANVPDATVISEHPVVRVGVVFCGRQSPGGHNVIWGLHEAIKAHNPNSKLIGFLGGSDGLLAQKTLEITDEVLSSYKNQGGYDMLGRTKDQIRTTEQVNGAMASCQALKLDALVIIGGVTSNTDAAQLAETFAEAKCATKVVGVPVTLNGDLKNQFVETTVGFDTICKVNSQLISNVCTDALSAEKYYYFIRMMGRKASHVALECALQSHPNMVILGEEVAASKLTIFDITKQICDAVQARAEKDKYHGVVLIPEGLVESIPELYALLQEIHGLHGKGVSMENISSQLSPWASALFEFLPPFIRKQLLLHPESDDSAQLSQIETEKLLAQLVEDEMNRRMVLGHVCYHILAAGLNGYMATVTNLKSPANKWRCGAAPISSMMTVKRWSRGPAATQIGKPAVHMATVDLKGKAFELLRNNSTSFLIDDIYRNPGPLQFEGAGADSKPISLCVEDQDYMGRIKKLQEYLEKVKSIVKPGCSQDVLKAALSAMSSVTETLAIMTSSSTGQGTPL

SEQ ID NO: 16231 - protein, 1731 aa, Oryza sativa
  Clone ID: TF_OSC402966j.C1.p6.fg
MGISAAARGSGVGSSVPEAPVFRPTEEEFGDPLAYVARIRPLAEPYGICRIVPPPSWSPPPALDVCTLSFPTKRQPIHRLLARLAPADPDTFLLDYRRFLHRHRGRKKPKPKLPALSDGRPLDLCRLFHAVKRFGGYDGACAGKRWADVLRLVDDKAPRHAFSVSEHVIAQLYYEHLYQYEHFTNRLPSQSHDDQPPVSASSANISIRRQKKRLRKTSNTMGHCGGSTSAKTAASAPKQKRRKVDATATVVNEAMDQVCEQCNSGLHGEVMLLCDRCDKGWHLYCLSPPLESVPPGNWYCSECMNSDRNCFGFVHRRKTCQVETFRKFEERVRKRWFGHKNPSRVQVEKQFWEIVEGKVGELEVMYGSDLDTSIYGSGFPRLCDPVPSSVDPVMWHKYCSSPWNLNNFPNLPGSVLQTVRDNIAGHLMSNHRAAVSASLFHLHSYSMHVGEPKCWYGVPGAEANAFEKATLRLVMLEYLTFCDLQVMRNALPDLFDAQPDLLFHLVTMLSPSILQANGVPVYSVIQEPGLNCAEAVNFAPADWLPHGGIGAELYRLYRKAPVLSHEELLYVVAKNGVDNESLPYLQGEIERLFVKEKKCREELWITGIVKSNLMPPKNNPNFIGSEEVDLLVYRHLMSCDIDSALIPLILAKFIKSIFSFSQHWKHLCECSPEKHRLLYRHTLAELGDLVCEVSKANLPRENVKQNSLLHSDVFLPTRKDKDQYMSYTQLAEDWLSKADHILHMPFLDTAYATALEDAEQFLWGDHNMDSVRNMSAKLIEGRKWASSVRKCLSQIDGFLHCKENCSEKVNYVEIKELAAVRCKPCYEPSLAQLQVYVDKGEIMINEINNALSSRSKVDYLETLYSRALEFPVELTETSALSCEISSAKSWLKKACDCLEQNKRGIVDIDFLNELKSEELESFLLVVDGANFSIPELNILMQRYSGACSWVNHANNIVGKLLERNDYDNIVEELTGILKDGESLGVKGMLFEEFSVVEEELKKSFCRKQASEALATQTSMEVVKEVLKEASILTIEEEQPFVDLSHNLKAAITWEEKASFILEHSAALPEFENHILCSENIHVILPSELDMKAEVATAKLWMDKCQAYLRPRSDKPASGGFLNVDDLKDLIGQPASMKVILDTSAINSVLNNVIEWEHNSLSLIHSSRSLLDSNVIDSTIDPLKRKLEELQDKINAEIEKGLSLGFEFKVVHELKDSFFTLGWILNALSFCGVTPLLQDAEKLIQQAVNLPASLSDCSLAELLVRGSSWLRKALMFLPGSEMSETSRLLNVENILAEYKASISKFKLIYLIFHALVGDQEIAVPYPMMIAKLEDAINKHNSWAEQCNAFFMFPDHQSWDGLLSLRDSGQSVAFDCTEMDKVVAEIKKIEEWLTHCHCTLFPDGNNSDSLLSALLKIRGSMDNACMLYSDCNQKGLCAICSCDVGDHITPRCMICQARYHSSCVEPLPASTQVTREWTCPFCFHLESGDPLQNRLQEKISKGNRPALPALIGLRSFAKGFYSGIEELDLLEEIAEKAHKFKSYLMQILHDADSYHGEDLSVMHRSLLIALKATSAAGLYDHQISCRIESMLSRYSWKKRIHILLCGGKKIPIQQVLMLDNEGSSLEICGEDFFKLEINKIKETSLQWLAKAEKTTLDSGKLALDLVYGLIIEGESLTVHVEKELKLLRDRSVLYCICHQRPKQDLTPLRHLVKQQEEWELSSATVVANGRKHM

SEQ ID NO: 16232 - protein, 306 aa, Oryza sativa
  Clone ID: TF_OSC900124j.C1.p5.fg
MAEKLLYPPPLLSHEEVANDRAAFMDTLRRFHSLMGTKFMIPVIGGKEMDLHALYVEVTSRGGLAKVMEERKWREVMARFSFPATTTSASYVLRRYYLSLLHHYEQVYFFRAHGALLRPAASALTKTPRRKMRGTSDQSPAAAEAGKRMALPERLGGEPCSFSVTGSIDGKFEHGYLVTVKIAAETLRGVLYRVAPPPPPPAAPPPPPPPARGRRRRGRRQRDPAQPRPNRSAYNFFFKEKHPELKATHPHREREYSRMIGDAWNRLAADDKMVYYRHSAEDKERYKREMQEYNERLKLAPSTMAG

SEQ ID NO: 16233 - protein, 117 aa, Oryza sativa
  Clone ID: TF_OSC401571j.C1.p5.gp
RPRKTITNSDHLEPSVKRPRGRPRKYPLPIAKLEDSSQNDTSQEFALIDPLVSSAVVSCDVAIACPMPTVNPVESTPRKGRGRPRKKPVEIKGLSGIKLTEDLSTALSPIALTCMEP

SEQ ID NO: 16234 - protein, 118 aa, Oryza sativa
  Clone ID: TF_OSC400259j.C1.p61.gp
RPRKTITTSDDHLEPSVKRPRGRPRKYPLPIAKVEDSSQNDRSQEFALIYPLVSPAVVSCDIAIAYPMPTVNPVESTPRKGRGRPRKKPVEIKGLSGIKLTEDLSTALSPIALTCMEP

SEQ ID NO: 16235 - protein, 215 aa, Oryza sativa
  unsure (1)..(215): unsure at all Xaa locations
  Clone ID: TF_OSC406953j.C1.p3.np
PRLPASAAAGERSGGGSGGGRVAGEQAAGGGGGHRAARRPRGRPLGSKNKPKPPVIITRDSPDALHSHIIEVAPGADVAACVAEYARRRGRGVCLMGASGAVADVAVRGAAAPLPGRFELLSVTGTVLPPPAPPGASGLSVLLSAGQGQVVGGCVVGPLVAAGPVTLFAATFANAVYERLPLQAEEAGEPHAEAEQQAQPEAAAASSXLGAGLST

SEQ ID NO: 16236 - protein, 316 aa, Oryza sativa
  Clone ID: TF_OSC900202j.C1.p3.fg
MDPVTASIHGHHLPPPFNTRDFHHHLQQQQHQLHLKTEDDQGGGTPGVFGSRGTKRDHDDDENSGNGHGSGGDGGDLALVPPSGGGPDGAGSESATRRPRGRPAGSKNKPKPPIIITRDSANTLRTHVMEVAGGCDISESITTFARRRQRGVCVLSGAGTVTNVTLRQPASQGAVVALHGRFEILSLSGSFLPPPAPPEATGLTVYLAGGQGQVVGGSVVGALTAAGPVVIMAASFANAVYERLPLEDDELLAAQGQADSAGLLAAGQQAAQLAGGAVDPSLFQGLPPNLLGNVQLPPEAAYGWNPGAGGGRPAPF

SEQ ID NO: 16237 - protein, 258 aa, Oryza sativa
  Clone ID: TF_OSC24712j.C1.p1.fg
MGSIDGHSLQQHQGYSHGGGAGGSNEEEEASPPPGGGSATGSAGRRPRGRPPGSKNKPKPPVVVTRESPNAMRSHVLEIASGADIVEAIAGFSRRRQRGVSVLSGSGAVTNVTLRQPAGTGAAAVALRGRFEILSMSGAFLPAPAPPGATGLAVYLAGGQGQVVGGSVMGELIASGPVMVIAATFGNATYERLPLDQEGEEGAVLSGSEGAAAQMEQQSSGGAVVPPPMYAAVQQTPPHDMFGQWGHAAVARPPPTSF

SEQ ID NO: 16238 - protein, 259 aa, Oryza sativa
  unsure (1)..(259): unsure at all Xaa locations
  Clone ID: TF_OSC24712j.C1.p2.gp
MGSIDGHSLQQHQGYSHGGGAGGSNEEEEASPPPGGGSATGSAGRRPRGRPPGSKNKPKPPVVVTRESPNAMRSHVLEIASGADIVEAIAGFSRRRQRGVSVLSGSGAVTNVTLRQPAGTGAAAVALRGRFEILSMSGAFLPAPAPPGATGLAVYLAGGQGQVVGGSVMGELIASGPVMVIAATFGNATYERLPLDQEGEEGAVLSGSEGAAAQMEQQSSGGAVVPPPMYAAVQQTPPHDMFGQWGHAAVARPPPTSFX

SEQ ID NO: 16239 - protein, 1088 aa, Oryza sativa
  Clone ID: TF_OSC400259j.C1.p38.fg
MAAPPEATGAPPQTEGEEVKDGVEVCVFDESPEVFSRAVHAISELTTGEHEPNFPDAEVERLASSITFLREWRHFSYEPKNVSFTCDARSAPSRVDTHKINLPQFSSASVPQITHLDNGKAKTDSFCSSDFVIFAGGNVWALDWCPRLCDRPHSPINCEYLAVAAHPPGSSYHKIGMPLIGRGIIQVWCLLAPSEEGHPHQSLVACNKYNPSNQPKQRGRPRKTITTSDDHLEPSVKRPRGRPRKYPLPIAKVEDSSQNDRSQEFALIYPLVSPAVVSCDIAIAYPMPTVNPVESTPRKGRGRPRKKPVEIKGLSGIKLTEDLSTALSPIALTCMEPKKKRGRPRKYPAPSNSKHLPGTDTELGNDSVCQPGSIDFGLGPTENTGSGANITHAAVDAASPVPLSGQRGREQPEKEVIHIENSMQSGQSDIGSMLPTYILPESGNKSNSTGLRRRGRPRKKPFPSTTSCVFVPGTETPKKGSTLTNSNNLVVLAKSNCDILANDIGPSSCAIENSVHLSVGTSHAATPAQGICLAKCKEESSAKKGRGRPRKQPISTECGCSKACRGEEQKTQTIPKSSDNASLVENCKKESCPGKGRVQDKKKSVSNERSSVVLSVEAQNMDGSSASTAYTSCCTPACNFENAETNQAVSVPSENSAQVIDELKDTEVARFKESTKDDNMICSAEKTLSRVPKDISLPRVVLCLAHNGKVAWDVKWKPPSANQSEHKSCLGFLAVLLGNGSLEVIPLTVDWSPSHDMILAGCHDGTVALWKFSANLSFQGSKPFMCVTAESAPIRTVSWAPSVSKENVNTFVTAGEDGLKFWDLRDPYRHLWELTTAPRAVISLQWLKDARGVVISLEDGTLKFVSLSRIANDVPFTGRPFVGTKTQGVSTYQLSEYLIWSVHASEITGYAAYCVADGTAVCFELTPRFWEKEPGRNRVPYFLCGSLSEEGTTIKIGIALPNSPLSNVPLGTKRATKTCKDVAQLHVIEEGKLLTNSEYNGAINPSIRDGQQDEPDEGQETGAIVLAAPSMQENFDTSTSRGSESPENFEVFPPKAVALHRLRWNMNKGSEKWLCYGGAAGIIRCQRI

SEQ ID NO: 16240 - protein, 1177 aa, Oryza sativa
  Clone ID: TF_OSC400506j.C1.p9.fg
MADHAAASAAADADPSLRQGGDAADADEEEEEEEAAPSSAAGVGVGVGVEERCRAMMEVVKKDAVGGKWRVSKLVVEHNHEVEVAPCGEGEGEVAAAVPVMGMEFESVHAAKGFYYGYGERVGFKARTGSNRRSVGNGVMIMQRFLCSRGNYANRRNKANGLDELKEEEVQDGAAGKRKRGANNKRNPNPVKNNSEVIEVESSAEKGVGTAVPNNGQEARKMRGSKRGRTKKDVTEKDEKPVVELEAEKEDEVVAQDGDDVEEQKGEGEEEMEEEVQVEVQEKRGRGRPRKADAEGNALQARVLRELGLRASQYTNEERKKIVSKYLSKRQSRPVSARPAKIASHQALAERRKRGDGGRFLSSEGLTQPSERRSKRLEKQNLKKEDKGESKEDEIIEGEPDPEMEVVAGPGGEPKVGMVFLNEDKAYDCYVTYAGTVGFSVRKGWLEKTATNTTKSRAYVCSKEGFRSKSVSTDPKKPRPETRTGCLAHMTIKITVSGKYVVTEYVADHNHDLETPLVDIQVLRSHKLLAKLQQPPDPPRVVLIPNDYKNYVRTRHTKDMQLGDTQAIYEYLQRKKGEHPSFFYAIQVDEDDQLTNVFWADVKSILDYHYFGDVLCVDTRYSTSDHSRPLLLFIGVNHHKQPVIFGAALVYDESVESFKWLFETFKSAMSGKQPKTVMIDQSTAISEAVASVWPRTTQRFSLIHLYKNATKILRDAFQASETFADDFSMWLYGYEEEGDFLSSWEILSDKYNLKDNEWLGKLYADRERWALPYGRDSFCADIAAALRSDNNTDAILADLLKKETDFPSFFNNYDKLLENKRLAEQQADYLGVQMAQRVAPLRMLWQAANAYTPTLFEMFRLEFELTLTCMAYCCGEIGPISEYEVTVKNRPRDHFVRFDSSECMVVCSCKKFEFTGIPCCHVLKVLEVRNIKELPPHYILKRWRKDAQSESPRENYGFEAVDEDPRFLLSKRYSMLYRTFYKIAAKAAENIEAYTYMESQCDQFIEQVELLLQAKLHDKSSLSTILKVQQPNLFPNEASNSETRRQQSPLQSNKKKKGRQGLPEPEEAEVPLRVDPPTISNDIPNHLRTPTSQFLATSHIMQAPYIAQQFGLSSLQGFPGISPFGQLQEPAPAPLQQPHLQQPPFHSGPQIPQVIVITYTHVPFPRDFTFTDSISNY

SEQ ID NO: 16241 - protein, 266 aa, Oryza sativa
  Clone ID: TF_OSC101556j.C1.p2.fg
MGLPEQPSGSSGPKAELPVAKEPEASPTGGAAADHADENNESGGGEPREGAVVAAPNRRPRGRPPGSKNKPKPPIFVTRDSPNALRSHVMEVAGGADVADAIAQFSRRRQRGVCVLSGAGTVANVALRQPSAPGAVVALHGRFEILSLTGTFLPGPAPPGSTGLTVYLAGGQGQVVGGSVVGSLIAAGPVMVIASTFANATYERLPLEEEEEGSGPPMPGGAEPLMAGGHGIADPSALPMFNLPPSNGLGGGGDGFPWAAHPRPPY

SEQ ID NO: 16242 - protein, 1378 aa, Oryza sativa
  Clone ID: TF_OSC401571j.C1.p5.fg
MAALPEATGALPQTEGEEVKDGVEVCVFDESPEVFSRAVHAISELTAGEPEPNFPDAEVERLASSITFLREWRHLSYEPKNVSFTCDARSAPSRVDTHKINLPQFSSASVPQYLAVAAHPPGSSYHKIGMPLIGRGIIQVWCLLAPSEEGHPHQSLVACNKYNPSNQPKRRGRPRKTITNSDHLEPSVKRPRGRPRKYPLPIAKLEDSSQNDTSQEFALIDPLVSSAVVSCDVAIACPMPTVNPVESTPRKGRGRPRKKPVEIKGLSGIKLTEDLSTALSPIALTCMEPKKKRGRPRKYPAPSNSKHLPGTDTELGNDSVCLLPGSIDCGLGPTENTGSGANITHAAVDAASPVPLSGQRGREQPEKEVIHIDNSMQSGQSDVGSMLPTYILPESSNKSNSTGPRRRGRPRKKPFPSTTSCVFAPGTETPKKGSTLTNSNNLMVLAKSNCDILANDIGRSSCAIENSVHLSVGTSRVATPAQGICLAKCKEESSAKKGRGRPRKQPISTERGCSKACRGEEQKTQTIPKSSDNAALVENCKKESCPGKGSVQDKKKSVSNERSSVVLSVEVQNMDGSSASTAYTSCCTPACNFENAERNQAVSVPSENSAQVIDELKDTEVARFKESTKDYHMICSAEKTLSRVPKDISLPRVVLCLAHNGKVAWDIKWKPPSANQSEHKSCLGFLAVLLGNGSLEVWEVPSPSMIQKIYSSSSKEGTDPRFLKLKPVFSSAKVALWKFSANLSFQGSKPFMCVTAESAPIRTVSWTPSVSKENMNAFVTAGENGLKFWDLRDPYRHLWELTTARRAVISLQWLKDARGIVISLEDGTLKFVSLSRIANDVPVTGRPFVGMKTQGVSTYQLSEYLIWSVHASEIAGYAAYCVADGTAVCFELTPRFWEKEPGRNRVPYFLCGSLSEEGTTIKIGIALPNSPLSNVPLGTKRATKTCKDVAQLHVIEEGELLANSEYNCAINPSIRDGQQDEPDEGQETGAIVLAAPSMQENFGTSTSRGSESPENFEVFPPKAVALHRLRWNMNKGCTHILPSSGIGWFSSVGCVFTVVSFAGVPWFFEFIRSGNVTRSVSKPHGRNLFLQSLVEEGQNPSTSNGASNSQKSVEDKDLIDCLENGVNFWTDYSKVQYHPQSLYELHGSWTDFDKFDNYGSAQEVVSDWSQIEEMNERLRFFVEECDHIQIEMLLGNIEMKLHSLTPEISDEDEDPYSVESLVVHGALDRGGQRTSISQVKDSVCSVYEARETKPKFSHLSASLCPLPVPLPFPSIFRGNIGRHGEILSDHAEESQPKGSLDIESIPMAARLRSSSTVLPFIERRSGSLQKHGVARGAIGSLVLRDWGFGREEVDDMGEHLAKLLRPFHPEMDLTSDSD

SEQ ID NO: 16243 - protein, 1378 aa, Oryza sativa
  Clone ID: TF_OSC900057j.C1.p13.fg
MAALPEATGALPQTEGEEVKDGVEVCVFDESPEVFSRAVHAISELTAGEPEPNFPDAEVERLASSITFLREWRHLSYEPKNVSFTCDARSAPSRVDTHKINLPQFSSASVPQYLAVAAHPPGSSYHKIGMPLIGRGIIQVWCLLAPSEEGHPHQSLVACNKYNPSNQPKRRGRPRKTITNSDHLEPSVKRPRGRPRKYPLPIAKLEDSSQNDTSQEFALIDPLVSSAVVSCDVAIACPMPTVNPVESTPRKGRGRPRKKPVEIKGLSGIKLTEDLSTALSPIALTCMEPKKKRGRPRKYPAPSNSKHLPGTDTELGNDSVCLLPGSIDCGLGPTENTGSGANITHAAVDAASPVPLSGQRGREQPEKEVIHIDNSMQSGQSDVGSMLPTYILPESSNKSNSTGPRRRGRPRKKPFPSTTSCVFAPGTETPKKGSTLTNSNNLMVLAKSNCDILANDIGRSSCAIENSVHLSVGTSRVATPAQGICLAKCKEESSAKKGRGRPRKQPISTERGCSKACRGEEQKTQTIPKSSDNAALVENCKKESCPGKGSVQDKKKSVSNERSSVVLSVEVQNMDGSSASTAYTSCCTPACNFENAERNQAVSVPSENSAQVIDELKDTEVARFKESTKDYHMICSAEKTLSRVPKDISLPRVVLCLAHNGKVAWDIKWKPPSANQSEHKSCLGFLAVLLGNGSLEVWEVPSPSMIQKIYSSSSKEGTDPRFLKLKPVFSSAKVALWKFSANLSFQGSKPFMCVTAESAPIRTVSWTPSVSKENMNAFVTAGEDGLKFWDLRDPYRHLWELTTARRAVISLQWLKDARGIVISLEDGTLKFVSLSRIANDVPVTGRPFVGMKTQGVSTYQLSEYLIWSVHASEIAGYAAYCVADGTAVCFELTPRFWEKEPGRNRVPYFLCGSLSEEGTTIKIGIALPNSPLSNVPLGTKRATKTCKDVAQLHVIEEGELLANSEYNCAINPSIRDGQQDEPDEGQETGAIVLAAPSMQENFGTSTSRGSESPENFEVFPPKAVALHRLRWNMNKGCTHILPSSGIGWFSSVGCVFTVVSFAGVPWFFEFIRSGNVTRSVSKPHGRNLFLQSLVEEGQNPSTSNGASNSQKSVEDKDLIDCLENGVNFWTDYSKVQYHPQSLYELHGSWTDFDKFDNYGSAQEVVSDWSQIEEMNERLRFFVEECDHIQIEMLLGNIEMKLHSLTPEISDEDEDPYSVESLVVHGALDRGGQRTSISQVKDSVCSVYEARETKPKFSHLSASLCPLPVPLPFPSIFRGNIGRHGEILSDHAEESQPKGSLDIESIPMAARLRSSSTVLPFIERRSGSLQKHGVARGAIGSLVLRDWGFGREEVDDMGEHLAKLLRPFHPEMDLTSDSD

SEQ ID NO: 16244 - protein, 519 aa, Oryza sativa
  Clone ID: TF_OSC409220j.C1.p4.fg
MAGQGSQKKKSCDWSKRYVDHLNGKMKCFHLQMSANFGHSMTIPNKFLDHFGGTLSRTIELVSPKGIVYIVKVTEHMNKTILQCGWEAFVDAHHIEENDSLLFRHIENSRFEVLILDSDGCEKVFTCAGIKKTSSVQERNAAPVDISRSTHDETTQSSGSKKFVRCQRASDSQRGKTAKLAETSSSGESGEEGTDSSTSEDESSYELDDPQMPPGRNYVLSRWTSLSEAQEEKVDMLVQDIQPEIPVFVAIMKHSNVNSRRACLVIPKRYASAHFPLESQTITLQRQGKNKKWYPMFYIRKDGSGYMLYGCWKNFVRDNHVKEGDMCIFHLTKFTGGEFGATVHLLRETKSGSLGSFHTSHKRFDLRDGRTWPKVTGVRRVSSRPYLTADRVSLTEEQVRKVEEVVHSIQSEGPMYVSIMNKSNVGTDGLYIIIFGRQFATRYLPEGEQTLTLLMTGKSNAWQVKMRPRSGDAQMITTGWRHFVHDNHLQIEDICLFQLMNDESKLTMTVHIIRRNEKS

SEQ ID NO: 16245 - protein, 538 aa, Oryza sativa
  Clone ID: TF_OSC409221j.C1.p1.fg
MKKYCDCCKRYVDHSNGKMKCFHRQMSANFEHSMIIPNKFLDQFGGKISRTVELESPKGNVYVVKVSKHMNKTVLQCGWEAFVDAHQIEENDSLLFRHIKNSRRASGVQERNADPIDVSSSTHDDTVQSSGGERFARSESGSDSQHSKTAKLAATCSSGGSECTGEEAKESSSSEHESSYDLVDPQIAPMPGYVLSRGTNLSQAHEEKLDMLVQEIRPEIPLYVTTMKHSNVNSHHASLVIAKHYACAYFPHTSQTITLKWHGKNRKWHPKFYIRKDQVGYILHGRWIDFVRHNHVKEGDICIFHLKNFNGRKFRATVHLLRETIPHSFGALHIPKRFESRNGRMRLKMTDDRRVSSTECRRGTMEPSTTNVKKEADNEQCNNGQGKRQEPLNFDVSVGSSKPYLTADRVSLTEEQFMKVEENVHSIQSEGPIYVSIMNKSNVGTDGLYIITLGRQFAIRYLPEGEQTLTLLTTGTGKAWQVKMRPRSGDARMFTLGWRDFVRDNRLQTEDICLFQLTKNSERGLAMKVHIIRHNERS

SEQ ID NO: 16246 - protein, 737 aa, Oryza sativa
  Clone ID: TF_OSC409221j.C1.p7.fg
MAPFLASPIRLHPCPLLFSHPHLFGSDYFAFSVKGRGAHLESMRVENKRGNRSWGTDAKRTHPNSIFNQLVRYGYIGTGFPDMNCSLTWSLIGGPSTLSLPSFFPSAHLLLSLALFFFLCIQSNHRMSKSGCERCRGRGFWDTDDQDTYFFKVMIGGFRRQMTIPYKFAENFRDQIQGTIKLKARNGNTCSVLVDKCSNKLVLTKGWAEFANSHDIKMGDFLVFRYTGNSQFEVKIFDPSGCVKAASHNAVNIGQHAQNMQGDPIEILSCSDEHLRAQSLTTERQNQPEKDVIDNCNKKMKTEHASSSEDDQETPTAEVHRMKVEEMVRAIHSNHPVFVAVMKKSNVTRQPCYVAISRKYANEYFPGGDQMLTLQRHGKRWQVKFCISKRKLRMLSKGWRKFTRDNELQHWAPLALFITLFFSPHFRKMKKCGQKMRKLNTRSTARDDQEKYFFKVMIGDFHKRMTIPDKFARHFKGVISKTIKLEPRSGYTFDVQVTKKLNILVLGSGWESFVNAHDLNMGDFLVFKYNGDFLLQVLIFDPSGCEKSTSCSMENAIDHVGQGWKEHNDISTSYHDQPKGNKHWMQKDSSSKGNKIGNTRSSNTPSKFSGCILPRGTCLPVVQEKKMKEKIQAIHSKTPMYGNVMTKCNVSGSPCVLEITQLYDDAYLPFNNGQELMLRHRDKSWKVRFYRFKNKSRKLTQGWKRFVHDNYLRMGDLCLFEILKNKYTMNVHIIRKC

SEQ ID NO: 16247 - protein, 306 aa, Oryza sativa
  Clone ID: TF_OSC409222j.C1.p4.fg
MVKILKTTLRATTMLKVLVKIRLSLFLTFSVLCLMPIMYMASHKTIPNEFLHNFGGKIPKSIKLETRSGLTFDVQVTKNSGRVVLQSGWASYVSAHDLKIGDFLVFKYSGDSQLKTLIFDSSGCEKVCEKPVDMSGRSYDIAMRNSQDEKKKRKQRDISRQGTVKPSEEGLKAELVPGCILPSRTDLTRLQKNILIEKVKAINSETPIYGYVMNNSSIHGIPCTVEISKKYADVYLPFEDGTVVLQHHGKSWNVRCCLTKQNSKRFLKGWRQFAGDNKLHLGDICLFDLLKDKKKYVMDVHIIRRK

SEQ ID NO: 16248 - protein, 327 aa, Oryza sativa
  Clone ID: TF_OSC409222j.C1.p1.fg
SSLYKMRRPGARCREGHAHFNGNHIDGQYKNFFKVMIGRFRERMIIPNEFLQYFRGKIPRTIKLQLRDGCTYDVQVTKNLGKISLQSGWKAFVTAHDLQMGDFLVFSYDGISKLKVLIFGPSGCEKVHSRSTLKNATHCGEKWEEPLHISSNSHDLPVKSPQNVSKSEKQWDSSEQENDTANIEEVALQGDDLQGHPVLNCILPKHTRLTDMQKQQLESKVGAIHSEIPIYGCILRKSRVHGKSQTVDICREYADVYLPFKELNMTLQRHGKNWEVLCRTKDTRTKRLSTGWSRFAQENNLQVGDICLFELLKKKEYSMNVHIIPKK

SEQ ID NO: 16249 - protein, 206 aa, Oryza sativa
  Clone ID: TF_OSC8898j.C1.p1.gm
MAMHPLAQGHPQAWPWGVAMYTNLHYHHHYEREHLFEKPLTPSDVGKLNRLVIPKQHAERYFPLGGGDSGEKGLLLSFEDESGKPWRFRYSYWTSSQSYVLTKGWSRYVKEKRLDAGDVVHFERVRGLGAADRLFIGCRRRGESAPAPPPAVRVTPQPPALNGGEQQPWSPMCYSTSGSSYDPTSPANSYAYHRSVDQDHSDILHA

SEQ ID NO: 16250 - protein, 305 aa, Oryza sativa
  Clone ID: TF_OSC900066j.C1.p8.gm
MAMHPLAQGHPQAWPWGVAMYTNLHYHHHYEREHLFEKPLTPSDVGKLNRLVIPKQHAERYFPLGGGDSGEKGLLLSFEDESGKPWRFRYSYWTSSQSYVLTKGWSRYVKEKRLDAGDVVHFERVRGLGAADRLFIGCRRRGESAPAPPPAVRVTPQPPALNGGEQQPWSPMCYSTSGSSYDPTSPANSYAYHRSVDQDHSDILHAGESQREADAKSSSAASAPPPSRRLRLFGVNLDCGPEPEADQATAMYGYMHHQSPYAAVSTVPNYCDPHTLGYWDYQNLTHKTGCSHAGAQLKNRTYKTL

SEQ ID NO: 16251 - protein, 199 aa, Oryza sativa
  Clone ID: TF_OSC401196j.C1.p40.fg
MATIVAWESRNLQLQGGGGGHGGGGGGGGGERREYMFEKVVTPSDVGKLNRLVVPKHYAEKYFPLGPAARTSPAGTVLCFEDARGGDSTWRFRYSYWSSSQSYVITKGWSRYVRDKRLAAGDTVSFCRAGARLFIDCRKRAASVSSSSLVPPALIKVQLPPSRPVVDEEEAACGRRCLRLFGVDLQLRADASPALDLQL

SEQ ID NO: 16252 - protein, 41 aa, Oryza sativa
  Clone ID: TF_OSC32158j.C1.p1.hg
MLSASDAGRIGRLVLPKKCAEAYFPAISQAEGLPLKVQDAT

SEQ ID NO: 16253 - protein, 553 aa, Oryza sativa
  unsure (1)..(553): unsure at all Xaa locations
  Clone ID: TF_OSC401603j.C1.p6.np
IVSALSISMHCMVSRPMSSPAQPPPTRPPVAAPQAQLRNGRPRMDAKARSQLLPRYWPRITDQELQHLSGDSNSVITPLFEKMLSASDAGRIGRLVLPKKCAEAYFPAISQAEGLPLKVQDATGKEWVFQFRFWPNNNSRMYVLEGVTPCIQSMQLQAGDTVTFSRIDPEGKLVMGFRKATNLSAEQPPEANNKVVVPDSSPNAAVPRPIKVNTESKSSSPVEQALPVKLTKVHYHKRKGQEPSPLPVKRKATSVGPKIKRFHMDSEESMELKITWEEAQELLRPPPKAPSIVVVDGHEFEEYEEPPILGRRTYFVTDQSGENHQWAQCEDCSKWRKLPVDALLPSKWTCSDNKWDSERXPAILEPFSLLYAVFMISYNRKSAAKKTKGKVDTDNIDVSDGLDTLANLAILGEGESLPSQPTTRHPRHRPGCSCIVCIQPPSGKGPKHKQTCTCNVCMTVRRRFRTLMMRREKRQLREGLWGASQKRARSIQRASSTNNKRTSNKRTSSPVKNQIDLNSQPEREDDLEIVKFSSASSASGAVFTTSGTVTSTG

SEQ ID NO: 16254 - protein, 272 aa, Oryza sativa
  Clone ID: TF_OSC4900j.C1.p12.fg
MAASPPLPTSIDGGQVLDDMEVVEMKYLFGKVLMPSDVSWDTEQLVIPDEHVGKLLDMVVMNRPEGGFFVVVVEDGEVTGKLWLFRYWKRDDVHCLTKGWGCYAREKGLRAGDTVSFFHSTACGRFFICCRCTCMSFLSLPTTSHRIHGSSVLPQPRAAQEAHHPFSGHATLCLGNKASDHSAPARHATASLGCAAAQPPQVPPTPTPRRRRRSMMVHPEPPEHTTDGMPVILESMALVSTPPVAKRVRLFGVYIDVPPLRPGGEATQDFNP

SEQ ID NO: 16255 - protein, 530 aa, Oryza sativa
  Clone ID: TF_OSC100940j.C1.p8.fg
MADARGSSSSSGDGGGGEGKGGAGHGDFVGGGQHNWYHGILGAVPPPNVGRQNIVHHQYPAASLIQQHHQSPTMPLPMAQLPYVPQYTVLPTPAVLPSHHHHHGQSQISQENFQDWVPSNNVAAPHVPSAFQDWRQMCNGSAFMPFGQTAANSNVFYQNLTFNSWTSNNMPRNPVYTSFHPAAIEDHHAPLFHSNNHDIDPEFLGNRHLHGVDIAGAPPAKATSPATAGGLLTNTAPATVSQIHARCRRRQIYRCCGLLPRAPPPSDPCAFARATITAARSARGLLSHLYGGLVFWLVGKRKLGEKRERKRKVVAGMDPPIVFRRSDMESEKNDDNPDQTPVSEPPSMNQNGENLIIRFNCREYRVILRKELTNSDVGNIGRIVMPKRDAEAHLPALHQREGVTLKMDDFKFETTWNFKYRFWPNNKSRMYVLESTGGFVKHHGLQTGDIFIIYKSSESGKFVSSVPFTSTTYGESDGEDYNGDRSGPGAGEVADEDFRKPEFGWYCCAKINRKESEIREQVSKEKVNSN

SEQ ID NO: 16256 - protein, 728 aa, Oryza sativa
  Clone ID: TF_OSC400964j.C1.p49.fg
MDASAGSSAPHSHGNPGKQGGGGGGGGGRGKAPAAEIRGEAARDDVFFADDTFPLLPDFPCLSSPSSSTFSSSSSSNSSSAFTTAAGGGCGGEPSEPASAADGFGELADIDQLLDLASLSVPWEAEQPLFPDDVGMMIEDAMSGQPHQADDCTGDGDTKAVMEAAGGGDDAGDACMEGSDAPDDLPAFFMEWLTSNREYISADDLRSIRLRRSTIEAAAARLGGGRQGTMQLLKLILTWVQNHHLQKKRPRTAIDDGAASSDPQLPSPGANPGYEFPSGGQEMGSAAATSWMPYQAFTPPAAYGGDAMYPGAAGPFPFQQSCSKSSVVVSSQPFSPPTAAAAGDMHASGGGNMAWPQQFAPFPVSSTSSYTMPSVVPPPFTAGFPGQYSGGHAMCSPRLAGVEPSSTKEARKKRMARQRRLSCLQQQRSQQLNLSQIHISGHPQEPSPRAAHSAPVTPSSAGCRSWGIWPPAAQIIQNPLSNKPNPPPATSKQPKPSPEKPKPKPQAAATAGAESLQRSTASEKRQAKTDKNLRFLLQKVLKQSDVGSLGRIVLPKKEAEVHLPELKTRDGVSIPMEDIGTSQVWNMRYRFWPNNKSRMYLLENTGDFVRSNELQEGDFIVIYSDIKSGKYLIRGVKVRRAAQEQGNSSGAVGKHKHGSPEKPGVSSNTKAAGAEDGTGGDDSAEAAAAAAAGKADGGGCKGKSPHGVRRSRQEAAAAASMSQMAVSI

SEQ ID NO: 16257 - protein, 267 aa, Oryza sativa
  Clone ID: TF_OSC4900j.C1.p11.fg
MAASLPLSAAIVGAEESVDKEVLEMEYLFEKFLMPSDLCSNTEWLGIPEEHVRKFGMMLEDRDGYSVIFFQDGVVPGKLWCFRYWKSNGVHGLTKGWRCFVREKGLKAGDTISFFRGSACGRLFICCRLGTHATFASSSTLHHGFSMPPPPARPLVGLQSGMLARDVPSLGQARLHDGNQDGGGAPSRHVPSSGRRVEAQLSRVSSRRQRRTMKHSIPEPTIETPPILESMFLIAAPPAVKCLRLFGVNIYVLPVSSSGQPKQESSP

SEQ ID NO: 16258 - protein, 88 aa, Oryza sativa
  Clone ID: TF_OSC404812j.C1.p6.hg
MQRLVGGRLTWGRVGAFPWRDHAGPLGERGRSDKPSNCRHRCCPDPAGSFSTCDSSRNSSQSYVLTKGWSRFVREKGLCADELLFIDC

SEQ ID NO: 16259 - protein, 268 aa, Oryza sativa
  Clone ID: TF_OSC400044j.C1.p70.fg
MAGVTSKRRSSSASTSSSSGDGAAVSDRPRGVTRKRRSGGRCPRPAASLRPAAPRPSSSDARARTRHKSGICVLSGVISITNGGYNWCRKVNMLDLNRAILDSDHHTAGLRVILQKELRYSDVSQLGRIVLPKVLAQQQEQDVIGAKKAGDQQAATVPQVDEHISTLFPIFPIAQVDDYLSPMAPQVDISAFVPHADENHEIFDGILNSLPEIPVANVRYSDFFDPFDDGMDMANTLNANANQSASLHVTDDKSGHSLIPNPKSGPHM

SEQ ID NO: 16260 - protein, 1214 aa, Oryza sativa
  Clone ID: TF_OSC900160j.C1.p1.gm
MADEGERVCIIVDEMEREDSDNEEADDDASSDEEGDVMATNWANEDFSGLVISEGDHVPWEYKENEVIEGARYAHKDEMKEANGWDEKGLPAKWPDIRSRWCMRHMGANFYKQFKNKHLMELFKRLCAQNQEKKFNELWDKLDELTTKQTDEQSRRPQVEGDEPPIPLGALHDDPPTMRSRSGSSIRNFTQWIENEPKEKWSLLFDTDGSRKCDLRGHTYKKCPKNAEVPSGADASPSRQASDGMAYDTPALLNRGIDRNHRSFPSAVEGAQLGTFRPRTSREWLRVDPRHVPWYALVEAAADDRDPAKRWDADRSLLAALVDRWRPETHTFHLPCGEMAPTLQDVSYLLGLPLAGAPVGPVDGVVGWKEDITARFEQTDLLHPDADDYSVRRSLEAYLLWLFGWVMFTSTHGHAVDFRLVHYPRSIADAQPQDVPQWSWGSAMLAATYRALCEACTKTDAGAIIAGCPMLLQLWAAERFAIGRPVVDSAPYGVGRSTQWPEDGPTMGTYWCRRGRRYAHVQVRRGYPDFVFEFDRLQPSDVIWEPYTEEAVAARAPLGLSSLCTRDQAYWLTILPMVFDIFVEPHCPQRVMRQFGLRQVFPGNVQPTVLPADHSLTRRGQLAGALWAPRVQQYVDDWVLATEEVINELFPHTEENYRDYLRWYLPRTRARVTFTPDAPEPHVAAVTDAYPTHRDRDYFVGADAARDISADITAVQVRLNRAPWTSYLQLVRYNHGLARLPSEQDLDLRHLFRTDLVCLRAPLASEQCDLQHRTSSAFERVRRHDRRFRELRRGVRHLFGRVRQLFLSRSVDPSPTRRDLRYWGLFVSRRLEELQRRTLRSSQRSHLYRQDGLPVPYPRTDSRTPRGTLGHRELSDGEEVSDGEYQAGDDFSGYAVRGRGFVEKEHIFDKVVTPSDVGNLGRLVIPWQHAECYFPRDVPANEREGVVLRFEDDAGNSWRFLYRGSSLTLGWSHFFRKNRLDAGDMVSFYRGASEATRDRLFIHSKRRMHILPTLGYSDPQVHINRLFQLLVRVRTMVSSFGKSGSPSPPNSPLPTVQNFTYKALKDCLQDLHYYSLLSMMGRNHKSQSTSAKIRDTIPTLDALIQLRSLSDPVFRIPAAATSHCILLCRGVLGIMGFLCSDENMKEDHRMLQVPAFDDLNYSAQDKITRMKEQTMPSSLADPIYLLPTAIRNLLYLDLSNCSDIAVGFVGLSQS

SEQ ID NO: 16261 - protein, 321 aa, Oryza sativa
  Clone ID: TF_OSC400021j.C1.p6.fg
MGQMDGGDGGGGGHPYHYQALLAAVHQQTVPFPNPFPAPSSGAEPPHPHNHNHNHNHNHNIHNSHNHNHNHNAAPHPCHTPTPTPTPRGFADWSASTSAFTSLAAHSSTAPSNAVHYSFSPCYAFWTHYMLNKNAYPTSFPAPHDDHLRLANNNHPRDAPGPASSYGVESFTSPSMAPNICTHMPPIEGPISAKEDKKPEILPRVVKSSDELETRNSNVEFHSETVGTLPESKQGHDSRATKLLNSGEYQVILRKELTKSDVGNVGRIVLPKKDAEASLPPLLQRDPLILHMDDMVLPVTWKFKYRYWPNNKSRMYIGFRR

SEQ ID NO: 16262 - protein, 433 aa, Oryza sativa
  Clone ID: TF_OSC900266j.C1.p5.fg
MADTRGSTSSGGGDDRGREGHDDFTGGGQYNRYHRILEAVPSPLVRSENVVHHQYPTGLIHHPSSTMPVAPCSYVPRYTMVPTSAMLPLQHHHRQLQISQENFQDRVPSNNVAAPHLPSNFQDLRPMCNGPPFMSYGQTASNRNVLYQNLTPYSFNAWASNNMPRNPVYTSYHPTAIEDPHATPFHINNHDTDQGFFTVSTSFRVDQSFVHAPSPFPPVSSSSRSFSSAQISNGPTDAKKAKKSDIKDQPIVLRRSDTESEKNDELNQTPASEPSSMSHNSANSTIRFNCREYRVILRKELTNSDVGNIGRIVMPKRDAEAHLPALHQREGVMLKMDDFKLETTWNFKYRFWPNNKSRMYVLESTGGFVKQHGLQTGDIFIIYKSSESEKLVVRGEKAIKPNVIMPIVDCSCKNDLNNSEECGFAISLLTKKT

SEQ ID NO: 16263 - protein, 287 aa, Oryza sativa
  Clone ID: TF_OSC401138j.C1.p1.fg
MYMDLTLGGALLQVEEATEEEEEEEEEEQALGQEPAPAAAAAALVLGRRHGVVVGGGGGGVVVAAEREHMFDKVVTPSDVGKLNRLVVPKQHAERFFPAAAAGTQLCFEDRAGTPWRFRYSYWGSSQSYVMTKGWSRFVRAARLSAGDTVSLSRAADGRYFIDYRHCHRHGGRDISFASAATAMPAAAWPLFGRVQTAAPVSYGGGHGSAAAATMFLDTVAPVAAAGGHRGEVGPSGQRSFRLFGVNVECGGDVDAAAEEEDADDDVDDGDHRRGEEMELVMWTNHR

SEQ ID NO: 16264 - protein, 313 aa, Oryza sativa
  Clone ID: TF_OSC900015j.C1.p21.fg
MAMNHPLFSQEQPQSWPWGVAMYANFHYHHHYEKEHMFEKPLTPSDVGKLNRLVIPKQHAERYFPLGAGDAADKGLILSFEDEAGAPWRFRYSYWTSSQSYVLTKGWSRYVKEKRLDAGDVVHFERVRGSFGVGDRLFIGCRRRGDAAAAQTPAPPPAVRVAPAAQNAGEQQPWSPMCYSTSGGGSYPTSPANSYAYRRAADHDHGDMHHADESPRDTDSPSFSAGSAPSRRLRLFGVNLDCGPEPEADTTAAATMYGYMHQQSSYAAMSAVPSYCRHGWGGFRKHQVEKERGIEETGRELCNYAMLPFVAIQ

SEQ ID NO: 16265 - protein, 530 aa, Oryza sativa
  Clone ID: TF_OSC900266j.C1.p4.fg
MADARGSSSSSGDGGGGEGNGGAGHGDFVGGGQHNWYHGILGAVPPPNVGRQNIVHHQYPAASLIQQHHQSPTMPLPMAQLPYVPQYTVLPTPAVLPSHHHHHGQSQISQENFQDWVPSNNVAAPHVPSAFQDWRQMCNGSAFMPFGQTAANSNVFYQNLTFNSWTSNNMPRNPVYTSFHPAAIEDHHAPLFHSNNHDIDPEFLGNRHLHGVDIAGAPPAKATSPATAGGLLTNTAPATVSQIHARCRRRQIYRCCGLLPRAPPPSDPCAFARAAITAARSARGLLSHLYGGLVFWLVGKRKLGEKRERKRKVVAEMDPPIVFRRSDMESEKNDDNPDQTPVSEPPSMNQNGENLIIRFNCREYRVILRKELTNSDVGNIGRIVMPKRDAEAHLPALHQREGVTLKMDDFKFETTWNFKYRFWPNNKSRMYVLESTGGFVKHHGLQTGDIFIIYKSSESEKFVSSVPFTSTTYGESDGEDYNGDRSGPGAGEVADEDFRKPEFGWYCCAKINRKESEIREQVSKEKVNSN

SEQ ID NO: 16266 - protein, 636 aa, Oryza sativa
  Clone ID: TF_OSC401605j.C1.p26.fg
MAKEEDGGGGPEFVRWREDFVSQERGSRVVHYYLEDAAGASHLAVVGTERSLRHMLYVVSEDFREAQGADGGGPGVFARKWRSRREVVDWLASFLPAKSLASKLSKFGSHMGNDIGLDGYSEPDSFMGHNLGKACSSDIMWSGSSWTCGKQLYHYKAFCRNGTTISTHSFVLVMSEEESRYLAYLEDMYEDKKGQKKVKVRWFHQNQEFACAIPPPPPHPCEVFITPYSQVISVECVDDIATVLTPEHYEKCVNTLPNSSMVGIRFCFRQYSKNKFKRFDLRSLRGYFSQAVVLSLKLPPEQEKDDGSDIIKTFEQWTPGKTKFPKQFERLYSKCLGTKICRGPQEDSIASYQKPSSKQSPRKHLSVKFIGPQNQRMPTYNVGDRIEVLSQDSGIVGCWFRCTVLKSCTNHNKLKVQYDDLQNADDSGRLEEWVPVSTLARPDKLGLRCPERRRVRPRPQQNSLADGTNLLPGAAVDVWQFSGWWEGVLVSADNISADSLQIYFPGENFFSVCQLKNLRISKDWVKSHWVDIEMKPDVLSKIPSVGVQTRQPDNLTSVERPDSRNSAMSDQELAAIQTNSSEDKQTGADQPAEVSLTDMASAFAEDQKQTVLGKRPRDDDAEQHCNGEVGIDVGKL

SEQ ID NO: 16267 - protein, 711 aa, Oryza sativa
  Clone ID: TF_OSC2508j.C1.p1.fg
MEVEAGGRGLAVLPRFRIMENTCVTQWKPLQVSLFGSIVFNENPYDDIEFTDVAASKDVSHTSSVRNNSKEFTWLGPAWLCEKRWKHYRSFCRKGITISVHNFVYILSEEKKRLIAQVEDLYEDTNSTNVVMVRWFDKVDEVGVELPPDVGDREIFFSPGLQDLSVECIDGLAAVLSAQHFEKFQSSPKHSYWQPYICRRQIDEDGVKPFDVTQLQGYWSQEVLRTMFNAASSLKVRFKVTKGASSSDGAQKRKRDAFSETDPQQCVPSAAFGSDSLKNDLEHKTQKQLYPGSRAEVLSQDSGIRGCWFRCFVLKRRGDKIKVRYEDLQDADETGNLEEWVLLTRIAKPDQLGIRIPERPMVRPYHVHSKDPCSFDAGSIVDAWWNSGWWEGIVLQQGNDRRLQVYFPGEKQIADFCEDDLRHSREWAGGKWNSLGERKDITHLLPPTSVHEEGGLLSKPVSQEGNPSSKLESDKRCDDKSLGTKISHDQKHQKRVLADLTNALKFDNLKWRPRKRSRRSGSKRQSDTSSGSGSSSQGDMEESSPCGSFAVLNSAPDEEVCKSSGEPLFMRVSNLTTLLYGFARFFYRSLFSGEPEADDRSSRAAAKWTDGVHEWQGDYGELEVQRGNGVFYCMTVRMSIDCNGCYQRIRRALLQMQEDLDSHLIDRKQQRVSVCGAFVPQDVAIKLRKKTNRRVEILEIKEIDAGDGHRL

SEQ ID NO: 16268 - protein, 816 aa, Oryza sativa
  Clone ID: TF_OSC400493j.C1.p35.fg
MDELAAASAAARRRWVQWEEVVVSNDRGRRLVHYYLRGAAAGGGGGGEVRELAVVGRERSPRHMSYVVQGRFLRSLAAAGVGVGVGVGAAVGAVVAVPSPSRSPLPASAEGGAPRKWRSRREVVDWLSSLVSGCNYGSSSMSNRFNENPYDDIEFTDVAASKDVSHTSSVRNNSKEFTWLGPAWLCEKRWKHYRSFCRKGITISVHNFVYILSEEKKRLIAQVEDLYEDTNSTNVVMVRWFDKVDEVGVELPPDVGDREIFFSPGLQDLSVECIDGLAAVLSAQHFEKFQSSPKHSYWQPYICRRQIDEDGVKPFDVTQLQGYWSQEVLRTMFNAASSLKVRFKVTKGASSSDGAQKRKRDAFSETDPQQCVPSAAFGSDSLKNDLEHKTQKQLYPGSRAEVLSQDSGIRGCWFRCFVLKRRGDKIKVRYEDLQDADETGNLEEWVLLTRIAKPDQLGIRIPERPMVRPYHVHSKDPCSFDAGSIVDAWWNSGWWEGIVLQQGNDRRLQVYFPGEKQIADFCEDDLRHSREWAGGKWNSLGERKDITHLLPPTSVHEEGGLLSKPVSQEGNPSSKLESDKRCDDKSLGTKISHDQKHQKRVLADLTNALKFDNLKWRPRKRSRRSGSKRQSDTSSGSGSSSQGDMEESSPCGSFAVLNSAPDEEVCKSSGEPLFMRVSNLTTLLYGFARFFYRSLFSGEPEADDRSSRAAAKWTDGVHEWQGDYGELEVQRGNGVFYCMTVRMSIDCNGCYQRIRRALLQMQEDLDSHLIDRKQQRVSVCGAFVPQDVAIKLRKKTNRRVEILEIKEIDAGDGHRL

SEQ ID NO: 16269 - protein, 322 aa, Oryza sativa
  Clone ID: TF_OSC10018j.C1.p1.fg
VASDEVAICNNDGKDAKLANISTTKGSSSSTAGNDSGDFKWLGPESHSKKGKSYKSFWRRGFTFMVHDFVYILVQHGNKLVAYVEELYEDNHANKMVQIRRFRTLNSTGIQLSPGVNDREILHSDNLQDIGVECIDGLASVLNEEHFEMFQAIANNTNRQPYLCIRHIDNNSNVKTFDIAQLQGYSEQEIFRIVSGTPPVTVHPDASEGSKNTPRSSARGHHHHRTMENPTASDETNVQATTINVLARNAAPTESASALINSALEKYLEQYFSHGCLVECLSQDSGIRGCWFIGSVIRRCGDRIKVRYQHLQDPETPRANLE

SEQ ID NO: 16270 - protein, 730 aa, Oryza sativa
  Clone ID: TF_OSC900127j.C1.p10.fg
MGNDGEKASKLCKEAGGPSLDSNLAPTIVLALTTVPMGWDNRRRKQASTIMNARGRGARNGNGPNRGRGGGRAHSDVVVGANTTVLATRRWVGLEIDSVPGNEGQRDIVNYYLRCATGVGNGERELAVVGTHHSNRRVTYVVHEPFLQSLKELQVAAVVGVERLMWKSRKDVVHWLNMLISDVASDEVAICNNDGKDAKLANISTTKGSSSSTAGNDSGDFKWLGPESHSKKGKSYKSFWRRGFTFMVHDFVYILVQHGNKLVAYVEELYEDNHANKMVQIRRFRTLNSTGIQLSPGVNDREILHSDNLQDIGVECIDGLASVLNEEHFEMFQAIANNTNRQPYLCIRHIDNNSNVKTFDIAQLQGYSEQEIFRIVSGTPPVTVHPDASEGSKNTPRSSARGHHHHRTMENPTASDETNVQATTINVLARNAAPTESASALINSALEKYLEQYFSHGCLVECLSQDSGIRGCWFIGSVIRRCGDRIKVRYQHLQDPETPRANLEEWLLVTRTANPDTLRIRLSGRTRIRPHNMSERENPSTISVGTVIDGWLYDGWWEGIVLKVNDARRLLAYLPGEKKMVLFRKDQLRHSLEWIDNEWKNFAHREDIARRIPSAEDLRIRVITAREVLTREEVMKQLEGLKTNKGGSNSAKPAAEKGSSSSATKKTTPDLIRHATNDLGSLNFKHVGVPASEEIRTDNKGSQVNLENVLKSDSLKWTERKARGSFGPRM

SEQ ID NO: 16271 - protein, 557 aa, Oryza sativa
  Clone ID: TF_OSC3380j.C1.p2.fg
MKDGRDEEVATDAVGAGGVDVGGETSKLIDQDCMAILDVLARRLMSGESEPYIGKIIKIWQQNQAKKVKILWFFLPDEIRKHLSGPVMEKEIFLACGEGVGLADINPLEAIGGKCTVLCISKDERNRQPSPRELAMADYIFYRFFDVNSCTLSEQLPEKIAGVEGIFLLIPKVEQVTSCSDQEVHGVDQKMLNVPVPLPQSTVMEDESPVAAVSLPPSVFKEENVASAIPFPQPVVKEESAAAAIPPPHVALKKESVSKSTENITKPAQKVLPGERPPKRVKFSENVTVQNVPLDVPERPSRTGPLELAGRQADRSKWFKIPWDTRLRNADEQGTLVYIQNLDIQFAAADIEELIRDALQLNCIAKPINHPTYDDPNNGKAYAIFKTKSAADSAISKINSGLVVGGRPLYCSKGLLKVPKPSETLLGHLTINNIRMGIRQREEQVLMLSYEVCSISFLCLNIFAQPLFFLQKKAVSTSHCSQPNTMEYDLALDWMLVRAKQETKFRTLHKLLNAATGLGRLKIDTANSGDRLVGIVGIAKDDHVFVLDALGEPYAGS

SEQ ID NO: 16272 - protein, 557 aa, Oryza sativa
  Clone ID: TF_OSC4791j.C1.p11.fg
MKDGRDEEVATDAVGAGGVDVGGETSKLIDQDCMAILDVLARRLMSGESEPYIGKIIKIWQQNQAKKVKILWFFLPDEIRKHLSGPVMEKEIFLACGEGVGLADINPLEAIGGKCTVLCISKDERNRQPSPRELAMADYIFYRFFDVNSCTLSEQLPEKIAGVEGNLLLNSKVEQVTSCSDQEVHGVDQKMLNVPVPLPQSTVMEDESPVAAVSLPPSVFKEENVASAIPFPQPVVKEESAAAAIPPPHVALKEESVSKSTENITKPAQKVLPGERPPKRVKFSENVTVQNVPLDVPERPSRTGPLELAGRQADRSKWFKIPWDTRLRNADEQGTLVYIQNLDIQFAAADIEELIRDALQLNCIAKPINHPTYDDPNNGKAYAIFKTKSAADSAISKINSGLVVGGRPLYCSKGLLKVPKPSETLLGHLTINNIRMGIRQREEQVLMLSYEVCSISFLCLNIFAQPLFFLQKKAVSTSHCSQPNTMEYDLALDWMLVRAKQETKFRTLHKLLNAATGLGRLKIDTANSGDRLVGIVGIAKDDHVFVLDALGEPYAGS

SEQ ID NO: 16273 - protein, 719 aa, Oryza sativa
  Clone ID: TF_OSC26838j.C1.p4.fg
MAPSSPSSAAAPTRTFTRKRAASAFAFAKATDEPSTKRTRRPKAETKPRKKKDEVKEEEKPPMEDDACGEEPDAEEMALGEEAEAEEAEAEQKQLDAPAPGVARKRVAQPSRVRHGSDGDHDPEFVGDPFPAKEARDKWPQRYQRNAATRRPDEEEDIKARCHYSSAKVDGTLYCLHDDVYVKAEEDKADYIGRITEFFEGTDHCHYFTCRWFFRAEDTVISSIMMENADDEKHDLKRVFLSEEKNDNVLDCIISKVKIVYIDPNMESEAKARRLADCDLYYDMSYTVAYSTFANIPLGKVVSDSEASSVGKATLLDLYSGCGGMSTGLCLGAALAGLNLETRWAVDFNSFACESLKYNHPRTEVRNEKADEFLALLKGWHSLCDEYVKKDIDFSSAGASENEEDDDEPLEKDEFVVEKLAGICYGGSGREDGLYFKVQWKGYGREEDTWEPIENLRDCPLKIKEFVQEGYRRKILPLPGDVDVICGGPPCQGISGFNRFRNRKEPLKDEKNKQMVTFMDIVAYLKPKYVLMENVVDILKFADGYLGRYALSRLVAMKYQARLGMMVAGCYGLPQFRMRVFLWGALPTMVLPKYPLPTHNVVVRGGAPNAFSVNNHQPNEVMEYGSSPKTEFQRYIRLSRKEMLDSSFEGKDGPDLGKLLDHQPLKLNKDDHERVQQIPVKKGANFRDLKGVRVGANNIVEWDPDVPRVYLSSGKPLAP

SEQ ID NO: 16274 - protein, 842 aa, Oryza sativa
  Clone ID: TF_OSC400269j.C1.p65.gm
MAPSSPSSAAAPTRTSTRKRAASASASAKATDEPSTKRTRRPKAETKPRKKKDEVKEEEKPPMEDDACGEEPDAEEMALGEEAEAEEAEAEQKQLDAPAPGVARKRVAQPSRVRHGSDGDHDPEFVGDPFPAKEARDKWPQRYQRNAATRRPDEEEDIKARCHYSSAKVDGTLYCLHDDVYVKAEEDKADYIGRITEFFEGTDHCHYFTCRWFFRAEDTVISSIMMENADDEKHDLKRVFLSEEKNDNVLDCIISKVKIVYIDPNMESEAKARRLADCDLYYDMSYTVAYSTFANIPLEASSVGKATLLDLYSGCGGMSTGLCLGAALAGLNLETRWAVDFNSFACESLKYNHPRTEVRNEKADEFLALLKGWHSLCDEYVKKDIDFSSAGASENEEDDDEPLEKDEFVVEKLAGICYGGSGREDGLYFKVQWKGYGREEDTWEPIENLRDCPLKIKEFVQEGYRRKILPLPGDVDVICGGPPCQGISGFNRFRNRKEPLKDEKNKQMVTFMDIVAYLKPKYVLMENVVDILKFADGYLGRYALSRLVAMKYQARLGMMVAGCYGLPQFRMRVFLWGALPTMVLPKYPLPTHNVVVRGGAPNAFSVNNHQPNEVMEYGSSPKTEFQRYIRLSRKEMLDSSFEGKDGPDLGKLLDHQPLKLNKDDHERVQQIPVKKGANFRDLKGVRVGANNIVEWDPDVPRVYLSSGKPLVPDYAMSFIKGRSLKPFGRLWWDETVPTVVTRAEPHNQARVLTVRENARLQGFPDYYKMFGPIKEKYIQVGNAVAVPVARALGYSLGLAYQRESEGSSPLFVLPDSFTEVGRQAAPARASSVGIPVGEVVEQ

SEQ ID NO: 16275 - protein, 227 aa, Oryza sativa
  Clone ID: TF_OSC402051j.C1.p12.fg
MAKTKQGKRDVDSYTISGTNKVVRVGDCVLMRPVDSDNQPYVARVEKMELDGRGSVRVRVRWYYRPEESKGGRRQFHGAKELFLSDHFDMQSANTIEGKCVVHSFKNYTKLDNVGPEDFFCRFEYKAATGAFTPDRVAVYCKCEMPYNPDDLMVQCDDCKDWFHPSCMSMTIEQAKKLDHFVCSDCVKENGAKRPSHAYAGSTKYEPKWIQGFSLSTGISLLLFPFL

SEQ ID NO: 16276 - protein, 625 aa, Oryza sativa
  Clone ID: TF_OSC400543j.C1.p17.fg
MGRRRRFAQLATTSDDDDDDAPAADAPPKAKPPPPPSSSSGPKKPKQRRLSSAAADDDDDVEEDDLELEEEEEDEKDLEEMRRNEEEERREETQTRRRRRRRGRKPKRPAEESEEDEEEEEEEAKAEEAREEENTEAVPIGEPVKITGRGKKQRKHYTSFEYEGNTFELEDPVLLTPEDSKEKPYVAILKDITETEGSLSVTGQWFYRPEEADKKGGGSWKASDTRELFYSFHIDDVPAESVMHKCVVHFIPQHKKIPSRKEHPGFIVQKVYDTVAKKLWNLTDKDYEDNKQHEIDLLVKKTIDRIGQLSDIEPADAPGDNNDQLSNKRGLRKRPVLPIDVSRDDALAGKSEQFGKAETPGSDKLKNYATLVKYKAVTGDQYRDRWLDKLVDTIPLTSKESAGASHADPGGATKSSTNGSSAKEDNEKSYSPDVIVSIMASLERSTYEALGSDFQKYNQKLRQLLFNIKNSPVLRNRLMNKELDPPVLLTMSPDELKVGLTAAERTSEPEESRKLQMTDARCVRCAEKEVGVSDIIHAGHGDRYQKVVASRRENEVVNVGGDRTLRLARLVASGKILRVCDVLKESFQRWRWPRMSLIDLVGQHRMEWEVVASGLDVRVELVRAW

SEQ ID NO: 16277 - protein, 59 aa, Oryza sativa
  Clone ID: TF_OSC27144j.C1.p1.fg
MAKTKQGKKDVESYTIKGTTKIVRVGDCVLMRASDTEKAPYVGRVERLETDGRGSVRVR

SEQ ID NO: 16278 - protein, 844 aa, Oryza sativa
  Clone ID: TF_OSC400897j.C1.p16.fg
MDLSATPSRSKSGLRSSPRKPVAAPAVAQMDLSTPSKPTPRRKPKAPPVAAPMSPVTPSSVRRSSRLLETPTKVTSETPVKPTPTPKRKRAAPSPSPKTPTQSEPKRQRQRQRQRQQPKKPKKRAYYRKVVYDGGEFAAGDDVYVKRRDGAESDAEDPEAEECRVCFRAGAAVMVECDVCLGGFHLRCVRPPLRRVPEGDWACPYCEAERAGKAIERPKPPEGKRIVRTAKEKLLSSDLWAARIESLWREPDGIFWAKVRWYIIPEETAAGRQPHNLRRELYRTNDLADIEMETILRHCYVMSPKEFKDASDQGDDVFYCEYEYDIHWHNFKRLADIDDEPETKEDPGDEPYNAGNDYVSDSDEDSEYDEEEEPTKCSSARTHQSHALAANLRKGRTYGLQKIGIRKIPEHVRCHQKTNLEKAKATLLLATLPKSLPCRDKEMEEISAFVKDAICNDQCLGRCLYIHGVPGTGKTMSVLAVMRRLRSELDSGNLRPYSFIEINGLKLASPENIYKVIYEQLSGHRVGWKKALHYLTEHFSGGTKIGKQANQPIILLIDELDLLLTRNQSVLYNILDWPTRPNSNLVVIGIANTMDLPEKLLPRISSRMGIQRLCFGPYNYRQLQEIITSRLKGIDAFEDQAIEFASRKVAAMSGDARRALEICRRAAEFADYRVKQSGHTSVNRGKNVVCMGDIEAAIQEVFQAPHIQVMKNCPKFGKIILVAMVHELYRSGLGEVMFDKLAATVLSWCHVNRELLPGYDTLLKICCKLGEGKIILCEEGTKHKLQKLQLNYPRNPQIFHGCPSTCEVYTCSGCTFPAFHSSTPGVGEQRSQLLALDQQSLKAI

SEQ ID NO: 16279 - protein, 236 aa, Oryza sativa
  Clone ID: TF_OSC101747j.C1.p25.fg
MAKSRPPKRILESYTIKGSDKVIKREAPPPTSPTDYGSSVSGDCVLMRASDTSKPPYVARVEAIEAAGSRGTNVRVRVRWYYRPEESMGGRRPFHGAKEVFLSDHYDVQSADTIEGKCNVHSFRSYTKLDSVNAEDFFCRFEYKSATGSFVPDRIAVFCKCEMPYNPDDLMIQCEECSDWFHPSCIGMTIKDAKKLEHFFCQSCTAENGKMAENSHEATAQSEEKVSFDVMEKLKV

SEQ ID NO: 16280 - protein, 248 aa, Oryza sativa
  Clone ID: TF_OSC16028j.C1.p4.fg
MAKSRPPKRILESYTIKGSDKVIKHYGSSVSGDCVLMRASDTSKPPYVARVEAIEAAGSRGTNVRVRVRWYYRPEESMGGRRPFHGAKEVFLSDHYDVQSADTIEGKCNVHSFRSYTKLDSVNAEDFFCRFEYKSATGSFVPDRIAVFCKCEMPYNPDDLMIQCEECSDWFHPSCIGMTIKDAKKLEHFFCQSCTAENGKMAENSHEATAQSEEKLTNFQYLMTQSTSWETVPIYSYGSTKSGVILQL

SEQ ID NO: 16281 - protein, 226 aa, Oryza sativa
  Clone ID: TF_OSC423524j.C1.p14.fg
MAKSRPPKRILESYTIKGSDKVIKHYGSSVSGDCVLMRASDTSKPPYVARVEAIEAAGSRGTNVRVRVRWYYRPEESMGGRRPFHGAKEVFLSDHYDVQSADTIEGKCNVHSFRSYTKLDSVNAEDFFCRFEYKSATGSFVPDRIAVFCKCEMPYNPDDLMIQCEECSDWFHPSCIGMTIKDAKKLEHFFCQSCTAENGKMAENSHEATAQSEEKVSFDVMEKLKV

SEQ ID NO: 16282 - protein, 1407 aa, Oryza sativa
  Clone ID: TF_OSC101037j.C1.p10.fg
MEASVSQIRRSPPRIEKRKKKNHNSLSGKAPPTRGNCDSLPPVWNAKSASECHWTRRLTSNYLSLVVVVVGEELPPCFAPPPMETPPPDPVSPPPPAADEGSPGGDDGAEDAGGFSAGLDSLWTALFGSPEELEPMWSPPRGFGVGAEFAAAEVEPEIMDVAGGPWDGAPWRSSGVVAGEGAATALVPPTAAAGFAEFEPAAPIDSYPAGAAAASLGDVPEVSALDSGVDCSPDPPPSSSPPVDFDARGFDPVADSAPAMESPLPPSVASSEANLDGRMLDCTLNSVPSPPLASPYEVGLGAEDPIKDSSPSVAWGTTMDAKDPEVDATCANGTALRRSRRIMKIKSAASSMPLNQNGDSSRASKRRVADSRKSRSSEGSKLPAFTGPISVNTVDLINGVKVQGLQEIVAVENVSSSYDNNQKAGGLYNQVVVALPAASNSLLKDKGASVLPRRKTRLASKVLVNSDRVSAISPVVNGGPPVQKSDVCIPTKKHKLAVEECLTSLDGVDGGGIVLCNSKLKSAKSRVVSKTPQGRGRRSPQPPKTQRARTLSVKYLEKLKRAENNNNNGSMSKSPRVPMIPENNGSMSKSPRVPIIPELSTKHELVLDKHMVDSVMLETDDGSCFFVGDAVPDDEARKQWPHRYEINDQIMKKDKRTSSQTFAKLVTVSFCVVFMYVYLQMLDFRGPEGKPNYIGRLLEFFETKTGECYFRVQWFFTAEDTVIGEQAQSHDPRRLFYSDLTDDNLLDCIVSKVTIVQVPPSVDGKSKSVPSSDYYYDMKYSIDYSTFSTIEMEDTDDLMQSCYTSRINDKMKKIDVNKKHKSPVLEKMELSLLDLYCGCGGMSTGLCLGARGGGVNLSARWAIDDDEIACESFRNNHPETRVRNETTDDFLELLKEWEKLCKTYVKHSRTKACVDSTTESNNETPDCSTVPPEEFEVWKLVDICFGDPNKVSKHGLYFKVRWKGYGPHHDTWEPVEGLRNCKEAIRDFVIEGHRQRILPRPRRNIAVFLLRPSKFPLGDVDVVCGGPPCQGISGYNRNREFEAPFKCEKNKQIIVFMDVVQFLKPKYVYMENVLDILKFADATLARYALSRLVAMHYQARLGIMAAGCYGLPQFRMRVFLLGCHSKEKLPPFPLPTHEAIVKNGCPLAFERNLVGWPNDTPMQLARPIVLEDILSDLPEVANGESRDEMLYVKGPQTEFQRYIRSFNVEVHGPRAHVTKDSKSSKLYDHRPLVLDNDNYQRILQIPKRKGANFRDLSGVIVGPDNVARLDPTKERVLLPSGRPLVLDCILAYENGKSLRPFGRVWWDEVVGTVLTVPNARMQALIHPAQDRLLTIRESARLQGFPDNYRFRGTVKDRYRQIGNAVAVPVGRALGYALAMAYLKKSGDDPLMLLPPNFAFSHDLRGFA

SEQ ID NO: 16283 - protein, 260 aa, Oryza sativa
  Clone ID: TF_OSC419703j.C1.p6.fg
MAKTRQPQKRVLESFTIKGPDGVIKREDPFLDPFIYLSRFLLFWGKFWIVESRYYLRFRSIVEMNTGDTVLMMAPDSSKKPYVARVEEIEATGPQASQVKIKVRWYYRPEESIGGRRPFHGSKEVFLSDHYDSQSADTIEGKCYVHTFRDYTKLRSVSAEDFFCRFEYKSATGSFVPDRIAVFCKCEMPYNPDNLMIQCEDCSDWFHPSCVEITIKEAKKLEHFYCKSCIAENGKDLQKSNGATVQSEEKGFRFYPYFFK

SEQ ID NO: 16284 - protein, 1544 aa, Oryza sativa
  Clone ID: TF_OSC101706j.C1.p3.fg
MTGKKRCRAKPQKKDEDTTDKGKLDEGPLDATKEMNGVGKGDSRAACKRPRRAAACSDFKEKSVRLSDKSSVVATNGNKMEEEEMDAVKLTKLGPEVQRPCRKLIDFILHDADGKLQPFEMSEIDDFFITALIMPMDDDLEKDRQKGVRCEGFGRIEDWAISGYDEGTAVVWVSTEVADYECVKPAGNYKSYYDHFYEKAQVCVEVYRKLARSVGGNPNLGLEELLASVVRSINAIKGYSGTLSKDFVISNGEFVYNQLIGLDETANTDDEKFATLPVLLALRDGCKSRVEVSKLQPNISNGSLKINDAECKEVSEDDDEKLARLLQQEEEWKMMKQRGKRGTTSQKNVYIKISEAEIANDYPLPAYYKPSSQEMDEYIFDSEDSFYSDVPVRILNNWALYNADSRLIPLELIPMKAGAENDIVVFGSGFMREDDGSCCSTAESAKLSSSSSSNHQDAGVSIYLSPIKEWVIEFGGSMICITIRTDVAWYKLRQPTKQYAPWCEPVLKTARLSVSIITLLKEQSRASKLSFADVIKKVAEFDKGSPAFVSSNVALVERYIVVHGQIILQQFSDFPDETIRRSAFATGLLMKMEQRRHTKLVMKKKVQVMRGENLNPSATMGPASRRKVMRATTTRLINRIWSDYYTHHFPEDSKDADVNEAKEIDDELEENEDEDAEEEAQIEEENVSKTPPSTRSRKLVSQTCKEIRWEGEAIGKTPSGEALYKCAYVRELRINLGRTVALEDDSGELVMCFVEYMFQKLNGAKMVHGRLLQKGSETVLGNAANERDLFLTNECLEFELEDIKELMSVNLQSLPWGHKYRKENAEADRIERAKAEDRKKKGLPMEYLCKSLYWPEKGAFFSLPHDKLGLGNGFCSSCQQKEPDCDELQILSKNSFIYRNITYNVNDYLYIRPDFFSQEEDRATFKGGRNVGLKPYVVCHLLDVHEPAGSRKIHPASTKISVRRFYRPDDISSAKAYVSDIREIFLLTLALILFLDQVYYSENIVKVPVDMIEGKCEVKKKIDISNSDVPVMVEHEFFCEHFYDPATGALKQLPPNVKLMSVQQKATGALKKNKGKQICESDQVDSDKCTKVSKENRLATLDIFAGCGGLSEGLQQAGVSFTKWAIEYEEPAGEAFTKNHPEAAVFVDNCNVILKAIMDKCGDADDCISTSEAAEQAAKFSQDNIMNLPVPGEVEFINGGPPCQGFSGMNRFNQSPWSKVQCEMILAFLSFAEYFRPRFFLLENVRNFVSFNKGQTFRLTVASLLEMGYQVRFGILEAGTFGVAQSRKRAFIWAAAPGETLPDWPEPMHVFASPELKINLPDGKYYAAAKSTAGGAPFRAITVRDTIGDLPKVENGASKLLLEYGGEPISWFQKKIRGNTIALNDHISKEMNELNLIRCQRIPKRPGCDWHDLPDEKRNVNHYERVQVKLSSGQLVDLIPWCLPNTAKRHNQWKGLYGRLDWEGNFPTSVTDPQPMGKVGMCFHPDQDRIITVRECARSQGFPDNYQFAGNIQSKHRQIGNAVPPPLAFALGRKLKEAVDAKRQ

SEQ ID NO: 16285 - protein, 1861 aa, Oryza sativa
  Clone ID: TF_OSC419704j.C1.p1.fg
MVRRASVAACLTCPLCGRLLRDATTISECLHTSYGIFNCVLFRVDHSMQFVRSRIFPFKRRKVENPEIICPVASPVKRKERSLSSLTIPAPQVSIQKCLTKRRTKASCLRNFPLHSTSRGSKDTSKKLGGWRPLGCQLKLGKDKKSLKSSVKDTNRTKSKSGDTDDGAPASKAKAREPFTRYGRAAKRTGRKKLLMLKNKKKRFKAKQPSKKRRFRALWFYLLAAFDQRGVPTLPQLPAKYLRIKDVDLPASIIQKYLAQKLNLSSETEVEVLCGGKVVNQGMTLHDLADCWLEKGPKSRMRSSFCLCLGCLWGFVADRGVVGRADRGRVMRGAMAKSPRSVVTTGTKRRRAKVHKEDEPVENENLESEFDVSKKESNGATEPGNEPVASKRPKRAAACSNFKEKSLDLSEKDSIITIKESRVEEKEIEAVNLTRTGPEDGQPCRKIIDFILHDGDGNLQPFEMSEVDDIFITALIMPLDDDLEKDRGKGICCSGFGRIENWAISGYDEGAAVIWVSTETSDYKCVKPASSYRSYFEHFSEKARVCVEVYKKLARSVGGNPQVDLEELIAGVVRSINSNRSFNGTVTKDFVISSGEFIYKQLIGLDHTAGNDDEMLATLPVLVALKDECKSRAGFTHLPAMPSNGTLRIKDGQDKGLTEDEDAKLARLLQEEEEWKMMKQRGKRGTSQKNIYIKICETEIANDYPLPAYYKPYNQEMDEYIFDSDIGMYSDDVPVRILDNWALYNSDSRLISLELIPMKAGAENDIVVFGSGFMREDDGSCCSTAELAQLHSSSSKSGREDPGVPIYLSPIKEWVVEFGGSMICITIRTDVAWYKLRQPTKQYAPWCEPVLKTARLAVSIITLLKEQSRASKLSFAEVIKKVAEFDSRHPAFISSKAPTVERYVVVHGQIILQQFADFPDESVKRCAFITGLLAKMEESRHTKLAIKKKSQQMRGENLNPSAKMGPILRKKLMRATTTMLISKIWGEYYATYFPGDTKEEDQNEPKEIDDDQEENEDNDAEEEVNVQDEKATRTPPSTRSRKSSADTRKEIKWEGQTAGKTVSGEVLYKCVIVQDLSISVGATVTTEDDSGETIMCFVEYMYEKLDGKNMIHGIILQEGSQTVLGNAANDREVFLTNDCLEFEASDIKELVTVNIQSLPWGHKYRKENSEAKRIEKAKAEERKRKGLPVEYICKSLYWPEKGGFFSLPYDKIGNGTGICSSCERKPVGNEFKLLSESSFVFENITYNIHDFLYIRPEFFSQGEGHETYKAGRNVGLKPYAVCHLLSVHGPAGSRKANPESTKVKVRRFYRPDDISSTKAYSSDIREVYYSEDIISVPVVMIEGKCEVRLKDDLPNSDLPAVVEHVFCCEYLYDPANGALKQLPPNVRLVTLTRKVPASKKNKGKQICDIELGGSDKPKDGQSENCLATLDIFAGCGGLSEGLQRSGLSLTKWAIEYEEPAGDAFGENHPEAAVFVENCNVILKAIMDKCGDSDDCISTSEAAERAAKLSEDKIKNLPVPGEVEFINGGPPCQGFSGMNRFNQSPWSKVQCEMILAFLSFAEYFRPRFFLLENVRNFVSFNKGQTFRLTLASLLEMGYQVRFGILEAGAYGVAQSRKRAFIWAAAPGETLPEWPEPMHVFASPELKITLPDGKFYAAVKSTAAGAPFRSITVRDTIGDLPAVENGAGKPTIQYGSGPVSWFQKKIRSDMASLNDHISKEMNELNLIRCKHIPKRPGCDWHDLPDEKVKLSTGQMVDLIPWCLPNTAKRHNQWKGLYGRLDWEGNFPTSVTDPQPMGKVGMCFHPEQDRIITVRECARSQGFPDSYRFAGNIQNKHRQIGNAVPPPLAYALGRKLKQAIDAKR

SEQ ID NO: 16286 - protein, 1614 aa, Oryza sativa
  Clone ID: TF_OSC400546j.C1.p3.fg
MVRRGAGGRRGGIGGGDDARLCMGGAKAADGREFRVGDCALFQAVEVPPFIGLIRWIEKKEEGFPKLRVSWLYRPADIKLNKGTQLCAAPNEIFYSFHQDETSAVSLLHPCKVAFLRKGVELPAGISSFVCRRVYDIDNKCLWWLTDQDYINERQEEVNRLLHRTKLEMHAAVQSGGRSPKRLNGPSSAQQKSGSDGAQNCGLSKGKKRDRGEQGTDPAKRDRERPLKAEDGESGNFKVENLKSEITKITEKGGLPHAEAVEKLVHLMQLDRTERKIDLPGRVILADIIAATESPDCLGRFVQLRGLPVFDDWLQEAHKGKSGEAGSPKETDKPMEDLVLALLRALAKLPINLTALQSCSIGKSVNHLRSHKNPEIQKKAKCLVENWKKRVDAEMKSNDVKPVVSGQAVSWPGKPGFPEISSAGNRRSGSSESSLKSPVSQLSSSKALTSKPVAADAAAKSSPVISGSSKLQHMQPGNAVTNLKEQPSKSTGGTCGSELPAVKEEKSSSSSQSLNNSQSCSSEHAKTIGSSKEDARSSTAASGVAYKTSGSSSRVHRRTNNGLLGSGIQKEAAVARSSSLDHSSVQEKVSQSGTACEKGADIQSDQGNSHRLIVRFPNPGRSPARSASGGSFEDPSFTGSRASSPVADKHEQSDRRVKMKTENSNPHLGNDTNAESWHSNDVKGASVSEEGDKSPRAMLTDDSKTTEGAGRDVPVSRVACSSYANEKGICSSETGLTKLFNPMNALIEIKYSEASHSLQAGDDTAMNLLASVAGEISKSELISSSPSPRNSSANEQGCEGDNIGKLKVECDVSLPQHAGPSNEVEKVISEKSEKSGVGLVGKELHREDVNMLSVNNLLSQGDKGTTSAGSSPLPEIDSKAKTENREVEDTDKCSHPPSRGDDGVKSNAKQPIGFKIDTNSNIKSSTTSEYRSAFTVRGKVEDGCTTSSDVGSTLGDQCKLAVSNRKMLPAEEPLCGGDKQAHGLLKPTDQKHLLGLPYYSEHIDKSGDSTANKLKLKPSFSSSTVEVNKADGLLVGSNTVLKEDEKKEHPADVTKLAVATGVKHGPENGISSKESKDNSSESSSHTRPGGTVSQETEHSAQRSSKKSSDDAGGKDDLVSSDDGSSFSAKTRSNATAKLDFDLNEGIPGDEGHLSEPATSPAVCSSAIHLPRPSPFVSPISSGLPAPIAAPAKGPFVPPENLIRLKSETGWKGSAATSAFRPAEPRKIFEMTLSASGILVSDAAGKNRPALDIDLNVADEQFLEEDVSQSSVQTTGSESGNTRRSNGPVRSVGFELDLNRADEVAENGQIVSNTNHRVEVPLLSRPLPGVFSSSDANSSRDFDLNNGPTLDEAGTEHAPRSLSSKNTSSIPFLPQVASMRMNSAEMSNISPWFASANACAPVAIKSFLPSRGEQPHPVETAAGSGTQRIITSMADGVQHGSDPSRTPVISTSPTMMFHPPAYQYAGFPFTPSVHLQAPGFSIGSTSYANSAPGGIPYFPTIAPTLVGPAGALPAQHTRQYAINLPEGSSTVGHDNNRKWGRQGLDLNSGPGSVDVEVKDDRVTLPVRQNFIAPPHAFVDEHTRMYQMPPGVGIKRKEPEGSWDAERSSYKQLSWQ

SEQ ID NO: 16287 - protein, 211 aa, Oryza sativa
  Clone ID: TF_OSC900107j.C1.p10.fg
MAKTKQGKKDVESYTIKGTTKIVRVGDCVLMRASDTEKAPYVGRVERLETDGRGSVRVRVRWYYRPEESKGGRRQFHGAKELFLSDHFDTQSAHTIEGKCVVHSFKNYTKLDNVGPEDFFCRFEYKAATGAFTPDRVAVYCKCEMPYNPDDLMVQCEGCKDWFHPSCMGMTIEQAKKLDHFLCADCVKENGTKRPSNSYPASSNSDSKVII

SEQ ID NO: 16288 - protein, 1761 aa, Oryza sativa
  Clone ID: TF_OSC401817j.C1.p11.fg
MEAEAEAVADLDEIDREMSRAESRKRQRRTAKEKPGARKGATEWKPEDVEKAAAAEGVAELDEIDREMPRPELRKRQRRTAKEKPSAHEGATEWKPEDVEKAAAQEPEGTELDSGLSPAESRGKRQRGVEKVKRRTRKKTAKEKTKETTEKSAAQAPEKMKVNDAGGALAEDVCADEPDAEQMAMEEEEEAADVLEAEERMGKCVGEGSAEKAATRKRVARPSTARRVEDSDDHFVGDPVPDDEARQRWPVRYSRKGSDSLLKQEPDEDEEMKARCHYLAANVDDEIYHLDDDVYVKAGPDEENYIGRITEFFEGVDRGSYFSCQWFFRTADTVISSKLLKVHDHRHNHKRVFLSKEKNDNLIECIVSKVKIAHVDPNMTPQARAHAISDCDLYYDMSYSVAYSTFANLPADNDGALGSEATSNISCDDADNSSKGKLSADIVAPYSEQTETASLLDLYSGCGAMSTGLCLGFAFSGINLETRWAVDINKYACACLKHNHPYSQVRNEKTEDFLALIQQWDALCRKYVVHKNDTLEPSIDMPLNDADDVNEPLPEDIFDVEELLEICYGDPSNTGKNGLWFKVRWKGYDPSYDTWEPIDGLSDCPERIKEFVEKGHKENILPLPGAVDVICGGPPCQGISGFNRFRKHNDPLEDEKNKQLVVFMDIVKYLRPKYVLMENVVDILKFADGFLGRYAMSCLVAMNYQARLGMMAAGYYGLPQFRMRAFLWGALPSMVLPKFPLPTHDAVVRGIVPTTFSQSVVAYNEVDTRCLRKALLLADAISDLPKVGNDQPKDVIEYSVAPKTEFQRYIRNNRKDIQDYSFRGDDPSEEGKLFDHQPLKLNKDDYERVQRIPVKKGANFRDLKGVIVGPDNTVRLDPNISRERLSSGKPLVPDYAISFVKGKSTKPFGRLWWDETVPTVVTRAEPHNQIILHPSQDRVLTIRENARLQGFPDYYRLIGPLKEKYIQVGNAVAIPVARALGYALGLAYRGESDGDRAVLKLPESFIYADQETVVKSSAGTPGSEIADSEQLFEYFINPNFFCMMFAFLKVNVVIPLILDSKMGLSRRGAEEGEARRAVPFQNILSWEGWNRLDHRRGEIRLDVRREMDDSPLDNLFDGNGLDSSAGADSSSSTGSPPSSTSSSPPSSQSPPPGSSPPPASPPPSTPSAPPTNSSGSAPSPPSPSQSAPPANTGGGGSPPPSHGSPPAPKAVQSQPAPKRSGDGGSSSDSGSSKEGGSSSDRGKSESNGNRPGPEAAIIAGMVIGFFTFALLLAIVACVCCSKKKKRPPHMHMPYYTDENGKVYYANSMPRWQNSVDQGGGWHAQYSPGQAPPSSEMSGSHGAGPLPPPSPGMALGFSKSSFSYDELALATGGFSSANLLGQGGFGYVYRGVLAGSGKEVAVKQLKAGSGQGEREFQAEVEIISRVHHRHLVSLVGYCIAGSSQRLLVYEFVPNDTLEHHLHGLHIFPALFPAIVTRHSEGRAGDGLDDEARHRARLSQGPRVPSRRFLQGQILSVRPSNDLICCIVVVTYEGHPRIIHRDIKAANILLDENFDAKVADFGLAKLTTDTNTHVSTRVMGTFGYLAPEYASSGKLTDKSDVFSFGVMLLELITGRRPVDPTNYMEDSLVDWARPLLARALSEDGSFDELIDQRLENKFDRLEMERMAACAAAAVRHSAKRRPKMKQIVRALEGDASLDDLNEGVKPGQSMMFSTGSEYDSGNYASDINRLRKVAFESSIEDSSEYGTHSSADSGEPPRRQQHR

SEQ ID NO: 16289 - protein, 1536 aa, Oryza sativa
  Clone ID: TF_OSC400546j.C1.p2.fg
MDGREFRVGDCALFRAVDVPPFIGLIRWIEKQEEGYPKLRVSWLYRPADIKLNKGLQLDAAPNEIFYSFHQDETSAVSLLHPCKVAFLRKGAELPAGTSSFVCWRVYDIDNKCLWWLTDRDYINERQEEVNRLLHRTRQEMHTAVQQGGRSPKRLTGPSASQQLKAGSDGAQNCGSSKGKKRERGEQGIDQIKRDRDRTLKTDDTEPGNLKGDNMKSEIAKITEKGGLPHAEAVEKLVHLMQLDRTERKLDFAGRVMLADVITATENPDCLGRFVQLRGLPVFDDWLQEAHKGKSGEGGSPKETDKPMEELLLALLRALAKLPINLNALQSCSIGKSVNHLRSHKNPEIQKKAKCLVENWKKRVDAEMKSNDAKPVVSGQAVSWPGKPGFAEISSAGNRRSGSSEPNLKSPVSQLSSSKALTVKPGASDTTVKSSPLISGSSKLQHIQPGNAVTNLKEQPCKSSGGTCSPELHTVKEEKSCSSSQSLNNSQSCSSEHAKTIGSSKEDARSSTAASGIAGRTSGSSSRVHRRTNNGILSSGGQKEATVARSTSLDRSLLPEKASQSVTACEKGTDTPSDQGNGHRLIVRFPNPVRSPARSASGGSFEDPSFTGSRASSPVLADKHEQSDRRVKMKTENSNPHLGNDTNAESWHSNDVKGASVSEEGDKSPYAMLTDDRSRTTEEAGKDACASRVVCSDANEKAACSSENGGRNSFNPMNALIEIKYSEASHSLQAGDDTAMNLLASVAGEISKSELISSSASPRNSPGNEEGCEGDNIGKLKVQSDMGLSRHAGPTNDAEKIISDKGEKIGAGLVAKEEQHLGDAKDNKVTSSGLPSPPGIDVKAVESPAKTENHEVRTTDKGGDGDKSVTKQPVDIKIDAKLNIYPSTTSELRGGDKQSHGLLKSTDQKNRQCLPDNSEAIDRSGDSAAVKLDVEPSFSSSTVEVNKADGLLVGNAVLREDEKKEQPSSTSADATKLAVPAGVPFGPENGISSKELKDNSSESSSHARPGTTVSQDTERSARRSSKKSSDDASGNEDLVSSDDGSSFAAKIRPSATAKLDFDLNEGIPGDDVHQSEAETSPAVCSSAINLPCLSPFISPMSSGLPAPIKVAATAKGPFVPPENLLRFQPETGWKGSAATSAFRPAEPRKIFEMTLSAPGIPVSDAADKHRPALDIDLNVADEQFLEEDISQSSVQTTGSESGNTRRSNGPVRSVGIELDLNRADEVAENHFVSNTPHRVEVPLLSSRPLPAIFSSADTNGSRDFDLNNGPTLDETGTEHAARSLSSKNTSSIPFIPQVAGGRMNSAEMSNISPWFASAHPYAPVAAQPFLPSRGEQPHPVETAAGSGTQRIITSLADGVQRGSDPCRAPVISTSPTMVFHPPAYQYAGFPFTPGVHLQAPGFSIGSTSYANSAPAGVPYFPSIAPTLLGPAGALPAQHTRQYAINLPEGSSTVGHDSNRKWGRQGLDLNSGPGSVDAEIKDERVSLPVRQNLITPPHAFGEEHTRMYQMPSVGIKRKEPEGSWDAERSSYKQLSWQ

SEQ ID NO: 16290 - protein, 720 aa, Oryza sativa
  Clone ID: TF_OSC420016j.C1.p9.fg
MESGGGSHVAEMPRVPKSARGKRSIRKKESQGQVMCAFDLLATVAGKLLDEGEGSLGNASSGTPAVDASPKDVRVKQEQCDEEAKHFKNEVMDQDSCNESALVSHIAFQRPVNHHGRKGEDPEGSHAVIEDPKAKSEALDKESSMISCTKAELGCNFAAIADRWSPESVESGAFTGDAAAIAMPATTSGFHKNAPDMYNLLDPMDVDVKPPPLVSSDSTGEMPLYGNKIRRSTSFPRVPKGGAGFTVDRDEDDDDKSSGCTHPSTATNRGFRPNCTAGHSRVKKLLACKHRKVAPARMHKGDLSYSGEHCEIPFTFSFFEEHCIDGTHIQTCLLYSYLSSLILLDVDRKPSFRNKKMYYTRQRTQRSTFKRRKMFDRHSAQVSEEYAKANTKFAARDSHAVSLEANKGTNSTAFQKSQESSDCHVKLRIKSFKVPELLIEIPETATVGSLKKTVLEAVNAILGGGLRVGVLHHGKKVRDDNKTLMQAGISHDEVLDNLGFSLEPNCAPHPSQLSPPEDNEFMETVDTTEPLARIAPADSSSKHGEVDASQELALAPLSANYQGSDHDFVHSPGGMSSPDKASTNSRAIVPVTPADSNAGAIVPANKAKRSPEQGQRRIRRPFSVAEVEALVLAVEKLGTGRWRDVKLRAFDNAKHRTYVDLKDKWKTLVHTASISPQQRRGEPVPQELLDRVLAAQAYWSQQQAKLQPKTPPLAEALLLT

SEQ ID NO: 16291 - protein, 658 aa, Oryza sativa
  Clone ID: TF_OSC400887j.C1.p25.fg
MVLQKRLDYGSHGHRAPIKPRVATLAPVKRSTRIRKKQMYALDLLATAAEKLLADQDNLSSGPNINETPEGYVTSMKPVKAEQFDEAFPLRSVAVKKDDCKGCTVGCAGICGFLRQANMCLAENSSTQNLADSVLESLTAKPDVLAKDSFVSSKKSCRLGFGLGTIPEYGSVGVCQPWSTRSAEVKQVHRARPTAIRSQEDSDAAALCALVETMDLDTKPLAEASSGSNSGVHICGPDRGHNSHPSCLAKVQHAADRDDDENSSGCVHPSTSGNNRGYIPHYIGDRRIRRLFASRLRKAARNRICGEMSCKGNKLSLCEKKMPTTRRRVQQTTLKRKRLAQLYSEKSSDEVKLTIKSFNIPELLIEIPENATVGSLKKTVSDAVTTIIERGLRVGILLQGKNIQNDNKTLRQAGICRGKKLNDIGFTLECEAGQDSHPGVIVPEEMDFVGASVVDKSATSFGNYTTIDFCCMWSSKGFNIPFPGVKCEEPAENQQLMQDFPGCSLSDPGSVDYPVEWSTQETSASSQAIVPFADPNSLALANVPLSRSKRPDFGQRRIRRPFTVAEVELLVEAVEHLGTGRWRDVKFRAFENVHHRTYVDLKDKWKTLVHTASIAPQQRRGAPVPQELLDRVLAAQAYWSEQQAKLHGDPPVPEICPT

SEQ ID NO: 16292 - protein, 31 aa, Oryza sativa
  Clone ID: TF_OSC24168j.C1.p1.gm
NMNEHPDAWPFKEPVDSRDVPDYYDIIKDPI

SEQ ID NO: 16293 - protein, 558 aa, Oryza sativa
  Clone ID: TF_OSC19148j.C1.p1.fg
MSGKGKRRSARLLKLEEQKNDDTTATGCLLDPWQIIRNSIAGVRGKRKRNEEIQHLQGEASSSQALCATTDINNLSSKSSAVQIIEYILDTLEMRDTHELFAMPDDIQVTDYAERVNRPGDFATLRQKNKDGMYNTLEQFENDVYMVFQKAMSINSEDTIPYREAMSLLHQAKQVFLSLKSNQMYSESELAAWRQKNLVSQSPAKLNGKFDGSKVGSGSGAGGAAPTTPQRPSAPARKKIAAKTGAVAAATSVKSTTRQRAARESNGAPGRRARKAASVTPGTAEHGGAGASATVEQRRLAYADEADHGGWRPVPVVSTGQHATLVYRPQTAAHTYQDSLRRFVRHAGLKARVAAEFRNLECDVRARQARPAPGYCRTVVSLPAPAPARPAGRSSRNGRCPPPSPPSAAFGGGGAAAASSADAAGNKAPPRCRLKTDEVLKLLVLIGRPAFMERARRVLGHERQESSSKQGHDQKPAVTRAGDDDGGAKAGVTAAKPGKKKGSASKPAAVEFGPFAPPKLVIPGRQLGFSQFAGSSSQPFKVTPTTPNVPDKKKKKRG

SEQ ID NO: 16294 - protein, 2233 aa, Oryza sativa
  Clone ID: TF_OSC401731j.C1.p13.fg
MQPGEAPPSSGGSPATSPRPPPAVAQGQQQLGFRNQAMMHHHDQQQQQQQGYPSGAPHGMMGGGGSSSFPPSSGPMPPFQGQRNMPLPGGPQGLAGGQQHNPTAMQQAYLQYMMQQQQQKAHGMLLQQQQQAKMNMAGPSTRDQDVAANTAKMQELMSLQAQAQAQMFKRQQSEHLQQAEKQAEQGQPSNSEQRSGDMRPPSMPPQGVPGQQLSSAGMVRPMQPMQGQAGMSNAGANPMAMAQLQAIQAWAKEHNVDLSNPANVTLISQILPMLQSNRMAAMQKQNEVGMASQQQSVPSQMNNDAPGHSNFPSQGAPSKPRQPLPPSTSVSGGAEPKMMNMSNMQMQQQLAAHNRDSSNDRAARPAMSMGNGGQMMHMPQSSGHANKIPEQPNPKNANSEAMQMQYARQLQQANRATAPSANSGETGGSQAPNQAARPPMGFTKHQLHVLKAQILAFRRLKRGDKKLPPEVLDLIMSGPPPDSQAQQVSGPPVTNRERSATSSADEHGRPVESGGIAPERSSLLKAPCLPKVEVSAPEDKTIPASGPMQVMKASPKEPLRIGPVSMPEQTNTTLIKSEQDPERGIQRTPGRSDYNGERGKSLPAESGSADAEQAKRAASSSSVPTPNRDVSRKYHGPLFDFPSFTRKHDSMVSANYNSNLALGYDVKDLLAQEGMIVLGKKREDNLKKISGLLAINLERKRIQPDLVLRLQIEEKKLKLLEFQARMRDEVEQEQQEIMAMPDRVYRKFVRQCERQRVELTRQVQQMQKASREKQLKSIFQWRKKLLEAHWAIRDARITRNRGVAKYHERMLREFSKKKDDDRNKRMEALKNNDVERYRQILLEQQTSVPGDAAQRYNVLSSFLTQTEEYLYKLGGKITAAKNHQQVEEAANAAAAAARAQGLSEEEVKAAAQCAGQEVMIRNTFSEMNAPRENTSVNKYYTLAHAVNERVTRQPSLLRAGTLRDYQLVGLQWMLSLYNNKLNGILADEMGLGKTVQVMSLIAYLMEFKGNYGPHLIIVPNAVLVNWKEVLAVKFNVLVTTYEFVMYDRSKLSRIDWKYIIIDEAQRMKDRESVLARDLDRYRCQRRLLLTGTPLQNDLKELWSLLNLLLPEVFDNRKAFQDWFSKPFQRDVPTHSEEEDDWLETEKKVIIIHRLHQILEPFMLRRRVEDVEGSLPRKVDCSALVTLSDAICHSALFVCYIVNSSCHLQESIVLRCRMSGIQGAIYDWIKSTGTIRVDPEDEKARIQRNAMYQAKTYKNLNNKCMELRKVCNHPLLSYPFMNYYGKDFIIRSCGKLWNLDRILIKLHRSGHRVLLFSTMTKLLDILEEYLQWRQLVYRRIDGTTSLEDRESAIVDFNRPNSDCFIFLLSIRAAGRGLNLQSADTVVIYDPDPNPQNEEQAVARAHRIGQTRDVKVIYMEAVVDNISSYQKEDELRNGGSGDLEDDLAGKDRYMGSIESLIRNNIQQYKIDMADEVINAGRFDQRTTHEERRMTLETLLHDEERYQETVHDVPSLQQVNRMIARTEEEVELFDQMDEEFDWTGDMMKHNQAPKWLRVSSTELDAVVASLSKKPLRNMAAGGISLDTNEKLEKRRGRPKGSGKYSIYREIDDDDFEESDDDSEERNTSSLPEEGEIGEFEDEEDNDDSVPDNKDQSEEEEPINDEGYDFSHGMGRRKAHRSEEAGSTGSSSGGRRLPPPAPSSSSKKLRSLSALDSRPGALSKRTADDLEEGEIALSGDSHLDLQQSGSWNHERDDGEDEQVVQPKIKRKRSIRIRPRPNAEKLDDRSGDGTVPQRGVHLAFQGDGDYDSQFKSEQAFADPASRQQDTVHRTVKQKRNMPSRKAPPATKAGKMTQLSGSGEGSAEHSKENWSNKVIESAGPNSSGTKMSDSMQRKVNLDCYLLALAKEPSMTPLISCGVFTLFYNHNNCKNVINKLWRRIDKEGHQIIPNISSWWRRNENSSFKGLASSTLDLQKIEQRVDGFEYGGVNEFIADMQQMLKSVVQHFSYRHEVRVEAETLHNLFFNIMKIAFPDSDFREAKGAMSFSNPGGGASGSAAQSTKQSASGQKRRSSTSEAEQHGSSTSRHNQHAPVGEVSGRAHTSKSEKDSRHSGPGSREQFTDSAGLFRHPTDMFIVKKKRDRRPSLGSPSSSGRTGPLSPTNAGRMGPAPSPRGARTPFQRDPHPSQQSMHSAGWGAHSVQQSDRGGSSSPGIGDIQWAKPTKRSRTDSGKRRPSHM

SEQ ID NO: 16295 - protein, 2210 aa, Oryza sativa
  Clone ID: TF_OSC411283j.C1.p10.fg
MALGFEFFLCGLGAMMHHHDQQQQQQQGYPSGAPHGMMGGGGSSSFPPSSGPMPPFQGQRNMPLPGGPQGLAGGQQHNPTAMQQAYLQYMMQQQQQKAHGMLLQQQQQAKMNMAGPSTRDQDVAANTAKMQELMSLQAQAQAQMFKRQQSEHLQQAEKQAEQGQPSNSEQRSGDMRPPSMPPQGVPGQQLSSAGMVRPMQPMQGQAGMSNAGANPMAMAQLQAIQAWAKEHNVDLSNPANVTLISQILPMLQSNRMAAMQKQNEVGMASQQQSVPSQMNNDAPGHSNFPSQGAPSKPRQPLPPSTSVSGGAEPKMMNMSNMQMQQQLAAHNRDSSNDRAARPAMSMGNGGQMMHMPQSSGHANKIPEQPNPKNANSEAMQMQYARQLQQANRATAPSANSGETGGSQAPNQAARPPMGFTKHQLHVLKAQILAFRRLKRGDKKLPPEVLDLIMSGPPPDSQAQQVSGPPVTNRERSATSSADEHGRPVESGGIAPERSSLLKAPCLPKVEVSAPEDKTIPASGPMQVMKASPKEPLRIGPVSMPEQTNTTLIKSEQDPERGIQRTPGRSDYNGERGKSLPAESGSADAEQAKRAASSSSVPTPNRDVSRKYHGPLFDFPSFTRKHDSMVSANYNSNLALGYDVKDLLAQEGMIVLGKKREDNLKKISGLLAINLERKRIQPDLVLRLQIEEKKLKLLEFQARMRDEVEQEQQEIMAMPDRVYRKFVRQCERQRVELTRQVQQMQKASREKQLKSIFQWRKKLLEAHWAIRDARITRNRGVAKYHERMLREFSKKKDDDRNKRMEALKNNDVERYRQILLEQQTSVPGDAAQRYNVLSSFLTQTEEYLYKLGGKITAAKNHQQVEEAANAAAAAARAQGLSEEEVKAAAQCAGQEVMIRNTFSEMNAPRENTSVNKYYTLAHAVNERVTRQPSLLRAGTLRDYQLVGLQWMLSLYNNKLNGILADEMGLGKTVQVMSLIAYLMEFKGNYGPHLIIVPNAVLVNWKEVLAVKFNVLVTTYEFVMYDRSKLSRIDWKYIIIDEAQRMKDRESVLARDLDRYRCQRRLLLTGTPLQNDLKELWSLLNLLLPEVFDNRKAFQDWFSKPFQRDVPTHSEEEDDWLETEKKVIIIHRLHQILEPFMLRRRVEDVEGSLPRKVDCSALVTLSDAICHSALFVCYIVNSSCHLQESIVLRCRMSGIQGAIYDWIKSTGTIRVDPEDEKARIQRNAMYQAKTYKNLNNKCMELRKVCNHPLLSYPFMNYYGKDFIIRSCGKLWNLDRILIKLHRSGHRVLLFSTMTKLLDILEEYLQWRQLVYRRIDGTTSLEDRESAIVDFNRPNSDCFIFLLSIRAAGRGLNLQSADTVVIYDPDPNPQNEEQAVARAHRIGQTRDVKVIYMEAVVDNISSYQKEDELRNGGSGDLEDDLAGKDRYMGSIESLIRNNIQQYKIDMADEVINAGRFDQRTTHEERRMTLETLLHDEERYQETVHDVPSLQQVNRMIARTEEEVELFDQMDEEFDWTGDMMKHNQAPKWLRVSSTELDAVVASLSKKPLRNMAAGGISLDTNEKLEKRRGRPKGSGKYSIYREIDDDDFEESDDDSEERNTSSLPEEGEIGEFEDEEDNDDSVPDNKDQSEEEEPINDEGYDFSHGMGRRKAHRSEEAGSTGSSSGGRRLPPPAPSSSSKKLRSLSALDSRPGALSKRTADDLEEGEIALSGDSHLDLQQSGSWNHERDDGEDEQVVQPKIKRKRSIRIRPRPNAEKLDDRSGDGTVPQRGVHLAFQGDGDYDSQFKSEQAFADPASRQQDTVHRTVKQKRNMPSRKAPPATKAGKMTQLSGSGEGSAEHSKENWSNKVIESAGPNSSGTKMSDSMQRKVNLDCYLLALAKEPSMTPLISCGVFTLFYNHNNCKNVINKLWRRIDKEGHQIIPNISSWWRRNENSSFKGLASSTLDLQKIEQRVDGFEYGGVNEFIADMQQMLKSVVQHFSYRHEVRVEAETLHNLFFNIMKIAFPDSDFREAKGAMSFSNPGGGASGSAAQSTKQSASGQKRRSSTSEAEQHGSSTSRHNQHAPVGEVSGRAHTSKSEKDSRHSGPGSREQFTDSAGLFRHPTDMFIVKKKRDRRPSLGSPSSSGRTGPLSPTNAGRMGPAPSPRGARTPFQRDPHPSQQSMHSAGWGAHSVQQSDRGGSSSPGIGDIQWAKPTKRSRTDSGKRRPSHM

SEQ ID NO: 16296 - protein, 437 aa, Oryza sativa
  Clone ID: TF_OSC11640j.C1.p1.fg
RRQLASELDQVRGLSKRLKAAAEAIAAESAAALALPVVVPPPQLPVGYAHSQFALADPVTPIPGQVAGAIVPVRSVMQRGPLTVSVTHTESFEKEKRTPKANQLYQNSEFLLAKDKFPPSDSHGRKKPKHHKKKHRSLASHGAGYDAEQRLYSHAFKKSMSLLSRLMKHKFGWVFNKPVDAVALGLHDYFAIIKHPMDLGTIKTRLTHGQYRNPREFADDVRLTFHNAMTYNPKGQDVHFMAEQLLGIFEAQWPEIEAEVQYLASCPPLPNKFPPPPIDVRFLDRSDSVKHHMVLDSKSRPLSHTPTYSARTPSMKKPKAKDPDKRDMTIDEKRKLSNNLQNLPPEKLDVVVQIIKNKNLSVRQHDDEIEVEIDSMDTETLWELDRFVANYKKNLSKQKRKAERAMLARQDAELHAQHVAPQQPSQEPNIGVKSPKQ

SEQ ID NO: 16297 - protein, 656 aa, Oryza sativa
  Clone ID: TF_OSC401036j.C1.p32.fg
MASSPPGAGAGGEERPAASPAAPAVAEAVEEGPVTSRWAPEIRVYRRKYPRKNPKPPPNPSPSSSPLAQTLASIRRSIRRPEDGPAAPRPDPPAAPASSPHPPPPSAPVAPAQQGEPAAPASDDVSAGPNRDGGAVPNGHGDVRAAAEEKARKRRARSELRRQLASELDQVRGLSKRLKAAAEAIAAESAAALALPVVVPPPQLPVGYAHSQFALADPVTPIPGQVAGAIVPVRSVMQRGPLTVSVTHTESFEKEKRTPKANQLYQNSEFLLAKDKFPPSDSHGRKKPKHHKKKHRSLASHGAGYDAEQRLYSHAFKKSMSLLSRLMKHKFGWVFNKPVDAVALGLHDYFAIIKHPMDLGTIKTRLTHGQYRNPREFADDVRLTFHNAMTYNPKGQDVHFMAEQLLGIFEAQWPEIEAEVQYLASCPPLPNKFPPPPIDVRFLDRSDSVKHHMVLDSKSRPLSHTPTYSARTPSMKKPKAKDPDKRDMTIDEKRKLSNNLQNLPPEKLDVVVQIIKNKNLSVRQHDDEIEVEIDSMDTETLWELDRFVANYKKNLSKQKRKAERAMLARQDAELHAQHVAPQQPSQEPNIGVKSPKQNLIVDEKLATSVPEQADNNGQNASRSSSSSSSSSDTGSSSSDSDSDSSSSDGSDAANSS

SEQ ID NO: 16298 - protein, 456 aa, Oryza sativa
  Clone ID: TF_OSC400239j.C1.p45.fg
MASALLAGRGGVNHHHHHHQWGETRAPLAPVAPNSDPNHPLQQRANGSATRPPPSSYVALRPGAMAHREARALRDRLAGELGQVRALIARIDTWQQGQVKRHGSPRRDLPTPPAKLRAAMRKRCEQILAKLRKDKRSIWFNAPVEVDRLGLHDYHAVIKCPMDLGTVRANLAAGRYPSHDDFAADVRLTFSNALRYNPAGHEVHTFAGDLLASFEKMYKASMSWFEQELKLLEPPMPVPPPELPPATAPVQVKPRAANVKMRKPKAREPNKRDMTLEEKNLLRVGLESLPEEKMHNVLQIVRKRNGNPELVGGEIELDIDEMDVETQWELDRFVNNFKKALNKSRRAAIVNGENADVIDASVANDSDMLVNGSTATMVDNGDVTMAIESKDPDKITTQAEQLDEYVDIGDEMPTATYQSVEIEKDTEAASSGSSSSSDSGSSKDSVSESGNAHSLV

SEQ ID NO: 16299 - protein, 1239 aa, Oryza sativa
  Clone ID: TF_OSC400938j.C1.p9.fg
MPRSPSPPPDRHHHHHHPARRRGPAGAAAPPPRSLRPRRAAAPSSRPLVDDFFPFPSSPSSSPSRPPPPQQQQQRRPSPEPSSSDSDGHGGGGGGGGGGSSASDRRRRKLKLVVKLSQLAPDQNHHRRGPPPPSYSDSSGGEQEQEEEEEAGGNGGDDVSGGEERVKPPKKRRIEPRGDRSRHREVRGETANPKLVGGRSDAASAPRTKRLPVPGMARTTPLPDRKALDMILDKLQKKDTYGVFAEPVDPEELPDYHDVIEHPMDFGTVRRKLARNAYRSFEQFELQPNRCNGIALYQINHRFTITSVDFVFLLDDVFLICSNAMQYNAPDTIYFRQAHSIHELARKKFQELRDEGIPTENLIKSEQKIRPHPSNREPIKKPVLRYSDDDLGFMSHKEQVSRPNSKDLEDDRKFKDQVKKTISRNSEDVLSSSFQKERVKKSSVRNSDDDLSSSFQKEQVKRPISRNSGDDISSSFHKEQGRKVISRNSENDRVASFHKQHDKRPTSRSSKDELPSQKKHIRKPVCTNGEEPDFSSHRDSVENPVCTNGEHVGVLSPKRLVEKPICRNRDDLGHSHKKGLNNKSICGDGQDDMGYSCNGETVKKPVRMNSQDALGSDVSAATIASAGDDSNGLSMSQANAVEPQDCIAANGFMDKDISSPLDEIRSEKPDDISARESSVKPSYKSIVVDETRRKTYDTYEEQPSSESDTIFDVFCEEPKELVNVGPHSEHSYARSLARFAGSLGTQGWRLASERIQRVLPTDVKFGRGWVGEYEPPLPPILFVQNQPRSLVSSEANVQRSASMTRNNERIRPTESVNPKDMSLSLLNRITTGNNVVGVPGPLESPEIKPRLFGVTAEPQQRSTEAPSLHENHRAPGSVAKTKRAPSEQTRKGSSSSSSRPLQKQPQRPEISKGASNVLDMPSLNKMTGQPRPFFQPAEAAITQQMRKSETPKSSHPLEMAHQRLECAKGASGVHDMPSLNNTSGQPKPFFQSQEAAVPQPRNENTWVYHGRPGDGKYGTTDKSRPMSSMGFITKNQQVNAASFAMNLNGQKNVNDNVKSVGSTVMPVQVNTTNRGPDSSRNIFSAFPPAVRENQSIPSAPVAQSWISFGASSESKPTIVSPTFHDSNSGWKMPFANARPDEAKMTAVPQFFRQPVQMVRESPGQNKGLVIFPQLVQTDFSRSQGQPQWQGLVPPMQQKPNKDMLRPDLNIGFPSPGSPPARQSSGINLEAQQPDLALQL

SEQ ID NO: 16300 - protein, 751 aa, Oryza sativa
  Clone ID: TF_OSC24127j.C1.p1.fg
MGKTQKFSKGHPLGFVPDYRHGVETVGESKGCIGSPERIVSGSSCAVPKRKCGILKTEDGGELPGFNVPRDVFMLPRMSPSDKKDLEMRLRKELEQVKALQSRLFLRPAAVSMNGGAASASGDVVAKRNDAKLKRSNSVQSGRGVPPSAATPVVRSANYAEAFKQCGNLLKNLFKHQWAGPFLAPVDVVQLNIPDYFDIIKKPMDLGTIEKKLNAGMYSTPWDFAADVRLTFDNAVTYNPVGNDVNLMGKALTCIFETRWKFIEKKLPSLDDRFSVRREPSQKGAVKKDTIEKDYPSEKKHSTKGVHKKDMFKKEDASTKPALQPKKRKASPLVQGSLEIPVVEADKVIDDAQVVQPSKVIDDAQVVQAFKVIDDAQVVQASKEIMTDRQKYELSVRLQSYGGLIPNHVVDFIRSHLPDDNEGDEDELELDMNVLSDSTLFELQKLLDDYDRVNQSGNPTKDEHREVEFESEYGLSNSSMHHEEGNELVEEDVDIGGNDLPPLTYPPAVFESETAERSSKHSTSSSSSSDSESSSSDSDSSSSSGSDLDVNVPPSTSGAKDNTQSAVRLDQENDPLSSTNLPQQSSDPVPISAEDEGENVSEKQVPPAKQYRAAVLLNRFADTIFKAREKTLDQRARIQAEAKAAEDARKRAEAAAAAEAAAEAKRQREREREAARKALQQMEKTVDINEGNLFLKDLEMLGTVTSGEQFPSSVGETSPTHTPEGLGFQLGSNPLEQLGLYMKNDDEEDEE

SEQ ID NO: 16301 - protein, 167 aa, Oryza sativa
  Clone ID: TF_OSC12766j.C1.p1.fg
VTDYAERVNRPGDFATLRQKNKDGMYNTLEQFENDVYMVFQKAMSINSEDTIPYREAMSLLHQAKQVFLSLKSNQMYSESELAAWRQKNLVSQSPAKLNGKFDGSKVGSGSGAGGAAPTTPQRPSAPARKKIAAKTGAVAAATSVKSTTRQRAARESNGAPGRRARK

SEQ ID NO: 16302 - protein, 505 aa, Oryza sativa
  Clone ID: TF_OSC400795j.C1.p14.gm
MGAASERKCTACGGTGGDEVQIDIDRRRTSHWCSSWSTSSARPPRPRSSSSPAPTGSTTPPAPPAFRLEMGVVGLAENYHACVGGGGSVLEVSYHGMAVAMGRVPRFCVHGKRAGGERADGVASAEATSVREELRGLIRSERQIVGAAEFSVEGEIKGFGYLRCKALCVVGRRGLGRRERQVGAVRAAPADLTRMHRERMAFISSRGRRRVAETASAFVMLLSSGVYTGTGQSHPATSSPTMPRPKRRRSPLPPPAPPGFPTERKHHLPELQPPAVAAASPGVAGVPADLGDALLRCGKLLDKLLEHEDGWVFAEPVDARALRLVDYYLRISDPMDLGTVRRRLERRRYADPWAFAADVRLTFNNAMSYNSAGDPVYESAAELSEIFEAGWPSVLAAPPRPPDAERKRRLSGLLPRLPVGAQVTVAEIMKKRDGCLREVNGMMEVDLDRADSATLDELDRMVAEHGAALAGVVKVKQGALVITDQEHNANFSGWTISLFTVGLLG

SEQ ID NO: 16303 - protein, 341 aa, Oryza sativa
  Clone ID: TF_OSC400239j.C1.p49.fg
MRKRCDQILAKLRKDKRSIWFNAPVEVDRLGLQDYHAVIKCPMDLGTVRANLAAGRYPSHDDFAADIRLTFSNALRYNPAGHEVHTFAGDLLASFEKMYKASVSCAAPELPPAKAPAQVKPRAGNVKMRKTKAREPNKREMTLEEKNLLRVGLESLPEEKMHNVLQIVRKRNGNPELVGGEIELDIDEMDVETQWELDRFVNKFKKALNKSRRAAIVNGENADVIDASVANDSDMLVNGSTATMVDNGDVTMAIESKDPDKITTQAEQLDEYVDAVADPEFLSWPWVRPCVDVGDEMPTATYQSVEIEKDTEAASSGSSSSSDSGSSKDSVSESGNAHSLV

SEQ ID NO: 16304 - protein, 358 aa, Oryza sativa
  Clone ID: TF_OSC404150j.C1.p1.fg
MRKRCTQILTRLRKQKISVWFNSPVDVERLKLHDYHAIIRNPMDLGTVKENLAFGRYPSHEAFATDVRLTFSNALRYNPADHHVHRYASNLLATFEGLYKEALSWFEQECQRLEPPMPLALPPPPQPPVPMPMQAPPRIGGGGRRPKPKAREPNKREMSDEEKHKLRVEIGNLPEEKMGNVLQIVQKRNTDPALMGEVVELDFDEMDVETLWELDRFVVNCKKALSKSRRTVAMNGDAVDATAIVPTEDDTVQENDTPEKRVSEVDMVDEYVDIGDEMPTANYQSVEIERDAQVTEVHFGNVFLVAWYRKLDGFLFKLLVIHSNCYGTYTFWVEGVFPYADSIVIATKPNILIFCLDS

SEQ ID NO: 16305 - protein, 616 aa, Oryza sativa
  Clone ID: TF_OSC900093j.C1.p5.fg
MSAPPRKRKKKGRPSLLDLQKRTLRLEKLQEPPPPPPPPQPRRSTRRNPAGVDSGDEGTAPGGRREKKLRLVMGLPDGSAKGEKTRKATDGSEEPSDSGPTTPLPDKKLLVFVLDRLQKKDTYGVFSDPVDPEELPDYHDIIKHPMDFSTIRKKLNKGAYGNLEQFEVSVRAYGDFCWPFLCCFDFPSLTVSTYSSHTQKKSQVLNMKMLLSANTSTVIKCVEPQDDVFLLTSNAMCYNSPDTIYYRQARAIQELAKKDFENLRQDSDASEPEPEPEIKPDPEPKPQPRRGRPPNKNTIKQKVGKPPVERATADFSGATLASVGNNGHRTQPPFDLQRQVMNGSFIADVLRASFASRNNGYNWSNERKLERIEDYSGSIGKWSAKSGRKPILTEESSRSTYCQPQPSSSIYELPVGVQLQQSYPRSLARFAAQLGPVAWEIASKRIERALPPGTKFGRGWVGDGEAPNATQPPVLTTSSTALIHPSSTETSSEQPTHNGTASTSHSAGPQPSSAPYASSTITTHRVNCQSLPSQQHGSVPQVSAERGEHGAEVKGNHNNLHERPAIQHTVNGFSAVSEKGIFYPVSISNRIYTAIEIGNLAPQTTQSEIRSIEDLN

SEQ ID NO: 16306 - protein, 616 aa, Oryza sativa
  Clone ID: TF_OSC900155j.C1.p11.fg
MSAPPAKTEKKGRPSFLTSKSGPFGSKSCRSRRRRPRPPQPGRSTRRNPAGVDSGDEGTAPGGRREKKLRLVMGLPDGSAKGEKTRKATDGSEEPSDSGPTTPLPDKKLLVFVLDRLQKKDTYGVFSDPVDPEELPDYHDIIKHPMDFSTIRKKLNKGAYGNLEQFEVSVRAYGDFCWPFLCCFDFPSLTVSTYSSHTQKKSQVLNMKMLLSANTSTVIKCVEPQDDVFLLTSNAMCYNSPDTIYYRQARAIQELAKKDFENLRQDSDASEPEPEPEIKPDPEPKPQPRRGRPPNKNTIKQKVGKPPVERATADFSGATLASVGNNGHRTQPPFDLQRQVMNGSFIADVLRASFASRNNGYNWSNERKLERIEDYSGSIGKWSAKSGRKPILTEESSRSTYCQPQPSSSIYELPVGVQLQQSYPRSLARFAAQLGPVAWEIASKRIERALPPGTKFGRGWVGDGEAPNATQPPVLTTSSTALIHPSSTETSSEQPTHNGTASTSHSAGPQPSSAPYASSTITTHRVNCQSLPSQQHGSVPQVSAERGEHGAEVKGNHNNLHERPAIQHTVNGFSAVSEKGIFYPVSISNRIYTAIEIGNLAPQTTQSEIRSIEDLN

SEQ ID NO: 16307 - protein, 563 aa, Oryza sativa
  Clone ID: TF_OSC401369j.C1.p14.fg
MASGPPSSPSSKAFSRKSHAHASGPNSSKAAAAGGGGGGVAAAFDAHNGTHVRTVTFSLSSSPAARRELRRRLTAELAQVRATCKRLSSLPAPAPSSALSATDPSTPLPPHPPVSKHKSKKGNPSSNPGLSAEARRKLYAPVFKSCGALLARLMKHKHSWVFNTPVDASALGLHDYHTIITKPMDLGTVKSRLAAGHYKSPREFAGDVRLTFQNAMRYNPKGQDVHFMAEQLLNMFEEKWPEIEAEVAQLSPQPPTPSSAAPRKPKEIDNSKVLERSDSTVHAAGMEATPKQNTGRPPVLKKPKAREPNKREMTFWEKQRLSNNLQELPPEKLDNVVQIIKKRNLSLSQHDDEIEVDIDSFDVETLWELDRFVTNYKKSISKNKRKAENPVAGQDEMNHDIELEKTEHARLDEVEQDQMPPVQETLHNPEPESIDIEPPKENTADDNERYVGSSSPVHLEDQKGENAGRSSSSGSSSSDSGSSSSGKCSHPLQKFILAAFLFAINSIKDIFIYICITYEIYREKHMQIQTQIVHQQMALMLHSHPERNIYRPGDGFGTVYLVF

SEQ ID NO: 16308 - protein, 525 aa, Oryza sativa
  Clone ID: TF_OSC3556j.C1.p1.fg
SLQSKVKRLKEEREKSISGETKPPPAAAAVKEEEEDVRKGSPEEAGAVEDRVSGHESGRSCKESNSSDLKRPENDPAVADDDDREAEEEEEAAAAPAAGDIAVKEEASGESVAGSKEADVEKESSDVQSSASPSRRRRRKGGGGGEEAEAASPSVSVPLPAAEAEPLVAFLESVRTSKAGAVFERRLDSQDGERYSGTIRRHVDLETVRSRLVGATAAAAAAACYASASEFYRDMMLLCANALVFFPRGSPEHAAALQLRALVSKQVSKDRQPHAGAKAPAAAAEEEEKKKPAKADADIAGPLLEKAPIIVCRKRSSIAKAAAAAAKGEKAEKAETDKKEKDGSEEKKKAAAAATTATAAATAKDKKARGMRTNKSRGPARNQKTAKLSETGEGTKKSDKKGGGGGGSSSAGAAAGEVAKKRNAVDFLNRMNQNGSPSTERVSLLETLKLSAAATEQQETVVVVVIREGRRPEGGRRLRLQEGRRASTPPGRRIGRPPKRAAAPQTPPRSKRAKDDKPTRKRGKK

SEQ ID NO: 16309 - protein, 604 aa, Oryza sativa
  Clone ID: TF_OSC407198j.C1.p1.fg
MQSRCPSAAVFTPTTCRLRFRVLHRRFSGGVTAENEDADGGEEEEEADAAAVAGWVEELRELRVAELRREVEKYDLSIGSLQSKVKRLKEEREKSISGETKPPPAAAAVKEEEEDVRKGSPEEAGAVEDRVSGHESGRSCKESNSSDLKRPENDPAVADDDDREAEEEEEAAAAPAAGDIAVKEEASGESVAGSKEADVEKESSDVQSSASPSRRRRRKGGGGGEEAEAASPSVSVPLPAAEAEPLVAFLESVRTSKAGAVFERRLDSQDGERYSGTIRRHVDLETVRSRLVGATAAAAAAACYASASEFYRDMMLLCANALVFFPRGSPEHAAALQLRALVSKQVSKDRQPHAGAKAPAAAAEEEEKKKPAKADADIAGPLLEKAPIIVCRKRSSIAKAAAAAAKGEKAEKAETDKKEKDGSEEKKKAAAAATTATAAATAKDKKARGMRTNKSRGPARNQKTAKLSETGEGTKKSDKKGGGGGGSSSAGAAAGGVAKKRNAVDFLNRMNQNGSPSTERVSLLETLKLSAAATEQQKKSSSSSSGKGDGRKEAGGSGSKKGAAASTPPGRRIGRPPKRAAAPPTPPPSKRAKDDKPTRKRGKK

SEQ ID NO: 16310 - protein, 734 aa, Oryza sativa
  Clone ID: TF_OSC402265j.C1.p12.fg
MEFGQQRQIKRGYDEMAFRGMASAAPRGYAETVGESEGAAGSPVRVDSEDSSAPKRKCISLNSDGFDVKREIFVPAKMSSSERRHLRKRFRTELDSVRNLLKKPEFAVPVPVNRAPALSSSAAPRGKKGQRGNHVVRGAKGRFLPTKPRPEASTVLTEDAIFKQCDAILKKLMTQKCSNIFDSPVDAVKLNIPDYFQIIKKPMDLGTIRNKLDSGSYTSPSEFAADVRLTFSNAMTYNPRGHVVHDYAIQLNKMFESRWRTIEKKLASIATEAHVEVDRADSKRRKTPPVDCSEVSTECVRPTESVRPTESVKPKMTFEEKESFGNCLASLSEDPEVPSHIIDLLQQCIDNNTDQLGDGEIEIDIHAVSDDLLFELKKHVDKYLQEREQSQQAKSEPSENEAANVSGLSHSSTNPCKGGDPVEEDVDICGNASPILIEKDAHNNPNKCGSPSSSSSDSGSSSSDSESGSDSESEQEKGGSPGKPKGSKRSEQLVEQEKSDVISPVDAIRPADDVELREQDNESKPAPEGENSKPDRQVSPDKLLRAALLRSRYADVIVKAQGILSQGGDKQEELEKLQKEEKARLLAEGNAAMEARRAEAEAEAKRKRDLEREKARQALQEASEKNCIYWCRAFFFPLKFEWFNLMQMERTVEINDNLHLKDLEMLGTATTEHIVSSVDETSPEHSQDGMPSFLPGSGNPLEQLGLFMKADEEEEEEDPSSVPSTKDAEEGEIN

SEQ ID NO: 16311 - protein, 1824 aa, Oryza sativa
  Clone ID: TF_OSC22451j.C1.p20.fg
MGDGERREDENPTTSAADDDDDEDYDEPGGGNHFLGFMFGNVDDSGDLDADYLDEDAKEHLFALADKLGPSLKDIDLIKPSAAPTDPSEQDYDAKAEDAVDYEDIDEEYDGPEVEAATEEDHLLSKKDYFSSNAVYASVNSKVSVFDEENYDEDEEPPNDNDLPSDNIVQNCTSASAEQLDMAPSNDNLAVEKMSSSLSEPEESFESEAFQKEMVAEEQLESKTATSLPVLCIEDGSVILKFSEIFGAQEPVRKAKMDRHKRPVNKELQITNFTDIVEEDEEVFLRSTIQNLSALKHIKTNDNFVESDSDESTSDVALRLKDSCLSEQPMKDKDIPTAVQSPVFPDFYPLEHENWENDIVWGNSPTTAIQPCLTSCAISKESLDDHNEDQAEGYVSGCWDVQNKFHSSSVMADPFGHTEIPDSTSYRSPENSYSPLRKETAQENNSLDEPNNITQPVKIDTTRHLNKLSLLNKELLEGSWLDNIVWDPSEDVPKPKLIFDLKDDHMLFEILDEKNGDHLRSHARAMIVTRPMKTSAVENVDHNNQAIALSGRFNISNDKFYSNRKMSQQARSHAKKRATMGLKLVHSVPAQKLQTMKPKLSIKEIANFHRPKAKWYPHENKLTARFQGDECSHGPMTAIVMTLGGKGVKFLVNAEETPLSVKSKASKKLEFKPSEKIKLFCSGKELQDDISLAMQNVRPNSILHVVRTEIHLWPKAQRLPGENKPLRPPGAFRKKSDLSVKDGHVFLMEYCEERPLLLANAGMAARLCTYYQKTSPSDQTATSLRSNSDGLGTMLAIDPADKSPFLGNIRSGSHQSCLETNMYRAPVFPHKVATTDYLLVRSPKGMLSLRRIDKLYAVGQQVKKSVSWIYHRLTRRATNFKILFSWQEPHMEVFSPGTKNMQNYILNRILVYVYREFRAREKPGIIPQIRADELPIQPPITEAIKGPKGHLFYIQRPDFRIPSEEELRRLLTPENVCCYESMQAGQYRLKHLGIEKLTQPVGLASAMNQLPDEAIELAAAAHIERELQITSWNLTSNFVACTNQDKENIERLEITGVGDPSGRGLGFSYVRVTPKAPVSNSTHKKKSAAAKGTTVTGTDADLRRLSMDAARELLLKFGVPEEQIDKLTRWHRIAMVRKLSSEQAASGVTMDEIPVSKFARGQRMSFLQLQQQTKEKCQEIWDRQIQSLSAMDGNENGSDTEANSDLDSFAGDLENLLDAEEFDDEDVGNTDIRSDKMDGMRGLKMRRCHTQSQINEEIQDDVAEAALVEKLLEESDSDMKRKKQPVETTNYSTPMYNQGNKMKQGKAGQMIKSSVYAGALTPKESIPREAKEVENFAEGSLPSKLRTKTGFDANDDIILVKRKNIPGKDGFKEKRQGARGDTLVCGACGQLGHMRTNKLCPKYGEDPETSEMDVNSIRSHPPDIVSNAQIKTSNKRLVAKVSSEAFETEGPESIEKAKPVPVKFKCGAPEKSLDRNMSISASLVSDKRMMDATDSKSTGKVNKIKISNKIKYDDYPPDTPKPSVVIRPPAEVEKDLPRKKIIIKQPKVLGDQQRPTELRSGQEPRKTRKIVELSSFEKRDREDDNGFSGQPIQINSSHDRGWGLVGKRSKGIMESSESWRAFEEQRERQEQRLIEARIYDARREDELQKAKKKNKKKKKHEFRDDDLLDPRPYKNDRRVPERGRAAKRRTPADMTEYTPPAKRHRGGEVELSNILEKIVDHLRTMSCSFLFRKPVTKKEAPDYFDIIERPMDLGTIRDKVRKMEYKNREDFRHDVAQIALNAHTYNLNRHPHIPPLADELLELCDYLLEESADVLDDAEYAIED

SEQ ID NO: 16312 - protein, 281 aa, Oryza sativa
  Clone ID: TF_OSC400632j.C1.p1.fg
MRKEKIPHQAPFAIQAAQLLGRAIGAGLFAITPAGERGMCCKAIKLGNARINSSHDRGWGLVGKRSKGIMESSESWRAFEEQRERQEQRLIEARIYDARREDELQKAKKKNKKKKKHEFRDDDLLDPRPYKNDRRVPERGRAAKRRTPADMTEYTPPAKRHRGGEVELSNILEKIVDHLRTMSCSFLFRKPVTKKEAPDYFDIIERPMDLGTIRDKVRKMEYKNREDFRHDVAQIALNAHTYNLNRHPHIPPLADELLELCDYLLEESADVLDDAEYAIED

SEQ ID NO: 16313 - protein, 722 aa, Oryza sativa
  Clone ID: TF_OSC417054j.C1.p1.fg
MAKTRKAAAAPPPPPPPPPAETPARRKGKKKGRPSLLDLQRRSLRLQAQNPSPAPSPSRRDANPSDEDDDGVGSGGRRRQKRLKSVLSSSGGGEVGRAPPLLPVAPIFRNLPEVFGGLPEERRGGFLPWDTRRCGCRSGWICDFGIFLRGVGFVDDEAPAAAVVVKVEVEEKKKKVSSKATGKGDAASDGGPTTGTPLPDKKLLLFILDRLQKKDTYGVFSEPVDHEELPDYHEIIEHPMDFSTIREKLLNDSYTTLEQFENDVFLLTSNAMSYNSDDTVYYRQARSIEALAKKDFENLRQASEPEEEQQPKTVPRRGRPPKYAKKIEKTENDVSPDLSNAKTKSADHAETIRKRLTGDRTRNANITTRDSPFLQHNTPGSFAGKRTDRFGDYSGPSKYGKKTTPTISDDERRSTYDQQYFHSSPLFSALGGERKVLVPVGLQQQHAYARSLARFAAKFGPVGWDIAAKRIRRLLPSGTNFGPGWVVDGEPPENSQWPRVPMLSDPSIQSTGVPASNVISKNDESNQKSGLTSNEDSGEEHLARTEPVASTSACVNTNSVSATKLATKCENGANVSCDGVGSTGQTPPLQQHSHSREIHSNMNGFTALPNTISQYAGQGFLGQMQLTHAQVLGMFSGVNGRTNGFIHGHPLVANSIKAPQNGDVGKVATNPSPDAGHDSEAALSQTMTSSAPSLSAGVQPSGSMPSEKLANPKKHPDLALQL

SEQ ID NO: 16314 - protein, 583 aa, Oryza sativa
  Clone ID: TF_OSC410643j.C1.p12.fg
MDGLAAPSPSHSGATSGGGASHRKRKLPPSSLSDATADEDDDTTAPSSPSTSPSSPSRPSSPSSSHSDDDDDDSLHTFTAARLDGAPPSSSGRPPKPESSTVSAAAAAAAAAAAPKPDSASAAAGDGKEDPKGLFTDNIQTSGAYSAREEGLKREEEAGRLKFLCYSNDGVDEHMIWLVGLKNIFARQLPNMPKEYIVRLVMDRTHKSMMVIRNNIVVGGITYRPYTSQKFGEIAFCAITADEQVKGYGTRLMNHLKQHARDADGLTHFLTYADNNAVGYFVKQGFTKEITLDKERWQGYIKDYDGGILMECRIDQKLPYVDLATMIRRQRQAIDEKIRELSNCHIVYSGIDFQKKEAGIPRRTMKPEDIQGLREAGWTPDQWGHSKSRSAFSPDYSTYRQQLTNLMRSLLKASLLSSQIFLYDMQPFGLTSLDKPVLCLLPFEFFAPFLFQAYFLKPDQLDGLFNGSMIEMATFYKFNIQIFLNMNEHPDAWPFKEPVDSRDVPDYYDIIKDPIDLKTMSKRVESEQYYVTLEMFVADMKRMFSNAKTYNSPDTIYYKCASRLESFFSNKVASQLAQASTKN

SEQ ID NO: 16315 - protein, 176 aa, Oryza sativa
  unsure (1)..(176): unsure at all Xaa locations
  Clone ID: TF_OSC34007j.C1.p1.np
NASSRSSXHISHLISTCTTIYLNXRNRSPPKKKKPQIKQKHGSGGRKAGRKDSSLSKGMPDLMRQFGTIVRQITSHEWAEPFLKPVDVVGLQLDDYYKIITKPMDFSTIQKKMEGKEYNNVREIYSDVRLIFANAMKYNDERHDVHIMAKSLLEKFEEKWLQLLPKVENEVNECLX

SEQ ID NO: 16316 - protein, 494 aa, Oryza sativa
  Clone ID: TF_OSC12509j.C1.p3.fg
MVVVVVGGGGGGGGGGGVKKEEGEEEARGRGGGGGVVGGWGTWEELVLGSAVIRHGGVAWGAVAAEVRSRSPCAFSPEECEAKFSEIQARYSACDAWFEELRKRRVAELRNDLKKSENFIGSLQSMIKSLSNSKHDDGNSECHTSHTESCSNNENTADNNSSSKALSKDRSSAASFTEEASNSQKSEKVQHCDTDSIQVNNTSAEALVKPLVEKKVCAEDGLLWGSRKKRAVRDRRTFLMADNSCRAGENTSTSHIQTDGSSEGYAKKGLKTPNLESGVSVVEKAKPNLAEILKTISTQSDCYMLQRRLDVQRKRTRYKKMIRRHIDFRILHSKIKSGATSSTKELLRDILLFVNNVLAFYPKATLEHMAAIELRNIAFRTVQESASMPSKSCGVTGAATAPLVKKNTRPVQPGSHGPHDAKRSKVSLKGTGSTVKQGEAKGSRGGSSVTANVKTMQRNPPAKKRGVGRPPKNGQKRAAAQQDSPNKGRKRTRR

SEQ ID NO: 16317 - protein, 67 aa, Oryza sativa
  unsure (1)..(67): unsure at all Xaa locations
  Clone ID: TF_OSC7812j.C1.p1.gp
PRFPVQFSIEVIRIRLENNYYRTLEAIRHDATVMLANAQSYFSKSTDMTKKIRRLSDWIEQTFSSLX

SEQ ID NO: 16318 - protein, 516 aa, Oryza sativa
  Clone ID: TF_OSC400755j.C1.p21.fg
MALAQPTLTLTQRCGPARYGESLPLSESSGPEKKLKLFFFVKTKKYLFKPNTMTTQACKKRRAVYISSESEDSGTDSEVEGSKLSKKDGVTSVYTCGHQPTSKNKVDPMNTSKSRQCGSILKKLMDHKSGWIFNTPVDPVVYGIPDYFDVIRNPMDLGTVKRKLTSKQYSNPYEFAADVRLTFSNAMKYNPPGNDVHGIADQLNKIFDSEWKLLERKWKDRNLVQEQPSLKVLKAQPAVTPKPVLPKGVTAGTNSAVSKTLATALSSKVKIKFSVRGSELTSSKDTPLQAVGRRDGTINQSLPCTKDNAKTPRIQSSEDRSESTEEEYLPEEPLSPSKALRAAMLKSRFAGTIVKAQQKALLDHGKKIDPAKLQLEKERLEKRQQEEKARIEAQVKAAEAAAQLKLDEEMRMKREQERRAARLALHMMKKTVDIDNSDFLKDLENLSKKWELNPPGKLIVDFVDGIDLPPGLGSPLERLGLFMKKDLEEEVEHEMEDSVSPSTEIDVEEGEISFCQ

SEQ ID NO: 16319 - protein, 99 aa, Oryza sativa
  Clone ID: TF_OSC11395j.C1.p1.fg
NMNEHPDAWPFKEPVDSRDVPDYYDIIKDPIDLKTMSKRVESEQYYVTLEMFVADMKRMFSNAKTYNSPDTIYYKCASRLESFFSNKVASQLAQASTKN

SEQ ID NO: 16320 - protein, 791 aa, Oryza sativa
  Clone ID: TF_OSC401282j.C1.p16.fg
MGKTQKFSKGHPLGFVPDYRHGVETVGESKGCIGSPERIVSGSSCAVPKRKCGILKTEDGGELPGFNVPRDVFMLPRMSPSDKKDLEMRLRKELEQVKALQSRLFLRPAAVSMNGGAASASGDVVAKRNDAKLKRSNSVQSGRGVPPSAATPVVRSANYAEAFKQCGNLLKNLFKHQWAGPFLAPVDVVQLNIPDYFDIIKKPMDLGTIEKKLNAGMYSTPWDFAADVRLTFDNAVTYNPVGNDVNLMGKTLKCIFETRWKFIEKKLPSLDDKFSVRREPSQKGAVKKDTIEKDYPSEKKHSTKGVHKKDMFKKEDASTKPALQPKKRKASPLVQGSLEIPVVEADKVIDDAQVVQPSKVIDDAQVVQAFKVIDDAQVVQASKEIMTDRQKYELSVRLQSYGGLIPNHVVDFIRSHLPDDNEGDEDELELDMNVLSDSTLFELQKLLDDYDRVNQSGNPTKDEHREVEFESEYGLSNSSMHHEEGNELVEEDVDIGGNDLPPLTYPPAVFESETAERSSKHSTSSSSSSDSESSSSDSDSSSSSGSDLDVNVPPSTSGAKDNTQSAVRLDQENDPLSSTNLPQQSSDPVPISAEDEGENVSEKQVPPAKQYRAAVLLNRFADTIFKAREKTLDQVAKKDPEKLQHDMEELERLRREERARIQAEAKAAEDARKRAEAAAAAEAAAEAKRQREREREAARKALQQMEKTVDINEGNLFLKDLEMLGTVTSGEQFPSSVGETSPTHTPEGLGFQLGSNPLEQLGLYMKNDDEEDEEGESADEPTIDVEEGEID

SEQ ID NO: 16321 - protein, 590 aa, Oryza sativa
  Clone ID: TF_OSC400140j.C1.p16.fg
MKRKRGRKMGKKGKLKASITADASPMSPSSPSTVDASSKSPSSPSTEENGTSPAHHQADNAPVIAPPPVPEPAPPEPEKPAVSTDVQNAKPKVYSRVRLKFKSAKVLETHQGPSEAKAPVDGGGGKPASAAPEASKEVAEKAIVSPDGQKDAQAAELSGSDKDKMARKVASINIKSVGLSSVEDKNQDRKADSVSEPLPSKQETVLENVESETALEPRSSQELEVKQATPERQRDDRELTAALEAIKKVMKMDAAEPFNTPVDPVALGIPDYFDIIDTPMDFGTICQNLERGDKYMNSEDVYKDVQFIWDNCTKYNSKGDYIIELMKRVKKGFMKNWLAAGLYSDAQENGGNDNTGDEDVKGSKGKSKQKRRRLGNDRHKNDCACAVCQVTRRKKEKDEILAVIENDTAAVNSNISDQQIMEVDSGINNAGSHDTTSSQEQPPQTDMYRRTVVADDSGTLIENHVKFFNNQPLPHDYEDEGSRPYFDEKEEVDYTDLISQEEHTSSQPNDGSEIAQHQHKEPTETSQEIEMEDYPIQKENQSFLQLCARLFPSNQSSVFRGRHSLFRQQQRQVSMKGSPLHAAITAIMKR

SEQ ID NO: 16322 - protein, 344 aa, Oryza sativa
  Clone ID: TF_OSC34011j.C1.p25.fg
MAAAETAATAAAAGERAPGTEVDAFRRQVEDLVSKTDQLERRVNEVVGFYDGKKHGSGGRKAGRKDSSLSKGMPDLMRQFGTIVRQITSHEWAEPFLKPVDVVGLQLDDYYKIITKPMDFSTIQKKMEGKDDNKYNNVREIYSDVRLIFANAMKYNDERHDVHIMAKSLLEKFEEKWLQLLPKVENEERKQKDEESNGVPKVNISPEEAIAKLAKDTDNELIEINKQLEELRQMVVQKCRKMTTYEKRKLGAGLCHLSPEELTKALEMVAQDNPSFEAKGDELELDMDAQSETTLWRLKFFVREALERQANVASGRTDENAKRKREICNALARTASKRVKQQPN

SEQ ID NO: 16323 - protein, 649 aa, Oryza sativa
  Clone ID: TF_OSC407196j.C1.p12.gm
ISMQPLLVSSHAWSFTSLCEGARIGRRRKMKRKRGRKMGKKGKSKASTTADASPMSLSSPSTVDASSKSPSSPSTEENGTSPAHHQADNAPVIAPPPVPEPAPPEPEKPAVSTDVQNAKPKVYSRVRLKFKSAKVLETHQGPSEAKAPVDGGGGKPASAAPEASKEVVAEKAIVSPDGQKDAQAAELSGSDKDKVARKVASIKIKSVGLSSVEDKNQDRKADSVSEPLPSKQETVLENVESETALELRSSQELEAIKKVMKMDAAEPFNTPVDPVALGIPDYFDIIDTPMDFGTICQNLERGDKYMNSEDVYKDVQFIWDNCTKYNSKGDYIIELMKRVKKGFMKNWLAAGLYSDVQENAAGEEDGATGGRGRVGILVNVAANPWLSEVALRRVGTSAAMVDRLVEMLTWNGRDKPAARRGRAPTARSGTRSGAIESVSSLLFVADEECNLLGLLFAMQVGPGHLASLHGGRRTVAGVDRRLGGQRRASALRLGGVRLATNGGGWPATSGGTATGVRRAAVGGGSVLLVFLFGGGGRVGRRLPPPPRLRFRSARTPPPPAASSRPRSPPRRDRVPLHPPVRPFANSLLAASSSMESQTRPTGARRERRSGRRRGDGPRRPPLVQLLPLRLRPPARCSAVRGPWRRERER

SEQ ID NO: 16324 - protein, 188 aa, Oryza sativa
  Clone ID: TF_OSC405157j.C1.p1.fg
METLVQGRWRRPVHSLRHLHRRRLRLVHLLLPGGPGRGGGDREHVSVKLRLVTRCATATAFYELRLLDQDTGRAADVDRASGAPRVFASSNPGTACFGRRAFMERSKLEASPACLRGDSVVIDCAVRVVVHDPVVSAVRRREAPDDVPPSNILRQLVAQVESEGADVTFPVQGETFTAHRLMLAARSP

SEQ ID NO: 16325 - protein, 475 aa, Oryza sativa
  Clone ID: TF_OSC400305j.C1.p20.gm
MRCYGRKRPWKRASFYGRVRNVNEGVIVAELVEQDGVRSSCRHGKEKLAGGSKMTTHGLGGTERHGMKQFTQGHDSEPQPCVAHEKQAQGRFRVTARFLELERQKLKRMGSKKRMSRYAKKHEEATLKFDVVGYSLNEGMAAGEFIRSPAFAVGATTGQSASTPTAPRCPKPQRSNPMQRYRLEKEESGYIKDDCLKIELRRTRACSPVFKAELYGGMKEREARSVTVDDTQPDVFRALPHFMYTDSLPDMDGVEDADYVEMIRLLLVAADRYAMDRMKLLCESVLDDLLDAETVGTTLALADQHSCNNLKDVCVKFMATSKGMDAVMATEGYDNLKRNCPYVLIDVLEKHASVANSGENVVDPLVNLSLPFISPAFIAGSPPPPLFSTARPTVPHRHRRRLVADHRREPFRSRHPIVTADGEEDEHHVELQRLGDALVGHEAAPASMGRSQPRGREKRGGGGEPAMNARGDEGQ

SEQ ID NO: 16326 - protein, 156 aa, Oryza sativa
  Clone ID: TF_OSC400049j.C1.p21.fg
MEPQVFKSLLTFIYTDSLPELEDEEETESDRDEEEDQESEADGVHGEDYDDDDDDDDDDNGGDEMWSPLLVAADRYDLQRLKLICAKKLCERIDASTVADNLGLAEKQHCRLLKEACLEFLKAPANLKVVLASDGLDHITATCPSVLKELLAKFAS

SEQ ID NO: 16327 - protein, 277 aa, Oryza sativa
  Clone ID: TF_OSC415318j.C1.p6.fg
MSTHSTELVKGSHEFTVAGYSLQKRNGTGHFVRSGSFEVGGYSWAIRFYPAGSTKEEERHVSVFLELGSTVVEKVTARFRFRVNGATASSWGQFNDFTLSSKTWGYQKFMEIEPVESEYLINDCLTMHCDVEVVKELKTGATMSRFITVPPPAICCHLEQLLESKEGCDVTFQVERSDYDAHRVVLSARSPVFRAQFFGPMADTGGGDRPTQTVFIPGRNIIGVVILHETLYELHRKGIPMHFRKHSNKYWKVIEERIEKKLSSWKDRIIITMVGSR

SEQ ID NO: 16328 - protein, 122 aa, Oryza sativa
  unsure (1)..(122): unsure at all Xaa locations
  Clone ID: TF_OSC405123j.C1.p1.np
AMDDLDDDDDDKAHMIHLLEAADRYDVERLKLICELMLCKSIAVDTVAATLAMADQHHCQKLKEACIEFLATSKKMEGVMESQGYEKMKLSCPSFMVDLWEIIGRKNYKVLSDSXHKQQVFI

SEQ ID NO: 16329 - protein, 347 aa, Oryza sativa
  Clone ID: TF_OSC400964j.C1.p15.fg
MCEGVRAAGDAAAAADVDVITSSGRRRIPAHSTVLASASPVLESILQRRLKKERDAAAGGGKVRRAVVLIRGVTDDAAAAFVRLLYAGSSGDEEEIDEKSAAQMLVLAHAYRVPWLKRRCEGAIGSRLTAESVVDTMQLAALCDAPQLHLRCTRLLAKEFKAVEKTEAWRFLQENDPWLELDILQRLHDADLRRRKWRRKRAEQGVYVELSEAMDCLSHICTEGCTEVGPVGRAPAAAPCPAYATACRGLQLLIRHFSRCHRTSCPRCQRMWQLLRLHAALCDLPDGHCNTPLCMQFRRKEEEKAAAKAKAKAGDDDDKWGLLVKKVRVARAMSSLGKRRQMSCSQC

SEQ ID NO: 16330 - protein, 102 aa, Oryza sativa
  Clone ID: TF_OSC547j.C1.p8.fg
MAQHLLAAADKYGLHRLKMICLEILSSHIDANSVATILVLAEKHYCYGLKEACFEFLNSLAVLSAIAARGKESVGATADAGVRGNAENMQVARDQGTLLIND

SEQ ID NO: 16331 - protein, 370 aa, Oryza sativa
  Clone ID: TF_OSC400305j.C1.p28.fg
MGTEPLPMSRKLSSGGGWFDGEDPVEEGVLGDDAAKADAGGVGGGEELYSAASACVNITRNLSLPIKTNPEHDISSCEQGLLSEPHGKIPFLFSEIFSHHFKLFNSSPLSPFLPPPLLSFALSFSPLFASSPSATRDDYGTNDGGQAGGRPAGGGGGSGRPASGSATPVLESDGGARICFTQPQECRQREWETSAWIRRLPANGDEQICSPRPRSDRGVRICRPQPREQATYLAPPPSGAITATATPGWIYQQQEQLEQVMDSSMNPSPLMWFDNTTHNLLRAADCYGLERLKAICETKLCLDIDVKSVMVILLLADQHQCDMLKQACFSFIANPNTLETVTGTPEYHQFKSLYPILLIEVLENVCILRK

SEQ ID NO: 16332 - protein, 797 aa, Oryza sativa
  Clone ID: TF_OSC900178j.C1.p15.gm
MGDLSSSDSLLGWANDELDLFASYGASLFPNTRKPLICSEHQPIQSVPPSCRVPNVAIVYVLADVPGGVELAARAAAPAPAAAIGEAVRVMERVRRRIRVRIGVGEAGGAGAAGGEELGGARHGGVAAVRKEQRKKGKWGSSKHKPFGTDSIHKPPYELPLCGVQPPRGSNGNRGSIRRVPHLRHSLHPILSQELPSDITIKVDDAAFNLHKLPLASRCGYIKKQVSGVGGNKATHLEIAGMPGGSKSFELVVKFCYGVNFEITVDNVAMLRCAGEHLEMTEECRPGNLVGRTEAYLEEVALASLEGAVAVLRKAEELLPASEEKARLVARCIDAVASIVCGGDGQFSMSLGTPGGGGGGGYNGVGAAASREVDDWCADELTALRIDTFQRVMIAMKARGFKGIAMGTLIMLYAQKSLRRLDMHGRDRKKMGARQEHEKRVVLETIVSLLPRERNTLSVSFLSMLLRAAIHLDTTLACRLDLEKRMAAQLGQAVLDDLLIPSSSPDAAAATTAYDIDAVQRILAGYLDLDYTTDPPPRLDYTTDDDFSSAASPPHSDVAQVGRLMDSYLAEIASDENLSVDKFTALAELIPERARFNEDGMYRAIDIYLKAHPSLAEGERKKVCRAMDCQKLSREACAHAAQNDRLPVQTVVQVLYHEQRRLRAPSQPPSAAPSYAGGESPALSYRPTPSFNGRHRPGVPDEVSRLQRENDELRMELLRMKMRLRDPSVAFSAGGVPPSGRPPLPKKPGGGGGGSSGGFMNSMSKKLGRLNPFLRSDVLGGGRVRTKPPKDRRHSIS

SEQ ID NO: 16333 - protein, 886 aa, Oryza sativa
  Clone ID: TF_OSC404491j.C1.p1.fg
MRKLFFSELTSCKETKLHSAPHSWLPLEKGKLSKFAGHSTSSIESLMKMPEPVVLPHFKPADYVDILAQIHEELESCPPDEKSCLYLLQFQVFRGLGEVKLSRRSLQSAWEKASTIHEKLIFGAWLKYEKKGEEPISDLLSSCGKCSQEFKLLDFVSQISTGSHEISYDDESDVFWGSPVVHFRIRDDMIACDRRKLAALSTPLYAMLNGGFRESHLEVIDMSRNGISSIGMRAISKFSLTGRLPYLSADAILEMLDFANKFCCNGLKDACERKLASFICSRQDAIDFMECALELGCSILAAACLQVLLNELPECLNDEQVVRIFSCASKQQRSTMAGNASFSLYCLLSEVSMSINATSDVTVTFLEKLVDSASDSRQKQLALHQLACTRLLRKDYAEAERLFNAAFTAGHLYSVVGLARLASMRGNKHFSLKLLDSVMSSRWPLGWMYQERALYLEGDNKLENLNKATELDPTLTYPYMFRAASLMKRQSVEAALMEINRILGFKLVLECLELRFCCYLALEDHRAALCDVQAILTLAPDYRMIGGRVSAKQLRMLVMENVEQWTTADCWMQLYDRWSSVDDIGSLSVIYQMLESDAAKGVLYFRQSLLLLRLNCPEAAMRSLQLAREHAASQHEQLVYEGWILYDTGHCEEGLQKAEASIAIQRSFEAFFLKAYALADSSLDPSTSATVVSLLEDALRCPSDRLRKGQALNNLGSVYVDCGKLDLAAECYINALKIGHTRAHQGLARVHFLRNSRTGAYEEMTKLIEKARSNASAYEKRSEYCDRELTKSDLQMVTKLDPLRVYPYRYRAAVLMDNHKEKEAIAELTKAIAFKADLNLLHLRAAFHEHVGDISSALRDCRAALSVDPNHQEMLELHHRVNSQEP

SEQ ID NO: 16334 - protein, 578 aa, Oryza sativa
  Clone ID: TF_OSC402104j.C1.p34.gm
MMTRRQDAYYRYPTTSTIVASAPMPTGHHVLRIDGYSLTKAKFAAGEECDESCSFVVGGHAWRIRYYPNGAVVSGSGGFVSLMLSLDHQPGAALPAAVVKARFAFSLLDMDGEPVPSRTYASDGVVSFSANSSSTFGAERFIGHGELEASGHLTGDRLAFRCDVTVVKRDGPPTMSTLCPVEHDMFRCLLDTGDDADVAFRAAGGETIAAHRRVLERRAPELAKLCRRRGGASCFMGLVGRHIDVGDMDAAAFKALLHFVYTDTLPETMAPREVPAMAPQLIAAARKYGLDWERLRLLCEDKAWGWRVDDTSMDTTAAAAPATGDDPKRSQRPPRASFTAAAASLFRHPASPAGRKVSTTPARPRRLAPFPSPPLPQAGGGALYVVFPVAGGGAPSPATSSYHSFSFAPVASTGPPPAPDPAGGNALYFRMVGAKATLYCYKIGVFSPHVLSISVVATYTQLLFLARKGVAMRAFESFTGRHDDRRLAFIKDGVELRAGLPPGPAGTVRTVRLPSFFFHTEPLKSQCRPWPPPPPVGDPESGGLRRRLLSLLDGTDVTFRVGGEAFAAHSSVVAAWSP

SEQ ID NO: 16335 - protein, 355 aa, Oryza sativa
  Clone ID: TF_OSC401213j.C1.p7.fg
MTQWADLDALRPAVAADVQVVTSDGKSIAAHSFVLGTASPVLERMIERARRGWNAECTIRVLGVSSDAVFAFLQLLYASRVTPEDEEVVTAHGPQLLALSHAYRIGWLKRAAEASVTARLTPEHAVDMLKLARLCDAPRLYLRCARLAAKDFAAVERSEGWRFARRHDAALELEILQLLEDADQRRERWARERASREAYRQLGEAMDSLEHIFSDDGCSCADADADADTDAPPCRGLRLLMRHYATCGARKAAPGGGCTRCKRMVQLFRLHASVCDRAAPHDDGDRPCRVPLCSHFKGKMRAEKADKTWRLLVKKVTRARAMSRLAAGREREVVPEVVAASWARYSSSGGAARLR

SEQ ID NO: 16336 - protein, 253 aa, Oryza sativa
  Clone ID: TF_OSC401965j.C1.p36.fg
MKQISPPHHDFNPVSATGCKDYISFYLFLEDAVDEPVMGQVTFSLLDQDGKPVLSRTHTTRMFSFSLNSSFGFHKFIRREDMEQSKHLKDDCFAVSVHLVITKGAPSVKVPPSNLHSHYGDLLSSKQGADVEFMMFEALLIFIYTDMLPKMDQEDEVAMAQHLLVASDTYGLQRLMLICEDRLCNHINTDSLAIMLVLAEKHHCIRLKEVCFEFLSSSTALVEFMESSDFLYFIRSCPTVLKDLIYNVAAHGK

SEQ ID NO: 16337 - protein, 637 aa, Oryza sativa
  Clone ID: TF_OSC9665j.C1.p1.fg
MAASSSAAASTSCAVAAEANGSTSTIVATTKPTGHHILKIDGYSRTKAMVAAGDSIDSSRFHAGDHAWRIRYYPNGTDRSNQNPDAISVMLELQDAAAGRNNGAAAAAAVKAKFVFRLLNKDGEPVPSRTYRSSVHSFPSSDGFKNWGFLRFITHGDLEKSGHLADDGFAVRCDVTVMGGIELRVEPASSLAVPEPDMHRHLGRLLSAGDGADVTFRVAGGEAFTAHRCVLAARSPVFKAELYSRGGFLRPAAAGRPGTRVIDVDDMDAGAFGALLHFVYTDTLPEMASADVPAMARQLIAAADKYKVERLKLVCEDKLSRRVVADDTSMTPTPMSTPTTMTDSTTTACRWGAKFQTLRQRPCQRECQDQLLDLAGERVARYSQSGDKCSISKKTDRWVCNSFIKRDELEKSGHVVGNRFAIRCDLTFNVQDLRVRGLVAVQLPPPVLGCHLAERLLFDDETADVRFRVRGETFPAHRAELLGSSMKEHAARTIRVDDMKVPVFAALLYFVYTDELPEMEDDERTVIMAPHLLVPADRYDMDRLAEEGVRGQDGEAPRRRHGGDVAGVGRAPWLPAAQGGHLEVPRRVAAGEVEDGHGERGVPTCDHGFPLHSHGDCSCHARRKFGLASELTVEMRR

SEQ ID NO: 16338 - protein, 404 aa, Oryza sativa
  Clone ID: TF_OSC412646j.C1.p19.np
KTTTQQIDRHIQKSIDTTNRFSYYGNTEIGVLDYSATNASAIGDPINSDLFTAGGLTWRVNCYPRGDKADNNGDYISLYLELISKSKNIKAIFDAFMVDEHGNPSDGSNRLVQVYPPAGYAWGWPRFVKRSNLSSVFVVDGKVRIMCVVGVTGGHLDGGLLPGVTGGHLDGGLLPLPPPNIGVHLGGLLDSEDGADVTFAVGGETFHAHRAVLAARSPVFRAELLGSMAEATMPCVTLRDIEPATFRALLHFVYTDVLQIEGSSSTSTTDLLQRLLAAADRFALERLKLMCAQKLWESVSVETVIATLCCAEMHSCPELKNRCIDLVVTKDNFMEVAVTKDYFHLGQSFPSVIEEITGNLPRTMQRGPWGQTWRQHRVSGSLGGVTSSSRVIYSRIMSATKARS

SEQ ID NO: 16339 - protein, 430 aa, Oryza sativa
  Clone ID: TF_OSC415148j.C1.p5.fg
MEDEGAGGGGIGGDASPVHVGSATEVGVGRDIVPSPTSSRSVMQTVNGSHMFVIQGYSLAKGMGIGKYIASETFTVGGCQWAIYFYPDGKNPEDNSAYISVFIALISDGIDVRVLFELKLLDQSGKAKHKGHSQFDRSLESSPYTLKNRGSMWGYKRFFRRTALETSDFLKDDCLKINCTVGVVVSTMDYSKPHSIHVPESDIGYHFGTLLDNQEGVDVICNVAGEKFHAHQLVLAARSSFFRSELFEHESDEEKNEVDTSNEIKEIVIDDMEPKVFKAVLHFMYRDNLVGDDELSASSSDCSIFDTLAGKLLAAADRYELPRLRLLCESYLCKHISVNSVATTLALADRHHAMELKSVCLKFAAENLSAVIRTDGFDYLKDNCPALQSEILRTVAGCEEECSSGGKSQSVWGQLSDGGDTSGRRVRPRV

SEQ ID NO: 16340 - protein, 386 aa, Oryza sativa
  Clone ID: TF_OSC400305j.C1.p21.fg
MPSSSSAAAAACGPPEFTPGWKTVSTCAPDVVGEGVHVFDIFGYSDHKGMGAHEPIRSGAFSVAGLDWVACLYADGYGVAGIDDVSAYLRLLGDAPTPRVWVSCEVKLVDQRTGVASTPQPFLRYALAFGDKCKALHCMMIPRGQIEVEPYLVDDRLTMEFHVVVRRDPRVSRTARFPRILVPPPDIKRQFANLLQSKEGADVTFDVAGEPFSVHKLVLAMRSPVFKAELCGLLREPGTQPITIVDMQPAVFRALLQFIYTDQFPVTRGFERRDNCEMIRHLLVAADRYAVDRLKLLCQGILCKNLNVHNVATTLALADQHQCDKLKDACIEFMSCSKKMKGVVASKGYEDLQRMAPSVLADAVAQMSKLNKMSRGSVPQDESKSC

SEQ ID NO: 16341 - protein, 343 aa, Oryza sativa
  Clone ID: TF_OSC400049j.C1.p16.fg
MSPPVAEESEGGGGRMPESMDHPPVVEESEARRQQRRPGDGKLHQHGQIDGAVDVEWRADEKSNADFSVQAKYQISFANQVKMQPSLKYIMVRTFIRGCSWTWGYKKFIKREDFEKSDDLRDDSFTIRCDILILRKIRAEETTEILPAAESFVSVPPSDMNQQFGDLLETEKGADVVFEVGGQTFAAHRCVLAARSPVFRAELYGLMKEGDTAGVVRVEEMEAQVFKVLLRFLYTDSLPEMKEEDVMCQHLLVAADRYNLERLKLICEEKLCKYISVGTVSNILALADQHRCDGLKKACFNFLGSPANLSAVVAGDGFKHLSKICPSLMEELVVKLALPATQA

SEQ ID NO: 16342 - protein, 422 aa, Oryza sativa
  Clone ID: TF_OSC400049j.C1.p54.fg
MKATAGLVEAQRRPARSKAVRRRQGSCGGLDVYGQASVEVEASAPTSPSDVGLDAGMTTTTTAAAAALTSSVGDGPPPSRSTTTITAGRTYHILKIEGYSSTLKAGRGQALRSSPFSAGGRTWYISYYPNGGRETNKHCISFFIHLDDDTVNDDVMAQVTFSLLDRHRNPVRSHTVTTTLYNFSVASSNALGFENFIRRDDLQRSEYLNDDCFAIAVRLVITEESPSFTVPPSNMHMDYGDLLSSKEGTDVEFVVGGETFAAHRLVLAARSPVFKAELFKPMEEGTTDVIKIDNMDAQVFKALLVFIYTDTWPEIGQDETTMVQQLLVAANKYSLSRLKIMCEDKLCSYIDTSSVVTMLMLADKYQCHGLKKVCFNFLASSRALSLVMKADNFWCLIQSHPTMLKDLIYNIVTHQLEIKLSV

SEQ ID NO: 16343 - protein, 413 aa, Oryza sativa
  unsure (1)..(413): unsure at all Xaa locations
  Clone ID: TF_OSC401668j.C1.p22.np
SDVSFSVGGETLIHAHRAVLAARSPVFRAELLGSMAEATMPCVTLHDIEPATFRALLHLVYTDALPASSTSSSTAAVLAAADRYALDRLKLMCAQSLWEIVSAETVAATLACAEMHSCTELKTRCIDFLMKDSNFKKAAVTDDYLHLYAELPVSDQRERHGSRLETXNSRHSGQPTNKQKRRWTHRSFSLPSFFFLPSSLFILPDRNSPPCRDGVGRICKESXIINHYFLKLYSPSIAVPPPNLGGHLAAMVGSADGSDVSFSVGGETLIRAHRAVLAARSPVFSAELLGSMAEGTMPCVTLHDIEPATFRALLHFVYTDALPHILSPSFFKKLFAAADRFALDRLKLMCAQKLWESVTVETVAETLACAEMHSCPELKSRCLDFFVEENNFRKVVVTGGYLRLMQGFPSVID

SEQ ID NO: 16344 - protein, 370 aa, Oryza sativa
  Clone ID: TF_OSC401879j.C1.p9.fg
MASRSISSCTTETAKGIHRFEIFSYSMMNTEAEDDSIRSGVFNVGGFDWALLYYPDGIDDDSKGYIGVYLELISKNGEPWALVDVNLINQLQPGQPRQLFTKTDVPTPFRSSSFQESTLGSLKCMKRSDIESTPGFIVNDCIVIECNVTVIYEPKVSKTRALCDAETSSALREIEVPPMEISSDFAKMLKDGVGADVTFRVGEDTFRAHRAVLAARSPVFHAQLCGPMKEKKETQMQEITIQDMQPSVFEAFLYFIYTDCVPRMDDLGNGEKMHLMMHLLKAGDRYGLERLRIMCERFLATNLDTEHVSAILGLADLLDLKKLKEACMEFMVPSERMDAVAASQGYQQLKRAFPSLAFEVWERRSRVRRN

SEQ ID NO: 16345 - protein, 350 aa, Oryza sativa
  Clone ID: TF_OSC405158j.C1.p3.fg
MASRSISSCTTETAKGIHRFEIFSYSMMNTEAEDDSIRSGVFNGYIGVYLELISKNGEPWALVDVNLINQLQPGQPRQLFTKTDVPTPFRSSSFQESTLGSLKCMKRSDIESTPGFIVNDCIVIECNVTVIYEPKVSKTRALCDAETSSALREIEVPPMEISSDFAKMLKDGVGADVTFRVGEDTFRAHRAVLAARSPVFHAQLCGPMKEKKETQMQEITIQDMQPSVFEAFLYFIYTDCVPRMDDLGNGEKMHLMMHLLKAGDRYGLERLRIMCERFLATNLDTEHVSAILGLADLLDLKKLKEACMEFMVPSERMDAVAASQGYQQLKRAFPSLAFEVWERRSRVRRN

SEQ ID NO: 16346 - protein, 136 aa, Oryza sativa
  unsure (1)..(136): unsure at all Xaa locations
  Clone ID: TF_OSC100059j.C1.p1.gp
FRALLQFIYTDQFPVTRGFERRDNCEMIRHLLVAADRYAVDRLKLLCQGILCKNLNVHNVATTLALADQHQCDKLKDACIEFMSCSKKMKGVVASKGYEDLQRMAPSVLADAVAQMSKLNKMSRGSVPQDESKSCX

SEQ ID NO: 16347 - protein, 120 aa, Oryza sativa
  unsure (1)..(120): unsure at all Xaa locations
  Clone ID: TF_OSC9673j.C1.p2.gp
MDADAFRALLHFIYTDTLPDDDDDDDAMARRLLAAADAYGMERLRLICEDRLRRRVAMGNVAVTLALAEQHHCRALKEACVEFLSSPGNLKAAMATDGFEHLKATCPSVLTELVMKQLVX

SEQ ID NO: 16348 - protein, 213 aa, Oryza sativa
  Clone ID: TF_OSC33617j.C1.p1.fg
FPPIFTLLKYILYAGDDDGTIPIPWLNLNGQLGDIVDRADGSDVPFSVGGEMFHAHHAVLAARSPVFKTELLGSMAESAMPCVTLHNIDPATFKALLHFVYMDALLSPTRGGASSTSTTTGFFKSLLMAVDMYALKRLKLMCAQKLWGSVSVETVATTLGYAETYHCPELKSKCLSFLMAESSFKKVAFTDGYFHLRQDFPLIIEEIKKRIES

SEQ ID NO: 16349 - protein, 182 aa, Oryza sativa
  Clone ID: TF_OSC14613j.C1.p1.gm
KAVLERSEYLRDNRFTIRCDITVMKNPEAKDTGGRRVTLPPSDLARHLGGLLATGVGADVTFEVDGKTFLAHRNVLAARSPVFHQELFSLTEKGNAATGGAGVIIRVDDMEAQDFEALLHFIYTDSLPEMKGGDAVAMLPTWSRRLTAMLAFAGEHQCPELEKKCLQLLEDPANLRNIVETE

SEQ ID NO: 16350 - protein, 1765 aa, Oryza sativa
  Clone ID: TF_OSC34061j.C1.p19.gm
MGNSLFSMASSTASPSDGRSPRLPETLSRCVTASVAAAHNFEVTRYSLLAGVGAGEFVTSGTFSIDGHNWNIQVYPDRWKQEMNAGYVSVFLCLCGGATGVRAKYTLSLSENGGESVQRSLTHRFDTVGAFWGFPRFMERPRLRQWLLRRGPGGGDDCVTFRCSLTVIREPRTEGVAAVAVPPSDMRRHMANMLRGGDGADVVVLVRDQPFRAHRCVLAARSPVFRAELFGGGHMRERRTSCVVVDDMEPSIFSAFLHFIYTDSLPENPDTPGDDQDCMAMQHLMVAADRYGLDRLVLICEEKLCRGIDVQTVATTLALAEQHQRVALKDACLGFIVSRGVLGAVARTDGFKHLLTTCPSIMVDILDKVASVMSNPDQKWANLVGPPSQTHERPRGTCFVRAHPWITGLVAGVSVVRTVEYRSAGSQVMDIGPHSIQLIAPPSLYHAASAAAMGDHRDPAFPAAAGGCRLPKTSSVSVTESVTAVHDFKVTGYSLIEGLGIGRYVSSSTFTVGGVDWAVRFYPDGSTVTCLGNASAFLYYCGREKEVRTRFTLNLLGKDGKLSQVTNSYMKHTFSPASDNWGFIKFAEKSKLQSSPFLHNDCLTIRCLLTVVRESHTKDVEVNSVVVPPSNLHTDFENMLQDGEGSDVTFTVGGQEFRAHKCVLAFRSPVFKAELFGPMKENGTQCIKIDDMEPEVFEALLHFIYTDRLPDSCRDGKAAAMQHLLVAADRYGVDRLRLICERRLSETIDVETVATTLVLAEQHHCSQLRQACIGDSLTEIAPMEEFFITHRISCGEIDARSFVEVEDEADRDDGEAAVWGAEGRQPQIEEAVVDVRAPPGTAPPPTPARKRTAAASPLGATPAPAPERKGMAAASLPGATPTPTPVTKRKGTTAASPRGTQSTTPARKGLAVASPPGKPLPTPGRKRNFVAGDWRGGREKERGNNFPPTRARQRRPRLGRKNGSLQMSNDIYGYGNMDYWDVVADMLTSSAARTSSRSVWEGITGTHDFEVVGYSLMDGFGAGRHVCSGDFSVAGHDWYVAFYPDGLDQDSAGYASACLAYRGKERLVRAKYSLSLVARDGRASPLAGDTLRSHYFTPTSRSADVLKFVEKSNLSSSPSSSSYSCLDDDTLTIRCVVTVVTGPRVVSVAPAKERGPRVTVPPPSLHEHLARMLRDGRGSDVAFRVGGRVLRAHRCVLAARSPVFDAELLGPMMETTAPCIEIHGVEPAAFEALLRFVYTDSWPLAGVDVAATVRLLSAADRYGLERLRLMCEEKLHEGIDVDNAADVLAMAELHHCSQLRDACVAFIASPSTLGPVLASSGFEDLIMATGASVTKEILHKQPPSQPQPGMGGPPPPPQGAAGQPPQWGAIPPPMPPHQYGAPPPQQPPAMWGQPPPQAHYGQVPPPQPYYAAPPPQAMPAPAAADEVKTLWIGDLQPWMDESYIYNCFAATGEVQSVKLIRDKQSGQLQGYGFVEFTSRAAADRILQTYNGQMMPNVEMVFRLNWASAGEKRDDTPDYTIFVGDLAADVTDYLLQETFRVHYPSVKGAKVVTDKMTMRSKGYGFVKFGDPTEQARAMTEMNGMLCSSRPMRIGPAANKKTTGVQERVPNAQGAQSENDPNNTTIFVGGLDPNVTEDVLKQVFAPYGEVVHVKIPVGKRCGFVQYVNRPSAEQALAVLQGTLIGGQNVRLSWGRSLSNKQPQHDSNQWGAGAGAGGYYGGYGQGYEAYGGYAQPQDPNMYGYGAYAGYPNYQQQQVAQQQPPQQDK

SEQ ID NO: 16351 - protein, 637 aa, Oryza sativa
  Clone ID: TF_OSC419840j.C1.p2.fg
MAGSEAAAAQEAEMDPDFSGGGGGGPSFEFAFNSVNFSDRVLRIEVVAGDDDDDDDHAPGSSRDGGAGSLSDWARHRKRRREELLKEKGRWIIGDARDTIVQPRNFGRTCNLVLIDYTCRMIWHTRLGLRGQCGQLFEIKLQLLVSCADHDLNACFVLLRSCSKVEPESEAVMPDQINCKVEPEECDAYEENQEEPVAMMDDSPPSVGPDGDDGPSMDSPWSGGVSTPVLRVKNIYISSAILAAKSPFFFKLFSNGMKESDERQATLRITDSEENALMELLSFMYSGKLTSTDPTLLLDILMAADKFEVISCMRYCSQLLTSLTMTTESALLYLDLPCSISMAAAVQPLTDAAKEYLSNKYKDLTKFQDEVMNIPLAGIEAILSSNDLQVASEDAIYDFLIRWARAQYPKSEERREILSSRLLPLVRFSHMTCRKLRKVLICTDLDHEQATKCVTEALLYKADAPHRQRALAADVTTCQKFAERAYKYRPLKVVEFDRPYPQCIAYLDLKREECSRLFPSGRMYSQAFHLAGQGFFLSAHCNMEQQSTFYCFGLFLGMQEKGSMSVTVDYEFAARTRPSGEFVSKYKGNYTFTGGKAVGYRNLFAIPWSTFMADDSLFFLDGVLHLRAELTIKQPTV

SEQ ID NO: 16352 - protein, 368 aa, Oryza sativa
  Clone ID: TF_OSC401762j.C1.p40.fg
MPTATGSRTPVRSASAVIAGTESGQHHLKIDGYSRIKDELPTGSDIKSRSFRAGGHSWHLRYYPNGFNSDCAECISIFLQLDYNVMKGVKAQYKFSLLDRARKPSYSRSSGKADVFLNTGWGYRTYIERGLLESSEYLRDDCLTIVCDFTVFKDLRTEDIDVDDAMPPPQSPPTVVVPPSDLHRHLGGLLATGEGADVTFEVEGKTFAAHRWVLAARSPVFRVALFGATTGGADDVVRVNIDAMKVQDFEALLHYMYTDSLPEMKGGEAAAMLPDLVAAANRYKMERLRLVCEHKLCEYVNGRTVVAMLAFAGEHQCNGLKEKCLRFLDDPVKLRLIVQAEGVENLSKSYPSILKDVIAKFVATPVDS

SEQ ID NO: 16353 - protein, 349 aa, Oryza sativa
  Clone ID: TF_OSC412646j.C1.p21.fg
MLDGGFIELKLRYEDLAAGDFVRSDDIYAGGHTWRVLCYPRGGGAMNSNGQRIGGEYLSIKLDLVTRSTNVRAIFAAFLVHLDGHPSPVHAKSFVAVYPLGAGGRGGGKAAAGWMYFASRSELEKKFVSGDGWVTVVCGVLIPSDSPQALSPPPPPPPSSGGGGGHIGRLLYGAADDTADVALVVGGETFRAHRAVLAARSPVFKAALFGSMAEATAPSVALRDMDPAAFRAVLHFIYTDALPDDIDELAGFSPVDMFQHLLAAAERYELGGLKLLSTKKLLDNVTPENVAGIIVCAETYGCPELKKKCLDYLAREDEHFRKAATTQGYLRLLQDFPSLMDEIRAVIER

SEQ ID NO: 16354 - protein, 795 aa, Oryza sativa
  Clone ID: TF_OSC2852j.C1.p4.fg
MLTSSAARTSSRSVWEGITGTHDFEVVGYSLMDGFGAGRHVCSGDFSVAGHDWYVAFYPDGLDQDSAGYASACLAYRGKERLVRAKYSLSLVARDGRASPLAGDTLRSHYFTPTSRSADVLKFVEKSNLSSSPSSSSYSCLDDDTLTIRCVVTVVTGPRVVSVAPAKERGPRVTVPPPSLHEHLARMLRDGRGSDVAFRVGGRVLRAHRCVLAARSPVFDAELLGPMMETTAPCIEIHGVEPAAFEALLRFVYTDSWPLAGVDVAATVRLLSAADRYGLERLRLMCEEKLHEGIDVDNAADVLAMAELHHCSQLRDACVAFIASPSTLGPVLASSGFEDLIMATGASVTKEILHKVSESWSGPARASRRIDAAAAVAAAARHGRPASAATGRGGAAAAVGRDPAADAAAPVRRAAAPAAAGDVGPAPAAGALRAGAPAPAVLRRAPPQAMPAPAAADEVKTLWIGDLQPWMDESYIYNCFAATGEVQSVKLIRDKQSGQLQGYGFVEFTSRAAADRILQTYNGQMMPNVEMVFRLNWASAGEKRDDTPDYTIFVGDLAADVTDYLLQETFRVHYPSVKGAKVVTDKMTMRSKGYGFVKFGDPTEQARAMTEMNGMLCSSRPMRIGPAANKKTTGVQERVPNAQGAQSENDPNNTTIFVGGLDPNVTEDVLKQVFAPYGEVVHVKIPVGKRCGFVQYVNRPSAEQALAVLQGTLIGGQNVRLSWGRSLSNKQPQHDSNQWGAGAGAGGYYGGYGQGYEAYGGYAQPQDPNMYGYGAYAGYPNYQQQQVAQQQPPQQ

SEQ ID NO: 16355 - protein, 605 aa, Oryza sativa
  Clone ID: TF_OSC22376j.C1.p7.fg
MDPDFSRASRGPSFAFAFNSVNFSDRVLRIEIVAGDDAAGAKGAAGEGCSSLADWAHQRKRRREELRREKAVAFDFRSYPKFESKKKWATNRNSCFPLRGIALGRPHCRLGASAVRYFRRARSRECESGKYTDLETCKVEAEECDTYEENNEEPVAMIEESPPDIGQDGEDGDSCDSSWSMECTQVLRVKSIYISSAILAAESPFFYKLFSNGMKESDQRHATLRITASDSFYLIIVCLSETEENALMELLSFMYSGKLTTNQPTLLLDILMIADKFEVVSCMRHCSQLLRSLPMTTESALLYLDLPSSISMAAAVQPLTDTAKAFLANKYKDLTKLQDEAMNIPLAGIEAILWSNDLQVASEDAIYDFVIKWARSQYPKLEERREILGTRLLPLVRFCHMTCRKLRKVLACNDLDHEQATKCVTEALLYKADAPHRQRTLAADVLTCRKYAERAYKYRPLKVVEFDRPYPQCIAYLDLKREECSRLFPSGRIYSQAFHLAGQGFFLSAHCNMDQQSAFHCFGLFLGMQEKGSTSVTVDYEFAARTRPSGEFVSKYKGYYTFTGGKAVGYRNLFAIPWSSFMADDSLFFIEGVLHLRAELTIKQP

SEQ ID NO: 16356 - protein, 394 aa, Oryza sativa
  Clone ID: TF_OSC415318j.C1.p8.fg
MAAAAASTVPQSSSTSSTPQNTISTHSTELVRGSHEFTVAGYSLQKRKGAGHSIRSGSFEVGGYSWAIRFYPAGSTKEEERHVSVYLELRSTVVEKVTARFSFHVHGASASSLHMRGSFDDYTPTSKSWGYPKFMEIETVESEYLINDCLTLLCDVEVVKTVKTGATISCFITVPPPAICRDLELLVGSKEGSDVTLQLEQSEYDAHRAVLAARSPVFSAQFFGPMADEDAAAAGSRRNVRIHDIKPAVFEAVLHFVYTDTLPPATTSWSASHRDKRPKLSDVAAASCSEEEVRVMIGERLAAADRFDLERMRLLCEDALWETIDVANAAATLRLADRHHCPQLKELCMEYIASAGVLAAVMTTEGFRELKLDCPSLLIEILENFGKRSEADEE

SEQ ID NO: 16357 - protein, 394 aa, Oryza sativa
  Clone ID: TF_OSC900359j.C1.p12.fg
MASSSSPCKLVSCGDNRHFMFRVDGAAIRRPVGRIVKETCEIGNGYTCEASLFVPSLLGERKVMMILAVTVNSDRAQSLARAHKVFIDMALLDDTKSPVLPPFARSVMSPSAAAGSSPKLPPPVAGSNLAASCKLVASRDHLLANCVKGGILAALCWVVFVPSSPRSPYSLLAHCLATMSNGRDLTDVCFDVDGKSFHAHRLIMARQSEVFRAELLGSMAESKMECITISDMSASTFKHMLHYIYCNDLPTCVKDTDDQSSWIFELQHLLVTADRYGVDTLKDLCEDTLCADITTDTVTSTLELAETRSYPKLRTSCLVFLSNTQNFAEVATTKEYYNLIQSYPSVLSEIRNRFKRPRPSLMLAPSTVTENQNKRPRLSPKLTPSADTKDENNP

SEQ ID NO: 16358 - protein, 290 aa, Oryza sativa
  Clone ID: TF_OSC400305j.C1.p24.fg
MARAKTVSKCITETAEGSHVFSITEYSQKRGMGVGKGVEVHASSDLRLLDHTTGLSTSVTKTLPKASAYLRDDRLDIECVVTVMKEPRVSQTKSSPKVAVPPSDIAAHLGKLLESKEAADVTFYVGEDTFAAHKVVLAMRSPVFKAELFGPMREAGAQVLPIKDIQPDVFKALLHFIYTDSLSIIDDLVGDDRGEMIRHLLVAADRYAMERLKLICESDLCENLNVQTVAATLALADQHHCASLRDACIEFMSSSSMDDIVATQGFVDLKTNCPSVLVDAFVNMSMLNKR

SEQ ID NO: 16359 - protein, 267 aa, Oryza sativa
  Clone ID: TF_OSC934j.C1.p1.fg
MASMYRLPRNAICAACYEGAKAIIAFFNDDDDEHADADQGSVKPSRLTKLNSTTKGLRDAWEEVKQMRCREEETKQRASFLQQGFAAAWKDGIHTDIAVRPGTGPPIQAHKAILATRSEVFRHILAGDDDCKAPAGDSLSLPELTHDELSHLLAFLYTGSLATCTEERHLHALLVAGDKYDVPFLRRACEARLAAGVEAGNVLRTLEVAELSSSAALKERAMGAVVEHAEEVVFSPEYEEFAVRNAALCVQITRALLANKAFPAKTP

SEQ ID NO: 16360 - protein, 401 aa, Oryza sativa
  Clone ID: TF_OSC400049j.C1.p25.fg
MSFAGVSFICDGVHVCSSPANGAAGSAAYGYHLLVINNYTRTKQAIPNGFRIKSGKFKLGGHTWHIKYCPNGDRSTISGFVSFHLVLDCDGGDGAVAAEPVNAKFEFSFADQVAKHQATRLRATKVCEFSRDCSAWHVGRFVRREALERSRYLVDDCFTVRCDIMVVHAGAGANGVAAATAAPSMAGAVESFGRLLDTKLGADVAFEVGGETFAAHRCVLAARSKVFDAELFGPMKEGTAASVVRIDDMDADLFRGLLSFIYTDELPEREDHGGEKETSSDDDDDDDDDDNGAQSDQKHKQFTWLQQLIVAADRYDLQRLKLLCEEEMYDHIGEKTVETMLILADHHHCRVLKDACLGFLGSHGNLQKMMAADGLDRVIKNFPSLTKEIIGRFAVVMANKS

SEQ ID NO: 16361 - protein, 395 aa, Oryza sativa
  Clone ID: TF_OSC569j.C1.p1.fg
MSTATPTPNVVDGDCGGTPPSRSASTIIAARTLHVLTIHGYSDTLKSNVDPSQHLLLSSPFSAGGHTWCIRYCPIGCTEESKDFISIYLVLEDTITDVVSAQVTFSLLDQQGNPMPSHTLTTPLLKFSLQGTLPKALGYNSFIRRDDLERSGHLKDDCFAIGVHVVVTKEAEPSSITVPPSDMHLHYGDLLSSEERYATDVEFLVGGETFTAHRLVLAARSPVFMVELFGPMKEGTTVNKIHIFDMEAQVFRALLKFIYTDMLPEMDQEDETAMVQHLLVAADKYGLHRLKMICVEILSNHIDAYSVATILVLAEKHYCYGLKEACFEFLNSSAILSAIVNTSDFLYLIQSCPDVLEDISFNIVARQLERAIFLSENQEGQINSVEIRINSVMTN

SEQ ID NO: 16362 - protein, 357 aa, Oryza sativa
  Clone ID: TF_OSC569j.C1.p2.gm
EGMSTATPTPNVVDGDCGGTPPSRSASTIIAARTLHVLTIHGYSDTLKSNVDPSQHLLLSSPFSAGGHTWCIRYCPIGCTEESKDFISIYLVLEDTITDVVSAQVTFSLLDQQGNPMPSHTLTTPLLKFSLQGTLPKALGYNSFIRRDDLERSGHLKDDCFAIGVHVVVTKEAEPSSITVPPSDMHLHYGDLLSSEERYATDVEFLVGGETFTAHRLVLAARSPVFMVELFGPMKEGTTVNKIHIFDMEAQVFRALLKFIYTDMLPEMDQEDETAMVQHLLVAADKYGLHRLKMICVEILSNHIDAYSVATILVLAEKHYCYGLKEACFEFLNSSAILSAIVNTSPNLGEVRACQSI

SEQ ID NO: 16363 - protein, 246 aa, Oryza sativa
  Clone ID: TF_OSC401835j.C1.p31.fg
MWCQSCKEEYEEEDAGTCKECYEEASETEEELKREIDDLRSRLHFLRLPSPSLDASSLSHSDLLLHAIPADAPARPDTPAVPAHRVILASRSPVFRAMLENEMEESRSGIIKIYDVSYDVLRAFVHYMYTAEALLDEQMASDLLVLAEKYEVKNLKAYCEKFLTSKVSNDNAITHYAFAHRHSAKQLLETSLAAIMDNMSTLADREEYKELVEKDPRLVVEIYEAYLNRQVNTAAGKETDSSSRKG

SEQ ID NO: 16364 - protein, 588 aa, Oryza sativa
  Clone ID: TF_OSC401916j.C1.p9.fg
MDYFTGTGTIVVSDDSLYAAFGYGDPFGFAPRARPPIRSLPFAAGGYQWCLWFHPTTFAGFFGFGVELLTAGAKARASFEFGPVDAASHNVIVRMPPFLFDHPHHPMVIMVWPKAMLAEEATLFVRDHAVVFRVDVTVVPDEPLPPDAGVGDDDVLPPSDMLAQLGNVYDTKEGADVTFSVDGELFAAHRVILAMRSPVFRAAVYGEMRESGRGGGPIAIDDMRPDVFDALLRYIYTDALPAAADDDDMEATWSDLLVAADRYGVERLKLICERALRGRLDAGNVADMLALADRQHCETLKDACIKFMATSGKMEEVKASQGLIKMVADRETGAKDQIGVYLELITKGTKARASYKLRLLNHVTACPCLWYTCPLKIYDSIDDNKSFTWGTKKFADRSKLEVASEYLQDVRLVIECDVMPLVRIEAIAEIIRSPSSPWSQLSEDIGKLLEMETGRSRRELQGQRSTLNTIDRVASTIRRANEREEKYLGEEERKELIKHLLITVDRYAIEGLKTMLEDGLCKVLSLGNVKEMFALTDQHDCSILKDVCFEFITSSSVHGLGDVALSEGYESLRESCLAAIVDALQRVQ

SEQ ID NO: 16365 - protein, 369 aa, Oryza sativa
  Clone ID: TF_OSC400049j.C1.p7.fg
MSPAVGRGNPPSRSASSSTIVAETATGYHLLKINGYSLTKATTPTGSFLPSSPFTVGGHRWNIKYYPNGDDVKTADYISFFLVLEEEETNMGLTVQAKFKFSFANQVKKQPSLKYRPIKTFNLEDSCGWGYVEFIKRVDLEKSDDLRDDSFTIRCDIVVVREIRTEETTEILPVESFVPVPPSDMDQQFGDLLETEKGADVVFEVGGQTFAAHRCVLAARSPVFRAALYGSMKEGDTDGVVHIEDMEAQVFKLLLRFVYTDSLPEMETEEDVVCQHLLVTADRYDLHRLKLMCENRLCKYIGVSTVSNILALADQHHCDGLKKACFSFLGSPANLSAVVASDGFKHLSRSCPSLMEELVVMLALPPSHA

SEQ ID NO: 16366 - protein, 120 aa, Oryza sativa
  Clone ID: TF_OSC405157j.C1.p3.gm
MASLYGSMREHRAPRIAVDDMEPEVFDALLRFVYSDTLALPGDLGEGEYKEMVRQLLEAADRYAMDRLRVICELILSRSLDAKTVAATLAMADQHSTTATRSRMFVFSSWPLGWMTTIND

SEQ ID NO: 16367 - protein, 500 aa, Oryza sativa
  Clone ID: TF_OSC400049j.C1.p3.fg
MATAACGESPSRLGSASAIVADTETRYHLLKIGCYSRTKATTPTGSFLSSGQFTVGGHRWRINYYPNGESADSADYISLYLLLDDKATNSSVKVQAQFKFQISSTDQVKNTPSLASTNVNTYGEDSSWSWGHRKFIKREDFEKSNDLRDDSFTIRCDVAVIGEIRTEKTTEIPSATTFVTVPPSDLNQQLVDLLETEKGADVVFEVSGETFAAHRCLLAARSPVFSAELYGLMKEGDTAGVVRIEDMEAQVFKLLLRFMYTDSLPKMEEEDVMWQHLLVAADRHDLQRLKLICEDRLCNYIGVSTVLNILVLADQHHCDGLKKACFSFLGSLENLSAVVTGDGLEHLSRSYPSLMKELFVVMALPPNHVLNLSHQVYYENQNFNVLLLLIKNSDLTGVNLKKTGWQGPSLVSEYDVSYSSGDPGKLPPIERVTVENAQGVDHCPVSASGREWCSACGLVADGKERNARIFEQRSRTAGQLFSGIREIMIWKEAGIFRQCD

SEQ ID NO: 16368 - protein, 324 aa, Oryza sativa
  Clone ID: TF_OSC401879j.C1.p6.np
RRRVASTLALADRHGCRGLREACGLVDEEILAAVVGGDEAEPLGGVEPLHSPSPSPTPSRPRPRPLAAAAAATQNPRNPRSSQAFPAWGHLRFMRRRELEEMGFVRDDRLTIECVVNVVLDPVVTAGDAPELDHPSNILGHLAGLLGDKGTADVTLVVRGEEFAAHRAVLAMRSPVFKAALYGPMKESTDANAGRVAIDSVEPAVFRALLHFIYTDTTAAMDDLDDDDDDKAQMIMHLLEAADRYDVERLKLICELMLCKSIAVDTVAATLAMADQHHCQKLKEACIEFLATSKKMEGVMESQGYEKMKLSCPSFMVDLWEIIG

SEQ ID NO: 16369 - protein, 345 aa, Oryza sativa
  Clone ID: TF_OSC31366j.C1.p2.gm
MGQCAMSHTRSTTAGAAGGKPPIAPPPTSSASAIVADTASGYHLFKINDYSRTRDIFPTGSALKSRAFTIGGHQWRIHYYPNGNTEECGEYISLFLHLDEIVTDKNVYAQHGFRLFDEFAGDNDDDDELQPSSIADLGQVSTFGGNNIGLGRLRFIKREELEKSKYLKNDSFTVRCDVVVTKRIRSEETPLVVRTSPKPKVARLVTVPPSDLHRHLQDLLCAEKGADVVFEAGGETFTAHRCVLAARSPVFSAELFGSMKESDTTVVIRIDDMEAQVFRALLRFAYTDSLPEMKEKDEGAMCQHLLVAADRYAMERLKLVCEEKLCERIDVSSVATVLALAEQHH

SEQ ID NO: 16370 - protein, 129 aa, Oryza sativa
  Clone ID: TF_OSC400299j.C1.p36.gm
MVAAAEFPSYVSVPPSDLHRHLGKLLTSGDGTDVTLEAGGETYKAHRSVLAARSSVLKAELLGPMAQPRSTAAATPTRINDIEAPVFRAMLHFIYTDHLSSTMATDGFEHLTTSCPAILKELMSKLVVH

SEQ ID NO: 16371 - protein, 466 aa, Oryza sativa
  Clone ID: TF_OSC400294j.C1.p19.fg
MTYKPVRDELSMPGVHPSHQGDRVSGHEKDDLQSSGVWRSSSLLNMLSIAQTLKIARDRSSLTHHASTIKHCKTFRMLHPSPESHPTFRMTDNCNTFSTIVAEAVSGSHVIKIAGYSRIKVLLRNGESLTSIPFSVAGHSWTIRFYPNGDSAESQDYLSFYLILDSANSYDVKVIFSFELLGKNGRSVSSYSFTTDLRTFSYKGSLWGYNKFIHQTVLEESSAHLRDDSFSIRCDIKVFKEIYSQETKGVHSKFVEVPPSNLHQHLGNLLDSMDGSDVVFEVGEERFSAHRCVLAARSSVFKAELLGTMKEKADGAIQVDDMEPGVFKSLLHFIYTDSLDTMAQEDQSRDEASEEEDLVMAQHLLVAADRYNVERLKLICEEKLCESIDSSMVATSLALAEQHNCNGLKEACFEFLASPSNLLEMMASDGYDHLKTSCPAVLKELTTRFLPPETKASEEITIGLYN

SEQ ID NO: 16372 - protein, 613 aa, Oryza sativa
  Clone ID: TF_OSC900305j.C1.p6.fg
MTSHGELKDMFVKILHFSQKVISNDKILKAMTSNGKLKDMFAKILHSLPANYGKEKHNNVENGITLVGASREILIDVVWKKVIFNDKILEAMTSNGKLKDMFAKILHSLPANYGKVKMKSTIMWRMKSLIIVTIQGSKYKYLEPLSLIMDQLSTMFYWAEDRLHPRQGDRVSGHEKDDLQSSGVWRSSSLLNMLSIAQTLKIARDRSSLTHHASTIKHCKTFRMLHPSPESHPTFRMTDNCNTFSTIVAEAVSGSHVIKIAGYSRIKVLLRNGESLTSIPFSVAGHSWTIRFYPNGDSAESQDYLSFYLILDSANSYDVKVIFSFELLGKNGRSVSSYSFTTDLRTFSYKGSLWGYNKFIHQTVLEESSAHLRDDSFSIRCDIKVFKEIYSQETKGVHSKFVEVPPSNLHQHLGNLLDSMDGSDVVFEVGEERFSAHRCVLAARSSVFKAELLGTMKEKADGAIQVDDMEPGVFKSLLHFIYTDSLDTMAQEDQSRDEASEEEDLVMAQHLLVAADRYNVERLKLICEEKLCESIDSSMVATSLALAEQHNCNGLKEACFEFLASPSNLLEMMASDGYDHLKTSCPAVLKELTTRFLPPETKASEEITIGLYN

SEQ ID NO: 16373 - protein, 596 aa, Oryza sativa
  Clone ID: TF_OSC412646j.C1.p23.fg
MEDKVLPEWYSKEDNGEYLSLFLELVRESTSNNVRAIFDAFLVEKDDEPSSTHADRGVHVHPTNGYTAWGWPQFVKRSDLESSSSSYVVDGKVRIMCVVIVIRDNTVPVPPSDIGAHLGGLLDRGEGTDVSFLVDGETFPAHRAVLAARSPVFRAELLGSMAESKMSSITLHDIEPLTFRALLRFIYTDKLPADDGGDQLKMAAMATDELFQKLLAAADRYDLSRLKLMCAQKLWEAVSVDTVATTLIHAEMHGCPELKSSCLDFFVQDKNFKETVLTEGYVQLVQRFPSIKDEIRGRTERKKGGGCLLAGRRARRGNHRVGKLASMRGEREEAGRPMNGTGRPARGRGGRRVGWGGRRACEEREKAGKRAEGDSHRVGRPMNGTGRSACARGEGEGGEKGGGRQPSLHGGGGGGEALSASILVASTPRVFTRDAAGSLHPDNSDAAGVHPTASATPLIMGARKLCVALVFGLLAADVMVTSILKGSFVLMLVPKSFESDHARVRGQQQPKVCQGLMAGNTATGDCQTGDGERRVRLREAWAFRRWRLEDRGGPGVPVASRPLGQAPGDLAPSTRRAGEETRRGRGVRESLVEAES

SEQ ID NO: 16374 - protein, 370 aa, Oryza sativa
  Clone ID: TF_OSC410511j.C1.p2.fg
MASNSPATSDAATGDVPEPSRSSSVVKAMSGYHVLKMEGYAAGVKGLGVGKFIDSGSFDVGGHRWCIRYYPKRSPASPGDGDWISIYLNLCSTAAAIGDANASFTISLLDQDDDEHQPVAAHSRSCSSTVTFSSAATKAWGFPRFVERKTLEESPYLRDDSFVLRCDVTVFKETIIEPAAPTPLVAVPPPDMHRHLGSLLSGGHGADVTLQVGDETFAAHRCVLAARSPVFMAELFGPMATSRHNDRETIRVHDMEPRVFEAMLHFIYNDSLPKVDDDEVVAMAQHLLVAADRYGMERLKLMCEDTLCSHVDASTAATALTLAEQHHCEGLKDACFKFMADPDNLKVVMESDGYLHLTRSCSYVLKKLAT

SEQ ID NO: 16375 - protein, 280 aa, Oryza sativa
  Clone ID: TF_OSC401965j.C1.p5.fg
MATTTATTLAASAGDGSSPPSRSTVMTIAAQAYHVLKINGARGFKNFIRRDELERSEYLNDDYFAIAAHVIIPKEKPSVVVPPSNMHLHYGDLLVSKEGTDVKFLVGGEMFAAHRLVLAARSLVFKAELFGPTKKGTIDAIQIDNMKARVFKALLGFIYTDIWPEIGHGKDNVAMAQQLLAAADRYGLQRLKFVYEDKLCNHIDTYSVSTMLVLVEKHHCCKLKEACSTFLSSMSPPIVEDPNSSIFGSELKKTVSSSENHGSQINRTDIRIQLWQNADV

SEQ ID NO: 16376 - protein, 354 aa, Oryza sativa
  Clone ID: TF_OSC401879j.C1.p12.fg
METVRGTHRFTFHGYSLCKGGGAGRCIRSGTFTVGGYDWCICFYPEGQGGGGGDREHVSVKLRLVTRCATATAFYELRLLDQDTGRAAAVARASGAPRVFASSNPGTACFGRRAFMERSKLEASPACLRGDSVVIDCAVRVVVHDPVVAAVRRREAPDDVPPSNILRQLVAQVESEGADVTFAVQGETFTAHRLMLAARSPVFKAELYGAMKEKDADHVIAIVDVQPAVFKALLHFIYTDDMPPDLGLAAADDDDTDRIDMARHLLVAADRYAVERLRVICERVLRRSLGVETVIDTMALAEQHSCGELKEACLEFIDSHSKRIVESDGYKNLKRACPLLVADMWERIVLSRLE

SEQ ID NO: 16377 - protein, 696 aa, Oryza sativa
  Clone ID: TF_OSC900182j.C1.p6.fg
MSLLENSVDSNLQIHRTTNNRKAALAREVRTQVDALHRCFSWRHADRAAAKRATHVLAELAKNEEVVNVIVEGGAVPALVCHLKEPPAVAVLQEEQQPRPFEHEVEKGAAFALGLLAVKPEHQQLIVDAGALPLLVNLLKRHKNATNLRAVNSVIRRAADAITNLAHENSNIKTCVRIEGGIPPLVELLESQDLKVQRAAAGALRTLAFKNDENKSQIVDCNALPTLILMLRSEDAAIHYEAVGVIGNLVHSSPNIKKEVLNAGALQPVIGLLSSCCTESQREAALLLGQFASADSDCKVHIVQRGAVRPLIEMLQSADVQLREMSAFALGRLAQRSSFVSQDTHNQAGIAYNGGLVPLLKLLDSKNGSLQHNAAFALYGVADNEDYVSDFIKVGGVQKLQDGEFIVQATKDCVAKTLKRLEEKINGRVLKHLLYMMRVGEKSVQRRVALALAHLCAPEDQRTIFIDNNGLELLLDLLVSVSLKHQLDGSVALYKLANKAAALSPMDAAPPSPTPQVYLGEQYVNSSTLSDVTFLVEGKRFYAHRIALLASSDAFRAMFDGGYREKDARDIEIPNIRWNVFELMMRFIYTGSVEVTSDISQDLLRAADQYLLEGLKRLCEYTIAQDVNVDNVSDMYDLSEAFHAMSLRHTCVLFILEQFEKICVKSGSSQLIQRVIPELRNFFAKALRPSHRNAQP

SEQ ID NO: 16378 - protein, 382 aa, Oryza sativa
  Clone ID: TF_OSC423269j.C1.p4.fg
MATECTTSTSTTATVEGRHRFRVAGYGATKGAAPGHRVASGTFTVGGFDWAVVFYPEGVTAADMDFVSVYLELKNAAAAAGGGGGGAVARAFYDLRLIHPATGEPRSVRWPMDGSTSRVFSQAFPAWGHLRFMRRRELEEMGFVRDDRLTIECVVNVVLDPVVTAGDAPELDHPPSNILGHLAGLLGDKGTADVTLVVRGEEFAAHRAVLAMRSPVFKAALYGPMKESTDANAGRVAIDSVEPAVFRALLHFIYTDTTAAMDDLDDDDDDKAQMIMHLLEAADRYDVERLKLICELMLCKSIAVDTVAATLAMADQHHCQKLKEACIEFLATSKKMEGVMESQGYEKMKLSCPSFMVDLWEIIGRKMTSYSVIPNIYARDKD

SEQ ID NO: 16379 - protein, 402 aa, Oryza sativa
  unsure (1)..(402): unsure at all Xaa locations
  Clone ID: TF_OSC100059j.C1.p4.np
PDRSRANRKIPTKKKSAKNSVTVSTVVPNTAEATHVFDIVGYSQMKGRGREEHVTSGTFVVGGLHWAILLFPDTHVILLDDEEDNVTAFLELQSQGGSKVRACCDVRLVDQTRPRLLCCAGAAGCQDIQGVQCRXIQQGQRLKMKRTEFEAPPYLVDDRITLECVVTVKKEPTRARPVPRIKVPPSNMMQQLGDLLESKEGADVVFDVAGETFPAHKLVLAMRSPVFKAELCGPMRESGTEPISIVDMQPVVFKALLQFIYTDWLPSIRDLEGDDNSEMIRHLLVAADRYAVDRLKLLCQSILCKNLRVGNVATTLALADQHHCGMLKDACIEFMSCPNMLDDVVASQGFVDLENTAPSLVAXAKEKMGRFKKMSRMTKSNAPEDEPNSNSFSLXVIWISVY

SEQ ID NO: 16380 - protein, 404 aa, Oryza sativa
  unsure (1)..(404): unsure at all Xaa locations
  Clone ID: TF_OSC100059j.C1.p5.np
PSTSDAAAAAXSGTRWSRCRTVSTVVPNTAEATHVFDIVGYSQMKGRGREEHVTSGTFVVGGLHWAILLFPDTHVILLDDEEDNVTAFLELQSQGGSKVRACCDVRLVDQTTGLASSAAPAQPDAKTFKVFNADESNRVSCLKMKRTEFEAPPYLVDDRITLECVVTVKKEPRVSRARPVPRIKVPPSNMMQQLGDLLESKEGADVVFDVAGETFPAHKLVLAMRSPVFKAELCGPMRESGTEPISIVDMQPVVFKALLQFIYTDWLPSIRDLEGDDNSEMIRHLLVAADRYAVDRLKLLCQSILCKNLRVGNVATTLALADQHHCGMLKDACIEFMSCPNMLDDVVASQGFVDLENTAPSLVAXAKEKMGRFKKMSRMTKSNAPEDEPNSNSFSLXVIWISVY

SEQ ID NO: 16381 - protein, 355 aa, Oryza sativa
  Clone ID: TF_OSC400305j.C1.p22.fg
MKRHQMESVPRTVSTVVPNTAEATHVFDIVGYSQMKGRGREEHVTSGTFVVGGLHWAILLFPDTHVILLDDEEDNVTAFLELQSQGGSKVRACCDVRLVDQTTGLASSAAPAQPDAKTFKVFNADESNRVSCLKMKRTEFEAPPYLVDDRITLECVVTVKKEPRVSRARPVPRIKVPPSNMMQQLGDLLESKEGADVVFDVAGETFPAHKLVLAMRSPVFKAELCGPMRESGTEPISIVDMQPVVFKALLQFIYTDWLPSIRDLEGDDNSEMIRHLLVAADRYAVDRLKLLCQSILCKNLRVGNVATTLALADQHHCGMLKDACIEFMSCPNMLDDVVASQGFVDLENTAPSLVA

SEQ ID NO: 16382 - protein, 300 aa, Oryza sativa
  Clone ID: TF_OSC405158j.C1.p2.fg
METAPSSSMSPASGTYVLDVHGFSGLRRQHCGGGGCIVSPTFTVAGLEWAIRYHPEGDADEVTDDVAVFVVLVTKDATAWAHVEFRLLDQAAGEMVTFFGEKDPILFDSGSEDLSTWGTGELTARSFLDGSPYVAGDCLKIECAVDVCRDRLTFHHDTPPSGEPFRQYPADDEPADVTFKIAGETFPAHVSVLAARAPGLLTNTTSQAATITIDDDDDDTPAAAAAFGALLHFAYTDTLPVASGLDGAGHTALLGRLLVAAGRYGMARLGAICERAMCRSLDAGTAADTLAMADGTASTR

SEQ ID NO: 16383 - protein, 344 aa, Oryza sativa
  Clone ID: TF_OSC401879j.C1.p11.fg
MASSRPISESTITRSTCATRTARATHQFEIVGYSLKRCLAAGEFVRSSAFAACGYRWSVRVYPGGFGPAHREFVSVFVKMMTNRGKAAARFDLRLIDRATGLPRSVFRAAQPVVFDYSVKHKKCKGKRGTRAFMRRRDLESSAFVRDDRLIVECVIDVVVANGGDDDTAAAASPLAGVPAPDLSRHLGELLERADGVGADVTFDVRGQPFAAHRIVLAMRSPVFMASLYGSMREHRAPRIAVDDMEPEVFDALLRFVYSDTLALPGDLGEGEYKEMVRQLLEAADRYAMDRLRVICELILSRSLDAKTVAATLAMADQHSTTATRSRMFVFSSWPLGWMTTIND

SEQ ID NO: 16384 - protein, 331 aa, Oryza sativa
  Clone ID: TF_OSC400239j.C1.p24.gm
MDIGPHSIQLIAPPSLYHAASAAAMGDHRDPAFPAAAGGCRLPKTSSVSVTESVTAVHDFKVTGYSLIEGLGIGRYVSSSTFTVGGVDWAVRFYPDGSTVTCLGNASAFLYYCGREKEVRTRFTLNLLGKDGKLSQVTNSYMKHTFSPASDNWGFIKFAEKSKLQSSPFLHNDCLTIRCLLTVVRESHTKDVEVNSVVVPPSNLHTDFENMLQDGEGSDVTFTVGGQEFRAHKCVLAFRSPVFKAELFGPMKENGTQCIKIDDMEPEVFEALLHFIYTDRLPDSCRDGKAAAMQHLLVAADRDSLTEIAPMEEFFITHRISCGEIDARSFV

SEQ ID NO: 16385 - protein, 718 aa, Oryza sativa
  Clone ID: TF_OSC400049j.C1.p33.fg
MSSPSSQQPASAIKAPTTSGYHRLRIDYYRSLGSPTGWALSSRDFVVGGRQWRISYYPNGNRPENAEFISVFLCLDSSSPKPAMLQVTITFDDEAKKQSQLRKAPVITIAPGACWGYHRFVKRDDLARSKRIRPDGFFTIRCDVSLIDHFTAQEDEPVFVSVPPSELRRDLGGLLDTGSGGDVVFQVGGEAFTAHRGLLAARSPVLAAALYGPMMEGGGLQGGVAIKIDDMDPLVFKALLRYAYTDSLPPQMQQGELEEEGRAMAQHLLAAADRYGMERLRLLCEAQLCKHIEVASVASILILADQHGCSGLKNACFEFLKSPGKFAAAMATQEYDYLKTNHCALADEVVKGNQAKWMLATVETFMRHRLNSKSILETATREIALHASTSNETPPVFLDLEESLRAKGDMTLREEATLKVLKVVATLGKAISTGAIAAVGYYVPGIVGAKFGEPSLPRLPRFAMAAVTSWFAGKVMYYAILQGSTEFILKHGEERMKMELSNIILNKHSDDKTLVEAVKTQFFAEHLFSDQYQDRTLFRWHLRRTYVDSAFMERVKEIEVKSSNDGPGLISGQRIISTRPFGDLMEDPLACILGSPDSNMESNKSAEHTGTIVKRREIACPPAVLVEPIRLQPNVPICSLLARSRTGSNLEVNPVILDLEESLLAKGNMTLEEEVTIRVSKMTASVFKVFATAAFGASSYYALGLGELSLHARARLDL

SEQ ID NO: 16386 - protein, 598 aa, Oryza sativa
  Clone ID: TF_OSC9666j.C1.p2.fg
MPFHSSATINLRTSYLEPVASRTYGGNVHRFPSPRGSSSWGFHKFIRHDELERSGHLTGDRFAVRCDVTVMRATELRVEPACLAVPEPDLRAHLRRLLSTGDGADVTFRVGGGETFAAHRCVLAARSPVFKAELCGRGGAAAGRCVDVDDMGAGEFGALLHFVYTDTLLEMASRDVPAMARRLIAAAGKYQVERLKLVCEDMLRRRVDTSMAMATTTDSAATTDDQLSQRPWLTQLFFKFASRMVGGMVVDAFTPEPPTAAEKSGDASPSLSPSPSCSTVAVSEASGHHVLRIEGYKRTKMMMATGEHLNSGEFHVGGYTWRLRYYPNRYDQEFSSSISFALVRTGRDDDDVVVRARVKISLLDVAGEPVTRYSHSDNKCTFYEGHDLWAIKSFIRRVDLEDSGHLDDGGGGGDSFAVRCDLTFNVPDIRVDVDDAAAVTVPAVPPPLLHRHLGDLLASEAAADVRFNVDGEAFAAHRCILAARSPVFRAELFGSMRERAARAIVRVDDMDADAFAAFLHFVYTDELPEMDDDGEEAAAVMAKHLLVAADRYGMERLKKVCEDVLFRHVVVATAATSLALAEQHDCPELKDAILRFKL

SEQ ID NO: 16387 - protein, 307 aa, Oryza sativa
  Clone ID: TF_OSC34061j.C1.p16.fg
MASSSTSSRCLTASVTGTHNLEVTSYSLLEGMGVGKFVSSTTFSVAGYDWNLRFYPDGITDNDRKEGYGAVWMLASVYQISIAKEHAIRRIRFTGNDSFKIECSLTVISESRAEDVSTIPVPPSNLHQHLAGMLHGVEIADVEFSVGGEPFRAHACVLAARSPVFRAELLGPAAARSIKIDDDDDMEPATFKALLHFIYTDHLPNDSGFGKDAAMQRRLLVAADRYGVDRLRAMCGVKLYKSVSVGTVVDSLEFAEKHHCAQLKDACLGFMASPNVLGVVRKTDGFKRLVEGCPWVLKEILDKVPRF

SEQ ID NO: 16388 - protein, 382 aa, Oryza sativa
  Clone ID: TF_OSC401668j.C1.p19.fg
MEHRGTRGEHSPVRMKHLAANREGDVRAIGAAHHDAELVPQVGRWHCNRFVVVAQNDEATYECNHIARVKFTQLDEAPPGIKAEALGCLAYQQTPLGMLHGWYSTLCSMKLETRSITHGWVGTPKAGVGDREMRIVTGQRRRLGMLLVGERRSRGGGQPCEPPKTREERWGGEISLEMKKRSSGGGGGWGVRMASSARCRRRARGLGDGAAAIHMCRVDHLNGSDVFFFVGGETFHAHRALLAVCSPVFKALLLSSTAEAAACSITLNDIKPAMFEALLHFMYTGDFLPAGAHSSSPDSSDTNTDTLHRLLAAAHEYKLDRLKLMCARKLEESLSVETVARTLGYAKMCGCSELKSKCLDLLLLGEEEHQSIGHTWLLLALA

SEQ ID NO: 16389 - protein, 424 aa, Oryza sativa
  Clone ID: TF_OSC400432j.C1.p4.fg
MDDDAGDASPPPAAAGVGATAAQSRDMAASPTSSRSVTETVNGSHRFVIQGYSLAKGMGVGKHIASETFSVGGYQWAVYFYPDGKNPEDNSAYVSVFIALASEGTDVRALFELTLLDQSGKGKHKVHSHFDRSLESGPYTLKYRGSMWGYKRFFRRTALETSDFLKDDCLKINCTVGVVVSTIDYSRPHSILVPDSDIGYHFGTLLDNHEGVDVVLSVGGERFHAHKLVLAARSTVFRSKFFDDEDGEKNEPGENDDVQEIVIDDMEPKVFKAMLHFIYRDTLVDDNELGGSSSEGSIFDTLAAKLLAAADKYDLARLRLLCESYLCKAISVATVASTLALADRHHAMELKAVCLKFAAENLSAVIRTEGFDYLKDNCPSLQSEILRTLAGCEEECSSGGKSQSVWGQLSDGGDTSGRRVRPRT

SEQ ID NO: 16390 - protein, 405 aa, Oryza sativa
  Clone ID: TF_OSC400049j.C1.p10.gm
MVVEQRPNHQRLGRIHGAKDGAPLAPRMLLQVLGPKGFRPCRPPPAARRLSPPRSDSTSTIVAGTAAGSHLLKIDGYSLTKGTPNGSFLISSQFTVGGHRWRIRYYPNGFSSSSADFISLFLVLDEKVKVQAKSDFQISYTGQVDEPPWLATMKADTFDGAGFRSFGYEKFVRRCDFEKLIRDDSFTIRCDIVVIDEIRAEESTEITTTTAAVVTVPPSDLNQQLGDLLESEKGADVVFEVGGQTLAAHRCVLAARSPVFKAELYGLMKEGGTAAGAVHIEDIEPRVFKVLLRFMYTDSLPEMEEEDVMCQHLLVAADRYNLERLKLICEEKLCRHISVGTVWNILPLADQHHCDGLKKACFDFLGSLANLSAVVASDGFKHLCRSCPSLMEELVVTLALPGSHA

SEQ ID NO: 16391 - protein, 358 aa, Oryza sativa
  Clone ID: TF_OSC9665j.C1.p2.fg
MSTKKSGAADVQPSPSSCSTIVVTEASGHHVLKIDGYTRTTMMVATGEHLDSGEFHVGGYAWHLRYYPNGYDQEFSSSISFALVRTAGAGDNVRLHARAKISLLDLAGEPVARYSQPVDKCSTSKASDPWVCKSFIERDELEKSGHVVGDRLAVRCDLTFNVQDRLVRELVAVPPPLLRRHIGELLGDARTSDVRFKVGGETFPAHRCVLAARSPVFRAELLGPMREHAATTIRVDDMDASVFAALLRFVYTDELPELDGGSAAAMAQHLLVAADRYDMERLKKVCEDRMVRHLDVGTAATSLALAEQHDCPELKKAILRFMASPARLKAVMASDGYEHLVTSFPSIATEILAMFAAH

SEQ ID NO: 16392 - protein, 418 aa, Oryza sativa
  Clone ID: TF_OSC401824j.C1.p49.fg
MERVLMACLELDSSQFLLNGDGSVIGSPFDIQLECNSFTGSKAVQDHSRYTLPSQCTNAPDPPPLPGTSYGTHRTSRNAKACRCVPEEIQDFWDRMFFEAYQYDLRVLTEDGNEIMSHSCVVGIKSPVLRAMLEEAKVQGGIRHILIPGVPSEAVHVFIRFLYSSRFEQYQMKRYVLHLLVLSHVFSVPSLKRVCINQLETSLLSPENVVDILQLARLCDAPRLSLVCTRMIIGDFKAITQTEGWRVMRQANPSLEQELLESLVEEDTKRQERARRLEENKVYLQLHEAMEALIHICRDGCRTIGPRDQTLKSSQAVCRFPACKGIELLLRHFSACKMRVPGGCANCKRIWQLLELHSRMCSALETCHVPLCRHFKEKMQHLSRKEEAKWNLLVSKVLESKATTSSISERRKFPSLKT

SEQ ID NO: 16393 - protein, 235 aa, Oryza sativa
  Clone ID: TF_OSC401315j.C1.p10.fg
MDGTDVTFDIGQDIFSAHKCILAARSSVFKAEFFGAMSAKAHRTIKIEDMEAGVFRSLLHFIYTDALPETALDVVMTQHLLVAADRYNVERLKLICEEKLSKHIDSNMVATTLALAEQHSCHGLKEACFKFLSSDANLERMKASEGYEHLKVSCPFVLKELIARFISPEMEAAREITMDLQNLKIWVETFDSLCYNFENYKKFWRSNKDTRKGKEMVFCTHGRIYSRKAGVRRHR

SEQ ID NO: 16394 - protein, 365 aa, Oryza sativa
  Clone ID: TF_OSC400305j.C1.p15.fg
MGTGSKKKKTVSWCTTEVSEGTHAFKIVGYSLNKGIGVGTFIRSGTFAVGGHDWAIRLYPDGVTEDSMDYVSVYLELMTENAKAMAFYTLGLVDPVTGGIRCNWSRSSPRLFDSSDSSRFGPRSPLFIPRSDLEMEESGYIVNDRLTVECEVTVTKGPQVSRTIGCSEIGVPPSELSEHFGKLLEEEEDVGRDVVFSVEGESFAAHKLVLAARSPVFKAEFYGEMIERGTFSIDIKDMQPSVFRALLHFIYTDVLPADIGDLEGDDYVEFIRHLVVAADRYAMDRLKLMCQSILGKYVDVKNVATTLALADQHNCDKLKDVCIQYICSLDEVDAMVRTKGYANLKRSCPSVLADLFEKTSKFRAS

SEQ ID NO: 16395 - protein, 300 aa, Oryza sativa
  Clone ID: TF_OSC401879j.C1.p10.fg
METAPSSSMSPASGTYVLDVHGFSGLRRQHCGGGGCIVSPTFTVAGLEWAIRYHPEGDADEVTDDVAVFVVLVTKDATAWAHVEFRLLDQAAGEMVTFFGEKDPILFDSGSEDLSTWGTGELAARSFLDGSPYVAGDCLKIECAVDVCRDRLTFHHDTPPSGEPFRQYPADDEPADVTFKIAGETFPAHVSVLAARAPGLLNNTTSQAATITIDDDDDDTPAAAAAFGALLHFAYTDTLPVASGLDGAGHTALLGRLLVAAGRYGMARLGAICERAMCRSLDAGTAADTLAMADGTASTR

SEQ ID NO: 16396 - protein, 371 aa, Oryza sativa
  Clone ID: TF_OSC23856j.C1.p1.gm
MANHCNNTSSVTVAEVARGSHVIKIDGYLRTKELMENGKYVSSIPFSVGGHSWFITYFPNGVNTESKDYLSVFLTIDFACAGGVKATFSFALLDKNGRSVQLYSKLYPLHTFTEKGSDWGHSKFMKKTDLERSVHLSNDSFSIMCDLTVMKDICSKETTQKQFVVVPPSDLHQHLGDLLLKNMDSTDVTFNVGQDIFSAHKCILAARSSVFRAEFFGAMSAKARRTIKIEDIEAGVFRALLHFIYTDSLPETAQNIVMAQHLVVAADRYNVGRLKLICEEKLSKHIDSNMVATTLALAEQHSCYGLKEACFEFLASRSNLERMMASDDYEHLKISCPSVLMELVASRAPPPLWSSSSLGKAAVGFAKSSPS

SEQ ID NO: 16397 - protein, 353 aa, Oryza sativa
  Clone ID: TF_OSC401315j.C1.p11.fg
MANHCNNTSSVTVAEVARGSHVIKIDGYLRTKELMENGKYVSSIPFSVGGHSWFITYFPNGVNTESKDYLSVFLTIDFACAGGVKATFSFALLDKNGRSVQLYSKLYPLHTFTEKGSDWGHSKFMKKTDLERSVHLSNDSFSIMCDLTVMKDICSKETTQKQFVVVPPSDLHQHLGDLLLKNMDSTDVTFNVGQDIFSAHKCILAARSSVFRAEFFGAMSAKARRTIKIEDIEAGVFRALLHFIYTDSLPETAQNIVMAQHLVVAADRYNVGRLKLICEEKLSKHIDSNMVATTLALAEQHSCYGLKEACFEFLASRSNLERMMASDDYEHLKISCPSVLMELVARFLPQQEK

SEQ ID NO: 16398 - protein, 361 aa, Oryza sativa
  Clone ID: TF_OSC400049j.C1.p28.fg
MGASASSSAGRSKPPPPPPCSSSGVAVSTSRGYHLFEIRNHSRIKSMTPLGRGETAEAADYAAVYLDYVIDSYPPKSVTAYFLLRLVDKVSNDLMDPPPDDDVRAAAVHEFSAGQNSWGYYAFWKKDELESSGRIVDDVLTIRCDVGVVGRYATAKTDAAAAAASVASSVHVPPADLGHQLGALRSRAVGADVTFQVGAGSGARRFGAHRCVLAARSPVFEAELYGPMVERDAGRVIRIDDMDPQVFDALLDFMYTDALPGMRKRDAVAMSQQLLVAADRYDLKRLRLLCEHELCKHVNKGTVASMLALVEQQRPSCQGLKKACFEYLRKTPKVLREIMATEAFDHLVNELLLSNKLAIRE

SEQ ID NO: 16399 - protein, 381 aa, Oryza sativa
  Clone ID: TF_OSC18902j.C1.p3.fg
MAAASTTDQGVAVINDSPLCKLLSSGDGRHVTFRVDYAGARRPAVAGRTLCTTCAIGDSGAYRCEAFFRLLIGRRKLVAFSVGVSGPRYRDVHKVVVDLVLVDNARSVALQPPTRSMAIQAAAGSNQGGCGLLVSKDYLEENCVQDGVLVAVCSVLFLPELPPCLWLDSLGHRLAAMSNKKDSTLTDVCFDVDGERFNAHRLVMAAQSEVFRSLLFGSDDAETKTETAVVTIDGISATTFKHMLHYIYCNQLPPPATGDGDDDDGEADHVTRIAELQRLLVAADAYGVEALRQACEDTLCAGINMDTVASTLALTEKGSYPKLRGSCLEFLSNTQIYSVATNDECYEVVQSYPDVLTEIRDSCLIYYRYATFVVVTELEDL

SEQ ID NO: 16400 - protein, 381 aa, Oryza sativa
  Clone ID: TF_OSC900359j.C1.p10.fg
MAAASTTDQGVAVINDSPLCKLLSSGDGRHVTFRVDYAAARRPAVAGRTLRTTCAIGDSGAYRCEASFRLLIGRRKLAAFAVVVSGPRYRDVHKVVVDLVLVDNARSVALQPPTRSMAIQAAAGSNQGGCGLLVSKDYLEENCVQDGVLVAVCSVLFLPELPPCLWLDSLGHRLAAMSNKKDSTLTDVCFDVDGERFNAHRLVMAAQSEVFRSLLFGSDDAETKTETAVVTIDGISATTFKHMLHYIYCNQLPPPATGDGDDDDGEADHVTRIAELQRLLVAADAYGVEALRQACEDTLCAGINMDTVASTLALTEKGSYPKLRGSCLEFLSNTQIYSVATNDECYEVVQSYPDVLTEIRDSCLIYYRYATFVVVTELEDL

SEQ ID NO: 16401 - protein, 631 aa, Oryza sativa
  Clone ID: TF_OSC547j.C1.p9.fg
MATASIASNVAGGGCPTPSRSAAASTVVTTQAYHVLKIDGYSRTLQVHCYRSLSSFPFNAGDRTWYICYYPHGKNDISKDFISIYLVLYDAIAEAVMVQATFSLLDQHGKPVPSHTHATRLLSTSNQDDMANNLGFETFIAKGDLEKSGHVQDDCFAIGVHVVITKETPPPIIAVPPSSDMHLHYGDLLSSKRCADVEFLVGGETFAAHRLVLAVRSPVFVAEHFGPMKEGVNVNDVIEINDMDAQVFKALLNFIYTDTLLEMDQEEDATMAQHLLVAADKYGLERLKVKCEERLSNHIDADSVATLLVLTDKHNCRGLNKACIEFFSSPTALAKIIETDEFQYLTQSHPNILEDIISNIVASQLEKAIFSPENEGGKINKVDIRIQPWQNSNARCGKAAGADCRGRQARRERGGRRRDLAAEREDVDTADVDAVEEHSTRRRLPEAVERAEQRGLAAAAGPDDTDDHPSRHVQVLTVRYYDLRTVNTRPPRRHHRRPFFPDAVHDQEVLPDIMLFNSIVDRTCQQHVHWNTKLTQKRRGVLAHLKLSPSERQRRRSKQESGEERKTKIEKTEIAGVDCSIVVLLSAPSAGEDERGIDASEKNPHHTEHPGSTDRKRPGWSSTADDEDLQP

SEQ ID NO: 16402 - protein, 447 aa, Oryza sativa
  Clone ID: TF_OSC413709j.C1.p6.gm
MSDGARVEAAPRLAQWRVDVLPCYTYRKSEPFRIGLWNWYLSVERNNKQTCVKKTIVHPGIFDKPLKHEGFVWAIDSTVTGRFVIEIEFLDLKIADPSYNSLTGSNSAFQGGEPASIWASHQIKKSSDNTALSSLARMLQEGILTDITINATDGSIMAHRAILASRSPVFRSMFSHDLKEKELSTVDISDMSLEACQAFLNYIYGDLRSEEFLTHRLALLRAADKYDISDLKEACHESLLEDIDTKNVLERLQMAHLYRLQKLKDGCLRFLVDFRKVYEMHDDFKVFLQTADRDIIAEIFQGTGATTAAVLGLSSTASSPMATHARRAAEARVWRGGLRATETREWRRAPTRRDGPISLDGRLAGIVLRARSRNSSPHRLNPRSSSGSGVYGSGGGGGRADETAGLKGDPYAVGVDAVMEFPGSPSYGPDRVIYLRPLSGEFPGYYG

SEQ ID NO: 16403 - protein, 359 aa, Oryza sativa
  Clone ID: TF_OSC400049j.C1.p17.fg
MSPAACRGNPSRSASASAVVVDTATGYHLLKIEGYSLTKGIPTSLSLKSSQFTVGGYRWRIDYFSNGDCADSADYISLFLSLDERANKDVKVRASWRFQIGYTGNVDKPPSLSTAKACTTFGVGPDGSWSWGYDRFIRREDFEKSDNLRDDSFTIRCDIAVVRRFRAEETTEILPVEAFVSVPPSDMNQQFGDLLETEKGADVVFESPVFRAELYSSMKEGDTAGVVRIEDMEAQVFKLLLRFVYTDSLPEMGNDDEDVMCQHLLVAADRYNLERLKLIYEEKLCSYISVDAVSNILALADQHHCDGLKKACFHFLASPGNLNAVITSDGLKHLSRSFPSLMEELVAMLAPLLSHALVI

SEQ ID NO: 16404 - protein, 392 aa, Oryza sativa
  Clone ID: TF_OSC415318j.C1.p9.fg
MAAASNVPPSSSTSSSSPHNTTSTHSTELVKGTHRFTVAGFSLQKRNGAGHFAKSGSFDVGGYSWAVMFYAAGEKEEDQGHVSVFLELQSTGVEKVTVKYTFNISGSSLLSAGWGDFKPSSKCRLGFNKFMEIETVEDVYLMNDCVTIHCAVEVVREKKARATVSRRIAVPPPAICRHLEQLLESKKGSDLTVQVGESKYDVHRAVLAARSPVFRAQFFGPMAAANRRASGGGGRCVRVHDMRPAAFEAVLHFVYTDTLPPVKEEEGFLTNNSASRRHLVNLRDAAAGCSKGEVRVMVREWLAAADRFGLERMRLLCEDALCESIGVANAAATLRLADRHHCALLRALCMEYIASPGMLAAVMATKGFKELKVACPSLLIEILEKVGCCRSE

SEQ ID NO: 16405 - protein, 371 aa, Oryza sativa
  Clone ID: TF_OSC401762j.C1.p46.fg
MATAPTVAGGKLLRSASAIVGGTESGQHLLEINGYSSIKDAVSIGNCVQSRHFRVGGHDWYIRYYPNGFNSNVSDCISIYLVLDGHEAHDYYYGRSIVRAELTLSLLDQEREPVTSYIYSHGLQIFDGYGRYRGSLRFIQKAVLERSEYLRDNRFTIRCDITVMKNPEAKDTGGRRVTLPPSDLARHLGGLLATGVGADVTFEVDGKTFLAHRNVLAARSPVFHQELFSLTEKGNAATGGAGVIIRVDDMEAQDFEALLHFIYTDSLPEMKGGDAVAMLPDLVAAANRYKMERLRLVCEDKLCEYVTVRTVAAMLAFAGEHQCPELEKKCLQLLEDPANLRNIVETEGLEHLTKSYPFVLKDLIAMFATKP

SEQ ID NO: 16406 - protein, 274 aa, Oryza sativa
  Clone ID: TF_OSC2852j.C1.p2.fg
MGDHRDPAFPAAAGGCRLPKTSSVSVTESVTAVHDFKVTGYSLIEGLGIGRYVSSSTFTVGGVDWAVRFYPDGSTVTCLGNASAFLYYCGREKEVRTRFTLNLLGKDGKLSQVTNSYMKHTFSPASDNWGFIKFAEKSKLQSSPFLHNDCLTIRCLLTVVRESHTKDVEVNSVVVPPSNLHTDFENMLQDGEGSDVTFTVGGQEFRAHKCVLAFRSPVFKAELFGPMKENGTQCIKIDDMEPEVFEALLHFIYKPPIGCQIAAEMARLQQCSTC

SEQ ID NO: 16407 - protein, 570 aa, Oryza sativa
  Clone ID: TF_OSC9673j.C1.p1.fg
FKALRVLDLESSVKLQNSDLNNVVDLFQLSYLTESEKCNLYRNCQELYIPKCCFQRIPDWMASMNNLYRLCIRSKQVTKQILQILGDLPALLDLELRSESDDPMEILIISKCIFRCLKIFRLYGSFVGLIFEDGSMQKVREISVVVRAHKAKSAFADHPDLGIRNLTSLMDLNVWINCEGARVQEVKVLEAAIADATALLPNHPTPHFFRENEENMVKDYLPNHPTPHFFRENEEKMYVPNSRLMSCASLLSAAIRRGVAGCRASPPSASAIVSRPATGSHILRIDGYTNTKSILATGESATSRRFAVGGHSFVMRYYPNGLDDGCADSISLFVDVAGGGGCGRSGIAGHARFSVLDHAGSPARRTDDASSEALAAGADAGVVVPPSDLHRHLAELLWSKEGADVVIELDGGDGETTTFHAHRWVLAARSPVLKAKLSASPSSPATLRLAAMDADAFRALLHFIYTDTLPDDDDDDDAMARRLLAAADAYGMERLRLICEDRLRRRVAMGNVAVTLALAEQHHCRALKEACVEFLSSPGNLKAAMATDGFEHLKATCPSVLTELVMKQLV

SEQ ID NO: 16408 - protein, 353 aa, Oryza sativa
  Clone ID: TF_OSC3760j.C1.p3.fg
MGCCFSVIDDDGYEHDDAVSGSVNEVPRVTGVHQFTIRQYSGVKGKGVGNSVLSRNFTVAGREWFVRFYPDGYNSDTSDHVAFFLQSLYRPSCGSVYHVEFSFALLGGGGGGGAVLHDVRIDRPCRFDNRNNSWGIRKYIAREQLEGAALGAIHDDALTVRCTMHVIQRRRGAGRPVVTGAGGPVRVPVPPSCHARNAMEFLLSGDAPFDLEIHVGDATFGAHRLALAGQSLYFRKLLYGQVGNEASSPAIRLREMSPEAFGAVLHYVYHDSLPPEANKGRNAAAMAREVFEAADMYAMERLKLMCASNLCRFIGDDTASGIMELAKAHSCDPLKKACENYMKRRRIPFNPDS

SEQ ID NO: 16409 - protein, 239 aa, Oryza sativa
  Clone ID: TF_OSC31354j.C1.p1.fg
PKFIRREDLEKSEYLRDDSFTIRCDIIVVDNYRAEDASSGAAGFVSVPPSNLHSHLGDLLKNEKGTDVVFEVAGQRFTAHRCVLAARSPVFNAELFGMMMESDTTTNDAIQIGDMAAPVFKALLHFVYTDSLPETMEEREDTMCEHLLVAADRYNLERLKLICEERLCKYIGIGTVMDILALADQHHCKGLKKACFDFLRSPANLSAVTGSESFEHLSRSFPSLMKELVDILGTSHNYA

SEQ ID NO: 16410 - protein, 154 aa, Oryza sativa
  Clone ID: TF_OSC900229j.C1.p20.gm
MGNWSGGCREKFREVFEWKDADVAFEVGGGGGVRFAAHRCVLAARSKVFKAELFGAMKEGDAACVVRIDDMEPQVFRTLLFFVYTDSLPEMRKEEEEAICQRLLVAAEVYGMERLKLICESKLCKYIDVGTVASIMALVDQSCPFITEELIGML

SEQ ID NO: 16411 - protein, 360 aa, Oryza sativa
  Clone ID: TF_OSC402103j.C1.p15.fg
MAGSSPSAAASGGGCEAVPSTSTIVAEMATGSHVLTVDGYSGTKGLAVGVHVKSGTFVAGGHSWHIKYFPNGATDETSEWTKGAAATVKARCKLTLLLDGRDGRAALPPPPPFTKSCELRTFSSGKGGSDQWGHKKFVRRKELEDPSKRLLRHDRFSVRCDVTVAVGIRTDDTTAKLPPPSDLHRHLGRLLKTNAGADVTFDVAGHKFAAHRCVLAARSPVFMAELLGPMKEEDTESHVVAIRDMDARAFKAMLHFIYTDSLPNVDDGGEAAAMAQHLLAAADRYDIERLKLICEDKLSGGVDATTAATTLALAEQHGCCRLKEACLRFMASPANLKAAMASDGFEHLAKLPFSPQRISC

SEQ ID NO: 16412 - protein, 365 aa, Oryza sativa
  Clone ID: TF_OSC405423j.C1.p13.fg
MAGSSPSAAASGGGCEAVPSTSTIVAEMATGSHVLTVDGYSGTKGLAVGVHVKSGTFVAGGHSWHIKYFPNGATDETSEWTKGAAATVKARCKLTLLLDGRDGRAALPPPPPFTKSCELRTFSSGKGGSDQWGHKKFVRRKELEDPSKRLLRHDRFSVRCDVTVAVGIRTDDTTAKLPPPSDLHRHLGRLLKTNAGADVTFDVAGHKFAAHRCVLAARSPVFMAELLGPMKEEDTESHVVAIRDMDARAFKAMLHFIYTDSLPNVDDGGEAAAMAQHLLAAADRYDIERLKLICEDKLSGGVDATTAATTLALAEQHGCCRLKEACLRFMASPANLKAAMASDGFEHLARSCPSLLKELVANLAV

SEQ ID NO: 16413 - protein, 374 aa, Oryza sativa
  Clone ID: TF_OSC900390j.C1.p2.fg
MYSITAAPATVSHLVRIDGYSRTKNLRRGRFIEAMNFTVGGHRWFIRFYPNGHGPRDVGVVSVYVGIAGAYRRGGGDAKPVIADARFSLVDRDGRPAPPSFVQGMPAVDFSGNDFGMNIKRAELETSGFLKDDGFLVRCELGFVNSAGDGDGRRGVQIKEGIKVPPPNLHRHLADLLWKNQSSGDVFIEVQGKTFTAHRWMLAARSPVMAAELSSSDSDDAAYTDADATKNTMMTLRVDDDMDAETFRALLHFIYTDALPPPPQPRARDTKEKEDEAAAAEAARRLHAAAARYGMERLQLMCEDALCRSLSVLTVASTLVFAEKHGCRVLKAACLDFLSCKRKLRQVTRLDDDFRLLTTTCPSVIKELFAQVLK

SEQ ID NO: 16414 - protein, 359 aa, Oryza sativa
  Clone ID: TF_OSC547j.C1.p6.fg
MTTTTITSSVCAGPPPSRSTTTITAERTYHIIKIPGYSSTLKVGHGQALRTSPFSAGGRTWYISYYPNGGRETNKHCISFFIHLDDDTVNDDVMAQVTFSLLDRHRNPVRSHTITTTLYNFSVPNSSALGFENFIRRDELQRSEYLNDDCFAIAVRLVITEEPSSFTVPPSNMHLDYGDLLSSKEGTDIEFVVRGETFAAHRLVLAARSLVFKAELFRPMEGGTTDVIKIDNMDAQVFKALLVFIYTDTWPEIDQDETTMVQLLVAANKYSLSRLKIMCEDRLCSYIDTSSVVTMLMLADKYQCHGLKKVCFNFLASSRALSLAMKADNFRCLIQGCPTMLKDLIYNIVTHQLEIKLSV

SEQ ID NO: 16415 - protein, 1805 aa, Oryza sativa
  Clone ID: TF_OSC400049j.C1.p26.fg
MSFAGVSFISDGETTPCSSPANNGAAAGSTYGYHLLVISNYSHTKETISTGDSIESGQFMLGGHTWHAEYCPNGDDSTNSDCVSFWLVRDDDDDDDDDGDDAVKVQPLKVKFEFSFAEQAAKHEARRVLVSMACDFSGTSGWCDTRFVRREVLDVSSNLVCHGLATVRRSLGKFLTIGIRARFRKWTRDRALEGVFMPRRRSSSPIVRTPHDSGGRATGSGGGDRGLVIHRVVKEGGGSVNYPLLTKTNYNDWALLMKIKLQARCLWAAIEPDGVDVPLHEDRMALDAICSAVPPEMIGTLATKASAREAWECIKTMRVGNDRIRKASAQKVRSEYESLAFRGDETVEDFALRLTTIVNQLATLGDPEPADKVVEKYLRVARPRFNQLILSIETLLDISTLSMEEVTGRLKAAEDSGQSSLHTADGKLYLTEEEWAERQKKKDQEAKRGDSGSSGGRGKRRGGRGRTGGGGTASPESTNSGSARKGDKCRNCGKLGHWAKDCRSKSKREEQAHVAQEDEEEHTLMLLTGGCVDTVDAAAPEGDTPTPPHQAVVELVEMKVFAALDDAADHDPGRWIMDSGASNHMTGSRMAFADLDTNITGNVRLGDGSVVRIAGRGTILFACKNGEHRTLSNTYYLPRLTANIISIGQLDETGFKVLAEDGIMRVWDEQRRLLARIPRTPGRLYMLDINLARPVCLAAHADEDAWRWHARLGHINFRALCKMGKEELVRGLPCLSQVDQVCEACLAGKHRRSPFPRQALCRSDEPLALLHGDLCGPITPATPSGNRYFLLLVDDYSRYMWVALLSTKDAAPAAIKRIQAAAERKSGRKLRALRTDRGGEFTSTQFAEYCAELGMRRELTAPYSPQQNGVVERRNQSVVGTARSMLKAKGLPGMFWGEAINTAVYLLNRSSSKGIGGKTPYALWNGVPPAVHHLRTFGCVAHVKTTTPNLKKLDDRSRPMIFVGYKPGSKAYRAYDPATRRVHISRDIVFDEAAQWDWDAEAAADLDTDFVVEYTTVYHPGSLSGTRQDAGEPPARSSSSPRTPSDSPTAGRTPSVHGDALAVEFVSPPTGAAANLDADHDDAPLRFRTMDNVLGPAMLPGLANREVQEELMMVSGEEPATFGQAERDEDWRRAMLDEISSIEENKTWRLVDLPSGHRPIGLKWVYKLKKDAQGVVVKHKARLVAKGYVQRAGIDFDEVFAPVARLDSVRLLLALAAQEGWMVHHMDVKSAFLNGELIEEVYVVQPPGFEIDGQENKVYRLDKALYGLRQAPRAWNTKLDCTLKKLGFKQSPLEHGLYARGDGSGRLLVGVYVDDLVIVGGDSGMIKGFKEQMKAEFKMSDLGPLSFYLGIEVHQEAGIITLKQAAYVSRIVEKAGLTGCNPCATPMEPRLKLSKESAGSLVDATEYRSLVGSLRYLVNTRPDLAYSVGYVSRFMEKPTDEHLAAVKRIIRYVAGTIHLGCRYVKEGEGGLQGYSDSDMAGDIDTRKSTTGVIFFLGKNPVSWQSQKQRVVALSSCESEYIAAATAACQGIWLARLLGDLRNAATEVVDLRVDNQSALALMKNPVFHDRSKHIQTKFHFIREAVENGEITPSYIGTEGQLADILTKPLSRIKFQELREQIGLATVRRSLGKFLTLERSRYLVDDCFTVRCDIVILAGAAAAPPPSSSLFGAVESFGRLLGREEGADVTFEVGGETFTAHRCVLAARSKVFEAELFGPMREGAAASVVRIEDMDAEVFRGLLSFIYTDVLPDQGDLGDEAHEWHDDDDDDEGGGDCDMAAETDRSRGQIRSPEAEAAVRGGDVRLH

SEQ ID NO: 16416 - protein, 305 aa, Oryza sativa
  Clone ID: TF_OSC400049j.C1.p18.fg
MPSSANGHGNSSTRSTSAIVVDRVTGHHLFKIDGYSFTKETPTGTPIASGEFTVGGYRWRIEYYPNGRGKKSADYIPLYLSLDKNTSGEVKVKYQIELADRVKKKKKQPSLISKPFMRRRKFEKSKYLRDDCFTIRCDIVVMREIRTEEATFVSVPPSDLKQQLGDLLETGKGADVVFEVGGGETFAAHRFFGSMKESDAAAGGVVRIEEMEAQVFKLLLRFVYTDSLPKMKEEDVMCQHLLVAADRYNLKRLKLICEKKLCKYIGVGTVASILALADQHYCDGLKKACFNFLGSSENPPVASII

SEQ ID NO: 16417 - protein, 824 aa, Oryza sativa
  Clone ID: TF_OSC401547j.C1.p15.gm
MATRLRWWRRRATRLRWCVKFGCSTTTAGSFPADGLVGLSGDAVSHVTQLGGEASLDRRFSYCLVPHSVNTSSALNFGTLANVTELGAASTPLVAGDVDTYYTVVLDFVKVGNKTVALAASSRITVDSGNAKISFVTPANCKKQTEQAIPDLTLEFGGGGGRAAVALKPENASVTVQEGTLCLAMVATTKQQSVSILGNLAQQNIHVGYDLDAGMVTFATADCAGNGRPTEQTSGGQARCGRGRWRRRGGGRGERGCRRRRRPWPQFSRPRRQRRRRRECVSAGQRRAKQAVEGRAGTTPKTASSRAGATGRLSLLKRRRRRRLPYLVSSSSSPPPQPPPGPLRGSDPEVARAATGCRTSSPPASRPAERREVRGRDEEGREEEEEMTWHSDMWGPHGSHADSATTSDKTGVKTPEDLNTVAFHGNPSKPGDPPSYTSPYLPSASHPIQTRDAGTLNPSSNAFGGVSRVGEEGVAGAEGEELSKMGPEAARETKGSLAAAFGFLGTSGGEPRAAPPRRRLPLGAPLHRQPHRRLQPLGRPQARPPRRADVKAALRCRLISNSATTSAAVDGHVSHAFKRAGESSAWVLILRRSALEASGAIVDDAFTVECTITVITEIPDNVAAAAPAAPANVLPPFSGRGLSLSHHLGELLRRGTGADVTLVVSGKCFPAHRAILASRSPVFMASLFGDMKEKSSRSVEIRDIEPQVFGAMLGFIYTDSVPELDQQDGVVVAQHLLAAADMCGLDGLKIMCEEKLIAGATVETAATTLALAEQHGCPRLKARCVEVVAANLDAVMATEGYKHLMASSPLVMNDLLRAVRGRKS

SEQ ID NO: 16418 - protein, 458 aa, Oryza sativa
  Clone ID: TF_OSC412646j.C1.p22.fg
MAEAKMSRITIHDVEPVTFRAMLRFIYTDELEEKDSMATDLLQNLVAVADRYDLSRLKLMCAQKLWEKVSVENVATMLIYAEMHGCPELKTSCLDFFVQEENFKVAVLNEGYAQLVQHFPSVIDEIKGRPVGGPGGLVDESKANNIVDVLAISARFNAAAEPKRRGSGDRRAQRKPREITAAVTITREIKLLLILMTNKENYCYSKLEEFDHTVLITLISVYNQDYGSWILFESIDRYISDSIPLAIAFWFAAPYAGMPDSGSLELILDYEATNHCAILVDGETFPAHRAVLAARSPVFRAELLGSMAEAKMSCITLHDIEPVTFRALLRFVYTDELPADDGGELNTTAMATERKKGGGCLLMGRRAGSGNHQAGKLASVRGEGGGGEADEQDGEPTSGTGRGGRRAGWGGRRAREEREKVGKGAEGDSHRAGRPMSLRGEGGGGEALSPSISLSWWP

SEQ ID NO: 16419 - protein, 404 aa, Oryza sativa
  Clone ID: TF_OSC400049j.C1.p6.fg
MSSSAAGNSSRSASTSTIVADTETGYHLLKIDGYSRTKGTPNGTAIASSQFIVGGHRWRIYYYPNGDHTDNADYMSFYLLLDEKKNTKTKSVKVWTLFQICFADQAKALPTLTSKTVRTFGDGSSWSWGYSKFIKREDFEKSKDLRDDSFTIRCDIAIVREFLVETTEVLPPKSFVSVPPPDMNLQLGELLETEKGADVVFEVAGERFAAHRCVLAARSPVFGAELYGLMKEGNAAVVVRVEDMEARVFKLLLRFVYTDSLPEMKKKDEGIMCQHLLVAADRYNLERLKLICEEKLCKHISTGTVSNMLLLADQHHCSGLQKACCNFLGSSANLSPVSRGWLFVMKQLVLGCCNAWRLAVVHPVSVSWLVLSLSGRAAEVYDLSNSMKFTSHEHHPKEARGAIA

SEQ ID NO: 16420 - protein, 181 aa, Oryza sativa
  Clone ID: TF_OSC31360j.C1.p1.fg
QLVDLLETEKGADVVFEVSGETFAAHRCLLAARSPVFSAELYGLMKEGDTAGVVRIEDMEAQVFKLLLRFMYTDSLPKMEEEDVMWQHLLVAADRHDLQRLKLICEDRLCNYIGVSTVLNILVLADQHHCDGLKKACFSFLGSLENLSAVVTGDGLEHLSRSYPSLMKELFVVMALPPNHG

SEQ ID NO: 16421 - protein, 348 aa, Oryza sativa
  Clone ID: TF_OSC423270j.C1.p1.fg
MGTVEGHHRFAIRGYSRLRALLAAGEYVRSAAFTVGGYDWAVVFYPRGATHADRDHAAVYVQLLTDRAAAAATFDLRFVRADSGRPLSVHPPLAAPRTFSTVLRSSSAAMYGVKVEAIQALQANYVRRDRLTIDCAVRVVGKPRVSAAAPLTAADVPPPDLAAHLGRLLDLKSHADVTFDVRGVQFAAHRVVLAMRSAVFAAELFGPMRNNAGGAIKVGDMQPAVFKVLLGFIYTDTLAAMDDLDADEDDRRELARHLLVAADRYDMGRLKLICADMLARSLTAQTVASTLALADRHGCRGLREACVEFVIAMGMNDEVVISRHPDQLSCISLFKYFFYQIGSLLKIH

SEQ ID NO: 16422 - protein, 384 aa, Oryza sativa
  Clone ID: TF_OSC401916j.C1.p2.fg
MVASASRLRPSSTTRTASSCKPETARGTHVFTIHGYSLQAVDGAGSNKASFIRSAAFDVGGFDWCLRYYHNGNIESDDDYISVFLELMTKDAEVRTIFDIRMLDQYTDDSSCVLVSTTNNTRRVFGTTNFKSKCLVWGSKNFIRRSELEGSVYLRDDRLMIECNLTVIKTPLVKTEERAAMPGDIIHFQVPPTNLSRDLGKLLEDNVGADLSFEVGGDVFPAHSVVLAARSPVFMAELYGPMRAKRGERIAIQDMQPVVFKALLHFMYTDSFSPAINDDLSRDERQELAKHLLVAADRYAVEGLKTICEKALCMSLSVDNVATIVALADQHNCGRLKEACVKFIASSNRLDDVVETEGYGRLKTSCPSILLDVIEMATKSRKIN

SEQ ID NO: 16423 - protein, 352 aa, Oryza sativa
  Clone ID: TF_OSC418633j.C1.p5.fg
METPTNLTNTISAVHLLKINGYSVTRALGCSEYISSRRLAAGGYDWEVLYYPRYYEHGVYWIALRLMFMSKECKHEVKAALKCQLVHEAQIYLPSGSKSVSSKYTGQRDCGPALLLVKQDDLPGSNYFIGDSFVVECTITVLREPQEAVTNVSPNVSNPCCDLQMHLGELLLSEKGADVTFVVAGESFLAHKIILAARSPVFMAEFFGPMKESSSQCVEIKDIEASVFKAMLHFIYTGTSPELDQQHVVSDSEQDITTMTQHLLVAADRYGLDRLKLICQDRLHDDINVETVATTLAFAEQHSCTQLKDRCIEFIISSRANLDAVMATEGYKLVIASCPSVLSTLLRAAVGR

SEQ ID NO: 16424 - protein, 614 aa, Oryza sativa
  Clone ID: TF_OSC400049j.C1.p53.fg
MATTTTMTLAASAGDGSPSSRSTVTTIAAQAYHVLKINGYSNTLEAGRHHALSSCPFSAGGHTWHVSYYPNGGRDSNKNCISIFLVLKDIVTEEDVMAKVTFSLLDRYGNPVPSYTYHTQLRNFSTSPSRAKGFENFIRRDELERSEYLNDDCFAVAVHVIVPKEKPSIVVPPSNMHLHFVDLLVSKEGTDVKFLVGGEMFAAHRLVLAARSPVFKAELFGPTKKGTIDVIQIDNMEARVFKALLDFIYTDIWPEIGHGEDNVAMAQRLLAAADMYGLQRLKFVYEDKLCNHIDTGSASTMLVLAEKHHCCKLKEACFTFLSSMSPPIVEDLNSSIFGSESEKTKYRYLRNEKRAHTYLERNSGAGDKVFLDKCILVSVYKGVKLMFGKRGGTTCALAQWLHRMGLEIQQEKGPAGRSSYVRRAPASSSYAGCCCYDATGQRNALAFWKVRFDRARGHVVRVIDADHGSGRDGWFSIEVARHTVKDEIVGLRRHVCCRSPLVGSAGWPRTSRARTTYYDVRADKFTYARASDTSPTARQLHALPPANRRTGPRTDDEERRRPGHHAPTRTASPYVRGQKSRRLVAVRGGNEQYTWELELEQLVWHDNGLAANSY

SEQ ID NO: 16425 - protein, 316 aa, Oryza sativa
  Clone ID: TF_OSC900229j.C1.p24.fg
MASRSASIVQANVTSGYNLLTIDGYMATTPIPTGVYMTSSAFAIGGHQWRISYYPNGKNSGCADYISFDLILDENVAAPLHERERGEGPSRFVKRRILERSRRRHLKNDSFIVRCDVVVTEFRPAEVAPGSVDVDGPPSDLHRHLGDLLRGETGADVVFEVGGERFAAHRCVLDARSSVFDLELFGATTAKEVVVGQSTGIVRVDGMEARVFKALLFFAYTDSLPEMMTTTKKKMEEQAAGDGDDRYDIDAFTVGKVIALAEQHDCRVLRKLASISSCVVLDFRRMYCWAPATAAPSAAPFLLDKSCLKASSKSGS

SEQ ID NO: 16426 - protein, 137 aa, Oryza sativa
  Clone ID: TF_OSC31363j.C1.p1.fg
MKEGDTDGVVHIEDMEARVFKLLLRFMYTDSLPEMEEEDVMCQHLLVAADRYNLERLKLICEEKLCRHISVGTVWNILPLADQHHCDGLKKACFDFLGSLANLSAVVASDGFKHLCRSCPSLMEELVVTLALPGSHA

SEQ ID NO: 16427 - protein, 390 aa, Oryza sativa
  Clone ID: TF_OSC595j.C1.p1.fg
MSHTRSTTAGAAGGKPPIAPPPTSSASAIVADTASGYHLFKINDYSRTRDIFPTGSALKSRAFTIGGHQWRIHYYPNGNTEECGEYISLFLHLDEIVTDKNVYAQHGFRLFDEFAGDNDDDDELQPSSIADLGQVSTFGGNNIGLGRLRFIKREELEKSKYLKNDSFTVRCDVVVTKRIRSEETPLVVRTSPKPKVARLVTVPPSDLHRHLQDLLCAEKGADVVFEAGGETFTAHRCVLAARSPVFSAELFGSMKESDTTVVIRIDDMEAQVFRALLFFVYTDSLPETKKEDEYAMCQHLLVAADRYNMERLKLMCEERLCSYIGVGTVTTILELAEQHNCDGLKKACFDFLSSQENLKAVTAGEGLEHLSRNCPSLVNELIGTLGNLIQ

SEQ ID NO: 16428 - protein, 236 aa, Oryza sativa
  Clone ID: TF_OSC1353j.C1.p1.fg
MAKHEHVSSKRLTVAGYAWEIHYTPGHDAHWHYWVAFKLVFLGIGEQAQRAGGDDDDNDAGAIKAELEASGFITGDSFAVRCTITVLSKNTINSAEPSPDLHLQLGELLRSGRFADVEFIVSGVSIAAHRCVLAARSPSLAAAVLKGGTRKKDGSVRVEVKDDMRAGVFRALLHFIYTDTLMELDWREDGSDPLLPRTMVMSLNEAAGRYGLERLKQICENMLGFDDACSADCAVM

SEQ ID NO: 16429 - protein, 112 aa, Oryza sativa
  Clone ID: TF_OSC400049j.C1.p20.fg
MNQQLGDLLETGKGADVVFEVAGQTFAARSPVFSVELYGPMKESEPTGVVCVQDMEAQVFKALLRFMYTDSLPKMEEEEGVMCQHLLVAADRYNLERLKLICEEKLCKGKLF

SEQ ID NO: 16430 - protein, 349 aa, Oryza sativa
  Clone ID: TF_OSC567j.C1.p1.fg
MATTAPNVVDSDCGGTPPSRAGGHTWCIHYCPIGSTEESKDFISIYLVLEDTTADVVSAHVTFSLLDQQGNPVPSHTLTTPLLKFSLQGTLPKGLGYNSFIRRDDLERSGHLKDDCFAIGVHVVVTKEAIPSSITVPPSDMHLYYGDLLSSEERYATDVEFLVGGETFAAHRLVLAARSPVFMVELFGPMKESTTVNKIQIFDMEAQVFRVLLKFIYIDMLPEMDQEDEAAMAQHLLVAADKYGLHRLKMICVEILSNHIDANSVATILVLADKHHCYGLREACFDFLNSSAILSAIVNTSDFQYLIQSCPDILEDISFNIVARQLERAIFLSENQAGQINSVEIGIRS

SEQ ID NO: 16431 - protein, 458 aa, Oryza sativa
  Clone ID: TF_OSC26652j.C1.p3.gm
MGQTTSKSAGDGKPKPKTTSAAAAAAAVVSETATGSMTMRIAGYSQTKGIGVGNSINSSKFHAGGHTWYIAYYPDGDREEYSDWVSVYLCLARPAAGAAADDVVEAKFTLSLLSGTYGAVVEEKICTAKKFSFANGYWPSWGHTRFIKRKKMDSRLWSCLHLDGQSFYIRCNITMDIIRCEAATTAVAVPPPDLHRHLAALLGSGVGADVRIRVGGKLFAAHKNVLAARSPVFMAELFGNNGGKDQKEAKAAAAATGNGVIRIDDMDLRVFRAMLQFIYTDTLPKIDKGDTAFMAQNLLVAAHRYGIERLKSISVDMIRKAARTMNLIAMIIRNNDEGIATQLRTRGRLGLHLPDAPEKPHRCRRLFELTLCYLSLDSTLLIQAAGDASTRSCDLAEMPDVLDLQASPHWSGLTMEEVIGKPPCRSAPRIAGAATDCQDFYPFPCRRSSITHGVETSG

SEQ ID NO: 16432 - protein, 342 aa, Oryza sativa
  Clone ID: TF_OSC401965j.C1.p35.fg
MATTLASGAGDAPGLEWYIPGLEIELCSRGGCSEWLGLYNRGLSGPPVIFSSGCDTWHINYRRLGSSDSSRDYISFYLVLEDQVVEDDTVTAQITFILLDQDRKKPFILRKDLAESEHLKDDCFAIGVDVVIVTKDEVSSVKVPPPSDMHRHYGDLLSSKLGTDVEFVVGGETFTAHRLVLAARSPVFKIELFRTTEERTTPNAIPINDTDAQVFRAMLSFIYTDTWPKIDQENEAAMAQHLLIAAERYGLDRLKLMCEDRLCNGIIDMGSVTTNLVLAENHYCHSLKKACLELLGPWTTLAEFMATDDFRYLTKSCPGILNDLICIVAARERERTIFFLGE

SEQ ID NO: 16433 - protein, 277 aa, Oryza sativa
  unsure (1)..(277): unsure at all Xaa locations
  Clone ID: TF_OSC401315j.C1.p1.np
NLNFIKFIWCSSKRRRGGKVVKGRCGXSLGRGGSDHPSVRSTLQTTNWGYSRFIKKRDLEQSEHLIDDSFTIRCDLTVMKGFSSKGSHCKPSVEVPGRLDLHLGNLLSNKKMNGKDVTIYVGKERFRAHKCILAARSSVFRALFFGAMIAEPRTIEIEDMEAGVFRLLLHFMYNDSLPETWSQDAMMAQHLLVAADWYNVGRLKLICEEKLAKHIDCNMVATTLALAEQHSCQGLKEACLEFLASPTNLERMMRTDGYKHLKISCPIVLNELSEIAA

SEQ ID NO: 16434 - protein, 218 aa, Oryza sativa
  Clone ID: TF_OSC411533j.C1.p1.fg
MDRVDTALPCFSSQCMNISLRTLFPPIFTFLKYILYAGDDDGTIPIPRSNLNGQLDDIADRADGSDVLFSVGSETFHAHRAVLAARSPVFKMELLGSMAESTMPCVTLHNIDPATFKALLHFVYMDALPSPTEAVRIGEVEADVCTEAVGECVGGDGGDDSRLRAYAERYHCPELKSKWLSFLMAEINFKKVAVTDGYFHLRRDFPLIIEEIKKRIES

SEQ ID NO: 16435 - protein, 257 aa, Oryza sativa
  Clone ID: TF_OSC416369j.C1.p3.fg
KFDDKLSNMRIGRRPGRPQGVRVGRFINAAGTTGFPTGKRARVDTALPCFSSQCMNISLRTLFPPIFTFLKYILYAGDDDGTIPIPRSNLNGQLDDIADRADGSDVLFSVGSETFHAHRAVLAARSPVFKMELLGSMAESTMPCVTLHNIDPATFKALLHFVYMDALPSPTEAVRIGEVEADVCTEAVGECVGGDGGDDSRLRAYAERYHCPELKSKWLSFLMAEINFKKVAVTDGYFHLRRDFPLIIEEIKKRIES

SEQ ID NO: 16436 - protein, 270 aa, Oryza sativa
  Clone ID: TF_OSC31365j.C1.p1.fg
MATAVSRGTASSIVADAVTGYHLLKIDGYSRTKGTPNGAALTSDQFVVGGHRWRIRYYPNGDIAMFADYISFHLMLDENATSTKGVKVKAQFQICFADQKLGKLLDTEKGADVVFGVGGETFAAHRCVLAAQSPVFSAELFGPMKDSDRAGVVRIDDMEAQVFKALLRFMYTDSLPEMEEEEDTMCQHLLVAADRYNLERLKLICEDRLCKHVGVGTVVNILTLAGQHHCDGLKKACLHFLGSPANLSAVLAGDGFEQLSRSCPSLVNEL

SEQ ID NO: 16437 - protein, 284 aa, Oryza sativa
  Clone ID: TF_OSC594j.C1.p3.fg
MATAVSRGTASSIVADAVTGYHLLKIDGYSRTKGTPNGAALTSDQFVVGGHRWRIRYYPNGDIAMFADYISFHLMLDENATSTKGVKVKAQFQICFADQKLGKLLDTEKGADVVFGVGGETFAAHRCVLAAQSPVFSAELFGPMKDSDRAGVVRIDDMEAQVFKALLRFMYTDSLPEMEEEEDTMCQHLLVAADRYNLERLKLICEDRLCKHVGVGTVVNILTLAGQHHCDGLKKACLHFLGSPANLSAVLAGDGFEQLSRSCPSLVNELVAMLAPPIPPSSHA

SEQ ID NO: 16438 - protein, 373 aa, Oryza sativa
  Clone ID: TF_OSC400049j.C1.p22.fg
MSFAGVSLVRDGRLQSPSSSAITSGATSGYYLLVVEGYSRTKDTVPNGDFIRSRPFRVGGYRWVIDYYPNGESSDDADSISVSLQLDQDSERPFMAHYEFSFIDETERQKSTHICSEALFDFSDDNRWGYTNFIRREELEKSKHLKDDCFTIRCDIILKKDGSNTTGDDVAAPLVAVPPSDMHRQFTDLLLTKVGADVTFQVGGETFAAHRCVLAARSTVFMVELFGPMKEGATTASVHISEMVPEAFKAMLAFIYNDTPPPETEEDEDGKVAMWQHLLVAADRYDLPRLKLICEEKLCGHIGVGTATTILLLADKHHCRGLKEACLEFLSSPANLEEVMEHGGLEDVVGTCPSVLVELIAKLALLRTQRDYK

SEQ ID NO: 16439 - protein, 694 aa, Oryza sativa
  Clone ID: TF_OSC400992j.C1.p38.fg
MAAPPVSGDGAAAAAPVVALGAAGAVGGPRPYEVAVAAAELRPVDCNLAALCDHVQAEGFGSGAFSDVVVEAMGATYRLHRLIISRSAYFRNMLHGPWREAGAPTVVLHIDDPNIDSEAIAIALAYLYGQPPKLNDNNAFRVLAAASFLDLQDLCTICTDFIISELWTSNFLQYQLFAESQDYGSHGERVRNACWGYLCQSATLELREVLPKLSSQTLHALLTSDELWVPNEEKRFELALYALLAKVTLSDVEVSGNENLNLTSSSANSDHSMRKGKSPMNEAGEEQLMGSELQNLKLHDNTETISAHNTSDIPDMVIPQDSTAYSIEQNAEASRRKMLLCHRVQAIVADTCTNCCLTGNSCACKQAHVSSHHHYRQEHDRSSASGTVGNIYLTDAHGEGNAVFGPVRVNVRGAVDGLAGIGRGNSNVPGAAWAPTRYVFSRVPYGLGSRNGQQPFANDESEPRVDYNGDISGDGLTALVNLSQESSASHHQTESIFETGIQVRYSGAASVSTPGGSSLQMQESKEHELGSNLETTENTTISLDMKTPLSHFPPFRFGVEFEDVHRLADSQVKHSTEVFYAGSLWKVSVQAFNDEDPHGRRTLGLFLHRRKAEPLDPLRKANMYVDHREKVTARYQLICPSKREVMIFGSLKQAGTLLPKAPKGWGWRTAILFDELGDLLQGGSLRIAAVVQLV

SEQ ID NO: 16440 - protein, 363 aa, Oryza sativa
  Clone ID: TF_OSC400049j.C1.p13.fg
MSPAAACRGNPPSRSAIVADTATGYHLLSIHGYSRTKGTPTGSPLKSTRFTVAGHRWRIHYYPNADRADSADYISMYLFLDEKSNATRSVKALFQIRFADQVKAQPSLALHAVRTFGDGSWSWGYAKFVRREVLEKSKDLRDDSFTIRCDIVVVREFVAEEATEILPAGSFVSVPPSEMNRHFGDLLETEKGADVVFEVAGESFAAHRCVLAARSPVFGAELYGLMKEGDTAGVVRIEDMEAQVFKMLLRFVYTDSLPEMEAEEDVMCQHLIVAADRYDLQRLKLICEEKLCKYIGVCTVSNILALADQHHCDGLKKACFSFLGSPANLSAFVADDGLDHLSRSCPSLMKELVVELALPPSHA

SEQ ID NO: 16441 - protein, 316 aa, Oryza sativa
  Clone ID: TF_OSC400305j.C1.p11.fg
MVSKKKKTVSRHTTESEEGRHSFEIVGYSLKKGIGVDEFVESATFAVGGYDWCIRFYPDGKGDGAKDYISVYLELLTKDCAVRAAYDLRLVNLATGLPKSVYSETTHRMFNSEDSSKFAPHYATFMHRSQLEMEASGYIKDDRLTIECFVTVVVQESMASNTVKAHELIKVPPSDILENFGELLEKGEGADVTFVVGGEKIAAHKIVLAARGLLHFIYTDSLPDMDDLSDDDYYEMIRLLLVAADRYAMDRMKLQCESILGEHLDVQTVATTLALADQHNCNGLKDVCIEFIATQNKMDDVVATEGYAEDLPFCLS

SEQ ID NO: 16442 - protein, 186 aa, Oryza sativa
  Clone ID: TF_OSC2852j.C1.p1.fg
MANMLRAADGADVVVLVRDQPFRAHRCVLAARSPVFRAELFGGGHMRERRTSCVVVDDMEPSIFSAFLHFIYTDSLPENPDTPGDDQDCMAMQHLMVAADRYGLDRLVLICEEKLCRGIDVQTVATTLALAEQHQRVALKDACLGFIVSRGVLGAVARTDGFKHLLTTCPSIMVDILDKVASVMSK

SEQ ID NO: 16443 - protein, 407 aa, Oryza sativa
  Clone ID: TF_OSC401762j.C1.p64.gm
MAVAEVETAALGDGGSGGGGGRRRGRGGGGRSGGGGARGRRRRSATWTGRGGGQGEGEGEAEAAREGAEAALGDVDGARGRGAEAAARGRKPVRSASTIIAGTESGQHLLKIDGYSHTKDKLPTPGSNVKSRSFRVGGHSWHISYYPSGNDSDKANCISIFLNLDDDVDVKAQFNGWGFVSFIRRDVLEKSEYLRDDCLTIVCDLTVFMELQTEDIDVDTATPPPPPPPTVVVPPSDLHRHLGGLLATGEGADVTFEVSGKTFAAHRLVLAARSPVFRAELFGPSKELGATTGGAVDHTAIRIDDMEARDFEALLRYMYTDSLPEPETTKGGGDAAAMLPDLVAAASRYKMERLRLVCEHKLCEYVNGRTVVSMLAFAREHHCDGLKEKCLRFLDDPVKVREIVKAR

SEQ ID NO: 16444 - protein, 271 aa, Oryza sativa
  Clone ID: TF_OSC400049j.C1.p4.fg
MSCSAIVADGVTGYHLLKIDGYSLTKGTPTGTAIKSNPFTVGGYRCSSKPRISRSPTTSGTTRSPSGVTWSLSARSVPRRGRLTHLAETFVSVPPSDMNRQLGDLLETEKGADVVFEVAGERFAAHRCVLAARSPVFGAELYGLMKEGDAAVVVCIEDMEARVFKLLLRFMYTDSLPEMKNKDAGVMCQHLLVAADRYNLERLKLICEEKLCKHISMGTVSNMLVLADQHHCAGLKKTCCNFLGSSANLSPISRGCLSVMKELVLGCWCIH

SEQ ID NO: 16445 - protein, 261 aa, Oryza sativa
  Clone ID: TF_OSC401315j.C1.p8.fg
MANDCNTISSAIVAEAVSGSHVMKIDGYSKTKALIKNEECLSSTPFSVAGYTWTIRYYPNGQSTECREYLSLYLFLDSFARDVKAIYSFKLLDKNGRPLLLNSIASPVKTFKLRGTGWGYPMFIKSKDLKASESLRDDSFSIRCDVTVMKPICSKETPAMPKPSVEVPPGDLHQHLGDLLKNMDGADVTFDVGQERFSAHKCVLAARSSVFEAMFFGATRAKPRRSNIKIEDMEAGVFRSFLHFVYTDLLPDTSQDVVMAQ

SEQ ID NO: 16446 - protein, 341 aa, Oryza sativa
  Clone ID: TF_OSC401180j.C1.p17.fg
MMISSSFAELKLEYPGTTTTTNSFAVGDGEQSWVIRCYPRGYREEDNGEYVSLRIGVPARSNTVRAIFHTFLMRRDGGVGAPSIICSDRAFPMSVPGHPRGYGGAFRHLVRRSDLEPLYAVDGVVTIVCGVVVFADAGGGGGDDDDGGPIPVPRSNLGGQLGGIVDRADCSDVSFSVGGETFHAHRAVLAARSPVFKAELLGSMAEAAMPCVTLHDIDPATFKALLHFVYTDALPSPSTSSSSSSTTTGFFESLLVAADRYALERLKLMCAQKLWESVSVETVATTLGYAETYHCPELKSKCLNFLMAESNFKKVAVTNGYFHLRQDFPLIIEEIKKRIES

SEQ ID NO: 16447 - protein, 364 aa, Oryza sativa
  Clone ID: TF_OSC407812j.C1.p18.fg
MGKLTDVTRSNDIQLKIVGHSLTMAMDDGEFFSSRRYCVGGHDWEIRLRPKDPWVGRRDRPLTLKLVLRGAPRTGSGSVKAQLSCCLVDPTQKLRPSEMKTVSHKFHKPGDYSPRAVFMARDELEASGYLTDDSYVVQCAITVLREQPEIAAAAAAAGDSANAAVAPSSELHAYLGALLESKTGADVTFVVSGESFAAHKAILASRSPVFMAELFGAMKVKASERVEVKDMEAPVFKAILHFVYTDTVPELDHRDGEETEAASTATAMAQHLLAGADRYGLERLKLICESKLAERIDVDTVSTTLALAEQHDCSHLKAKCVEFIAAGTAENLDAVLATDGFKHLEASCPSVLTDLVKVARGRKN

SEQ ID NO: 16448 - protein, 323 aa, Oryza sativa
  Clone ID: TF_OSC900305j.C1.p3.fg
MANDTNNTSSSVIATETTSASHVIKIDGYTVTKDLMENGEFVSSIPFSVGDFLWNVRYYPNGNCSKNADYLSFSVFLESHWAEDVKAKFSFKLLDTNNKPVRSRNFISNTHNFSRRGSNWGYSRFIKKRDLEQSEHLIDDSFTIRCDLTVMKGFSSKGSHCKPSVEVPAGRLDLHLGNLLSNKKMNGKDVTIYVGKERFRAHKCILAARSSVFRALFFGAMIAETPRTIEIEDMEAGVFRLLLHFMYNDSLPETWSQDAMMAQHLLVAADWYNVGRLKLICEEKLAKHIDCNMVATTLALAEQHSCQGLKEACLEFLASTNQS

SEQ ID NO: 16449 - protein, 429 aa, Oryza sativa
  unsure (1)..(429): unsure at all Xaa locations
  Clone ID: TF_OSC101916j.C1.p11.np
WQQQLQPHDQQAASCSVTAGMMMQASGYDMAELDIFLYLNSQDASAAIQEQPRKPHIYMHLLLSPNLQTLNIFPSQPMHAGEPSPKGSSSHHGGASSAAASEHEGPKTPDAKTLRRLAQNREAARKSRLRKKAYIQNLETSRIRLSQLEQELVQRSRTQHVSTXGAILGGGAFSAGIGGQSPGIYNQAAWFDGEYARWVESHERMMAHMRAAVEEQPQHGGLRQLVDAAVAHHGVLVELRQLVDAAVAHHGVLVELKAAVASADVFHLVSGTWLPAAERCFLWIGGFRPSELIKMMARHAEPLTEQQAAGVYGVQQSAREREEALDRDLHATHHALSDAVSSDSLPSLPAPVPPHTPTSMAHLSLAISNLSSLEAFVRQADALRLQTLYKLPQILTARQSARCFLAIADHSHRLRALTSLWLSRPRHPD

SEQ ID NO: 16450 - protein, 300 aa, Oryza sativa
  Clone ID: TF_OSC401607j.C1.p25.fg
MADASSRTDTSTVLDTDDKNQMAHHFDINFVKNLIVKVDGQSGAIVPSNSSDRSDRSDKPMDQKVLRRLAQNREAARKSRLRKKAYVQQLESSKLKLASLEQEINKARQQGIYISSSGDQTHAMSGNGAMTFDLEYARWLEEQNKQINELRTAVNAHASDSDLRLIVDGIMAHYDEIFRLKGVAAKADVFHILSGMWKTPAERCFLWLGGFRSSELLKLLVNQLEPLTEQQLLGLSNLQQSSQQAEDALSQGMEALQQSLADTLAGSLGPSGSSGNVANYMGQMAMAMGKLGTLENFLRQ

SEQ ID NO: 16451 - protein, 519 aa, Oryza sativa
  Clone ID: TF_OSC401001j.C1.p21.fg
MEGGRLGGAAASASAAAAADARGGMSGFAAPQHAIVKHGPGSVTHCGGKWTFAELCQSEQIWVLDCYCMQWACKFATNATECHTNLNNVQPTQVTDFGALAQSAGFRIEDLANLSTNGLFNLKSNAHTIINDPLQFENYVKSISPSNITTTATVTVVDPQTLVPQKGAQLNLVTIRTGNVENWGESTIADTSPRTDTSTDPDTDERNQMFEQGQLAAPTASDSSDRSKDKLDHKTLRRLAQNREAARKSRLRKKAYIQNLESSRLKLTQIEQELQRARQQGIFISTSSDQSHSASGNGALAFDMEYARWLEEHNKHINELRAAVNAHAGDNDLKSTVDSIMAHYNEIFKLKGVAAKADVFHVLSGMWKTPAERCFMWLGGFRSSELLKLLAGQLEPLTEQQLAGIANLQQSSQQAEDALSQGMEALQQSLAETLASGSLGPAGSSGNVANYMGQMAMAMGKLGTLENFLRQADNLRLQTLQQMQRILTTRQSARALLAISDYFSRLRALSSLWLARPRE

SEQ ID NO: 16452 - protein, 475 aa, Oryza sativa
  Clone ID: TF_OSC404032j.C1.p1.fg
MGGSREEDRQHHNHLPSELPLGFRSSSPTTMIASSSMSKESSNYDMADFDQASLFLYLDSHDQQSIQEQRQTLNIFPSQPMHVADPAHEAKSAGVAMAMLPNGNQLQVLPSHPSKKPDQQGGQKINSSVPTNPPGPNLPLPNSAKDNKNSSLIKGPKKCGLQKEGSSSGKGATTSNDPEREGRRTLDPKTLRRLAQNREAARKSRLRKKAYIQQLESSRIRLSQLEQQVHVARVQGAMLGAGDQHQGLPSGPSAASLFDLEYGRWVEEHSKLIFQLRAALNEQMADSQLQVFVNGAMAQHDELLSLKGAIARADIFHLLCGVWATPAERCFLWLGGFRPSEAIKVMLKQVEPLSEGQLMSIYELQQAAKGTEDALSHAMDGLQQSLSDTVAAPDVAAAGGFMGHMSLAMNKISAMEDIVRQADGLRQQTLHKLQHMLTIRQAARCFVAISDYFHRLRALSTLWVARPRPEEGPAM

SEQ ID NO: 16453 - protein, 362 aa, Oryza sativa
  Clone ID: TF_OSC400216j.C1.p4.fg
MANAKLPKQALLPPRSPFPTAAAAAGPYAGDHGPIARPQGAPHHRHGHGHGHHQRTSSESFIEEQPSWLDDLLNEPETPVRQHGRAGHRRSSSDSFAMFDGGAAAGAYANGFEGMGGGGGGGQAAPWGGVQEYYAKPSSFGRHQGRPWEQGMNNLVNYRQSGGPPMPAKEKVGGHHGSPSVLRDHDHGMDRRSSDESGHDQKVGPERKEGVPPKHAQSEADTKRAKQQYAQRSRVRKLQYIAELERKVQALQSEGIDVSAEMEFLSQQNIMLDLENKALKQRLESLAQEQLIKRFQQEMFEREIGRLRSLYQQQQQQQKQPQPTTTLSRSNSRDLDSQFANLSLKHKDPNSGPLRTQSSSIL

SEQ ID NO: 16454 - protein, 346 aa, Oryza sativa
  Clone ID: TF_OSC401539j.C1.p89.fg
MAQLPPKIPVAAPGHHQHWASAGGAGDAAWADEFAEFAASRRGAHRRSLSDSVAFVEVAPAGCGAGGEFDRLDDDQLMSMFPDEGGSSAPGSDNGGSDSDGGGDKHAAAQSDDGQHAAGEPTQEQAAATSPTELIRDPKRVKRILANRQSAQRSRVRKLQYISELERSVTTLQKWRQFETDRWTQPHWLAGNSTQCGEEMSESNEVSVLSPRVAFLDQQRTILTVGNSHLKQRIAALAQDKIFKDAHQEALRKEIERLRQAVLACYRLTAPDLLCMIWFPLLGERNHRRRKTCAAYRYRGTPLLLQFQGQVAQRAIQHLHYSEFAVYGSGSAMINHATCGVLVSRY

SEQ ID NO: 16455 - protein, 171 aa, Oryza sativa
  Clone ID: TF_OSC402026j.C1.p13.gm
MAEQLGGVGSPQLSLSSCSSFLSISSAGTSAADGAPHLSLGVGGAEELDLLLQVGIGGGGGGGGDEEEEERKTIRMMKNRESALRSRARKRELEKEVRRLVNENLKLKRHCKQGQHKSGAGYDAIKTYQQRPFSESPSSSLRPGRPYLAGLLPLPFTSLCLRHHDQPTARY

SEQ ID NO: 16456 - protein, 347 aa, Oryza sativa
  Clone ID: TF_OSC403288j.C1.p1.fg
FSTTATAAATARPPPTLDIFPSWPMRSLHTPKEGSNVTADTTDSESSSKNNSNQNASSDQHVLVGDMAGQFDQIPQQEQHKKMATNSPTHSSKTGKALDPKTMRRLAQNREAARKSRLRKKAYIQQLESSKLKLAQMEQDIHRARSQGLLLGAPGGNTSSGAAMFDVDYARWLEEDSQRMAELHGGLHAHLPDSDLRAIVDDTLTHYDHLFNLKGMAAKADVFHLITGMWATPAERCFLWMGGFRPSELLKTLTPQLDPLTEQQVVGICNLQQSSQQAEEALSQGLDQLHQSLAETVAGGSPLDDPNVGSFMGHMAIALGQLSNLEGFVIQIKIGVALSLCVTQLHK

SEQ ID NO: 16457 - protein, 480 aa, Oryza sativa
  Clone ID: TF_OSC8883j.C1.p9.fg
MASMAPPCPTPWLLQTSYHSGQQIYSQQVVDLMLHVLISLLNLHWPDTDSEQGGGGGGGAAYFGELEEALVHQVATLRRRAQQTATTTTSHHGHTTPFSTAAAAATATATARPPATLDIFPSWPMRRSSLPTPKDGCSNVTADTTDSESSSKNNGDQGAAAADMASQFDQIPQQQQKQHKKMAASSTHSDHRMTKTLDPKIMRRLAQNREAARKSRLRKKAYIQQLESSKLRLAQMEQDLERARSQGLLLGGSPGGNTSAGAAMFDAEYGRWLEDGGRRMAELHGGLHAHLPDGDLRAIVDDALAHYDELFRLRAAAAKADVFHLITGTWATPAERCFLWMGGFQPSDLLKTVAPQLDPLTEQQVVGICSLQQSSQQAEEALSQGLEQLHQSLAETVANGGSVVNEASLGSFMGYMALALGKLSNLEGFVIQADNLRQQTLHQMHRILTIRQAARCFLAIGEYHNRLRALSSLWASRPRE

SEQ ID NO: 16458 - protein, 365 aa, Oryza sativa
  Clone ID: TF_OSC400765j.C1.p13.fg
MASSSDEQPKPPEPPAAAAVAGTAVATAAAAVPTHAEWAASLQAYYAAAGHPYAWPAQHLMAAAAAGAPYGAPVPFPMYHPGAAAAYYAHASMAAGVPYPTAEAMAAAAAAAAGAVPEGKGKGKGAAASPEKGSSAAPSGDDASRSGDSGSEESSDTRDDDTDHKDSSAPKKRKSGNTSAEGEPSQATLVPYAAVESPYPLKGRSASKLPVSAPGRAALPNATPNLNIGIDLWSTPPALAVPAGQGEASPGLALARRDGVAHLDERELKRERRKQSNRESARRSRLRKQVGYLYGSGSRWQTWKETLILLGAAIFLAGGIECMLDAGRGIWYDVSTSPDVGLSAHGQYAQQAMLQETDKQHAPRP

SEQ ID NO: 16459 - protein, 150 aa, Oryza sativa
  Clone ID: TF_OSC420547j.C1.p6.fg
MSYAFNKLLPTTHFRQYAQRSRVRKLQYIAELERRVQALQTEGVEVSAEMDFLGQQNIMLDLENKALKQRLESLSQEHLIKRFQQEMFEREIGRLRSLFQQQQQQQHIPQQQGPTHSRSNSRDLDSQFANMSLKHGDPNSGRDAVPGLRI

SEQ ID NO: 16460 - protein, 857 aa, Oryza sativa
  Clone ID: TF_OSC400302j.C1.p17.fg
MAAAVAMRGSSSDGGGYDKVSGMDSGKYVRYTPEQVEALERVYADCPKPTSSRRQQLLRECPILANIEPKQIKVWFQNRRCRDKQRKESSRLQAVNRKLTAMNKLLMEENERLQKQVSQLVHENAHMRQQLQNTPLANDTSCESNVTTPQNPLRDASNPSGLLSIAEETLTEFLSKATGTAIDWVQMPGMKPGPDSVGIVAISHGCRGVAARACGLVNLEPTKVVEILKDRPSWFRDCRNLEVFTMIPAGNGGTVELVYTQLYAPTTLVPARDFWTLRYTTTMEDGSLVVCERSLSGSGGGPSAASAQQYVRAEMLPSGYLVRPCEGGGSIVHIVDHLDLEAWSVPEVLRPLYESSRVVAQKMTTAALRHIRQIAQETSGEVVYALGRQPAVLRTFSQRLSRGFNDAISGFNDDGWSIMGGDGVEDVVIACNSTKKIRSNSNAGIAFGAPGGIICAKASMLLQSVPPAVLVRFLREHRSEWADYNIDAYLASTLKTSACSLTGLRPMRFSGSQIIIPLAHTVENEEILEVVRLEGQPLTHDEALLSRDIHLLQLCTGIDEKSVGSSFQLVFAPIDDFPDETPLISSGFRVIPLDMKTLELIEAFGFKYSLGKIKQDGASSGRTLDLASSLEVGSATAQASGDASADDCNLRSVLTIAFQFPYELHLQDSVAAMARQYVRSIVSAVQRVSMAISPSQTGLNAGQRIISGFPEAATLARWVCQSYHYHLGVELLSQSDGDAEQLLKMLWHYQDAILCCSFKEKPVFTFANKAGLDMLETSLVALQDLTLDRIFDEPGKEALFSNIPKLMEQGHVYLPSGVCMSGMGRHVSFDQAVAWKVLAEDSNVHCLAFCFVNWSFV

SEQ ID NO: 16461 - protein, 71 aa, Oryza sativa
  Clone ID: TF_OSC401928j.C1.p5.fg
MSAARGGGRASSSAVEEELRALMEKRRAKMMLSNRESARMRKQRHLDDLTAQVAHLHRENVHVATALGLTT

SEQ ID NO: 16462 - protein, 855 aa, Oryza sativa
  Clone ID: TF_OSC400500j.C1.p14.fg
MAAAVAMRSGSGSDGGGGGYDKAGMDSGKYVRYTPEQVEALERVYAECPKPSSSRRQQLLRDCPILANIEPKQIKVWFQNRRCRDKQRKEASRLQAVNRKLTAMNKLLMEENERLQKQVSQLVHENAYMKQQLQNPSLGNDTSCESNVTTPQNPLRDASNPSGLLTIAEETLTEFLSKATGTAVDWVPMPGMKVDCQLLRFTLPASNDPGPDSFGIVAVSHGCRGVAARACGLVNLEPTKIVEILKDRPSWFRDCRSLEVFTMFPAGNGGTIELVYMQMYAPTTLVPARDFWTLRYTTTMEDGSLVVCERSLSGSGGGPSTASAQQFVRAEMLPSGYLVRPCEGGGSIVHIVDHLDLEAWSVPEVLRPLYESSRVVAQKMTTAALRHIRQIAQETSGEVVYALGRQPAVLRTFSQRLSRGFNDAISGFNDDGWSVMGGDGIEDVIIACNAKKVRNTSTSANAFVTPGGVICAKASMLLQSVPPAVLVRFLREHRSEWADYNFDAYSASSLKTSSCSLPGLRPMRFSGSQIIMPLAHTVENEEILEVVRLEGQALTHDDGLMSRDIHLLQLCTGIDEKSMGSCFQLVSAPIDELFPDDAPLISSGFRVIPLDMKTDGTPAGRTLDLASSLEVGSTAQPTGDASMDDCNLRSVLTIAFQFPYEMHLQDSVATMARQYVRSIVSSVQRVSMAISPSRSGLNAGQKIISGFPEAPTLARWICQSYQFHLGVELLRQADDAGEALLKMLWDYEDAILCCSFKEKPVFTFANEMGLNMLETSLVALQDLSLDKIFDEAGRKALYNEIPKLMEQGYVYLPGGVCLSGMGRHVSFEQAVAWKVLGEDNNVHCLAFCFVNWSFV

SEQ ID NO: 16463 - protein, 390 aa, Oryza sativa
  Clone ID: TF_OSC900303j.C1.p8.fg
MSRSPHLPPRCPPLGPQITRRDDSLFTQSCRFPSEDPFVGEPPCWLDDLLADSGKSHTLPPLRRACSDSDAILDVLTSFQSPIYPIDEGDPQPVGEAGESFNAAAEGGGSGAGIEGSCVYGPNSPRQKTRLTSSESSMVNAVLENVPSNPLQYLMIDATSGVNCNVGAANGTGDTGDAVCHADQEKSLKRKKVARRESHGVRLGGAKRQWEDGEGGAVLQEVKQRNGDESLTPIPEVVSEAGWWAVTGRSMGWRRSGQRSRVRKLQYIADLERTVDSLQNIGADLAVRVASLFQLRNALSMENKQLRRQITSLQQAKLIKDGQTQMLKKETERLKQLSVRHRRSRSVTSCFEANSFGGGDPSAINWQMLDMSKLSLNGGAVVPPRGGYGM

SEQ ID NO: 16464 - protein, 682 aa, Oryza sativa
  Clone ID: TF_OSC400397j.C1.p26.gm
MSQLKMLMDVTLHGMMWMKLLVRHTIFEVTMFQGELTIVLGINKLEPGQLALAAASDSDRSKDKHEDQKTLRRLAQNREAARKSRLRKKSRTVPSNSGQLQGIFISSSVDQTHSMSGNGALAFDMEYARWLEEHNRQINELRSAVNAHAGDNELRGVVDKIMSHYEEIFKQKGNAAKADVFHVLSGMWKTPAERCFLWLGGFRPSELLKLLSTQLEPLTEQQLSGIANLQQSSQQAEDALSQGMEALQQSLAETLAGSLGSSGSTGNVANYMGQMAMAMGKLGTLENFLRQVTLIWLSTPQWQYIGFFTVMPAYGLTCTGDPITSIGLWCDWLGYGECAGDDWHVIDCGADCHTSELVIENLKPRCISNARRRAVLRASSSPQWARPSHEKEQQRTDCIVTQKLQEYGTKLADGDELGRKMPQHQGREKMLALRREPTPPGYLPDGVYPVMASEKNIKVFQMGTHVEASIPFQTRAAAEHAWKLNGRAIYDGCCWLNIQWAQPSSSTPAAATPLVGITKELIANVLELKAMLKESNASKEVEDGRTKQKVAAVDLAVMAPVAMPLTQMSPPADSLVEQEMATQQKTVEGTTRTLPAVVPSSQFPPSEAGFSNSKEQEAAPAWSSEAGGMAWHEGGSAFCVKVEHSDGACCAQPGFASSHVLAVGLAGSTIAEDNGDLQMVLV

SEQ ID NO: 16465 - protein, 115 aa, Oryza sativa
  Clone ID: TF_OSC401427j.C1.p4.fg
MEANADADERRLRRKIFNRESARRSHARKQWHIDKLRARAGRGRGRRRLGAAGAEAVVWRAPEERPEAGAEASDGGREGKASCKPPGPAPPPLVARWRGQAPHPQSGARFSVWML

SEQ ID NO: 16466 - protein, 523 aa, Oryza sativa
  Clone ID: TF_OSC20620j.C1.p14.gm
MATNLRFASISFRTCPKMLFGNSENYSLGLQWLVFEGLGNAYSSLPLDDIKVLSIGIRARSLIPGFTVLREDVDKRAMGPNIERVVDVSISPPNDMELSFEEEEKCTHLNAQATNVLFSALSEDVFKTIMPLEDAYLIWTTLKERYDKSKCDGEDALRETSFGDCSTLSSHHDKSQVIISSDQEDHVFMGDDDDDDSVVDHLNKDTTMVIKLMRVIEKQQACLIKKNEEIKDLADEHKKLKGYNSSLIMRYEQLENEFACATNSIACVASLKKENQELKSQLEEITSKEKHMDHGLMGNAQPSQDNHESMVKKLEKGSTVACTKFYQENKSNNKRTPVAAASPPTGSGGGEDAAAAGPPGRHRLSFSPTRSGGGQESPLHATSRRRSLLMGRGSPAPPPRGRRGHEGETTGRGAGARPLDGGALTHGRRHAAVELELSLGGVISPNVTSFDLKAAVCSHGLFMIAPNHWDRTSRALVRPLRVTFDRTTFIAVCISRHPHVPLRCVPRFCRQCARCPLPARPDC

SEQ ID NO: 16467 - protein, 471 aa, Oryza sativa
  Clone ID: TF_OSC418822j.C1.p4.gm
EDEAEMASTRLSLELGKVGIQSSPPCSSSSSAGHPAMQPAAAATAAPGYGPRPRHMLTEAEKEAKRLRRVLANRESARQTILRRQAIRDELARKVADLSSQNETMKKEKDVVAIRTIKKAAVAEPMDTAPPAQQQAETAAAVAPPTTATPPSTAPQPSFLYTAAPAGVAPVPYVWGSWPPCGPTGYEPPPPLCLPPCAWYYPVVADPRVSSPPTSTYPQSYQEQPTSSPGGGTAEEDTDDDPCSLTLAIDVDKRSAPGAGGSAAGAGQHASISDREKATAAAEARKRRKELTKLKQMHGGGGGSRPGGGGEHCACPSLRGMPPPPPPQPQPTTTATTSANGGKVTPNLTMDAEGTRLLNLTVLQRLDPAVEDILITAAHVTLYDFNIDLNQWSRKDVEGSLFVVKRNTQPRFQFIVMNRRNTDNLVEDLLSDFEYELQPPYLLYRNAAQEVNGIWFYNQHDCEAVASLFGR

SEQ ID NO: 16468 - protein, 182 aa, Oryza sativa
  Clone ID: TF_OSC401058j.C1.p53.fg
MASPGVVCTTVTPTSSAGSDQVVAGGGEAARRPVAPAVMEERKRKRKESNRLSAQRSRARKQQQLDELAGQVAALRARNGALGLAAREAARRCAAVRAENELLRARSVELAARLDSLTDLAQCLHDAAAASSFAAAPPMMMAGAATAFPTGAVGAAAGFMMPQLPPPLLDATTMGMHCNYYY

SEQ ID NO: 16469 - protein, 366 aa, Oryza sativa
  Clone ID: TF_OSC401001j.C1.p60.fg
MASKAGGGGVARRGGGRMRSLGRQGSMYSLTLDEVQSQLGEPLHSMNLDELLRSVFPDGLAIADGAGATTSSQQHQPGSGLLRQGSITMPPELSKKTVDEVWKGIQAAPKRNAETGGGGGGGRRRRERQPTLGEVTLEDFLVKAGVVTQGSLKELSDVGNVDPVGRGVTATGTVDLAPGSHWIEQYKQQIASTDAHHHGQQGVQGAYFPNRLVPQPLNVGPGAILEPSYSDGQTSSGMIGGMSDSQTPGRKRGMSGDVADKLMERRQKRMIKNRESAARSRARKQAYTNELENKVSRLEEENVRLKRQKESDYLHYTRSNLVMENIEIHRSLINSNIIIWYDELYYFIGSVSSYNQEVFVMVIVCV

SEQ ID NO: 16470 - protein, 153 aa, Oryza sativa
  Clone ID: TF_OSC12168j.C1.p2.fg
MSSGTSSGSSQGTRSSRSEDDLNLQAQMEKKRKRRKESNRESARRSRMRKQQHLDELTSQVNQLKNQNQQLSMALSLTTQNLVAVQAQNSVLQTQELELQSRLCALTDILMCMNNTSATPTPTIPATTTSACDIFGASSWNQPPIDLYQYQCF

SEQ ID NO: 16471 - protein, 156 aa, Oryza sativa
  Clone ID: TF_OSC401981j.C1.p10.fg
MPLMHLLAPPAQAFVVAPPRVAPAFDGAAAPPREDDPAADQPPEREADADERRLRRKISNRESARRSRARKQRHLDELRARAERLRRCNRELAARGHAARGRAGLVRLANAWLRAEAAALTRRLAAARRAIALGQLYRPAAAAAAASGRSSRRSPR

SEQ ID NO: 16472 - protein, 548 aa, Oryza sativa
  Clone ID: TF_OSC411383j.C1.p7.fg
MGFFRRIAGMFGISRDDADHHPHHHHHDGAAGDSAAAAEVPQDKVVAAAAAAAAAGNVQRRGFSVQVPVPVERPGPGPVLVPCPQGDGGVQGFRWYTRKLRIDEDGDVADEFLDEVVPEISINNDSTPAGRYQVKYNTKSAALAMRKQISVIDGDICHSLEYQGRLRWNCQSLLAKGLQEFDMRVCLGASQECGSVEFLVDASFLNLSVLGCLMGTNDPGTPSKATKASEPEQSPATTSGTTAPVYPEWPGFQAYSAIPPHGFFPPPVAASPQAHPYMWGAQGVHPFNHYPMLANGNVETAGTAPGASEINGKNELGRTSGPSANGITSHSESGSESESEGSDANSQNDSHSKENDVKEDGSSQNGISHTALNQNMSMAPTQTGVVIGGVAPTTNLNIGMDYWGAAGSSPVPAMHGKASSGSVRGEQWDERELKKQKRKQSNRESARRSRLRKQNIMDSLIEAPKYLFQAECEELSVRADNLRAENSSLRAELERIKKEYEALLSHNASLKEKLEGNSDSIPYMNEQNDTNGTHQKQQDSDAQPNDAP

SEQ ID NO: 16473 - protein, 322 aa, Oryza sativa
  Clone ID: TF_OSC401520j.C1.p23.fg
MTPLPLARQGSVYSLTFDEFQSTLGGVGKDFGSMNMDELLRSIWTAEESHAVGAATTTTATTASVAAAEHAAVGAPPVQRQGSLTLPRTLSQKTVDEVWRDMMCFGGGGASTAPAAAEPPPPAHRQQTLGEITLKEFLVRAGVVREDMSVPPVPPAPTPTAAAVPPPPPPQQQTPMLFGQSNVFPPMVPPLSLGNGLVSGAVGHGGGGAASLVSPVRPVSSNGFGKMEGGDLSSLSPSPVPYVFKGGLRGRKAPGIEKVVERRQRRMIKNRESAARSRQRKQAYMMELEAEVAKLKELNDELQKKQDEMLEQQKNEGLGGSI

SEQ ID NO: 16474 - protein, 322 aa, Oryza sativa
  Clone ID: TF_OSC420174j.C1.p9.fg
MTPLPLARQGSVYSLTFDEFQSTLGGVGKDFGSMNMDELLRSIWTAEESHAVGAATTTTATTASVAAAEHAAVGAPPVQRQGSLTLPRTLSQKTVDEVWRDMMCFGGGGASTAPAAAEPPPPAHRQQTLGEITLEEFLVRAGVVREDMSVPPVPPAPTPTAAAVPPPPPPQQQTPMLFGQSNVFPPMVPPLSLGNGLVSGAVGHGGGGAASLVSPVRPVSSNGFGKMEGGDLSSLSPSPVPYVFKGGLRGRKAPGIEKVVERRQRRMIKNRESAARSRQRKQAYMMELEAEVAKLKELNDELQKKQDEMLEQQKNEGLGGSI

SEQ ID NO: 16475 - protein, 945 aa, Oryza sativa
  Clone ID: TF_OSC8882j.C1.p13.gm
MKFGRITPVVKFWYGKFYRGHTKDIIDVDLFWRSTVKEKDSELLGYKFRYKEGIKSKISLGSQISSAGFNLGFGHLALVLKVMAAAEGGGDQGTINAIVAHPKPSGASSLPPGSRLESELQAVLVLNQSVDGIHDQATGSRVLPSSGNHDGGLASNNLSSQGPTVFTEGEVVDEEEDAVEIEIEENEVQKAGQWTILARFYSLKFPNQSALFEDMRRAWRLRAEMSYKSLKDNLFIVSFNAEGDYNFVLQGDPWLHRGDALLVAEFNGLLNPSMVNLDTVPIWVRIYDLPLVMMNRARAGIRQDAKRYEDQPTRVDAFDGFDIREGKGEDSIDSQLADQTNMLHVSEVSSLGQKKGKDLVSKETSSIPSMEMIPAIRDLNVQQVSFGDGSTEEFGSPTKRKALPTTKSSGIVQQAVLEYGQRGAEETASSTRAMKRLKKGVEANTGVEDMEATSLGAAVKDPHQLRQKCLHYEIVWEREPEATQVIEEAWVVAGEKADLGDINKALAKVMTALRSWSRAKVKNVGRELEKARKKLAELIESNADRTDVYTADPNLNPETVTRLIQEKVTDIMNEKLCEDFTEDEISQAIFQIGPLKSPGPDGFPARFYQRNWGTIKADIIEVILNICISSRSEEDFIAWHPDKNEYEQAMFLMTLWRNWYVRNELIHGKSAPPTETSQRFIQSYVDLLFQIRQAPQADLGIGRDFSVLANIIHEARHLLVGERAAPPLAAALACPHGEQPDAKILPAATPPMSDDHSGGGGEQRQCRRGFAVDVVELGAALALADMAGAAVKPAMQLQLQPTAAQEEDEEMATTRLSLQLGNNVGSIIQSSSCSSSGSSAGLPAPPPPPPPATAYGTKPLHMLTEEEKEAKRLRRVLANRESARQTILRRQAIRDELARKVADLSTQNESMKKERETVMQEYLSLKETNKQLKEQAQHHLSLSLF

SEQ ID NO: 16476 - protein, 242 aa, Oryza sativa
  Clone ID: TF_OSC401982j.C1.p6.fg
MMKKCPSELQLEAFIREEAGAGDRKPGVLSPGDGAHDPKPTTSANHAPESDSDSDCDSLLEAERSPRLRGTKSTETKRIRRMVSNRESARRSRRRKQAQLSELESQQSIYDQVEQLKGENSSLFKQLTESSQQFNTAVTDNRILKSDVEALRVKVKMAEDMVARAAMSCGLGQLGLAPLLSSRKMCQALDMLSLPRNDACGFKGLNLGRQVQNSPVQSAASLESLDNRISSEVTSCSADVWP

SEQ ID NO: 16477 - protein, 278 aa, Oryza sativa
  Clone ID: TF_OSC900405j.C1.p4.fg
MDIEAFIHGGSGGGDADADHPLGIFSAADLSGFGFADSSTITGGIPNHIWPQSQNLNARHPAVSTTIESQSSICAAASPTSATNLNMKESQTLGGTSGSDSESESLLDIEGGPCEQSTNPLDVKRVRRMVSNRESARRSRKRKQAHLADLESQVDQLRGENASLFKQLTDANQQFTTSVTDNRILKSDVEALRVKVKMAEDMVARGALSCGLGHLGGLSPALNPRQACRVPDVLAGLDYAGDDPFTAGLSQPEQLQMPGGEVVDAWGWDNHPNGGMSK

SEQ ID NO: 16478 - protein, 383 aa, Oryza sativa
  Clone ID: TF_OSC401400j.C1.p16.fg
MGKGEVATRSKSQKSSATQNEQSTPTNPPTAYPDWSQFQAYYNPAGTAPMTPPGFFHPNVAPSPQGHPYMWGPQMMPPYGTPPPYAAMYAQGTPYQQAPMLPGSHPYNPYPGQSPNGTVQTPTSAGGTETDKSGKSKRKTPLKRSKGSLGNLDVVATKNKKAPAKPSASSSNEGSSHSESGSGSSSEGSSTNSKSGSRTKDGSEHGQGNDASNKGATAQSSAVEPVQASTGPVVLNPMMPYWPVPPPMAGPATGVNMGMDYWGTPTSVPMHNKVIAAPASAPSSNSRDVVLSDPAIQDERELKRQKRKQSNRESARRSRLRKQAEWEEVANRADLLKQENSSLKEELKQLQEKCNSLTSENTTLHEKLKELEGEKSNGNWYKE

SEQ ID NO: 16479 - protein, 174 aa, Oryza sativa
  Clone ID: TF_OSC420956j.C1.p1.fg
PPHHRRARSEVAFRFPDDLGLGGGADGGGFDEIGSEDDLFSTFMDMEKIAGADRDRAAETSSPPRPTKHRHSASFDGFAFGAGAGGPGPGLGKQQDGAGGVFSEVMEAKKAMSSEQLAELAAIDPKRAKRILANRQSAARSKERKARYITELERKVQTLQTEATTLSAQLTLFQ

SEQ ID NO: 16480 - protein, 154 aa, Oryza sativa
  Clone ID: TF_OSC401748j.C1.p3.fg
MANYHHQEYYQMAAAAAVAWPREPDSPQLSIMSGCSSLFSISTLRDDDDGGGVRLAGAALPATPVSLAGIAGGASTPGGDEVDMEVRQQSGGSGDDRRTIRMMRNRESALRSRARKRAYVEELEKEVRRLVDDNLNLKKQCKEGSGMREDIVCR

SEQ ID NO: 16481 - protein, 380 aa, Oryza sativa
  Clone ID: TF_OSC413557j.C1.p9.fg
MAHDEAVATQKIGKTTSPPKDQPTPCPFPDWSAVQAYYGPGVLPPTYFAPAIASGHAPPPYMWGPQPIMPPPFGTPYAAMYPHGGAYPHPLMPMMANPLSMEPAKSASSKEKGSNKKLKEVDGAAVSTGSGDSKKTMTSSGDYSAEGSSDVNDLKVGKTGRKRRLDDGAGAETSAAAKMENALPPSHILGSTAILPNHSFPAQVIRPSATNVANSRALGTPISPPPGVIVPSHTGVSTELLIKDERELKREKRKQSNRESARRSRLRKQAETEDLATQVESLTAENTSLRSEISRLSESSEKLRLENSALMGKLKDPAASTQAETSLQKTTTASSPRVVENFLSMIDNTNKTSVRHTEHAEPKLRQLLGSGPATDVVAAS

SEQ ID NO: 16482 - protein, 192 aa, Oryza sativa
  Clone ID: TF_OSC400718j.C1.p72.gm
MEIQLNTISAKDLARLVAPAQVPAKHFQMPARDVEAAAAGDEELGAASPLPLGGGDGRGHRAAAALPPDAEAAAAGDEELGVAFTPPSLSVACTRGGRGHQPPEREAEADADADERRFRRKISNRESACRSRARKQWHLDELRARAGWLRHCNCELAARGHAARGRAGLVHLTNVQLRAKAATPASPSPACR

SEQ ID NO: 16483 - protein, 189 aa, Oryza sativa
  Clone ID: TF_OSC400608j.C1.p15.fg
MALPPQAYFVPAAPPPPFQEATAALAAGDDATAALAVFELERILEEAAAAGGGGGNGSPSSGSDGCCYGLQGVAPAAEEERRRRRMVSNRESARRSRMRKQRQLSELWAQVEHLRGANRRLLDELNRALRGCADVRRENSRLRDEKAELAGKLQLLLPRQPAPEKNAADDQSSCSSEPCKNSTTTTAAE

SEQ ID NO: 16484 - protein, 400 aa, Oryza sativa
  Clone ID: TF_OSC400445j.C1.p27.fg
MTWHIQALPLAMPRHHPAWAPPPPFAETFPSSFLPKQNPSISDESAIFKHTHERQPTARDKNISIAISMDVEFFADLDLDALLASFSSSAAAAGSGVSGLFAPSPPHDAEAGSPESVSSRRPSPSREAALSEIERFLMEEGPAAEEGVGAEDFFDALLVDGGEEEEEEEGKGSEAGGSTDGDSGKENEVATPDAEKEDVEAEVDGDDPMSKKKRRQMRNRDSAMKSRERKKMYVKDLETKSKYLEAECRRLSYALQCCAAENMALRQSLLKDRPVGAATAMQESAVLTVCLSHNPDAPTVYLCHKPDAKGNLFLFAETLPLVSLLWLVSIVCLLPVPGLPNRNPVARSSAGRDLATVTGKKTSSEQQLEETLLLHGRRCKGSRARIKLDTGPFRLAAAAC

SEQ ID NO: 16485 - protein, 191 aa, Oryza sativa
  Clone ID: TF_OSC401980j.C1.p7.fg
MPLDFGLPDMDVGFGLFGVDAAAFGYDGVASDAAAGLSPVVGAGDGSGGGGDVLLYCDGGGGGGGGGEDGEEERRRRLRRKISNRESARRSRARRRQRVEELERAADELRAERRALASRLDATARRALAVRGANARHHAEAGVLRRRLGEAQRNAAVLIGLSRLLRSTANGAHGGAAPAQLSNGGVASLMT

SEQ ID NO: 16486 - protein, 270 aa, Oryza sativa
  Clone ID: TF_OSC422806j.C1.p2.gm
MGRSELRCTQSPRYSSPGLAALSAPSVAIRIPRLCRLVCFLSRIVRLGADECGGVRASDDLEQEFWRSLIAAMLSLHDAMPLDFGLPDMDVGFGLFGVDAAAFGYDGVASDAAAGLSPVVGAGDGSGGGGDVLLYCDGGGGGGGGGEDGEEERRRRLRRKISNRESARRSRARRRQRVEELERAADELRAERRALASRLDATARRALAVRGANARHHAEAGVLRRRLGEAQRNAAVLIGLSRLLRSTANGAHGGAAPAQLSNGGVASLMT

SEQ ID NO: 16487 - protein, 163 aa, Oryza sativa
  Clone ID: TF_OSC400354j.C1.p25.fg
MASSSGSGGSAVSAATAAAGGSSSAAEEELRALMEQRRAKRMLSNRESARRSRMRKQRHLDDLTAQVAHLRRENAHVATALGLTTQGLLAVDAENAVLRTQAAELAARLASLNDILSCINTNGAAAAAAAALTVAAATDPLLAFDSAAFDDLFRSSPELFQLC

SEQ ID NO: 16488 - protein, 164 aa, Oryza sativa
  unsure (1)..(164): unsure at all Xaa locations
  Clone ID: TF_OSC400354j.C1.p26.gp
MASSSGSGGSAVSAATAAAGGSSSAAEEELRALMEQRRAKRMLSNRESARRSRMRKQRHLDDLTAQVAHLRRENAHVATALGLTTQGLLAVDAENAVLRTQAAELAARLASLNDILSCINTNGAAAAAAAALTVAAATDPLLAFDSAAFDDLFRSSPELFQLCX

SEQ ID NO: 16489 - protein, 426 aa, Oryza sativa
  Clone ID: TF_OSC401664j.C1.p14.fg
MEGEPSRRLSLLDRCDDGSEDPVVPPRVPTILNLTSHHRLDRSKFLPLIHPTPARFISSTGSSFPPYSEPPPSAPMLELGSGFGPEDLYSFFPNHFFLMESISLPPYDVVDVPPVIPVALRSGRSNQGLPSKLPLIEGHRRSHSDIPFGYSQEHPQMPPVASVKPEVTTIKGHQLEDVAAAALKDMGIQAWSPSGSIDKEVKSSGAGSTTHHCRSLSVDSFMMGNLNFGVVGQQMSSPPLLTTEVNVGGGEPIGSTASPFAAELANVKFTEDEKKKIVMDKSLSEIVLTDPRRVKRILNNRASATKSKEKKMKHVGELQRKLQVLQSETTTLGAQVTVMQRNNNELVSQNNELKTRLQAMDQLAQLGDALTSRLAAEAQHLRAVVSEISDPNLPSGSHQQLSSDIDQLQQLLTQRQTSQIQHNQPQ

SEQ ID NO: 16490 - protein, 1809 aa, Oryza sativa
  Clone ID: TF_OSC401949j.C1.p30.fg
MDGRFPLPPASGGGRGHHRRAHSETFLRLPDADLLLDPEGDFSFSDLDFPSLSDDSPAISDPTPPPPPPMAATPAPAPRPPGGAHMRSLSLDTAFFEGFSLQGGGGGGGGGGSGGSGGHKRSGSMDGVNSPFEGESALSGGLPDYAKKAMPAERIAELALIDPKRAKRILANRQSAARSKERKIKYTSELERKVQTLQTEATTLSAQLTLLQRDTSGLTAENRELKLRLQSMEEQAKLRDALNEALREEVQRLKIAAGQAPNMNGNPFNGGLQQQIPPYYTQQQQQQQQMPYLGGHHAQQRHPSHQQSSSNGGQSLSGDSRCRESICGDGPRVSLRIRRRPWWSEIMRDTKARVQYTCGLTGGTSAVRPVAPRRCKGGQTGVSDKRQELISAVRPEIQSRSDRRQPGDQTGATPSVRLRSVEFEGTNNIKELRRDLFKKEYIKFEMKPGEALDDYLSRFNKILSDLRSVDSSYDVNYTQYEISHHFLNGLDMSIWKMKVTSIQESVDMSTLTLDSLYTKLKTHEMNILSRKVDSNSSVLVSSSTSLDVDSSSSKSSAFALFNAMSDDQLEQFVEEDLVLLSNRLSRAVTNLGRARGEDNGDEKTNDNKPKGTFKGRKIKENLKKAFDQVYTAFEPLSDVDGESGDEDKGNNISGVCFMARGELDSECEDNEVSALEEAINILSAKNMKCEKLYRKQEFIIESLNSEIARLKYLIPNDDDCTNCEVLMNEISKIRDVNAAHDLKNRSSLALSFALHTRTLDELCLTKKLLQKYQIAFHASLMFNMICAKKLKQPHDVLDCSTCTLNKLKLKDALGRVGYMEDVVKTNEVLSCPKCGKSKGVMVDSENCANLEKEVSYLKNSLQRFSDGVGARSGEILVKPDTNKTVFKSAGFVKVNEKFELKNVALVEDLKYNLLSVSQIVDEDFEVHFKKTGSKVFDSCGDSVLNISRYGRVFKADFDNPVSPVITCLVAKFDKDVMFWHRRLGHVGFDYLTRLSSLDLVRGLPKLKKDLDLVCTPCRHAKMVASSHAPIVSVMTDAPGHLLHTDTVGPARVQSVGGKWYVLVIVDDFSRYSWVFFMATKDKAFQHFRGLFLRLNLEFPGSLKRIRSDNGGEFKNSSFEQFCNERGLEHEFSSPRVPQQDGVVERKNRVLVEMTRTMLDEYHTPRKFWAEAVQGEDGHIFEYESDNDDDEVGSAGQTGRQADRTAGTPPVRPAHDVRSDRPGSSGSGTIDADQDGPPEITTSTSTDTERESTSEVAAPLHIQRRHLPEQIIGNIGERTTRSKVMTHDVCANSAFVASFEPKDVSLALTDESWINAMHEELENFEINKVWTLVEPPSRHNIIGTKWIFKNKQNEDGLIVRNKARLVAQGFTKVEGMDFDETFAPVARIEAIRLLLAFAASKGFKLHQMDVKSAFLNGFIQEEVYVKQPPGFENSDFPNHVFKLSKALYGLKQAPRAWYDRLKNFLLTKGFTMGKVDKMLFVLKHGDNQLFVQIYVYDIIFGCSTHTLVVKFAETMRREFEMTMMGELSYFLGLQIKQTPQGTFVHQTKYMKDLLRRFKMENCKPISTPIGSTTVLDPDEDGEAVDQKEYRSMIRSLLYLTASRPDIQFAVCLCARFQASPRASHRQAVKRIMRYLNHTLEFEIWYSTSSSICLSGYSDADFGGCRIDRKSTNGTCHFLGISLIAWSSRKQSSVAQSTAESEYVVAASCCSQILWLLSTLKDYGLTFGKVSLFCDNISAINIAKNPVQHSRTKHIDIRFHVLRDHVEKGDVILQFLDTKLQLADIFTKPLDSNRFAFLRGELGIIHPFGMI

SEQ ID NO: 16491 - protein, 281 aa, Oryza sativa
  Clone ID: TF_OSC401563j.C1.p10.fg
MQAYYAAAAAAAGGHPYAWPPPQSVPPMAGCAVPSAAAEGKSKRKTSGGPSGEDSSGSGDGGSEDSSERRDDADEKGLSPAKWRKLGHPDIEGETSQAAAMSEQNPVKAAPNLNIGMDIWSNSTMAAMPSGQVEVNAGTHLRRDKALSQMDERELKRERRKQSNRESARRSRLRKQERPTSFCHPPNYPVTFYGLTNQECEELSQKVTELTAVNSTLMTELDKLKKDCEDMEAENSQLMDEMVQSEGSSVIATLSVKIDTSKDRHGSSSQLNKHTNDDSKG

SEQ ID NO: 16492 - protein, 374 aa, Oryza sativa
  Clone ID: TF_OSC401580j.C1.p21.fg
MGNDEAVVTQKMGKAPSPPKDHPALSPYLDWSNMQAYYGPGILPPTFFSPGIAAGHTPPPFILGPQPLVPSAFGKPYAAIYPPGGAFSHPFMPLMVSPLSMEPAKSVNSKDSCSNKKMKEIDGAAVSTGSGNSEKTSGDCSLEGSSDGNNQKASGTPKKRSIDDRPKSGVETGGALTPNDRPSEQAALPNLCIPVTAIKPDVSTASDFRVIATPVTEVPTKDDKESKRERRKQSNRESARRSRLRKQAETEELARKVELLTAENTSLRREISRLTESSKKLRLENSALMEKLTETGPDEAQEVPPVKTKAQQARGVENFLSMIDKTGTPRSSGHMDHAIATPKLRQLLGSGLATDAVAARKPSNFDLLPLPAFG

SEQ ID NO: 16493 - protein, 469 aa, Oryza sativa
  Clone ID: TF_OSC401841j.C1.p34.fg
MAESRIFGGLKPTKSRLLGPTIRGPPPNGAATHAPRRILFSFSPESQWLGQSSTRACLPPLRSPCLPAPSAASPAYPRLASSAASASAPARLRSRITLPGGRSPVPPMDPAASAAESSSLSSRDVAAMPDSPPRRAARHRRAQSEILLGAALPDDIAFDADLGVVGEVGGGGGDDYEEEEEDDEEEEMEGAGGSRMFEMFLEAGGKLETPEPAAPLPPPPARPRHQHSMSMDGSTSLASSAAGVAGRMGADAKKAISDAKLAELALVDPKRAKRILANRQSAARSKERKMRYIAELERKVQTLQTEATTLSAQLSMLQRDTTGLTSENSDLKIRVQTMEQQVRLQDALNDRLRDEIQQLKVATGQVNANCGKVGNFGLSSFGGANPQGYQRSHIQSLLAAQQLQQLQIHSQHQQQQMHLQQHHHLSTVQQQLLQEGLPLPGDLKMKGIVAASHAQNAGASESHALRSEP

SEQ ID NO: 16494 - protein, 935 aa, Oryza sativa
  Clone ID: TF_OSC400123j.C1.p14.fg
MAEPDLLAPFADLPFPPGDDFPDFPTLGDDAFALEDFDLDDLDFDFDVDLFPPDAPPPVTTSSSSSAAGSPEAGTSSAGDGGSKNEESADSSSPSRSGSDGGGGKDGKDDEAKRRARLVRNRESAHQSRQRKKQYVEELEGKVKVMQATIADLTARISCVTAENAALKQQLGGAAGAGAAAPPPPMPMYPAVYPLPMPWIHPAYAMRGSQVPLVPIPRLKTQQPASTPEPPAKKARKTKKVAGVSLLGLLFLMMVCGCLVPAVNRMYGAAYTGEGAAIVPSHHGRILAVEGPQNSVSNGVDPKVPQNGSETLPALLYLPRNGKHVKINGNLVIKSIVASEKASSRLSNYGEKGSGNQGKEETSLAIPGYVAPLEAGEVMDSAKGMNELMALAPGDGSIYREDDGMLPQWFSEAMSGPMLNSGMCTEVFQFDLSPTTADANGIVPVYSGSVTNTSQNYTENLPSGPVQKVKNRRISYSEAIPLRGSTSNDTDHFKAPPKNHSQSHAGRKPVSSVVVSVLADPREASDRDGEGRISSNSLSRIFVVVLIDSVNVFAGWNTLLSVRLLEEIAALLARMQIVCWTAPAVGVTDMWVPPTSGPLHPYSLKSSKGAPFPPRPILVFLIAIFGFYVCYISFNQITLENRSEENSGEVQAEIHCRKPHLPHEELRYVHFPKPESYSRGECSCNLVRSFVLVSMQRSGSGWFETLLNSHPNISSNGEIFNRVDRRENISSILQTLDKLYNLDWFTSAAKNECTAAFGLKWMLNQGFMDHHDDIASYLNKKGVSVIFLFRRNTLRRLISVLANDYDRDAKQLNGTHKSHVHSKEEAEILAKFKPVLDVSNLIPNIRNAEKYIRDCLDHFNTTRHMILYYEDIVRNRNALFQVQEFLGVPVRKLVSRQVKIHTSPLPGLVRNWDDVSNKLNGTQYAHFLDGADYVR

SEQ ID NO: 16495 - protein, 165 aa, Oryza sativa
  Clone ID: TF_OSC1203j.C1.p11.gp
MDDGEIELSSQMMFPNPEIPTSLDDFLPSIRTTCTHTHTCNPPGPSATEHTHTCYHTHTRVFSSDDDSCGGDKAKPKKSRKPLGNREAVRKYRQKKKAHTAHLEEEVKRLRVINQQLVKRLQGQAALEVEVVRLRSLLVDVRSRINGALGSCPIQAQCGVDNVLG

SEQ ID NO: 16496 - protein, 748 aa, Oryza sativa
  Clone ID: TF_OSC1203j.C1.p5.fg
MPRRTDNAASANSVEPEKSEECLEFDDDEEEEVEEEEIEYEEIEEEIEEEEVEEDEDVVEEVEEVDEEEDEEEEEESDETEGVSKTKGVHQKDVTEKGKHAELLALPPHGSEVYVGGISSDVSSEDLKRLCEPVGEVVEVRMMRGKDDSRGYAFVNFRTKGLALKAVKELNNAKLKGKRIRVSSSQAKNKLFIGNVPHSWTDDDFRKVVEEVGPGVLKADLMKVSSANRNRGYGFVEYYNHACAEYARQEMSSPTFKLDSNAPTVSWADPKNNDSASTSQVKSVYVKNLPKNVTQAQLKRLFEHHGEIEKVVLPPSRGGHDNRYGFVHFKDRSMAMRALQNTERYELDGQVLDCSLAKPPAADKKDDRVPLPSSNGAPLLPSYPPLGYGIMSVPGAYGAAPASTAQPMLYAPRAPPGAAMVPMMLPDGRLVYVVQQPGGQLPLASPPPQQAGHRSGSGGRHGGSGGRYGGGGGSSGSSRPEECVSETRLYMRILPVSQSAESDGALYRQFTPVSHMDYEISGPESEVDSEVWLGWVAQRQIPTSLDDFLPSIRTTCTHTHTCNPPGPSATEHTHTCYHTHTRVFSSDDDSCGGDKAKPKKSRKPLGNREAVRKYRQKKKAHTAHLEEEVKRLRVINQQLVKRLQGQAALEVEVVRLRSLLVDVRSRINGALGSCPIQAQCGVDNVLGCDGMAQCFAGKPELGVRQSCAPSTVNCHISSDSGQNLVVPHALSPSDVIGSFMVSSTSKDE

SEQ ID NO: 16497 - protein, 478 aa, Oryza sativa
  Clone ID: TF_OSC900200j.C1.p21.fg
MEFGNGGSSSSERRAAAEGATLARQGSVYSLTFDEFQSALAGGGGGGGGGSGFGKDFGSMNMDELLRSIWTAEESQAMASASGSAAGVGVAVGAPPTSLQRQGSLTLPRTLSAKTVDEVWRNLVRDEPPPVGAADGGDMPPQRQSTLGEMTLEEFLVRAGVVRENPPAAPPPVPPPMPPRPVPVVPKTTAFLGNFPGANDAGAAALGFAPLGMGDPALGNGLMPRAVPVGLPGAAVAMQTAVNQFDSGDKGNSDLSSPTEPMPYSFEGLVRGRRNGGGVEKVVERRQRRMIKNRESAARSRARKQAYTLELEAEVQKLKEMNKELERKQADIMEMQKNEVEEMIKDPFGRRKRLCLRRTLTGPWPFTVLHPGLVLWDGTLDFCCRGARTRVSSRNLVSMLSDAGLRQNDVASRGEDWRHARCGRRGFAHACPRSEIQGRNPRYALQIHSHHSKIQGGLAISSDGTAAATRVPDEQGGA

SEQ ID NO: 16498 - protein, 389 aa, Oryza sativa
  Clone ID: TF_OSC22910j.C1.p1.fg
MELPADGSALARQGSIYSLTFDEFQSALGSAEKDFGSMNMDELLRNIWTAEESQAIAPAAAAASAAAVVGDAQQQQQPIQRQGSLTLPRTLSQKTVDEVWRDIMGLGGSDDEDPAAAAAAAAPAQRQPTLGEMTLEEFLVRAGVVREDMGQTIVLPPQAQALFPGSNVVAPAMQLANGMLPGVVGVAPGAAAAMTVAAPATPVVLNGLGKVEGGDLSSLSPVPYPFDTALRVRKGPTVEKVVERRQRRMIKNRESAARSRARKQAYIMELEAEVAKLKEQKAELQKKQVEMIQKQNDEVMERITQQLGPKAKRFCLRRTLTGPCCCICSVCCCCVDMSSRLQFSDSVLYPSLRGFSFSDLHFKDKEERLISQMGEKRGNGLAKNIFGRL

SEQ ID NO: 16499 - protein, 224 aa, Oryza sativa
  Clone ID: TF_OSC416339j.C1.p7.fg
MDDVPSQLLFSHPEVPDSFDDFLNNITTCTHTHTCNPPGPSATMHTHTCLHTHTQVFASGSGEDDIKEDLTKTRRPLGNREAVRKYREKKKAHAAFLEEEVKKLRAANQQLLKRLQGHAALEAEVIRLRSILLDVRGKIDMEIGTFPYQKPCSVGSVACTDPGMCFNGNSEIGGVWEECSRPVGADRMIDKDGSMSQEIDIPGPVHSISMDVVGSLVTSASLSE

SEQ ID NO: 16500 - protein, 269 aa, Oryza sativa
  Clone ID: TF_OSC400505j.C1.p8.fg
MSCHGGGGGGGEGALSRQGSVYSLTLNEVESHLGEPLRSMNLDDLLRTVLPAAAAAAETAGRKTVDEVWRDIQGASTGRHHATPMGEMTLEDFLSRAGVAVDGAASAAGAHWLRGHYPPPPPPTTTTLQYVGGSGAVVDGVYNRVDGHGVAGFLSQVGVAGRKRGGGVDGVVEKTVERRQKRMIKNRESAARSRARKQAYTNELENKISRLEEENQRLREHKAVADFSTFPSCVDFLKAFLTQKLEPVMQIVPQPEPKQQLRRTTSASF

SEQ ID NO: 16501 - protein, 722 aa, Oryza sativa
  Clone ID: TF_OSC403595j.C1.p10.fg
MPRTDNAASANSVEPDKSEECLEFDDEEEEVEEEEIEYEEIEEEIEEEEEVEEDEDVVEEVEEVDEEEDEEEDEESDETEGVSKTKGVHQKDVTEKGKHAELLALPPHGSEVYVGGISSDVSSEDLKRLCEPVGEVVEVRMMRGKDDSRGYAFVNFRTKGLALKVVKELNNAKLKGKRIRVSSSQAKNKLFIGNVPHSWTDDDFRKAVEEVGPGVLKADLMKVSSANRNRGYGFVEYYNHACAEYARQEMSSPTFKLDSNAPTVSWADPKNNDSVSTSQVKSVYVKNLPKNVTQAQLKRLFEHHGEIEKVVLPPSRGGHDNRYGFVHFKDRSMAMRALQNTERYELDGQVLDCSLAKPPAADKKDDRVPLPSSNGAPLLPSYPPLGYGIMSVPGAYGAAPASTAQPMLYAPRAPPGAAMVPMMLPDGRLVYVVQQPGGQLPLASPPPQQAGHRSGSGGRHGGSGSRYGGGGGSSGSSRPEEFVSETRLYMRIYQYFPISQIAESEEALYRQFTSVSHMEYEISGQESEVDSEVWLGWVAQRQTPTSLDDFLPSIRTTRTHTHTCNPPGPSATAHTHTCYHTHTHVFSSDDDSCGGDKAKPKKGRKPLGNREAVRKYRQKKKAHTAHLEEEVKRLRAINQQLVKRLQGQAALEAEVVWLRSLLVDVRSRINGALGSYPFQAQCGVNNVLGCDGMAQCFAGKPELGERRICTPSVMNCHISPDS

SEQ ID NO: 16502 - protein, 426 aa, Oryza sativa
  Clone ID: TF_OSC400780j.C1.p52.fg
MNGGIGDALMQPQHVQVMSSSLPMVASTFVAEPAAAANKPRAAGLPPTPPQVFAAQRAAAAAGGDVCMEESAQGGGGGLPPRKAHRRSSSDVPFGYLAGQHQLLPPKVEAGWGHLGAGAGGAAAADDLFNAYLNLEGLDGLNSSDDRHDEGDSRGSSIKTNGADSSENESEECADDTRGGIRLWSADGGERREGVKRNAAGEPATAPLARHARSLSMDSLIGKFNFTAGTAAAAGNGVALGPNRFSLEFGSGEFTPSEMKKIMADEKLAEMALADPKRVKRVLANRQSAARSKERKMRYIAELEQKVQILQSEATNLSAQLTMMQRDSAGLATQNNELKFRLHAMEQQAQLRDALNEALTTEVQRLKLATAELGDSCSSSSLAQQIQLNAQNQMFQLQQQQATQIPFYQLQQSQQNGAAKNNESKE

SEQ ID NO: 16503 - protein, 390 aa, Oryza sativa
  Clone ID: TF_OSC417322j.C1.p2.fg
MGSSGADAPTKTSKASAPQEQQPPASSSTATPAVYPDWANFQGYPPIPPHGFFPSPVASSPQGHPYMWGAQPMIPPYGTPPPPYVMYPPGVYAHPSMPPGAHPFTPYAMASPNGNADPTGTTTTAAAAAAGETDGKSSEGKEKSPIKRSKGSLGSLNMITGKNSTEHGKTSGASANGAISQSGESGSESSSEGSEANSQNDSHHKESGQEQDGEVRSSQNGVSRSPSQAKLNQTMAIMPMTSSGPVPAPTTNLNIGMDYWANTASSTPAIHGKATPTAAPGSMVPGEQWVQDERELKRQRRKQSNRESARRSRLRKQAECEELAQRAEVLKQENTSLRDEVNRIRKEYDELLSKNSSLKEKLEDKQHKTDEAGVDNKLQHSGDDSQKKGN

SEQ ID NO: 16504 - protein, 274 aa, Oryza sativa
  Clone ID: TF_OSC400189j.C1.p8.fg
MASSRVMAAAAASSSSSPPPPPPAAAAAGGAADLARFRSTSSGIGSMNMDDILRNIYGEAAPPPGAAGSAPAPPPAGEAAGAPVAEVAARRTAEEVWKEISSSGGLSAPAPAPAAGAAGRGGGPEMTLEDFLAREDDPRATAVEGNMVVGFPNVTEGVGTAGGGRGGGGGGRGRKRTLMDPADRAAMQRQKRMIKNRESAARSRERKQAYIAELEAQVAELEEEHAQLLREQEEKNQKRLKEKWHVFMQIKEQAVAVVIRKKTQDLRRTNSMEW

SEQ ID NO: 16505 - protein, 163 aa, Oryza sativa
  Clone ID: TF_OSC400993j.C1.p66.fg
MASGENNVEEELRKTRKPLGNREAVRKYREKKKAHAAFLEEEVKKLRTTNQQLLRRLQGHISLEAEVVRLRALLFDIRGKIDAEIGTFPFQKQCSFGSVTCTDHSPCFNTSTEVAVREESSRPTIVDCGIDGTGIISHELDIPKMVNSVDVIPSFVNSASLTE

SEQ ID NO: 16506 - protein, 629 aa, Oryza sativa
  Clone ID: TF_OSC414158j.C1.p8.gm
MEDGTEDAGAAGCRCGIPERKWRGGLLSLTARQKSLFSLRHATIKYVHSSARNRVDRARPCAQQNATTTTTASPTPHLTSLHHRRACVMNTTSANELMMHRHVQAAPYAAAPQQQGGKQRAPGLPPTPPPPPAAASSHSSHGDVCMDDTARGGLLPPRKAHRRSRSDVPFGYFQPLPPPSPKMEAGGGWALPGCGGAGDVDLLNAYMSLEGMGGADGLNNSDGDSRGSSMRTNGADSSENESEDYVGADSQALLWGGAGGGEAAGKKRRNNAAGEKAARHARSLSMDSLMGKLSFAANGEPAKFSLEFGSGEFTPAEMKRIMADEKLAEMALADPKRSAARSKERRMRYIAELEQKVQILQTEATTLSAQLTLLQRDSSGMATQNNELKFRLQSMEQQAQLRDALNEALTAEVQRLKLAANEVCDTSSSSNLAHQIQLRCQNQMLDLHKQQQQQSPAPPSPSPSLLLNLLAATVPPLDDRADNDEKAVLAPTLSCADLVRGDGSRAAAGGDARGGGGGGRVAGSSPLLSGSGAGGQAPAPGSEAAGARGAGRRWRKAAGTELAEGAAAAAAAVPPRSAPLGRIWRVAAVGNGGGGVATMVATVGRRQVAMAVSAGSGRRQQLATTTVVW

SEQ ID NO: 16507 - protein, 146 aa, Oryza sativa
  Clone ID: TF_OSC412577j.C1.p14.fg
MERAAGTGSGGDDDELVLPPASFQDGLPSSRSYPSCIGGGSAAAASASLERELLYRAELHQQQLGGGGGVERRKRRAMKNRESAERSRARKQAYLQELEQEVRLLRAENAALRHQCHQLKAAAAEAEAEAAAAAAAAKKPTSSATF

SEQ ID NO: 16508 - protein, 324 aa, Oryza sativa
  Clone ID: TF_OSC18922j.C1.p1.fg
MAQLPPKIPTMATAWPEFGGGHHHHAAHGHHHQRSPSMGAFLAAPLPPFPLPPPAPANGGAQQQQQQQQHQPSWVDEFLDFSATKRGAHRRSVSDSVAFLDPVSDDNAGVGAHDFDRLDDDQLMSMFSDDLQPPPPQQQPAAPAASASSPSDHNSMNDEKQDKGETDEAQSECDGATPGQPASPATVDPKRVKRILANRQSAQRSRVRKLQYISELERSVTSLQTEVSALSPRVAFLDHQRSLLTLGNSHLKQRIAALAQDKIFKDAHQEALKKEIERLRQIYHQQSLKNAESQPADAAPVRGRDNADLIGSEGAAAAAPCPHS

SEQ ID NO: 16509 - protein, 612 aa, Oryza sativa
  Clone ID: TF_OSC400710j.C1.p6.fg
MDLKDGGGSERRGAAAGAGAGAAPLARQGSIYSLTFDEFQSTLGGMGGGLGKDFGSMNMDELLRSIWTAEESQAMASASAAAAAAEGGLQRQGSLTLPRTLSVKTVDEVWRDLEREASPGAAAADGGGGGGEQQQPRRQPTLGEMTLEEFLVRAGVVRENTAAAAAMVAAAAAPPVAPRSIPAVNNSSIFFGNYGGVNDAAAAAAGAMGFSPVGIGDPTMGNRLMSGVAGIGGGAITVAPVDTSVGQMDSAGKGDGDLSSPMAPVPYPFEGVIRGRRSGGNVEKVVERRQRRMIKNRESAARSRARKQAYTMELEAEVQKLKEQNMELQKKQEEIMEMQKNFFPEMQKNQKLFSVGRDGVHYSATKCTKYTISTEKVMITLIHGKQVLEAVNNPYGQKKRCLRRTLTGPCFWFDSEGCIMSEEFMPKMINMGSHLTRKNKPDQSDTTVEFHPRPDVLLQGAGEGLVFLLGGQVNCIGLQDSTESRPENDTVLVQIQGPATVSSGSVTVQAGPNCRAKEEPIRDTNHWRQHPGVPYAPGHGEPTPSLLGLRDTQHCPFHGQFQKQFFPPRSSSGNQRRPMADLSPDWGRFGLDWDCGVTSARTFGNDRDGTAF

SEQ ID NO: 16510 - protein, 423 aa, Oryza sativa
  Clone ID: TF_OSC401035j.C1.p16.fg
MQLKCSERLVSLKASVLHTVDDTMWLKLHRRRNPEGYDMPSDLDQALLLYFDGQEQDKPSTQEEPHKPLNFVKETLNIFPSQPMDGEPTPTPKKEGGSGSGGAMAASASSELKGPKTPDPKTLRRLAQNREAARKSRLRKKAYIQQLETGRIRLAHLEQEIQFTRAQGAFCGAGILSPDAALFNLEYERWQEAHHQVISRLRAAVEEHRPDGELQPHVDEAMSHYGVLMAHKARLVGADPLHLLSGLWKGAVEQCFLWIGGFRPSELIKVVVRHVEPLTEQQLAAVYSAQQAARQEEDALDGGLQALLRSLSDVVSSSDAPSSSQQTPPVMYHPSAAAAMAAASFMGQYGSYSNLQLAMDKLANLAIFLRQADEERMRTLHALRRMLTVRQAARCFVAVDDYFGRLRALALFWTTTRPHPAAG

SEQ ID NO: 16511 - protein, 195 aa, Oryza sativa
  Clone ID: TF_OSC5587j.C1.p1.fg
TLNIFPSQPMDGEPTPTPKKEGGSGSGGAMAASASSELKGPKTPDPKTLRRLAQNREAARKSRLRKKAYIQQLETGRIRLAHLEQEIQFTRAQGAFCGAGILSPDAALFNLEYERWQEAHHQVISRLRAAVEEHRPDGELQPHVDEAMSHYGVLMAHKARLVGADPLHLLSGLWKGAVEQCFLWIGGFRPSELIK

SEQ ID NO: 16512 - protein, 354 aa, Oryza sativa
  Clone ID: TF_OSC900100j.C1.p15.fg
MNREKSPIPGDGGDGLPPQATRRAGPPAAAAAAEYDISRMPDFPTRNPGHRRAHSEILSLPEDLDLCAAGGGDGPSLSDENDEELFSMFLDVEKLNSTCGASSEAEAESSSAGAAAAVAAAEELVGASPGTEGMSSAEAKKAVSAAKLAELALVDPKRAKRIWANRQSAARSKERKMRYIAELERKVQTLQTEATTLSAQLALLQRDTSGLTTENSELKLRLQTMEQQVHLQDALNDTLKSEVQRLKVATGQMANGGGMMMNFGGMPHQFGGNQQMFQNNQAMQSMLAAHQLQQLQLHPQAQQQQVLHPQHQQQQPLHPLQAQQLQQAARDLKMKSPMGGQSQWGDGKSGSSGN

SEQ ID NO: 16513 - protein, 301 aa, Oryza sativa
  Clone ID: TF_OSC900383j.C1.p7.fg
MKRGGAGVGGGGGGGDPGAYAAVLKTKLDLYCAAVAKSMEAKLQESSLGYLNLQASDTSQLVSQDSFNGYGSTRVTNSNAIHEDDDQGKPANSGTSKEQSDDDGDLEEDTDPVNAKRTRRMLSNRESARRSRKRKQAHLNDLESQVSQLRSENASLQKRLSDMTQKYKQSTTEYGNLQDDMNAMRRKVNIAEEAVRRVTGIGLQLFTTSEMPASSMPVSSGVSDAASAAAAAALVEDDWTNCSLPDEAIPVPSAAMALRSPSVRRVASLENLQKRIHAGDVTHFEAASALSLPEATACDNK

SEQ ID NO: 16514 - protein, 283 aa, Oryza sativa
  Clone ID: TF_OSC3436j.C1.p5.gm
MGGCEVNLERHGLVPVGTGSGRDTLCDVSSFTVRLHRLFGVIFLNDCRDCVTVFVSSASSRTLLPDFGYNDHGYSTHGFINYGSLAPFALATLTTQRAGNHLFKYGDLMVTVTEATYGDLMVTVTEATATSKKVQVQGAAMANYHHQEYYQMAAAAAVAWPREPDSPQLSIMSGCSSLFSISTLRDDDDGGGVRLAGAALPATPVSLAGIAGGASTPGGDEVDMEVRQQSGGSGDDRRTIRMMRNRESALRSRARKRAYVEELEKEVRRLVDDNLNLKKQCKE

SEQ ID NO: 16515 - protein, 409 aa, Oryza sativa
  Clone ID: TF_OSC402805j.C1.p29.fg
MASHAGGSGGGGGGSGRDAGSAQRGPMQGLARQGSLYGLTLNEVQSQLGEPLLSMNLDELLKSVFPDGADLDGGGGGGGIAGQSQPALGLQRQGSITMPPELSKKTVDEVWKGIQDVPKRGAEEGGRWRRERQPTLGEMTLEDFLVKAGVVTDPNDLPGNMDVVGGAAAAAAGTSDLNAGAQWLQQYHQQALEPQHPSIGAPYMATHLAPQPLAVATGAVLDPIYSDGQITSPMLGALSDPQTPGRKRCATGEIADKLVERRQKRMIKNRESAARSRARKQAYTNELENKVLRLEEENERLKKQKPTFILSSKVSRKQVTKAMRSATICVLCICILMILQCFASISAVDLGDAAASASGGEGLIRPRKLLQNAPAARSPPSRSAAAVEVEVNASLGKQKPSSKSNPRQN

SEQ ID NO: 16516 - protein, 425 aa, Oryza sativa
  Clone ID: TF_OSC419671j.C1.p6.fg
MERVFSVEEISDPFWVPPPPPQSAAAAQQQGGGGVASGGGGGVAGGGGGGNAMNRCPSEWYFQKFLEEAVLDSPVPNPSPRAEAGGIRGAGGVVPVDVKQPQLSAAAAAAATTSAVVDPVEYNAMLKQKLEKDLAAVAMWRASGTVPPERPGAGSSLLNADVSHIGAPNSIGGNATPVQNMLSGPSGGSGSQLVQNVDVLVKQPTSSSSREQSDDDDMEGEAETTGTARPADQRLQRRKQSNRESARRSRSRKAAHLNELEAQVSQLRVENSSLLRRLADVNQKYNDAAVDNRVLKADVETLRAKVKMAEDSVKRVTGMNALFPAASDMSSLSMPFNSSPSEATSDAAVPIQDDPNNYFATNNDIGGNNNYMPDIPSSAQEDEDFVNGALAAGKIGRTASLQRVASLEHLQKRMCGGPASSGSTS

SEQ ID NO: 16517 - protein, 461 aa, Oryza sativa
  Clone ID: TF_OSC400878j.C1.p1.fg
MEHVFAVDEIPDPLWAPPPPVQPAAAAGVDDVGAVSGGGLLERCPSGWNLERFLEELDGVPAPAASPDGAAIYPSPMPAAAAEAAARWSRGYGDREAVGVMPMPAAALPAAPASAAMDPVEYNAMLKRKLDEDLATVAMWRELLGHIPLEDEIILVEKKKLLYWNLASGAIHSESPLGNKTSLSIVGSILSSQKCIEGNGILVQTKLSPGPNGGSGPYVNQNTDAHAKQATSGSSREPSPSEDDDMEGDAEAMGNMILDEEDKVKKRKESNRESARRSRSRKAARLKDLEEQVSLLRVENSSLLRRLADANQKYSAAAIDNRVLMADIEALRAKVRMAEESVKMVTGARQLHQAIPDMQSPLNVNSDASVPIQNNNPMNYFSNANNAGVNSFMHQVSPAFQIVDSVEKIDPTDPVQLQQQQMASLQHLQNRACGGGASSNEYTAWGSSLMDANELVNMELQ

SEQ ID NO: 16518 - protein, 170 aa, Oryza sativa
  Clone ID: TF_OSC900418j.C1.p13.fg
MQHDAISNIAYHPSMDFTSFFLPQTDAYSHDLSALLDMAVVDPYISCNGSSITMIPVTEDEANAQPMNHGNDERKKRRLVSNRESARRSRVRKQRRLDELSSQVSELRDTNQRLLVELNHMISKHARIVRENSQLREEASDLQRKLSEMKMEDAEVAAAAAAAPRTLEVA

SEQ ID NO: 16519 - protein, 261 aa, Oryza sativa
  unsure (1)..(261): unsure at all Xaa locations
  Clone ID: TF_OSC400070j.C1.p5.np
EAAAAVRSLEWEVLLATNSLGSLVVDGADYDGGIDTFFLDDADDVLFGQLADEPPAAKGARAAAKAAVESLPTVVVDAARGDTQCAVCKDGMEAGERARRLPCAHLYHDGCILPWLAIRNTCPLCRHELPTDDPEYENWKARRAAPAAMAMATGTASLGNLAEERRRRRMISNRESARRSRMRKQKQLSELWAQVVHLRSTNRQLLDQLNHVIRDCDRVTHENCQLRDEQAKLQKQYFLGWHRHXGIGGNDECCDWXRRES

SEQ ID NO: 16520 - protein, 299 aa, Oryza sativa
  Clone ID: TF_OSC421842j.C1.p10.fg
MKKCPSELNFEAFFHGERGEDDADAAADQKPGGGPHPPPFAMFSAADLSSFGFADSVTQSTITGVIPNHIWPQSQSLNARHPAVYTIESQSSICAAASPTSATTLNMKESQTLGGTSGSDSDSESLLDIEGGPCEQSTNPLDVKRMRRMVSNRESARRSRKRKQAHLADLETQVDQLRGENASLFKQLTDANQQFTTAVTDNRILKSDVEALRVKVKMAEDMVARGALSCGLGHLGGLSPALNPRQGACRVPDVLTGLDYAGDDPFTGLSPPEQVQMPGGGEVGDAWGWDNHSNGAMSK

SEQ ID NO: 16521 - protein, 174 aa, Oryza sativa
  Clone ID: TF_OSC401561j.C1.p22.fg
MAYQSFGAVDLAASFFFSSSSSSPQPGLVGVHGDRFLGGGGGDGGDGGSSYDGGGDGGAASGKGTRRDERKERRLASNRESARRSRVRRRRQLDELSSHVAELRAANHRLAVELNRAAARHAQMARENARLAEEARALRERLPLRGGGGGGGDGEAEEEAGGGCGAEAILAPMD

SEQ ID NO: 16522 - protein, 272 aa, Oryza sativa
  Clone ID: TF_OSC3427j.C1.p1.fg
AAAPWNSYFDDILKDTEHHACTHTHTCNPPVHDLSHTHTCVHVHTKIVSAPSDTPSDAAETAESPTENNASKKRPSGNRAAVRKYREKKKAHTASLEEEVVHLRALNQQLMKKLQNHATLEAEVSRLRCLLVDIRGRIEGEIGAFPYQRPVKNIDLVSSVDQGSYLGGAQVMNSCDFRCADQMYCSPGMQVRTMGEDGAVSGQVLGQGACDIASIQCQGAKSGSAKLPVCGAMEHGYYGIPKAVRRCQGVRRPLRLTRKLEEKGQKQVINPS

SEQ ID NO: 16523 - protein, 187 aa, Oryza sativa
  unsure (1)..(187): unsure at all Xaa locations
  Clone ID: TF_OSC3427j.C1.p1.gp
AESPTENNASKKRPSGNRAAVRKYREKKKAHTASLEEEVVHLRALNQQLMKKLQNHATLEAEVSRLRCLLVDIRGRIEGEIGAFPYQRPVKNIDLVSSVDQGSYLGGAQVMNSCDFRCADQMYCSPGMQVRTMGEDGAVSGQVLGQGACDIASIQCQGAKSGSAKLPVCGAMGTMPVGCMPNSEKKX

SEQ ID NO: 16524 - protein, 1150 aa, Oryza sativa
  Clone ID: TF_OSC407343j.C1.p12.gm
MDDGDLDFSNPDTFLCPAVGGADPDGSCSMDSYFDDILKDTEHHACTHTHTCNPPVHDLSHTHTCVHVHTKIVSAPSDTPSDAAETAESPTENNASKKRPSGNRAAVRKYREKKKAHTASLEEEVVHLRALNQQLMKKLQNHATLEAEVSRLRCLLVDIRGRIEGEIGAFPYQRPVKNIDLVSSVDQGSYLGGAQVMNSCDFRCADQMYCSPGMQVRTMGEDGAVSGQVLGQGACDIASIQCQGAKSGSAKLPVCGAMEHGYYGIPKAVRRCQGARTGSQPSEPQVPRIGRQRPPPRSRSTSSSPRRPVKYCHVEDAPPEPSDLPRGAIAPAWTGRTGSPAKKLQVNADDSTDELVDPPKVEEKIGGVPHGLSTDSEVVQREAESISRKTLRSSAEKFEFQAEVSRLMDIIINSLYSNKDIFLRELISNASDALDKIRFLALTDKEVLGEGDTAKLEIQIKLDKEKKILSIRDRGIGMTKEDLIKNLGTIAKSGTSAFVEKMQTGGDLNLIGQFGVGFYSVYLVADYVEVISKHNDDKQHVWESKADGSFAISEDTWNEPLGRGTEIRLHLRDEAKEYVEEDKLKDLVKKYSEFINFPIYLWATKEVDVEVPADEDESSESSEEEESSPESTEEEETEESEEKKPKTKTVKETTTEWELLNDVKAIWLRSPKEVTEEEYTKFYHSLAKDFGDDKPLSWSHFTAEGDVEFKALLFVPPKAPHDLYESYYNSNKSNLKLYVRRVFISDEFDELLPKYLSFLKGLVDSDTLPLNVSREMLQQHSSLKTIKKKLIRKALDMIRKLAEEDPDEYSNKDKTDEEKSAMEEKKGQYAKFWNEFGKSVKLGIIEDATNRNRLAKLLRFESTKSEGKLASLDEYISRMKPGQKDIFYITGSSKEQLEKSPFLERLTKKNYEVIYFTDPVDEYLMQYLMDYEDKKFQNVSKEGLKLGKDSKLKDLKESFKELTDWWKKALDTESVDSVKISNRLSDTPCVVVTSKYGWSANMEKIMQSQTLSDASKQAYMRGKRVLEINPRHPIIKELRDKVAQDSESESLKQTAKLVYQTALMESGFNLPDPKDFASSIYRSVQKSLDLSPDAAVEEEEEVEEAEVEEKESSNIKEEAEPSSYDKDELAAMFISLTVVPCPCREYYLIS

SEQ ID NO: 16525 - protein, 357 aa, Oryza sativa
  Clone ID: TF_OSC400458j.C1.p48.fg
MGAYDRPPPVGMWSHEQFKVDNGQATSASTIMEAEMKFENRLEEIPQVVLEEGRNVDQEASKPPDKVLRRLAQNREAARKSRLRKKAYIQQLETSRLKLAQLEQELQRARQQAVYANGSLREPNLGFTGPIDPGALGFEIKYSHWVDEQNRNTGELRNALLQGQTTDQDLELKLLVEAGLDNYNRLFEMKEEAANSDVFYIMSGMWKTPTERFFLWIGGFRPSEVLKNLRPQLEPLTDKQVVEVGGLQQTSMQVEDALSQGMDKLKQTIADSLTAADPFDSPEAYMVHMANAVEQLRSLVQFVTQADHLRQQTLQEMHRILTTRQAARGLLALGDYFQRFRALSSLWAARPRDSGIS

SEQ ID NO: 16526 - protein, 416 aa, Oryza sativa
  Clone ID: TF_OSC411284j.C1.p12.fg
MAPSSLLIIFFLLPTSRSSALQQHGVAVVGMAAHQGMAAATAADRFCLPRMAAAAAAASQVENWGDSGVIVSSPFTDDTSTDLDDSADKHHLHALVGGGDGGDDAGEQRGADSSAVSKERRGDQKMQRRLAQNREAARKSRMRKKAYIQQLESSRSKLMHLEQELQRARQQGIFIATGGSGDHGHSIGGNGGTLAFDLEYARWLDEHQRHINDLRVALNAQMSDDELCELVDAVMMHYDQVFRLKSFATKSDVFHVLSGMWMSPAERFFMWLGGFRSSELLKVLASHLEPLTDQQLMGICNLQQSSQQAEDALSQGMEALQQTLGDTLVSAAATVVSGGGGADNVTNYMGQMAIAMAKLTTLENFLRQADLLRHQTLQQMHRILTTRQAARALLVISDYFSRLRALSSLWLARPRD

SEQ ID NO: 16527 - protein, 151 aa, Oryza sativa
  Clone ID: TF_OSC14114j.C1.p1.fg
MTSGFGFTPWAADTCPTLEQLMASSASPSPSSSLDDNAAAAEEENGEVEEEEERRRQRRKVSNRLSARRSRARKQQRLEELRGESARLRAENRELAARLHAVARHGLAARCQNARLRAEAAALARRLLALQRLARGRHMMITASPPQFSRR

SEQ ID NO: 16528 - protein, 151 aa, Oryza sativa
  Clone ID: TF_OSC900018j.C1.p1.fg
MTSGFGFTPWAADTCPTLEQLMASSASPSPSSSLDDNAAAAEEENGEVEEEEERRRQRRKVSNRLSARRSRARKQQRLEELRGESARLRAENRELAARLHAVARHGLAARCQNARLRAEGAALARRLLALQRLARGRHMMITASPPQFSRR

SEQ ID NO: 16529 - protein, 180 aa, Oryza sativa
  Clone ID: TF_OSC416709j.C1.p1.fg
MTLSGGTLSSGITSGSSHGTRSSGSEGDIQLQVQMDLKRKRRKESNRESAKRSRLRKQQHLDDLTSQVNQLKMENQQLTTTLNMVTQSCAFAESQNSVLRTQMMELDSRLSALREIIFYMNNGNQSPSNPTIAATTYPSTTTMTAATTGHYDYYDVFTANAWGSGMQMMQQPIDQFLYQC

SEQ ID NO: 16530 - protein, 203 aa, Oryza sativa
  Clone ID: TF_OSC400151j.C1.p14.fg
MAAQEQEQEKQQVKTSTTSSLPSSSERSSSSAPNNLKEGGGVESDEEIRRVPEMGGGGGSASSGAGADERQGKEDGKQQGGGGGGAAAAGGGQEQAPPARKRGRSAGDKEQNRLKRLLRNRVSAQQARERKKAYMTELEAKAKDLELRNAELEQRVSTLQNENNTLRQILKNTTAHAGKRGGGGGGKGGDGGGGGKKHHFTKS

SEQ ID NO: 16531 - protein, 360 aa, Oryza sativa
  Clone ID: TF_OSC401241j.C1.p11.fg
MATTRASLTDPLLPSPAARAPVKAKKLSWSMLHASSKDERRGQSGEAEAEASGGVHANPSSPARMQEQATSSRPSSSERSSSSGGHHMEIKEGKEAPLRSLLLPFLDFHFTVPLSGMESDEEIGRVPELGLEPGGASTSGRAAGGGGGGAERAQSSTAQASARRRGRSPADKEHKRLKRLLRNRVSAQQARERKKAYLNDLEVKVKDLEKKNSELEERFSTLQNENQMLRQILKNTTVSRRGPVLLKIPKSGLREAAPAGCGGLREAEGDEKFVLNGFTAANLSFDGMATVTPNGLLMLTNGTNQLKGHAFFPALLQFHRTPNSMAMQSFSTAFVIGIISAFEDQGSGSPAAAGGSGRAA

SEQ ID NO: 16532 - protein, 238 aa, Oryza sativa
  Clone ID: TF_OSC7652j.C1.p3.gm
MDLPQPMGMTQGAQAQWGVKGSPVGLIAASMSITEASLHFCYLHSLSVVFLYFFYFLFVLCDTFKMSVAPATEGSARRSAAAAAAEEEERQRNRKRSNRLSAQRSRIKKQQYVDGLAVEAEQLRRENDAMRAGAGAVLQRCRLVEQENRVLAAHARELCSALQLRASQLRLLGEVAGVPLDVPDVADHLVQLYGGDLGMTPLSPPPLLPPLPPQIEMLYFQPDSVMDPVSMLQGYENI

SEQ ID NO: 16533 - protein, 147 aa, Oryza sativa
  Clone ID: TF_OSC7652j.C1.p3.np
KMSVAPATEGSARRSAAAAAAEEEERQRNRKRSNRLSAQRSRIKKQQYVDGLAVEAEQLRRENDAMRAGAGAVLQRCRLVEQENRVLAAHARELCSALQLRASQLRLLGEVAGVPLDVPDVADHLVQLWRRPGDDAALATAAAAAAA

SEQ ID NO: 16534 - protein, 173 aa, Oryza sativa
  Clone ID: TF_OSC900423j.C1.p21.fg
MSVAPATEGSARRSAAAAAAEEEERQRNRKRSNRLSAQRSRIKKQQYVDGLAVEAEQLRRENDAMRAGAGAVLQRCRLVEQENRVLAAHARELCSALQLRASQLRLLGEVAGVPLDVPDVADHLVQLYGGDLGMTPLSPPPLLPPLPPQIEMLYFQPDSVMDPVSMLQGYENI

SEQ ID NO: 16535 - protein, 368 aa, Oryza sativa
  Clone ID: TF_OSC10722j.C1.p6.fg
MDPRFPPPAPSGGAPPRGHHRRAHSETFIRLPDADLLLDPDGEFGFSDLDFPSLSDDSPAASDPTPPPPPPALPQAAPRPPGGAHLRSLSLDAAFFDGLAFQGGGGGGGAGSGSSGGGAGHKRSGSMDGESSLFEGESAPPDYAKKAMPADRLAELALLDPKRAKRILANRQSAARSKERKIKYTGELERKVQTLQTEATTLSTQLTLLQAYWDAMIIKSVSLCLVVFILNCEYRYSSVLANCTFQDKQGHYKAIEIKESKYIYPDKQSNLLRKPSLFNAALNDALREEVQRLKIAAGQVPNMNGNSFNGGLQQQQQQQMPTYFSQQQQMHYLSGHQGRHHHPNNPHNSLNGGQSMSGQTLNDSMDFM

SEQ ID NO: 16536 - protein, 265 aa, Oryza sativa
  Clone ID: TF_OSC400259j.C1.p152.gm
MASRVMASSSPSHTASDLARFAAGRGGGGSAGLGSMNVEEILRGIYADMPTPALPLVGGDRPMSPLPAPDVAAAPRTAEEVWKEITGAGVAAAAGGVVPPAAAAAAAPAVVAGAGAGTGAEMTLEDFLAREGAVKEDEAVVTDPSAAKGQVVMGFLNGAEVTGGVTGGRSRKRHLMDPMDRAAMQRQKRMIKNRESAARSRERKQAYIAELESLVTQLEEENAKMFKEQEEQHQKRLKELKEMVVPVIIRKTSARDLRRTNSMEW

SEQ ID NO: 16537 - protein, 646 aa, Oryza sativa
  Clone ID: TF_OSC11046j.C1.p1.fg
MAEPALLDPTAAFDLRLYPAHLFDHELPLAGGGGGDDDDDLPLDGLEFDLPGDFSVEDFLLRSPERDDSGEGSAAGSGPTASPSSSPTTSASNSAVANGSGGEVKHEESDEGRSGGGDPKWSLKRKQASPGPSSDAAKCRRSGDGDVSPSASASRTAVDSDEGGTVCEEEEDERRAARLMRNRESAQLSRQRKKRYVEELEEKVKSMHSVINDLNSRISFVVAENATLRQQLSGGSVNCPPPGVYPPAPIPGMHFPWMPGYAMRPPGSHVPLVPIPRLKPQQPVPSSKVVKKPESKKTVENKSKSKTKTKKVASVSLLGLLLIMLVFGAFIPGFNHNFGMCGQSDNAMFRNFGQSHARVLSVSSQDKSSLNNSDMIGVDVGKMTGNTDGPGKKHQPAHNSSEILPALLYVPRNGKHVKINGNLIIHSVLASEKAVAHKASKDDSDQSARDHKETSVAIARYLSLPGKDVNRQETSSADGPLPQWFREGMEGPILNSGMCSEVFQFDISTASSNPGGIIPASPVVNSSSVNATEKIPAHSAAYHGKLKNRRVMYNEAIPLTGKTANNTEPFNRTSESSSKLPDSKPASSVVVSVLADPREAGNGDGDPRVSPKPLSKIFVVVLVDGVRYVTYSCTLPFKSSSPHLVN

SEQ ID NO: 16538 - protein, 168 aa, Oryza sativa
  Clone ID: TF_OSC400025j.C1.p12.fg
MAGLPFPSDSDTALEAFLADIGFGAPCPEAAPAPSPSHPDTTAAAATDEPVMAGDDQADEERRRRLRRRISNRESARRSRARKQRHLDELRAKASALRATSRDLVARLRGARARAALVALTNAQLRDEAGKLALRLAAARRVIALRQLYSAAAAGGGFEMQALASLIA

SEQ ID NO: 16539 - protein, 176 aa, Oryza sativa
  Clone ID: TF_OSC33872j.C1.p21.fg
MTIKRKDDGQVVKQSVKAVGGGLLERVDSDDEEIVGRVPEFGLALPGTSTSGRGSVRVAGDAAATAAGTSSSSPAAQAGVAGSSSSGRRRGRSPADKEHRRLKRLLRNRVSAQQARERKKAYMSELEARVKDLERSNSELEERLSTLQNENQMLRQVLKNTTANRRGPDSSAGGDS

SEQ ID NO: 16540 - protein, 442 aa, Oryza sativa
  Clone ID: TF_OSC400036j.C1.p47.fg
MEQTLDVPRSLRLLAPKAQQQMDEFWRDRQKEIETTKDFSEHAIPMARLKKIVSSQKGNMMMTFDMPAFLSKMCELFVQELAVRAWASAQSHNRCIILDTDIAKAIASTESYDFLVDILHNHRVKHKSTPCSTLTTKRCRLVDQPSTSHMPYQHQLPQFAPTYTPAIPITPSLMPPISHYIPFQYPSLSQEVSPMMASAPIVNRSMLLIHNIARGLGLQGNNISTFANNNIPDNIVGCSSPTVLASMMSPALLEVAGTSLNPPNSHSICTMNMINSSDPSGSSIGDINVANQASLAPSGRFNPAILRESSCPSFLHSNNDTIVAIPEGVDISGTMDVASDVAAIVINGQEEHERETNVEHHQQNEIYESIDIGIINASVADDNKYSISWDELGMADDSLLDKFLEEFQVRNDGVLRTGIELHEDPFLGDVMLANPSTSNANK

SEQ ID NO: 16541 - protein, 367 aa, Oryza sativa
  Clone ID: TF_OSC900254j.C1.p20.gm
MDPTKSSTPPPVMGAPVGFPPGAYPPPPPAGAAAAAYAQQLYAPPAAAAAQQAAAAQQQLQMFWAEQYREIEATTDFKNHNLPLARIKKIMKADEDVRMIAAEGPRRVRPRLRDVHPRAHPRGVGAHAEENKRRTLQKSDIAAAIARTEVFDFLVDIVPRDDAKDADAAAAAAAAGIPRPAAGVPATDPLAYYYVPQQPAGGAKGRRGEKGEEKARRLATGDEAAAATREQAGWGGGRRHRGHRPCGPPPGTSPRPPSSGRSRTSSSTATPSCSSPSCCCRTGHNSGKKSWEFPLFAGGCASGHRSVLIQNSDVAYLCNQMMLKLRDFYDPSKWWETAGRWPSSSGGAWACFGRGRAGAGNRSEGRT

SEQ ID NO: 16542 - protein, 335 aa, Oryza sativa
  Clone ID: TF_OSC401168j.C1.p5.fg
MPIPEKDGVEDNQEDDTFSRLQLLAQQRHAMEKFWRMSQEQIEESAGNEELILPISRVKNIIHAKEGGMMLSADTPAFVTKLCELFVQELILRAWVCANSHNREIILGTDIAEAITTTESYHFLANVVHGHQALGSNIPEIGVSAWKRHKLDEMTSLCHPPQAVQVTDLANHPPNIPVCPPIGQSGTQHTTSTHVLMMQGESIHKASKEKSPLKEVMVPTNKVGMTNSSYGVPNGGGATSSKVVIDSPKGETAQVFSSQHACPSLEDNYVIPIPAGHGDSFRTLDEANIPQLHQEQKNFISQDAIVGENIPLNESLEKSKHKDEDLLFPDKDLPE

SEQ ID NO: 16543 - protein, 258 aa, Oryza sativa
  Clone ID: TF_OSC401409j.C1.p13.fg
MRKKLGTRFPAARIKKIMQADEDVGKIALAVPVLVSRALELFLQDLIDRTYEITLQSGAKTLNSFHLKQCVRRYSSFDFLTEVVNKVPDLGGADSCGDDRALPRRRKALPNGSDPENEESRSSKMAVRSANISPRGRGRGRGRGRGRPPTKRKEVGYVQFEDESSMFADQGEALPGEETVPETIHGTESVPPSTHPPAEAPSAAEIPAPNPKVEEAKNDDHQPDWPMPDAIGNIGVGPSGFGHLTVQVDEDEDYDNED

SEQ ID NO: 16544 - protein, 289 aa, Oryza sativa
  Clone ID: TF_OSC418198j.C1.p28.fg
MAGKKKALTNPASPSASASASTPKKSTATSKDRSTPKPRKNPNPKEEAPPPPPANNKRLNPQGGSNRKKKADAGTPSKKPKRQPPEPKPRKHKGAKSEKPHRVSGEGEKPTPTKKKKKKESSKEPKREKQQASAPMSTPSKKNKEAKRDTGGAGKPTPTKRKLGDVDPPQERPSGEGQASSPTPAKKRKDKAAAAEAVADHGAGSFPMARVRQIMRAEDATIRPSNEAVFLINKATEIFLKRFADDAYRNALKDRKKSIVYDNLYFVPQKVTAEDALKAPVSSQVNQPQ

SEQ ID NO: 16545 - protein, 290 aa, Oryza sativa
  Clone ID: TF_OSC416336j.C1.p2.fg
MRKKLDTRFPAPRIKKIMQADEDVGKIALAVPVLVSKALELFLQDLCNRTYDITVQRGVKTLSSSHLKQCIHSYNVYDFLRDVVSKVPDMGTSDAGVDDKLGKRRKTAEDDSEEESKRTRNEAASQTSTGRGRGRGRGRGRRGGRVSEREIISAYEKFEENHEFPPGQFSKPSQLKVDVSVDGTDAIETKEATPLSNARASLRNIDLNIELTDYDDEGSAPLEVQPPAPAAGVVTTSSGPLVSEVNEEAKTKDFLGWQLPELTKMAMDPVQFALSSNHRLEEDEDYDNEE

SEQ ID NO: 16546 - protein, 138 aa, Oryza sativa
  Clone ID: TF_OSC420787j.C1.p13.fg
MSSAGGGGGRGKSKGSKSVSRSSKAGLQFPVGRIARYLKAGKYAERVGAGAPVYLSAVLEYLAAEVLELAGNAARDNKKNRIVPRHIQLAVRNDEELSRLLGAVTIAAGGVLPNIHQTLLPKKGGKDKADIGSASQEF

SEQ ID NO: 16547 - protein, 296 aa, Oryza sativa
  Clone ID: TF_OSC27280j.C1.p3.fg
MDPMDIVGKSKEDVSLPKSTMFKIIKEMLPPDVRVARDAQDLLVECCVEFINLLSSESNEVCSREDKKTIAPEHVLRALQDLGFREYIEEVQAAYEHHKHDTLDSPKASKFTGVEMTEEQAVAEQQRMFAEARARMNNGAAKPKEPEPEAQQQTQQPPQPQLHPQPQQPLQPQLQLHPQPQQQPSQLHPQQLLHPQSQQTPQPQPQVHPQPQQPPQLQPQPQLLQQPQLPQQLQPQSQLPPQPQQPPQLQLQSQLHPQPQQPPQLQPQPQLHQQPQPQAELQSQSQPQTEHGLDSS

SEQ ID NO: 16548 - protein, 229 aa, Oryza sativa
  Clone ID: TF_OSC401854j.C1.p11.fg
MPDSDNESGGPSNAGEYASAREQDRFLPIANVSRIMKRALPANAKISKDAKETVQECVSEFISFITGEASDKCQREKRKTINGDDLLWAMTTLGFEDYIDPLKLYLHKFRELEGEKAIGAAGSGGGGAASSGGSGSGSGSHHHQDASRNNGGYGMYGGGGGMIMMMGQPMYGSPPASSAGYAQPPPPHHHHHQMVMGGKGKVEEVQSKGKIRDFLQLQASMLELIQGEN

SEQ ID NO: 16549 - protein, 125 aa, Oryza sativa
  Clone ID: TF_OSC401203j.C1.p25.fg
MRQARPYSAMFAGGVSARTGPHALPLARIKKIMKRSAGDSSVVDGGGGGGGGARMISGEAPVVFSKACELFIAELTRRAWAATLEGKRRTVHKEDVAAAVQNTDLFDFLVDVVTADLGDDHTDYK

SEQ ID NO: 16550 - protein, 285 aa, Oryza sativa
  Clone ID: TF_OSC5489j.C1.p2.fg
MADAGHDESGSPPRSGGVREQDRFLPIANISRIMKKAVPANGKIAKDAKETLQECVSEFISFVTSEASDKCQKEKRKTINGEDLLFAMGTLGFEEYVDPLKIYLHKYREMEGDSKLSSKAGDGSVKKDTIGPHSGASSSSAQGMVGAYTQGMGYMQPQSNFHILVVLQSFAFPYMYQVAQIYCNKYEVSREQIWDTPQIMELSPWIPYTINRIWKETHGSQDIRIQGRPREAANSALDWQWPSKHSSLASNFYGTRVVGGHHEYQRSTKKDTTHVNFASGLGDLG

SEQ ID NO: 16551 - protein, 144 aa, Oryza sativa
  Clone ID: TF_OSC400992j.C1.p58.fg
MTNGQDNLLPIANVGRIMKDGLPPQAKISKRAKETIQECATEFISFVTGEASERCRRERRKTVNGDDVCHAMRSLGLDHYADAMHRYLQRYREGEELAASLNSSSSAAAAAAAAGSRGGGAIQIDVRAELSIFRSGNNQGRPNN

SEQ ID NO: 16552 - protein, 150 aa, Oryza sativa
  Clone ID: TF_OSC900366j.C1.p10.gm
MAGETGEGGGSHSQPEKQPGQAAAAASMAEAEVEELPKAIVRRLVKEKLAQVAAGGAEVIVNKDAMSAFAESARIFIHYLSATANDMCKESKRQTINADDVLKALDEMEFPEFVEPLNTSLQAKEVGDLNSDHPSDALLCSILSFSYRIW

SEQ ID NO: 16553 - protein, 199 aa, Oryza sativa
  Clone ID: TF_OSC402631j.C1.p11.gm
MKSRKSYGHLLSPGGSPPLDNESGEAAAAAAAGGGGCGSNAGYVVYGGGGGGDSPAKEQDRFLPIANVSRIMKRALPANAKISKESKETGQECVSEFISFVTGEGLRQGPPREAEDHQRGRPPLGHDHAWGARPTGGRVKSYLTGTGRPRAKRAHWLRGAGGGHQGAPRERAGPRRKTGGGNEGFDEVGGTGGGGIDGG

SEQ ID NO: 16554 - protein, 297 aa, Oryza sativa
  Clone ID: TF_OSC30077j.C1.p6.fg
MKSRKSYGHLLSPVGSPPLDNESGEAAAAAAAGGGGCGSSAGYVVYGGGGGGDSPAKEQDRFLPIANVSRIMKRSLPANAKISKESKETVQECVSEFISFVTGEASDKCQREKRKTINGDDLLWAMTTLGFEAYVGPLKSYLNRYREAEGEKADVLGGAGGAAAARHGEGGCCGGGGGGADGVVIDGHYPLAGGLSHSHHGHQQQDGGGDVGLMMGGGDAGVGYNAGAGSTTTAFYAPAATAASGNKAYCGGDGSRVMEFEGIGGEEESGGGGGGGERGFAGHLHGVQWFRLKRNTN

SEQ ID NO: 16555 - protein, 320 aa, Oryza sativa
  Clone ID: TF_OSC401807j.C1.p27.gm
MPSFTIAIVLSSVSDLQCELEFLACVTSKKHGGTHSHGMNCPAMTAATAAGAFGFGRTRADMEPSSQPQPVMGVATGGSQAYPPPAAAYPPQAMVPGAPAVVPPGSQPSAPFPTNPAQLSAQHQLVYQQAQQFHQQLQQQQQQQLREFWANQMEEIEQTTDFKNHSLPLARIKKIMKADEDVRMISAEAPVVFAKACEVFILELTLRSWMHTEENKRRTLQKNDIAAAITRTDIYDFLVDIVPRDEMKEEGLGLPRVGLPPNVGGAADTYPYYYVPAQQGPGSGMMYGGQQGHPVTYVWQQPQEQQEEAPEEQHSLPESS

SEQ ID NO: 16556 - protein, 250 aa, Oryza sativa
  Clone ID: TF_OSC414618j.C1.p4.fg
MEPAFPNGGAAAPPPPMAAEQLPPAAAVVREQDRLMPIANVIRIMRRVLPPHAKISDDAKEVIQECVSEFISFVTGEANDRCHREHRKTVTAEDLVWAMDRLGFDDYVPPLTAYLRRMREYEGGGSGGGGGGGRGAAAAPAVVPPPPPPPPEDAFRYVQVHHPVYAAPGEPVQGYGYPVAMSSALPAPHVHVGVRGGGQHEVFGGGPAPLAVYYGGAPYGEASSRGGCSAADEGSSSSSASPAPVGPNYE

SEQ ID NO: 16557 - protein, 530 aa, Oryza sativa
  Clone ID: TF_OSC419121j.C1.p2.fg
MLSSMFLFLLPLSLLSFSLLGNLWAGAATSAGEGWSSVGLRLMLLGGATPFFYINIETVIITNMNYYPEGSNPVYFAVLVKYEDLDGDVVQVDLMESKSAYGGAIGVWTPMRESWGSASAVTSARPFVTNNVIPAIWSRIAPSLPPSPLPRRPRSALAHCRASPASVSPSARASPTPPSPRSPPHRPSRSRHLLLSGIPAAALVVACPNLNDLDFSNDHYGSTSGMRRRRRWPSCVGFWGGFGDGDGDRYSITFSAYIVVLRTQEAYVQILQQLHRSTSLEMDPHSHKKAHEGLIGDNPDAYAVTTYQPVLMVEPSAAAAFPPAPQVAPAYPVNPMQLPEHQQHAIQQVQQLQQQQKEQLQAFWADQMAEVEQMTEFKLPNLPLARIKKIMKADEDVKMIAGEAPALFAKACEMFILDMTLRSWQHTEEGRRRTLQRSDVEAVIKKTDIFDFLVDIITDDKMKDDGMGSQAASMVSPYTSGGMGFSFDLYPNQHHLAYMWPPQEQQEQWPPQEQQEQKQKQDSDGGGQDE

SEQ ID NO: 16558 - protein, 177 aa, Oryza sativa
  Clone ID: TF_OSC400992j.C1.p59.fg
MADHHGGHHADGHRRQQQLQGEAADQAAAEIIKEQDRLLPIANVGRIMKQILPPNAKISKEAKETMQECVSEFISFVTGEASDKCHKEKRKTVNGDDVCWAFGALGFDDYVDPMRRYLNKYRELEGDRAAAAATSRSGAGAAAGPDHPSSSSSAAAATAGHFMFNAMDRSTDSSRQF

SEQ ID NO: 16559 - protein, 241 aa, Oryza sativa
  Clone ID: TF_OSC413083j.C1.p3.fg
MSEGFDGTENGGGGGGGGVGKEQDRFLPIANIGRIMRRAVPENGKIAKDSKESVQECVSEFISFITSEASDKCLKEKRKTINGDDLIWSMGTLGFEDYVEPLKLYLRLYREGDTKGSRASELPVKKDVVLNGDPGSSLVNYGAQRADANANHLDLFFLLRKNPESTTANCMREDEAKPVTVKIIETVYVEADTADDFKSVVQRLTGKDAVAGDAPELNSAQRFGSGREASRHGDHKVRIYE

SEQ ID NO: 16560 - protein, 205 aa, Oryza sativa
  Clone ID: TF_OSC400603j.C1.p33.fg
MEPKSTTPPPPPPPPVLGAPVPYPPAGAYPPPVGPYAHAPPLYAPPPPAAAAASAAATAASQQAAAAQLQNFWAEQYREIEHTTDFKNHNLPLARIKKIMKADEDVRMIAAEAPVVFARACEMFILELTHRGWAHAEENKRRTLQKSDIAAAIARTEVFDFLVDIVPRDEAKDAEAAAAVAAGIPHPAAGLPATDPMAYYYVQPQ

SEQ ID NO: 16561 - protein, 301 aa, Oryza sativa
  Clone ID: TF_OSC419400j.C1.p11.gm
MDPTKSSTPPPVMGAPVGFPPGAYPPPPPAGAAAAAYAQQLYAPPAAAAAQQAAAAQQQLQMFWAEQYREIEATTDFKNHNLPLARIKKIMKADEDVRMIAAEAPVVFARACEMFILELTHRGWAHAEENKRRTLQKSDIAAAIARTEVFDFLVDIVPRDDAKDADAAAAAAAAGIPRPAAGVPATDPLAYYYVPQQDISTAAVVWALTHVVQHGDTILLLAVMLLPHRAQLWQEVLGVSALCRGLCERPQERVDSEFGCRLFVTSTSTTKARWQWWETAGRWPSSSGGAWACFGRGRAGA

SEQ ID NO: 16562 - protein, 250 aa, Oryza sativa
  Clone ID: TF_OSC407812j.C1.p9.fg
MEPSSQPQPAIGVVAGGSQVYPAYRPAATVPTAPAVIPAGSQPAPSFPANPDQLSAQHQLVYQQAQQFHQQLQQQQQRQLQQFWAERLVDIEQTTDFKNHSLPLARIKKIMKADEDVRMISAEAPVIFAKACEIFILELTLRSWMHTEENKRRTLQKNDIAAAITRTDMYDFLVDIVPRDDLKEEGVGLPRAGLPPLGVPADSYPYGYYVPQQQVPGAGIAYGGQQGHPGYLWQDPQEQQEEPPAEQQSD

SEQ ID NO: 16563 - protein, 238 aa, Oryza sativa
  Clone ID: TF_OSC400426j.C1.p12.fg
MAAAAVADEVTEAMEQVEGEREEADAVADEAAEVMEQAEGEREEAIDAVAGEAGEVMKEVVEGEREEANAMADEADEAMEPEGEREEEADAVADEATEPMEQVEGEGEDGDAAAQRPALPLGRVKRIIRVDRDIKKVTNEAALLIAAATELFVGSLAAGAHRAASRRGRRAVRAVHVRAAAREHRPTADFLLDCLPAAEEAAPARAAAAGPSRGGGRGEAKPLPRGTRRIDAFFQKTT

SEQ ID NO: 16564 - protein, 186 aa, Oryza sativa
  Clone ID: TF_OSC400070j.C1.p19.fg
MAGNKKRGGRNMDQVKKAAVRSDGVGGSATNAELPMANLVRLIKKVLPGKAKIGGAAKGLTHDCAVEFVGFVGDEASEKAKAEHRRTVAPEDYLGSFGDLGFDRYVDPMDAYIHGYREFERAGGNRRVAPPPPAAATPLTPGGPTFTDAELQFLRSVIPSRSDDEYSGSSPAIGGYGYGYGYGKNM

SEQ ID NO: 16565 - protein, 181 aa, Oryza sativa
  Clone ID: TF_OSC6715j.C1.p2.fg
MAIPTKEEVEQNEEDNTFSRLQLLAQQRHAMEEFWRRSQEQIEASAGNHEHILPIDCVKNVIRPKNDAMMLSADTPTFVTKLCELFVQELTLRAWVCANSHNRDIILGTDIAEAITTTESYHFLGNVLRSHKALGSTAPDIDTSARKHIKLDQMTSLYHPTQEMQASRLAGYPPHVPIYPP

SEQ ID NO: 16566 - protein, 254 aa, Oryza sativa
  Clone ID: TF_OSC400069j.C1.p6.fg
MEAGYPGTAANGAAADGNGGAQQAAAAPAIREQDRLMPIANVIRIMRRVLPAHAKISDDAKETIQECVSEYISFITGEANERCQREQRKTITAEDVLWAMSRLGFDDYVEPLGVYLHRYREFEGESRGVGVGVGAARGDHHHGHVGGMLKSRVQGSMVTHHDMQMHAAMYGGGAVPPPPHPPPHHHAFHQLMPPHHGQYAPPYDMYGGEHGMAAYYGGMYAPGSGGDGSGSSGSGGAGTPQTVNFEHQHPFGYK

SEQ ID NO: 16567 - protein, 937 aa, Oryza sativa
  Clone ID: TF_OSC7036j.C1.p3.fg
MEGGPLQAKGLKGRDMQARPYRYSPLQKDEIEKQVKEMIDAGLITPSMSPYASPVLLVKKKDGSWRFCVDYRRLNALTIKSKFPMPVVDELLDELSGTKFFSKLDLKAGYHQIRMVETDEAKTAFKTHHGQFQFRVMPFGLTNAPSTFQCLMNSVLAPFIRKFVLVFMDDILVYSPDLDSHLHHLQQVFVILRQHQLFARRSKCSFACTQLEYLGHIISDKGVSTDPEKTAAMLAWPVPTSVTELRGFLGLTGYYRKFVQGYSIIARPLTLLLKKKAFLWTDAAQLAFDQLKTAMSNTPMLALPNFQLPFTLETDACAYGLGAVLSQQGHPIAYYSKTLGPVNQKLSIYEKEFLAIMMAVDKWRCYLQRGPFIIKTYHKILCHLDDQILGTELQQKAMTKLMGLQYSFQYKRGVNNIVADALSRMPSSSQFCAFSVVQPIWIQEMINSYTVDPQAQQLLAELAVHSPNSQGYSLTQGIIRFQNKIWIGSNAGLHTKLIQAFHASALGGHSGIAATYHRIKKLFAWPGLKLDVENFVKQCQVCQQAKHEHCRLPGLLAPLPIPKEAWQDISMDFIEGLPRSDGYNAILVVVDRFTKYANFIPLRHPFTASQVAHLVDKTVFKTHGIPRSIVSDRDRLFTSKFWTTLFATWDTQLQMSTAYHPQTDGQIERVNQCLEMYLRCMTQANPKKWSHWIHLAEFWYNTNYHTYLGCSPHKALFGVDPHYSQVPDLTLATLPDVVDVQTERQHLSEFLQQQLTRAQLRMKNKVDKGRSDRVFAVGDAVFLKLQPYAQSSVVNRPYPKLAYKFFGPFTVLERIGVAAYRLDLPASSTVHPVFHVSQLKAQVPDHTPVYTSLPSQVVLDAADVVPEAILERRLVKRSNAAHVQVLLKWSSLPADHATWEDYHVVKTRFPDAPAWGQAETPAGGTVMTGNGDTEKEV

SEQ ID NO: 16568 - protein, 1150 aa, Oryza sativa
  Clone ID: TF_OSC403247j.C1.p47.fg
MPPARGGRRGRGRGRRGGRGGAASRARGENVVDVEPIKLGDDDAKVDPQTKSPNEEITSAEVCEVETSEASPLGAPEEDEGKPGSTRNLKRLRKTITIDSAAAEEHGAESDDEEFDVLATASCQELAPCRRSKRLRCKPTRKRSKPTGKRDLGGKESEDDVFANSSSSSQDDAGKLASRRSKRLRERLTSDYFDGDMKIVRLPAEDQNAFGTDWAPEIFHMLMMIATPMIHVTLTTEITTDRKKIVPCRRTSKRLQEKRKAHDVSEESYTEASSCMLSTSSSSDDELLHNSIKPGRRNSGGPSCSICKIGIACSFLIKCKNSTCSRSFHTFCLDPPLQEIIGTWECSWCKSNAAPAVKVTEVLTSKKIQRLVGHRRILQEADFQYQFLVKWQSLSHHHDCWVPLEWLHVSDPLRVQSYLNKNCLPKEVYSEDQRKLEWFEVDHAIACRRKFHHEGLCDVLATFQDNQDFDGYEFLVKWKGLDYCEATWEPCCTDGVQQAVSMLVRRHKNASKRVNISQTCLDGSKIEEVHCGALYDYQLQGLQWLIDNFKTRRSVILADEMGLGKTVQVVCFLYHIIKESLTASPALILAPKSILLQWEKEFCQWASDLNVIVYQGDRDSRKCIQVHEMYSSDGKPLFDALVTSYEFVQIDKAVLQKFKWSTIVIDEAHRMKKLDCNLAACLKRYCSEFRLLLTGTPLQNNIMELFSLLHYIDPDEFSDPKADGLFSPIESGRDLTMDEKVARIHNILKPRMLRRMKSDVLTDSMPVKKWVEVPCALADSQRELYINILERNYSKLNSAIRNGRKLSLNNILMELRKCCNHPVGLEVGQQATEDVFLSLIASSGKLQLLHKLLPRLKERGNRVLIFSQMTRMLDILEDFLCSLGYKYARIDGQTSLSARQESIEEYKNIDSETFIFLMSTRAGGMGVDLPGADRVIIYDPDFNPFMDLQAQSRAHRIGQTRPVVVYQLITKCSVEEKILQKSKQKLAIENMLMNSSKKPSADELQSILLHGAKTIVDRKISATSIHYDNEAIENLLKLDPSTGEKCSSDDNGYLGSIVSFAHGVEDEAPSSPKVEDLKVLKPATPKVDLGRGKRQRKVVNYADEVENEDSDDMYAPEGSSTSEFSSSSSDDETDSALQLQIVTVPDIDAD

SEQ ID NO: 16569 - protein, 1133 aa, Oryza sativa
  Clone ID: TF_OSC401367j.C1.p45.fg
MESKLLEKLEGITKWMHEIDQRLDSQGGSLEKVTTKVDLAMDSVGKFRMAVETEFEGVVEREKMSALDTLTQTGTMTEYKQQFDSLVYQIRVFDPSVGEIRAAVVVQLPDTVQQASAIALMQESVLASRATKALKGKFVKLPQYKSDISSDTAPGRVDKEDLWKAKQLKDYRRAQGLCFKCGDKYTPEHRCAVGGQIKAMQLEEVLTDDILDVVIAAEQSDDEEDCHISLNALTGAHLPTAIHLRALVHSKVLLLLVDSGSSHSFIDYNFAQMLGLPLKPIPSTLVKVANGDCLPCQYVVPGFSWWIQGHTFTYDMRVVTLGGHDAILGRDWLEQWGEMSCHWANKTLKFQYQGSWISLQGVQDAAVPSEIAAVTLPQLLKWHKGCEIWTAALLEHSQDDVQHVIPSSVQQLLTDFDDVFHDPKCLPPHRVFDHAISLVPDAIPVNCRPYRYYPLQKDEIEKQVNEMIDAGLITPSMSPYASPVLLVKKKDGCWRFCVDYRRLNALTIKSKFPMLVVDELLDELSGTKFFSKLDLKAGYHQIRMVETDEAKTAFKTHHGQFQFRHQLFAKRSKCSFACTQLEYLGHIISDKGVSTDPEKTAAMLAWPVPTSVTELRGFLGLTGYYRKFVQGYSIITRPLTLLLKKNAFLWTDAAQLAFDQLKTTMSNTPVLALPNFQLPFTLETDACAYGLGVVLSQQGHPIAYYSKTLGPVNQKLSIYEKEFLAIMMAVDKWRCYLQRGPFIIKTDHKSLCHLDDQILGTELQQKAMTKLMGLQYSFQYKRGVDNIVADALSRMPSSSQFCALSVVQPIWIQEVINSYTVDPQAQQLLAELAVHSPNSQGYSLTQGIIRFQNKIWIGSNAGLHTKLIQAFHASALGGHSGIAATYHRIKKLFAWPGLKLDVENFVKQCQALFGVDPHYSQVPDLTLATLPDVVDVQTERQHLSEFLQQQLTRAQLRMKNKADKGRSDRVFAMGDAVFLKLQPYAQSSVVNRPYPKLAYKFFGPFTVLERIGVAAYRLDLPASSTVHPVFHVSQLKAQVPDHTPVYTSLPSPVVLNAADIVPEAILERRLVKRCNAAHVQVLLKWSSLPADHATWEDYHVVKTRFPDAPAWGQAETPAGGTVMTGNGDTEKEV

SEQ ID NO: 16570 - protein, 1391 aa, Oryza sativa
  Clone ID: TF_OSC401857j.C1.p18.fg
MEAKLLEKLDSLTLCMEALDDKLTKQSGRIDQVATKVDLAMDAVAALQKEQVQAAQLHKQAMASEPMYQIPPVFQVSAAVLHMSGNAAQWYQSFKLVEEVANWSQFRHAVVCEFESTSQREKIQALQTLRQAGSVAEYKHQFDSLVYQIRVFDPSVGAVMVQLPTTVQQAAAVALMQESVLLELSTKQSKRLMYKPLPTKGELPQGGTDTPAIKPERAELWKARQLRDYRRANGLCFKCGDKYSPEHQCALGGQIKAMQVTEVIPDDLLNAVTAEEDSDQDENCHISLNSLSGASHVNTIRLRALVQNKVLLLLVDSGSSHSFLDYNFAQLLGLQLQPIAPSLVKVANGDCIHCQFMVPQFTWWFQGRTFTYDMRVVPLGGHDAILGMDWLAQWGDMSCNWANKTLKFMYQGTWVELQGVPDSPPQTELSAMSLSQVLKCQKGCDIWAAALLETADFPSADSVPPAVSQLVHEFADVFQDPHSLPPHRVYDHAITLFPGSAPVNSKPYRYSPLQKDEIESQVKDMIDSGLITPSMSPFASPVLLVKKKDGTWRFCVDYRKLNSITVKSKFPMPIVDELLDELAGTRFFSKLDLKAGYHQIWMVEDDEYKTAFKTHHGQFQFHVMPFGLTNAPSTFQCVMNSVFAPLIRKYVLVFMDDILVYSPDLPSHLTHLKQVFELLRQHKLYAKRSKCSFACSQLEYLGHIISDQGVSTDPTKTAAMLAWPVPANVTELRGFLGLTGYYRKFVKNYSILAKPLTVLLQKKAFQWSDDAQQAFQKLKLAMSSTPVLALPDFSQPFILETDACAFGVGAVLSQHNHPIAYYSKTLGVANQKLSIYEKEFLVLGTDLQQKAMTKLMGLQYTFQYKKGVENVVADALSRVPPQSHLSALSVASPIWLQEVLNSYAVDTQAQKLLVELAVHSPNDQGYSLTDGLIRHHGRIWIGANLGLQTKLITAFHSSPIGGHSGTMATYHRLKKLFSWVGLKTAVFNFVKQCQICQQAKHEHCRLPGLLVPLPVPKEAWIDISMDFIEGLPKSDGYTVILVVVDRFTKFASFIPLRHPYTASQVAVTVDKFVFKTHGLPQSIVSDHDKVFTSRFWGDLFKVWNTQLNMSTAYHPQTDGQTERVNQCLEMYLRCMIQATPTKWNSWLHLAEYWYNTSFHTSLGCSPHKALFGVEPHISQVPVLLSSVHHSVVDLISERNQLSVFLQQQLQRAQLRMKHKADKGRSERSFSVGDHVFLRLQPYAQSSVVNRPYPKLAFKFFGPFQILEKVGSAAYRLALPEGSAVHPVFHVSQLKAHVPDHTPVFTSLPTPVVLDAADVWPELILDRRLVKKGNAAHVQVLIKWSSLSADDATWEDYDVLKTRFPSAPAWGQAASLAGGTVTADGIQCDAPQ

SEQ ID NO: 16571 - protein, 1058 aa, Oryza sativa
  Clone ID: TF_OSC400864j.C1.p5.fg
MEQQLAELVEVMSAIQKQNSAIQTSVGSLEEIKPLVVELASWKPAMDKAVTELHEEMGDLRQQVERIARNPVLSVKPSELPALLPTPTRPRDTAPKEEEVSPSVGGEGHGPLGHRVASIPRGKACGKESSPSSLPAKEGSNRGFTAGFHGGNARVDCPQFDGENPRAWKMKCETYFRVSGICSEVWEAMTSYRATARSATPSFASKTFGGGRADERTLPVEDKVAALRAYRKAKGLCHTCGERWSRDHKCGPTVQLHIVEELLELLADSAADGMPEIIEPTTDIGSESEPQGEVCQISRDAMIAQKDEIERQVKDMLQQGVIQPSSSPFSSPVLLVQKKDLTWQFCVDCRHLNAVTVKNRYPLPIIDELLDELSGASLFTSLDLRAGYHQIRMRAEDEYKTAFKTHNGHYEFRVMSYGLTGAPATFQGLMNMIFAPLLRKGVLVFIDDILVYSRNLQDHVMLLRQVVFVWTSEHQAAFEALKAALVSAPVLALPDFSGTFVIETEASDLGVGAVLMQDGHPLAFLSKSLGPRNRGLSTYEKECLAILLAVDHWRSYLQFGEFIIRTDQRSLIHLDDQRLVTSWQQRALTKLLGLSYRLVYKKGLENKAADVLSRCRSNEVYQLSTVSSCVPSWLEEVQKGYDSDICTSQLLAKVLLSPSQFPSYSLKNGILYYMRLIWLGANSELQLKILSAFHCSAVGGHSGIQVTYSRVRRLFAWPGLKQAVRQFVSNCSICKQAKAERVRYPGLLQPLPVPEHAWVTVSLDFIEGLPSSAGFDCILVVVDKFSKYAHFLALVHPFTAFDVALAYLNNVYKLYGLPHHIISDRVRIFTSALWTELFQLTDTRLKLSTAYHLQTDGQTERVNQCLETFLRCFVHACPKKWFRWWALAEFWYNTAYHSALERSPFEVLNKVGAVAYRLRLPDDCSIHPVVHVSQLRQAVAPTTATDVRALPTMAPEEVVPVQVLARRVSKKGAGAVEQVLVRWTGQSSSEATWEDAAALRLRFPDAPAWGQAAFEGGRNVTGAATVSEPVRENNPVKSGKRPQRERRPNVRVSGPEWS

SEQ ID NO: 16572 - protein, 760 aa, Oryza sativa
  Clone ID: TF_OSC400896j.C1.p18.fg
MGEVGEEREAGFENRIPAISGAGAGGRERGVGAGNAAHARRGRRGPEEAETWARRRLRARRGGGSGGRLGEDPTGFTLALHRYFLRASYKLNFRLGRRTSGCDTDATQLAFDQLKTAMSNTPVLALPYFQLPFTLETDACAYGLGAVLSQQGHPIAYYSKTLGPVNQKLSIYEKEFLAIMMVVDKWRCYLQRGPFIIKTDHKSLCHLDDEILGTELQQKAMTKLMGLQYSFQYKRGVDNIVADALSRMPSSSQFCALSVVQPIWIQEVINSYTVDPQAQQLLAELAVHSPNSQGYSLTQGIIRFQNKIWIGSNAGLHTKLIQAFHASALGGHSGIAATYHQIKKLFAWPGLKLDVENFVKQCQVCQQAKHEHCRLPGLLAPLPIPKEAWQDISMDFIEGLPRSDGYNAILVVVDRFTKYANFIPLCHPFTASQVAHLVDKTVFKTHGIPRSIVSDRDRLFTSKFWTTLFATWDTQLQMSTAYHPQIDGQTERVNQCLEMYLRCMTQANPKKWSHWIHLAEFWYNTNYHTSLGCSPHKALFGVDPHYSQVPDLTLATLPDVVDVQTERQHLSEFLQQQLTRAQLRMKNKADKGRSDRVFAVGDAVFLKLQPYAQSSVVNRPYPKLAYKFFGPFTVLERIGVAAYRLDLPASSTVHPVFHVSQLKAQVPDHTPVYTSLPSPVVLDAADVVPEAILERRLVKRGNAAHVQVLLKWSLLPADHATWEDYHVVKTRFPDAPAWGQAETPAGGTVMTDNGDTEKEV

SEQ ID NO: 16573 - protein, 1481 aa, Oryza sativa
  Clone ID: TF_OSC411208j.C1.p7.fg
MAYRAPTLRPQLAASPASRVPLSDSRRPPVYSGSNGFWSGRGRSGRASTSSSRVEDKVLRRRGLDGDQTSVRAFSSPREGANWMGSSPASSSSSSSSHASSSSESWIRDKLSGVRPSSLAGRAPTTGTKRQCSSPPPSADRSEKKAKEDLAMEEPPEALAMEEQQDALATKEQALAMEEEQGAPATKGEQEVLPEMEEEQLVMEEEQESLAMDKMESGMEEQPGIEEEVLPEMEEQLMIEEEQELSAMDKMESGMEEQPGIEEEVLPEMEEQLMIEEEQELSAMDKMESGMEEQPGIEEEVLPEMEEQLMIEEEQELSAMDKMESGMEEQPGIEEEQPATEELGADDALPSANTHLDLVSSHLRDDGNWLTVMSSLCHPSRGWCLWAIFGSHAFAIDTTADADILTLDLAGLKETTSCPRAKGNNVKHCGTESCASSWIKPGILQAPLKQAMDSMESKLLEKLEGITKWMHEIDQRLDSQSGSLEKVTTKVDLAMDSVGKVQQECAELARSMKRVASCSDQAGILGSPFGISQVSASGSATPPPLNPLVPPVLDGVDLGHGFGDGIYRRHQPLPKMDFPRFDGSDVRIWLDMCETYFDMYQITQNFKVSAAVLHMSGNAAQWYHSYKLVNEVNSWDQFRMAVATEFECVVEREKMSALDTLTQTGTMTEYKQQFDSLVYQIRVFDPSMGGKMLVTHFMNGLTEEIRAAVVIQLPDTVQQASAIALMQESVLASRATKALKGKFVKLPQYKSDVSSDTTLGRVDKGDLWKAKQLKDYRRAQGLCFKCGDKYTPEHRCAVGGQIKAMKLEEVLTDDILDAVIAAEQSDDEEDCHISLNAFTGAHLPTAIHLRALVHSKVLLLLVDSGSSHSFIDYNFAHMLGLPLKPIPSTLVKVANGDCLPCQPYRYSPLQKDEIEKQVKEMIDAGLITPSMSPYTSPVLLVKKKDGSWRFCVDYRRLNALTIKSTKFFSKLDLKAGYHQIRMVETDEAKTAFKTHHGQFQFREVINSYTVDPQAQQLLAELAVHSPNSQGYSLTQGIIRFQNKIWIGSNAGLHTKLIQAFHASALGGHSGIAATYHRIKKLFAWPGLKLDVENFVKQCQVCQQAKHEHCQLPGLLAPLPIPKEAWQDISMDFIEGLPRSDGYNAILVVVDRFTKYANFIPLRHPFTASQVAHLVDKTVFKTHGIPRSIVSDRDHLFTSKFWTTLFATWDTQLQMSTAYHPQTDSQTERVNQCLEMYLRCMTQANPKKWSHWIHLAEFWCNTNYHTSLGCSPHKALFGVDPHYSQVPDLTLATLPDVQQLTRAQLRMKNKADKGRSDRVFAVGDAVFLKLQPYAQSSVVNRPYPKLAYKFFGPFTVLERIGVAAYRLDLPASSTVHPVFHVSQLKAQVPDHTPVYTSLPSPVVLDAADVVPEAILERRLVKRGNAAHVQVLLKWSLLPADHATWEDYHVVKTRFPDAPAWGQAKTPAGGTVMTGNGDTEKEV

SEQ ID NO: 16574 - protein, 1332 aa, Oryza sativa
  Clone ID: TF_OSC13017j.C1.p6.fg
MPARTRSVNSLDSVDGFDARAEILQLRREMTDLSNLRGEMGEIKDLLKSICTALPGFHSAGASTSGTAGAGGSAGTQAMAGASVSAGAQAATGTGALIAPLVPPGFSSVAPILSTGGMQSGVALPQTADETQVNSTNAIPSSQIHAGMGSVFPSTSLPPIFPIHMSGAVPSVGHVNFSIEPNTVNPNFAPIFTSAPIFTSATRTQAGHLPGGLNIHGVESQEDVGMNHYGIETNQPWRYPQMQPTARPHLNATGIHMANGGGPVWPEGPRHLFGGMPNPYADMTLRSQRLELTIFNGEDAIGWLQQCEKFFEMTGTPVEQWVNLATGHLVGRAGKWFRNLGIPWHYINWPQFYLMISDRFTEANAHEAVEQLQNVRQTGSVMHYIDKFEDSVALVKRDHPYLIEYYILSCFIGGLRADIKHDHKCRTGKVIHMMEEVEDEEEESGSPEENQEGEYQTAPGSPAKKEDDNEEQLMQISTHAIQGTYGINTFSLITYVKGRKVVALVDSGSTNTFMNYEFALRSGCEIIEFDHNRVMVAGGGILNSTAKTEVIQYKVQGYLFVHTLKTLEMENVPVPDSVATILAGFAEVFAEPKGLPPRRECDHAIPLKMGAEPPNQRPYRVPHQQKNAMEEIIKELLESEEIRPNLSPYSSPAVMVRKRDGSWRMCVDYRQLNARTIKNKFPMPIVEDLLDELNGAKLVRKCVLVFFDDILIYSKNLEEHEKQLQCVLSILRSHKLYAKRSKCTFAAPSVEYLGHIVSGEGVATKPSKIKDVLEWAVPVNITKLRGFLRLTGYYRRFVQGYGAICRPLHDLLKKDNFHWGPEQQKAFDQLKKIMTTCPVLALPDFSKPFVLETDACGSSIGAVLIQEGRPIAYYSKALGQRAAGSSTYEKEAIAILEALKKWRHYLLGNQVIIRIDQQSLKYMATHKLSEGIQHKLLLKLLELDYNIEYKKGKENAAADALSRRDTKEVEEKEKCYAITLVYPEWIEDVKSSYLNDAQYMKLVDGEELNEESSNFSLGAGILRYKNRIYVGSTTNIRNKLIQAFHKSAFGGHSGVKVTYHRIKKIFYWPQLKKEVEKIVSECPTCQITKAEHVHSPGLLDPLQIPEMAWTHISMDFIEGLPKSQGKDVTPYEALYGVHPPQNGEQAIPGNVTEEIRITAQQREELMLRLKDNLLRAQNRIRKFADRLRSERSFQEGDMVYLKMQPYRQNAFGLRGSLKLRAKFYGPFRILKRIGKVAYHLQLPEEAGIHPVFHVSQLKKHVGNLVVPLPNLPLVDEDGNIKTEPVAVLARRVVPRRNEPVTQWLVHWENLSPEDATWEDSAFIQATFPHFRP

SEQ ID NO: 16575 - protein, 1377 aa, Oryza sativa
  Clone ID: TF_OSC400920j.C1.p23.fg
MPARTRSVNSLDSVDGFDARAEILQLRREMTDLSNLRGEMGEIKDLLKSICTALPGFHSAGASTSGTAGAGGSAGTQAMAGASVSAGAQAATGTGALIAPLVPPGFSSVAPILSTGGMQSGVALPQTADETQVNSTNAIPSSQIHAGMGSVFPSTSLPPIFPIHMSGAVPSVGHVNFSIEPNTVNPNFAPIFTSAPIFTSATRTQAGHLPGGLNIHGVESQEDVGMNHYGIETNQPWRYPQMQPTARPHLNATGIHMANGGGPVWPEGPRHLFGGMPNPYADMTLRSQRLELTIFNGEDAIGWLQQCEKFFEMTGTPVEQWVNLATGHLVGRAGKWFRNLGIPWHYINWPQFYLMISDRFTEANAHEAVEQLQNVRQTGSVMHYIDKFEDSVALVKRDHPYLIEYYILSCFIGGLRADIKHDHKCRTGKVIHMMEEVEDEEEESGSPEENQEGEYQTAPGSPAKKEDDNEEQLMQISTHAIQGTYGINTFSLITYVKGRKVVALVDSGSTNTFMNYEFALRSGCEIIEFDHNRVMVAGGGILNSTAKTEVIQYKVQGYLFGKAFQLIPLKGYDIVLGADWIYEHSPINLDLKQRTLTMNKMLDKNVMGFVIEVHTLKTLEMENVPVPDSVATILAGFAEVFAEPKGLPPRRECDHAIPLKMGAEPPNQRPYRVPHQQKNAMEEIIKELLESEEIRPNLSPYSSPAVMVRKRDGSWRMCVDYRQLNARTIKNKFPMPIVEDLLDELNGAKVFSKLDLRSGKNLEEHEKQLQCVLSILRSHKLYAKRSKCTFAAPSVEYLGHIVSGEGVATKPSKIKDVLEWAVPVNITKLRGFLRLTGYYRRFVQGYGAICRPLHDLLKKDNFHWGPEQQKAFDQLKKIMTTCPVLALPDFSKPFVLETDACGSSIGAVLIQEGRPIAYYSKALGQRAAGSSTYEKEAIAILEALKKWRHYLLGNQVIIRIDQQSLKYMATHKLSEGIQHKLLLKLLELDYNIEYKKGKENAAADALSRRDTKEVEEKEKCYAITLVYPEWIEDVKSSYLNDAQYMKLVDGEELNEESSNFSLGAGILRYKNRIYVGSTTNIRNKLIQAFHKSAFGGHSGVKVTYHRIKKIFYWPQLKKEVEKIVSECPTCQITKAEHVHSPGLLDPLQIPEMAWTHISMDFIEGLPKSQGKDVTPYEALYGVHPPQNGEQAIPGNVTEEIRITAQQREELMLRLKDNLLRAQNRIRKFADRLRSERSFQEGDMVYLKMQPYRQNAFGLRGSLKLRAKFYGPFRILKRIGKVAYHLQLPEEAGIHPVFHVSQLKKHVGNLVVPLPNLPLVDEDGNIKTEPVAVLARRVVPRRNEPVTQWLVHWENLSPEDATWEDSAFIQATFPHFRP

SEQ ID NO: 16576 - protein, 1817 aa, Oryza sativa
  Clone ID: TF_OSC416668j.C1.p17.fg
MEKSGRRPSRSCTRSPVRLGSSPSSFPPVVALVPDGCRVRDSPLSTVEGGAIGGKDLNAEEEEDVQTSQSDISTGNGHRPVRERRPNPRVLGPEWVARRRRRLDPVGSERKYHIVATISHISELFLRVPNNLVSEPFALQNPLGLAVKFPGERWDPATLVACDPQKLRLPQSENERKREEAEVRTRAEYLDLKKSVESRIPAVEKRVEDLGASLQSLSTKVEHLEGSLMRHTKLEPDASTAKTGGSGIIKEEQNQPNTDLTSPSFGMNENFSLSRAPFGFEPRTPSLDSGIASYNLSSTIPPMTCPQFCGDNPQMWKVNCEQYFDVFGIQQIHWVKIATLNFCGNAAFWLQSVRNQLGGITWVGLCDLVCSRFSKDRQQALIRQWFHIRQDGSVAEYVEKFDSLMHQLLAYDNSLLPVYFVTKFVEGLRSDIRVVVLVQRPQDMDSACAVALLQEEALEGVQSTQYKKPDTSIPIRNSHKGAGVLPSTLPPKQLLSPQSEDRRGTESARARDDKLSALKAYRRSKGLCFTCGERWSRDHKCSTAVQLHVVQELLDALQDVKTVEVSDGEQFLHCEDTSDLMAISQQAIWGTESPNSFRLRGWVQGTELLMLVDSGSTHSFMEESIGLKLAGVKPLRSKLSVKLADGETLSCSYEVTNCRWWMQGHNFINNFRLLNLGGYDIILGMDWLEQFSPMQVNWVDKWMDITISGQPVRLQGIVSQVSHCSPISTEQCLGMVRQGSLMYLVQLTSSDPVTKEPIPAAVQQLIDSFQAVFAEPNGLPPKRYCDHTIPLVPGAAPVNLRPYRFNPALKDEIEQQISDMLKSGVIQPSHSAFSSPALLVKKKDGTWRLVIDYRKLNAITVKGTYPMPVIDELLDELAHAKWFTKLDLRAGYHQIRMAPGEEYKTAFQTHTGHYEYTVMSFGLTGAPATFQGAMNETLSPVLRKFALVFFDDILIYSPDFSSHLDHIAQVLSLLSKHQWYVKLSKCSFAQKQLTYLGHTISAAGVHTDQGKIQEVVNWKVPTTVKKLRGFLGLAGYYRKFVKGFGVISKPLTNLLRKGVPFIWTPETDAAFHNLKQALVSAPVLALPDFQKVFTVETDASDSGIGAVLSQDGHPVAYISKALGPRTKGLSTYEKECMAVLLAVDQWRSYLQLGDFIILTDHHSLMHLSDQRLHTPWQHKAFTKLLGLSYKICYRRGSHNGAADALSRKFQHDEEELCHISACTPTWLQEVTTGYASDSYSSQLLTELTVQPNARKHFSLHAGLLKYKGRIWIGNNRQLQLKLLTEVHSNPIGGHSGFPVTYRKLKQLFAWPSMKKMTKLFVQQCQICLQAKPDRAKYPGLLQPLPVPEGAWQVVSLDFIEDGQTERVNQCLEIYLRCFVHSAPSKWAAWLHLAEYWYNTSYHSAVQSTPFEVLYGHSPCHFGISLQDCAIPDLHVWLKERQLMQKLVQQHLHRAQQQMKHFADKKRSFRTFAIGDWVYLKLQPYVQTSVAVRANHKLAFKYFGPFQITAQIGTVAYKLQLPPTSSIHPVFHVSQLKSATGFTGHVQSHLPSSISALQVPWRILDRRLAKKGNSTISQVLVQWSESPPEDATWEDYEELHARFPAALAWGQANSQGVGLVRDSPLSTVEGGAIGGKDLNAEEEEDVQTSQSDISTGNGHRPVRERRPNPRVLGPEWVAADNDKLLRPLAVHGARHGHADDERVGQRGQREAGDGPATAQPPLLMNRAQTPMTAMGSSGLDSDPLGSTKRGLSSAEAARGSGEARAARSRAARSGYEEAAARCSCRSWSSSRAARRRSERPGDEESGASAKAREERGER

SEQ ID NO: 16577 - protein, 1463 aa, Oryza sativa
  Clone ID: TF_OSC400800j.C1.p14.fg
MAEPTIADLLKEIKNMSAELTSLKADMATMKDKASTAASTETRHPDGLRDLDLPPRPKKWDFPRYDGTTDPLLFLNKFEAYFRHHRTMAEERVGMASYHLDDVTQTWYTQLLEDEGTPTWGRFKELVNLRFGPPLRSAPLFELSECRRTGTVEEYSNRFQALLPRAGRLDESQRVQLFTGGLLPPLSHAVRIHHPETLAAAMSLARQVELMERDRPAPPPLRAPPRGLLPAPAPRLALPAPAQQLALPAPPAAAPQGRDAANPRRLTPEEMAERCRQGLCFNCNEKFTRGHNRFCRRLFFVDGVEIDDVAIEGDAAAAAGDTEAPVFSLHAVAGVPIADTIQLQVTVGDASLLALLDGGSTHSFIGEEAARRAGLPIQSSPRMTAIVANGERVACPGVIRDAAFTINGSTFHTDLFVMPLAGFDVVLGTRWLGTLGPIVWDFTSRSMAFQRDGQRFAWKGVASTSTTHLRTLAAASGTLLDELLVAYEDVFGEPTGLPPPRGRDHAIVLKPSSAPVAVRPYRYPAAHKDELERQCAAMIEQGVVRRSDSPFSSPVLLVKKADGSWRFCVDYRALNALTVKDAFPIPVVDELHGARFFTKLDLRSGYHQVRMRPEDVHKTAFRTHDGLYEFLVMPFGLCNAPATFQALMNDVLRPFLRRFVLVFFDDILIYSETWTDHLRHLRTVLSVLRQHRLFVKRSKCTFGSPSVSYLGHVISEAGVAMDPAKVQAIHEWLVPRSARAVRSFLGLAGYYRKFVHNYGTIAAPLTALTKKDGFSWTEDTAAAFDALKAAVTSAPVLAMPDFAKPFTVEGDASTHGFGAVLVQDGHPVAFFSRPVVLRHRALAAYERELIGLVHAVRHWRPYLWGRRFVVKTDHYSLKYLLDQRLATIPQHHWVGKLLGFDFAVEYKPGAANTVADALSRRDTEEGAILALSAPRFDFISKLHDAQRQDPALTALRDEVSAGTRTGPWALVDDLLQYNSWLYIPPASPLAREIIEATHEDGHEGVKRTMHRLRREFHIPNMKQLVQDWVRSCAVCQRYKSEHLSPAGLLLPLPVPQGVWTDIALDFIEALPRVRGKSVILTVVDRFSKYCHFIPLAHPYSAESVAQAFFAEIVHLHGVPQSMVSDRDPIFTSTFWRELMRLMGTKLHMTTAFHPQSDGQSEAANRVIIMYLRCLTGDRPRQWLRWLPWAEFIFNTAYQSSLRDTPFRVVYGRDPPSIRSYEAGDTRVAAVAKSMEERAEFLFDIRYRLEQAQAVQKLHYDKHHRHVAYQVGDWALLRLRQRPTTSLPQSGTGKLKPRFYGPYRITELINDVAVRLELPAGARLHDVFHIGLLKKFHGPPPGAPPALPPLHHGAIAPEPERAVRFRLARGVRQALVQWKGESPASATWEDIEVLRAKYPALQLEDELSLEEGGDVMWGKTYTRRHRARDVRRAAERAGARMDAERAVIAGTAHATEDEAISASG

SEQ ID NO: 16578 - protein, 1424 aa, Oryza sativa
  Clone ID: TF_OSC900060j.C1.p13.fg
MAAAETELGDLSQKVVNLTSNLNNILGSLTKLETWIPAVDVGIQGLNNVVEEISARVTKLESMLATATFAAAQTPVGPDNVENHQGNASKALVAHERTLVKGKSRLPISPVNFDLGEASVQSQFSSRSSSPRLPKTNFPRFDGDNPKLWKKNSEKYFDMYQVPYDSWANFATLHFVGNAALWLQTYEALHSVETWPELCVVVHNKFGKDKYQEHLEELESLRQTSGVDAYYSKFEELMHRVLVYNQAFDETYFVTKFVGGLKTEIKAAIKLHKPRTVDAALSLAKTQEDLALEIKKGGQKSTYKEGFKSTAFRVNYQGKGILGQAPDDTTKTEEKPKWEDCFESLKAARKAKGECFKCGEKWGPGHKCPKYVQLHVLEELLEVFQLREDDEVCQNEEAESSEEELVVSECVVSGTMGKKTIRLQGLIQNHEVLILIDSGSSNSFISQQLVEKLGLAVTDIPLSQVIIADGGVMQCDKLAIGVEWWCQGHSFTNDLKVLKLGGYDIILGMDWLEHHSPMWIHWQRKKLRFTYQGKRINLVGVKENLSDCKSVTSKQLKGMLKTGAVSQVVQLCSIAEESLETELPPTISAVLKEFQEQFKAPSGLPPHRSFDHSIPLLSGSKPVNVKPYRYAPKQKDEIERQVKEMLLQGIIKPSSSPFASPVLLVKKKDGTWRFCVDYRGLNDITVKNKYPMLVVDELLDELSGAQWFTKLDLRSGYHQIRLVQQDEHKTTFKTHQELYEFRVMPFGLTNAPASFQGLMNTIFDKMIRRNVLVFVDDILVYSKTLEEHVQHLREVFAVLQQHKLFVKASKCSFAKQQLEYLGHIIGAQGVATDPSEVHAVQDWLVPRNLKQLRGFLGLTSYYRKFIKNYGIMTRPLTALLKKGVPFKWAELQQQAFSQVKWAMVQAPVLALPDFSQEFIVETDACDKGIGAVLLQNGHPIAYLSKALGVKAQALFTYEKECLAILMAVNKWRAYLQNNEFVIQTNHKSLTHLGEQKLTTSMQHKAFIKLMGLQYKIRYKQGAENRVADALSRRDADEELSAISVGRPKWLESVVDWYDQDEEAKQLLAQLIINLVGVEHFTLTNGVISGLGGHSRITATYNRIKNLFYWPGMKKDVYQYVSSCDICQQAKPEHCKSPGKLQPLPIPEQAWSTISMDFIEGLPKSEGFDTILVVVDKFSKFAKFIPLILSQHYKLPQLLSRMFMIHLGCHSALKKSPYEVLFARKPTPFGLIDVGKSTVPDVQIWLQNRAHMNEVLHQQLTRAQQRMKHQADKHRSERVFAVGDMVYLKLQPYVQMIVARRSCQKLCFMYFGPYKILERIGEVAYRLDLLQSSQIHPLVHVFLLKKVIHSGIQVQADLPENCVSEEAEVVPEEILSRQLIKRGNSAVPYGLIRWTGLPASLATWENLRQLQLRFPGAPAWGQAVS

SEQ ID NO: 16579 - protein, 504 aa, Oryza sativa
  Clone ID: TF_OSC401061j.C1.p30.fg
MARGKNHPDGEEEEAPAAAGEEEAPVEMDEEGEMEEEEEEEQGEGEGEERDEGEEEEEWEDAEEVEGGEESEQAAAEEEDSPLVVVEAEAAAPVVDGSPPKLAEGYYEIEDIRRRRLRKGKLQYLVKWGSQWEGGAWDLAAPELSGRIRTEDWKDQEEITYCLPKQVRVDVDHVVKVPRLRMAVDTHIAIFGTIHLYEFSYEDQEQDCVQKKQQYGRRGWPESANTWEPLENLSACSDIIDAFEMRLQSPRPGRKRKRKITTTPVAGSNPSHGKRGRPRLDAKSHTRAPAPEPKQLPCRTSCRRATNCSSKTVAGLDASGSVVRNQLAQNIVQEGSSSVISRTPCQELPLSIRLTDQQNEHHLVNGSSNSENLVKVPPSQGGQVTGAKKRKSGNVRRFEQNKPTQGQGECGALVVAEDVGSTEGETGDKKKTEGCPNRVHITKIIKPVRFAAAVNNDVQQVSITFKALRSDGQEVMVDDKELKANNPLLLISYYEQCLRYNPTS

SEQ ID NO: 16580 - protein, 2932 aa, Oryza sativa
  Clone ID: TF_OSC400390j.C1.p75.fg
MTKPSSKTEVEPSHVIPVTLDDFEGEDRKAMEEHINELTREALMRATTRTRQGVIIKPGPRPKLAPDMEKVDGFLRNRLGSLMDDYTLKDKAYTTVSQSPIDPIGSKTDGAAFTAGPTGPDGRGYPPDTRQGQYNHIASQTQPIRPPNPPPNPQGPNNMEDMISDIMRNRFGIETRNRARAYKKPYPDYYDNVSFPRNYRVPEFSKFSGEDVDYSDASDSEEEGDHDIYVAEWSWTNKNKPFVCSNLMPTLRKDRQSEVKYSFDVAKCDKILIIFCKRSKLDYLKAMSYLLKKRRAYCKWHNSHSHSTNDCNVFRRQVQSAIDEGRLKFTDGSKMKFDHDPFPVNTINFNNKKVLIRPEQAESTKGKKVVIGEPRPKMMVPKKQEIGVWKENKGEASTSKAPRKTKVTFDMLLEKYERQGGERDHNKGKRPRSPPRERFGHSPRRSCSPPYFHPQDMSWGPYPMPPPGYPYPYFMPGGATPPMYNHMPPMRFNQGWGGPRRPIHERLSSPNKSRFYGKNRVNEEKREGKRVKIEERTSEVITIKIGSHDVPIPSEDGVGKSPSKKSEAGSSSSQSAGLTRPSGRSDRGHVAGPTGPSGRSDRRSDDGLTDASGRSDRVSNVDLTGASGRSDRRSAAGLTGFQRRFDGRVAKGDVRASSSSNKVNKGHYLPPGTEPNPRWMPKDLTATQKRRLQRLRAQELREKKAEEKRDKRFNELRPPPFCAMDEAEVAQFLLGPKDAVFEKPDESNRHMKPLYLKGHVDGKPVSRMLVDGGAAVNLMPYSLFKKLGREGDELKKTNMILNGFNGEPTEARGIFSAELTVGNKTLPTAFFIVDVQEASLEWLQKRVQEYRSTKNDIGETVEDFDEVEKLGQGFTSADPLEEVDIGDGTKPRPTFVQKNMKADYKVKVIELLKEYVDCFAWEYHEMPGLSRELVEHRLPVKPGFRPYKQPLRRFNPLLYDRVKEEIDRLLKAGFIRPCRYAEWVSSIVPVEKKGSGKIRVCIDFRYLNKATPKDEYPMPIADLMINDALGHKVISFLDGNVGYNQIFMAEEDMYKTAFRCPGFVGLFEWVVMTFGLKNAGATYQRAMNLIFHDLLGIILEIYIDDIVVKSDGMEGHIADLRLAFERMRRYGLKMNPLKCAFGVSAGKFLGFMVHERGVEIDPKKIEKIHDFKAPTCKKEVQKLLGKVNYLRRFISNLAGKIDAFVPILRLKKEADFTWGAKQKETFEELKRYLSTPPVVRAPKAGKPFRLYVASEDKVIGAVLTQEEDGKEYIITYLSRRLLDAETRHIARCDNSRANDLAQQTSGYNVKRGLFLILEEPVLDFKFLRKIGKVGDQRRSDRRCTAGLTVTRGGLTGHMPPGHRFVLVATDYFTKWAEAVPLKNMTHTEANGQAESSNKTLLKLVKKKIEEHPKRWHEVLSEALWAHRIYKHGATKVTPFELVYGQEAVLPVEVNLGSLRYIKQDDLSSEDYETFMGDNLDEVTDKRLKALEEIEKEKKRVAKAYNKRVKAKLFQVGDLIEVVGDSRITAKLKVLRSCLSTCQKSCQQFQKMDFPRYDGTTDPLIFVNRCESYFHQQRIMEEEKVWMASYNLEDVAQLWYIQLQEDEGTPRWNRFKDLLHLRFGPPLRSAPLFELAECRRTGTVKEYQNSFQALLPRAGPLQEAQLVQLFTGGLLPPLSHAVRIHNPQSLAAAMSLARQVELMELDKPAPVPARPAPRGLLPALPQRLALPAPPASAPVAKMEAKPVKRLSQEEQAERRRLGLCYNCDEKYSRGHNRVCRRIFYIDGVTLTDAEDAALDADQDGEAPVFSLQAVAGVPICDTMQVRVMLGAVTLTALLDTSSTHNFIAEEAARRTNLAIQPKPRLTATVANGEKIQCPGVLRQAPITIDGEEFHVDLFVMPLAGYDLVLGTQWMVTLGPITWDFTARTMSFSRHGMEVRWSDVAARPEPTVAVIAASEVLLDGLLASFEGVFAEPSGLPPQRARDHSIVLKPGALPVAVRPYRYLAAHKDELELQCAAIIEQGIVRRSDSAFSSPVLLVKKPDGSWRFCVDYRALNALTVKDAFPIPVIDELLDELHGARFFTKLDLRSGYHQVRMRPADVHKTAFHTHDGLYEFLVMPFGLCNAPVTFQALMNDVLRPFLRRFVLVFFDDILIYSKTWADHLRHIRAVLSELQRHQLFLKRAKCAFASASVAYLGHVISEAGVAMDPAKVQAVRDWPAPRSARAVRSFLGLAGYYRKFVHNYGAIAAPLTALLKKDSFSWSGEAATAFDALKAAVTTAPVLAMPDFSKPFIVECDASSHGFGAVLVQDSHPVAFFSRPVAPRHRALAAYERELIGFVHAVRHWRPYLWGRRFVVKTDHYSLKYLLDQRLATIPQHHWVGKLLGFDFTVEYKPGHANAVADALSRRDTPEDGTILALSAPRFDFVDRLRHAQTTDPALVAMHEELTSGSQALPWAAVDGMIQYSGRLYIPPASPLLPELMAAVHEEGHEGVQRTLHRLRRDFHFPNMKQLVQDLVRACPTCQRYKSEHLHPAGLLLPLPVPQGVWTDIALDFVEALPRVRGKSVILTVVDRFSKYCHFIPLSHPYSAETVAQAFFADIVRLHGMPQSIVSDRDTVFTSHFWRELMWLVGTKLHMTTAFHPQSDGQSESANRVIVMYLRCLTGDRPRQWLQWLPWAEYVFNTAYQTSLRDTPFRVVYGRDPPSIRSYEPGDTRVAAVAKTMEERDKFLADIRSRLEQAQATQKRHYDKAHRHVTYQVGDWALLRLRQRAASSLPQTVAGKLRPRFYGPYRITELINDVAVRLALPPRARLHDVFHIGLLKKFHGSPPDAPPPLPAVHHGAVVPEPERAVKTRLARGVRQLLIQWKGESPASATWEDADAFIAKYPDFQLGDELALDEGGDVMWGRTYARRRRARDVRRATERAQRTAEEATGSG

SEQ ID NO: 16581 - protein, 722 aa, Oryza sativa
  unsure (1)..(722): unsure at all Xaa locations
  Clone ID: TF_OSC401613j.C1.p1.np
SVTKWTPPKTVSQIRSFLGLAGCYRRFIENFSRIARPMTXLLKKDEKFKXTAECDKSFEELKKRLVSAPVLILPDQTKDFQVYCDASRHELGCVLMQEGRVVAYASWQLRPHEGNYPTHDLELVAVVHALKIWRHYLIGNRCEVYTDHKSLKYIFTQPDLNLRQRRWLELIKDYDMSIHYHPGKANVVAYALSRKSYCNALCTEDVCKELQQELERLNVGIVEHGFVAALEARPTLVDQVRAAQVNDPEIAELKKNMRVGKARDFLEDEHGTIWMGERLCVPDDKELKDLILTEAHQAQYSIHLGSTKMYQDLKEKFWWANMRREIAKFVTLCDVCQRVXAEHQRPAGLLQPLQIPEWKWEEIKMDFITGLPRTSSGHDSIWVVVDXLTKVAYFIPVHTSYTGKRLAELYLSRIMCLHGVAKKIVSDXGSQFTSKFWQKLQEELGTRLNFNTAYHPQTIDGQTERVNQILEDMLRACVLDFGGTWYKSLPYAEFSYNNSYQASLQMAPFEALYGRKCRTPLFWDQTGERQLFGTEVLTEAEEKVRTVRERLRIAQFRHKSYADNRRRELTFEAGDYVYLRVTPLRGVHRFQTKGKLAPRFVGPYKILERRGEVAYQLELPSNMIGIHDVFHVSQLKKCLRVPEEQADSEHIDIQEDLTYVEKPVCILETRERRTRNKVTRLYRVQWSHHSEEEATWEREDELKAAHPHLFASSSESRGRDSV

SEQ ID NO: 16582 - protein, 1261 aa, Oryza sativa
  Clone ID: TF_OSC17178j.C1.p4.fg
MVNTRNGSRAVGEGSNGEERTDGGHPNSASGHGPPPLPENPTLAQVMAHQTQMMAAMMQQMQQQHQQMHQRMQQQAEQQQFGPPPPQSKLPEFLCVRLPTFSSTTNPMEVNDWLHAIKKKLNLLQCNDQEKVAFATHQLQGPASAWWDNHMATRPPGTEVTWAEFCRSFRKVQVPDGVVAQEKREFRILHQGNRTVTEYLHEFNRLARYSPEDVRTDAEKQEKFLAGLDDELTNQLISRDYADFEKLVDKAICQEDQRNKMDRKRKAAQFRSNQGSHQRPRFTPGQQGGPTTMIVRQHRPFNSSSFHQGASGSQNHQGTPSAQAKKETGAKPRSCFNCGEHGHFADKCPKLRRAGPRFAQARANHASAEEAQAAPEVVLGTFPINSIPTTVLFDSGATHSFISKKFVGMHGLRKEEISTLMRVHTPGNSSTSISYSPSVLIEIHRSRFLANLILLESKDLDVILGMDWLTKFKGVIDCANRTVTLTNEKGETVVYKSLVSPKQGISLNQIEVENLVATEEKSSRKLEDIPIVCEYPEVFPEDLTTMPPKREIEFRVDLAPGTTPIYKRSYRMAANELAEVKKQKKDRTKRMCVDYRALNEVTIKNKYPLPRLDDLFDQLKGAKVFSKIDLRSGYHQLRIREEDIPKTAFTTRYGLYECMVMSFGLTNAPAFFMNPMNKVFMEFLDKFVVVFIDDILIYSKSEEEYEQHLRLVLEKLKEHQLYAKFSKCDFWLSEVKFLGHVITAQGVTAECDKSFEELKKRLVSAPVLILPDQTKDFQVYCDASRHELGCVLMQEGRVVAYASWQLRPHEGNYPTHDLELVAVVHALKIWRHYLIGNRCEVYTDHKSLKYIFTQPDLNLRQRRWLELIKDYDMSIHYHPGKANVVAYALSRKSYCNALCTEDVCKELQQELERLNVGIVEHGFVAALEARPTLVDQVRAAQRVKAEHQRPAGLLQPLQIPEWKWEEIKMDFITVLAEIARGIGNPAELQHSLPPADHPDGQTERVNQILEDMLRACVLDFGGTWYKSLPYAEFSYNNSYQASLQMAPFEALYGRKCRTPLFWDQTGERQLFGTEVLTEAEEKVRTVRERLRIAQFRHKSYADNRRRELTFEAGDYVYLRVTPLRGVHRFQTKGKLAPRFVGPYKILERRGEVAYQLELPSNMIGIHDVFHVSQLKKCLRVPEEQADSEHIDIQEDLTYVEKPVCILETRERRTRNKVTRLYRVQWSHHSEEEATWEREDELKAAHPHLFASSSESRGRDSV

SEQ ID NO: 16583 - protein, 1255 aa, Oryza sativa
  Clone ID: TF_OSC23279j.C1.p1.fg
VRMLDQQRNIYLGQAGEGNQYAEAVLKGPRLEIPLFSGEDPIDWLKQCEKFFEITGTPLDQWVNLAVAHLNGRALKWFGGIGLPWQVIAWPQWCSMVCTRFSAASEHEAIELFQNVKQFGTTVEQYIDKFEDYVDLVKRDHPYLQEQYLTSCFIGGLRADIKYDVCGLLMPEKWWEISTETGIRIHLEVIRGGMLTIGDKTEVREIGERKRSAGSVKNLGFQGTSDYALRNSYPLKNTDTKKVVVAGGGELKTDVMVPDISYEIQGECFTNQFKLLPLKGYDIIWGADWIYNYSPISLDLKQRILGITKGNKVILLQDFTKPNKHFQISGKRLEKMLKKGALGMVIQVNVMSETVEEEGHVIPEDISDIIQQFPAVLKEPKGLPPKRECDHVINLQSGAVPPNIRPYRVPHYQKEAMENIINELIESKEIQTSDSPYSSPAVMVRKKDGSWRMCVDYRQLNAQTVKNKFPMPIIEDLLDELNGARIFSKLDLRSGYHQIRMAEKDVHKTAFRTHLGHYEYQVMPFGLTNDPATFQSLMNHVLAPFLRRFVLVFFDDILIYSKTRAEHLEHVKLVMQALQDNHLVIKLKKCAFGLASVSYLGHVISQDGVATDPKKVGKIKNWPTPKDVTDVRKFLGMTGYYRRFIQGYGTICRPIHDMLKKNGFQWGADQTTAFETLKHKLRTSPVLALPDFDQAFTIEADACGVGIGAVLMQGGRPIAFFSKALGPKAAGQSIYEKEAMAILEALKKWRHYVLGSKLIIKTDQQSLKFMMGQRLVEGIQHKLLLKLMEYDYTIEYKSGKENLVADALSRLPQKEAVADRCHPMTVVIPEWIVDIQRSYENDVQAHKILSLIGTAADPDREYKLEAGLLKYKGRIYVGEATDIRRQLITTYHSSSFGGHSEIPDMAWTHITMDFIEGLPKSQGKDVILVVVDRLTKYAHFIALAHPYDVEQVVEAFMNNIHKLHGMPMVIITDRDRIFTSSLFQEIFKAMKVKLRFSTAYHPQMDGQTERVNQCLESYLRNMTFQEPHKWYSWLALAEWWYNTTFHTAIQMTPFKAMYGYSPPQINEFSVPCNISEEARVTIEEKEAILNKLKNSLADAQHRMKYFADKNRTERNLEVGDMVYLKLKPYRQSAFGIRGSLKLRSKFYGPFKVLQKIGQLAYKLQLPDDAQIHPVFHVSQLKKHLGKHAIPMSNLPSVGPDGQIKTEPLAVLQRRMVPRKGVAVTQWLILWQNLSPAEATWEDASVIQAMFPSFNP

SEQ ID NO: 16584 - protein, 1617 aa, Oryza sativa
  Clone ID: TF_OSC10179j.C1.p2.np
TKQTAKIMENEAKLDLLLKKMEETERKREEGEKKQSLEMRVFKEAVESWIPAVEKKVDVLQSTVDMLQTQVAKLSAPPPTNSATPSSSSPSGAAGVRAIDSTGLNGQGPPPGNGTLASQNFSPFHCRVDQGPPPGNGTLASQNFSPFHCRVDASAMNSFQSGTSVGLTGGVAPMTCPKFDGDNPIMWKVNCESYFDLYGIHPINWVKVATLNFTGNAAFWLQAVRSQLEGVTWEELCDRVCTRFNKDRQQALIRQWFKICQTGTVADYVEKFDSIMHQLMAYDPTFKPVYFVTKFVEGLKHEIRSAILLQRPGDLDAACTLAFLQEEALEGDKGIDIKKGEGSGSAKHSVRVALPLPTPPTVKGGSPSFAEERRISDNGRSQNREMDRLATLKAYRRSKGLCFTCGEKWGREHKCASSIQLHVVQELLAVLQPDISSEEFIVQSDDSLMAISIQAINGTESNHSIRLRGWLQGIEVLMLVDSDSTHSFVDHQLGLKLTGVKSMASPARVKVADGGHLNCSLYVNNCDWLTQGIHFKSNFRLLSLGTYDVILGMDWLEQFSPMKVDWVQKWLEFQFQGSTVRLQGIQSHISSCLPITPDQLTGLLKSGSALFLIHLDSNHTSHITTIPAHVQPLLDEFQSVFQEPTELPPKRLCDHKILLPGSKAVFIRPYRHTPAQKDEIERQVKEMLQNGIIQHSSSPFSSPALLVKKKDGSWRVCIDYRQLNAITKKGTYPMPIIDELLDELAGAKIFSKLDLRAGYHQIRMAEGEEFKTAFQTHSGHYEYKVMSFGLTGAPATFQGAMNDTLRPLLRKCALVFFDDILIYSPDMNSHLDHLKQVLQLLDTHQWKVKLSKCDFAQTQISYLGHIISGQGVSTDPSKIQSIVDWAVPTTLKKLRGFLGLAGYYRKFVKDFGTLSKPLTQLLKKDAPFVWSAEVNQAFQALKHALTSTPVLALPNFQQGFTIETDASDIGIGAVLSQNQHPVAFVSKALGPRTQGLSTYEKECLAIMMAVDHWRPYLQFQEFLIITDHHSLMHLTEQRLHTPWQQKAFTKLSGLQFQIVYRKGKHNAAADALSRHVPEETSEFLGISTCSPVWLQDILHGYDQDPLALSLLTGLAVNPSSYPHYSLSKGLIKHKGKVWVGNNSNIQQQIISALHDSPLGGHSGFPVTYKRIKSLFSWPHMKLTVQKQLASCAVCLQAKPDRSKYPGLLQPLPVPDGAWQIISMDFIEGLPKSYHQDCILVVVDKFSKYAHFMPLSHPFSALDVAKVFMLNVYKLHGLPQIIISDRDKIFTSALWEQLFLRSGTKLHLSSAYHPQSDGQTERVNQCLEIFLRCFVHATPAKWSLWLHLAEFWYNSSYHSALNKTPFEVLYGYPPSHFGIRADACVISDLDSWLSERHLMTQLLRQHLNRAQQVMKTQADKKRSFRSFQVGDWVFLKLQPYVQSSVAKRANHKLSFRYFGPYQILSKVGSVAYKLQLPADSMVHPVFHVSQLKGTQNFKHSIQSQLPNITDHIQYPVQILDTRIQKKGNKVVRQILVCWSNLPAVEATWEDEEELKQRFPSALPWGQVSLQGVGFVSSNTASGVAVSDEAQENTITRPLKRATRIKKSNVRLSGPEWAC

SEQ ID NO: 16585 - protein, 112 aa, Oryza sativa
  unsure (1)..(112): unsure at all Xaa locations
  Clone ID: TF_OSC10179j.C1.p6.gp
DHIQYPVQILDTRIQKKGNKVVRQILVCWSNLPAVEATWEDEEELKQRFPSALPWGQVSLQGVGFVSSNTASRELPLSDEAQENTITRPLKRATRIKKSNVRLSGPEWACKX

SEQ ID NO: 16586 - protein, 1370 aa, Oryza sativa
  Clone ID: TF_OSC900333j.C1.p7.fg
MEAMEGRLVDMIQSLVKKVEEVNVMGSKLEIIDKKLEQYGEQLGKVQAKVDLSMDSLGQVQMEQAFVTKALKEGNPHAAPTSTRPGKAPILQTPSTASTSSTPPTPPPLPNLNGYASVQPIHSAARDHAEVEHKRNWTPKMDFPKFDGLKDELHYSVAAQLPENVHQAFQVALIFESAHRMKKGVHKKEGYLTKGIDTPAKVPGDIWKAQQLKEYHKTHGLCFKCGDKYAPRHVCAKQEGPQLKAMEVEQNSEMLTDEMLDVVACLETQPENMLLSIQAISGSVAPKTIQLRALVKDQVVLILVDSGSSHSFINEALCQKLQLSTVPHPSYDVKVANGALLTCASHVPHFRWLLQGQTFQFPVKVLALGGYDMVLGMDWLEQHSPIQCDWNLKTISFNHQGSWVTLQGIQASAMHSLTAATPDQIMNWFQGNDIWAMAVVQQITPPLNSVIPSTVQALLDKYQFVFSAPDSLPPHRAVDHALPLLPGAVPVNCRPYRYSPAQKDEIEKQVCEMLEAGLITHSCSPFASPVLLVKKKDNTWRFCVDYRRLNTLTVKNKFPLPIVDELLDELTGAQYFSKLDLRSGYHQIRMLPEDEYKTAFKTHHGHFQSRVMPFGLTNAPATFQYLMNSIFAPFMRKFVLVFMDDILVYSHSWAEHLSHLELVFQTLQNHQLFAKLSKCSFATPTLEYLGHTISKDGVATDPAKTACMQQWPVPANITELRGFLGLTGYYRKFVHHYGIIAKPLTKLLQKNVKFVWTPEADSAFHALKQAMCSTLVLALPDFSKPFALETDACDIGIGAVLLQDGHPIAFYSKAIGTQNTIGGHSGGQATYQRLKKLFMWAGLKQQVEEFVQQCAVCQQAKHEHCKYPGLLQPLPIPEGAWQEVCMDFIKGLPLSRGFDVILVVVDRFTKYAHFIPLKHPFTALQVAEVFLNNVTKLYGLPKIIVSDRDKVFTSAFWQALFKRFEVHLHLSSAYHPQSDGQTERVNQCLEMYLRCAVSNTPSKWCYWLPLAQYWYNTTFHTAIQCSPHKALYGVDPHHGILPSFALEDVDTSTSSSEADNLLKDRTFYASLLRHHLTRAQHRMKQAANANRTLRSFQVGDMVYLKLQPYAQHSVVSRPCPKLAMKYFGPFSIVSKIGSVAYKLQLPEASRIHPVFHVSQLKQVIPNNAPVFSTLPMSLELDVQSLSPSAILDRRMVKRGNAAVVQVKVRWGSLPEDFSTWEDYDVLCVRFPEVKSWGQDSSHGGGTVIAAAMTESKSKAEEKKKGKAERLVWFDDSRPYVVLMCTISQGIGGFVFGNERSESKEDSYVERFLDCISNGTIPDDSRPVLLNVLKEDHEDAELVRGALETFVSAVTPIETSKNRGSACISEL

SEQ ID NO: 16587 - protein, 1629 aa, Oryza sativa
  Clone ID: TF_OSC401333j.C1.p5.fg
MFKALFLMVDEEEPLQLETEINQETRTKNQTLGRIGRREEKEERLKSEKVASGGDGRRRGERRVVGAPSNPSHVRVKEQPLSEGAKSVAEDAGDDADSGRREDELEAAEGEVVRRATRPVKINLKYYGPDWAVMSQESKLDVLLRTIEENEKKRMEAEARTRDDLADLKKMVEICLPKMEEKVEKLSESVQTLSHKHHTDLSTSLPPMTCPKFDGENPQMWKSNCEQYFDIYGINPMHWVKVATLNFSGNAAFWLQSIRSQIMGITWQTLCDLICARFTRDIQEALIRKWFHAQQNSTVTEYVEQFDSIMHQLMAYDSALTPVYFVTKFIEGLRDDVRGAVMLQRPQDLDSACSIALLQEEILESNKSTTHRRSDNHIAFRPVPKLNNYVPVPPGQRSVAVSAHDDKKGVESAKSREDKFASLKSYRRAKGLCFVCGERWGRDHKCATSVQLHVVQELLEAMRSECNSDDILTAKDPIESVEAIDGGLMAISQQALLRGWVQGTEILMLIDSGSTHSFIDESIGSKLVGLIPLSRSVTVKIADGGTMKCTQQILGCRWWTQGHYFKSDFKLLNLGSYDAILGMDWLEQFSPMQVDWVNKWLEVVIDGQPVRLYVNPRPKGLPPKRICDHHIPLLPGSKPVNLRPYRFNPALKDEIEAQISEMLQSGVIQPSQSAFASPALLVRKKDGTWRLVIDYRQLNAITVKCSYPMPVIDELLDELPGAKWFSKLDLRAGAPATFQGAMNETFKSVLRRFALVFFDDILIYSPDLPSHLDHLKQVLTLLQQHHWQVKLSKCSFAQQQLTYLGHVISAEGVSTDPSKIQEIVNWETPTTKKKLRGFLGLAGYYRKFVKGFGLISKPITQLLRKGVPYKWTLETETAFQQLKQALVSAPVLALPDFSLPFTVEIDASDSGIGAVLSQNKHPIAYISKALGPRNRGLCHARNFYPKFQTLTYGRDRSVHDRLTGEGDDDVGDDVTTGGGGSAARTAHARRRTAALRHERRTPTGSGRHGELTGDQSDGGRGTDGDGDEEEAAANFGLTAATVLRRSSAAAKEWTRTAATWRPRRRSSRATATAGTAAAHGWSDGGDGGARAHGARAFPTTRGEGKGCDRLSTYEKECMAILLAVDHWRSYLQLGEFIILTDHHSLMHLSDQRLHTPWQHKAFTKLLGLNYKICYRKGTSNAAADALSRKFQSDSELSIISSCVPSWLQEVAKGYEHDPYSSDLLSALSVQLDCKPGFQLQSGIIKYKGRIWIVTYSKIKKLFAWQGMKSQVKDFVQQCQTCLQAKPDRSKYPGLLQPLPVPDGSWEVIIMDFIEDRDKIFTSQLWTYLFSASGTKLNLSTSYHPQSDRQTERVNQCLEIYLRCFAHANPSKWVTWLHLAEYWYNTSYHSSLKTSPFEVLYGHSPRHFGINVDTCEIPDLQEWLKERKLMQALVQQHLHRANQQMKHMADKKRSFRSFAVGDWVLRKIGTVAYKLQLPATASVHPVFHVSQLRAAKGYKELSSLQLPKANSALQVPSQILDSRVVKRATDAVLQVLIRWSDSAAEDATWENMEDLRTRFPTALAWGQAKFQGEGIVKEQPLSEGAKSVAKDAGDDADSGRREDELEAAEGEVVRRATRPVKINQKYYGPN

SEQ ID NO: 16588 - protein, 963 aa, Oryza sativa
  unsure (1)..(963): unsure at all Xaa locations
  Clone ID: TF_OSC900010j.C1.p13.np
PPNLRPYRVPHYQKAAMENIITDLVESKEIQESESPYASLAVMVRKKDGSWRLCVDYRELNSQTVKNKFPMPIIEDLLDELHGARIFSKLDLRLGYHXIRMAEQDVHKTAFRTHMGHYEYQVMPFGLTNAPATFQSLMNQVLKPFSRKFELVFFDDILIYSRSKEEHLDHLKLVLQVLKENDLVIRLKKCAFGLSEVSYLGHVILQNWVATDPKKVDKISRWPIPTDVTELRKFLGMIGYCRRFIKGYGVICRPMHDMLQKQGFQWGPEQTAAFNELKSKMCTSLVLAMPDFSKEFVEADACGSGIGVVLMQSGRPIAFLSKSLGPKADGQSVYEKEAIAILEAIKKWRHYILGGKLVIRTDQQSLKFMMNQRLVEGIQHKLMLKLMEYDYSVEYKQGKQNYVADALSRMPIIQEKEEESCQAITIVVPDWIEDIKRSYDDDVQAHKLLSLVGTEADPNGEYRQESGLLKYKGRIYVGQGTNIRTELLRACHASSFGGHSSMRATYHRIKLLFYWPRLKKEVENFVRECPTCQVTKGENVHIPGLLEPLEIPDMAWSHITMDFIEGLPMSRGKDVIFVVVDRLTKYAHFLALSHPYAVEQVVEDFMDNIHKLHGMPNAIITDRDRIFTSGLFHKIFKAKKVQLRFSTAYHSQTDGQTERVNQCLESYLRNMTFQETKNCSPWLALAEWWYNTTYHTAIQMTPFKAXYGYSPTQINEFSIPCNVSAEGRMTLEEKEAILQKLKGSMELAQKRMKYFAGKNRTERVFETGDMVYLKLQPYRQTALRIRGSLKLRSKYYGPFKIIQKVGKVAYKLQLPAEAQIHPIFHVSQLKRHLGTHAIPMANLPAAGPDGQIKTEPVAILQRRMVPRMVAVTQWLVLWQNLSPADATWEDATVIQGMYLDFHPXGQECCHGGGLTKLFDEGSCRRREAYAQAAVCYQHXPYAVPGRWSPQLSRGPQPRWXVLL

SEQ ID NO: 16589 - protein, 1476 aa, Oryza sativa
  Clone ID: TF_OSC401054j.C1.p44.fg
MGDDLKSTLETLAKTLASLQSSSEATTKAIEDNTQAIAALSVARTTEKASTESSGTPAPDRPPKHWRPEFPKYDGKTDPLAFINRCESFFIQQHVIPAERTWMASYNLQDGAQLWYMHVQDNEGTPTWERFKELLNLRYGPPLRSVPLFELSACRRTSTVEDYQDRFQALLPRAGRLEEAQQVQLFTGGLLPPLSLQVQQQKPASLEEAMSLARQFELMEPYLFPATTSARGVLPTPAPRPSTGPVVKPAPATVTVEGRPVKRLSQAQQEERRRLGLCYNCDEKYSRSHNKVCKRLFFVEGGAIEEGDDTVEDDTEEATVEAPVFSLHAVAGIPLGKPILLQVTLGAASLVALVDTGSTHNFIGEDAALRTGLPVQPRPRLTATVANGEKVSCPGVLRRAPITIQGMAFDVDLYVMPLAGYDMVLGTQWMAHLGTTIAWDVTTGTVSFQHQGRTVSWQSLPPHQRADVHAVSTGTSLVAATGSSSSTPAPTTEPALLDGLLGSFDDVFAEPRGLPPPRGRDHAIHLLPGAPPVAVRPYRYPVAHKDELERQCAVMMEQGLIRRSTSAFSSPVLLVKKADGSWRFCVDYRALNAITIKDAYPIPVVDELLDELHGAKFFTKLDLRSGYHQVRMRAEDVAKTAFRTHDGLYEFLVMPFGLCNAPATFQALMNDILRIYLRRFVLVFFDDILIYSNTWADHLRHIRAVLLLLRQHRLFVKRSKCAFGVSSISYLGHIIGATGVSMDPAKVQAVVDWPQPRSARTVRGFLGLAGYYRKFVHDYGTIAAPLTALTKKEGFRWSDEVATAFHALKHAVTTAPVLALPDFVKPFVVECDASTHGFGAVLLQDKHPLAFFSRPVAPRHRALAAYERELIGLVLAIRHWRPYLWGRAFVVRTDHYSLKYLLDQRLATIPQHHWVGKLLGFDFTVEYKSGASNVVADALSRRDTDEGAVLALSAPRFDYIERLRAAQTTEPALVAIRDAIQAGTRSAPWALRDGMVMFDSRLYIPPSSPLLHEILAAIHTDGHEGVQRTLHRLRRDFHSPAMRRVVQEFVRACDTCQRNKSEHLHPGGLLLPLPVPTTVWADIGLDFVEALPRVGGKTVILTVVDRFSKYCHFIPLAHPYTAESVAQAFYADIVRLHGIPQSMVSDRDPVFTSSFWRELMRLTGTKMHMTTAIHPQSDGQTEAANKVIVMYLRCFTGDRPRQWVRWLPWAEYIYNTAYQTSLRDTPFRVVYGRDPPIIRSYEPGETRVAAVARSMADRDEFLADVRYRLEQAQATHKKYYDKGHRAVSYEVGDLVLLRLRHRAPASLPQVSKGKLKPRYFGPYRVVEVINPVAVRLELPPRAKLHDVFHVGLLKKFVGAAPPSPPALPAVHHGAIDPEPERVTRSRLARGVRQVLVHWKGESAASATWEDLDTFKERYPAFQLEDELALEEGRDVMWGRTYARRHRARDVRRAGERAAARAQSTSREPQGQVNNSG

SEQ ID NO: 16590 - protein, 212 aa, Oryza sativa
  Clone ID: TF_OSC20914j.C1.p1.fg
MEYYVSKGVFGWVIRLPFSLRFWLLCIVLLLVGIPEFRSLIVIYAVCLPGQVFLKAQPYVQSSLAVRSNHKLTFSLDFPVRLPLVVNPDTIEPVQVLARRVLKKGAGTSEQVLVRWTGQMSEDATWEDAGMLRQQFPTAPAWGQADFDGGRNVADSTVSGTVPDLAIYANPVKKIPVRARRANVGMGLSCVVKMRLYKHLWCGEGVSNMKWM

SEQ ID NO: 16591 - protein, 1670 aa, Oryza sativa
  Clone ID: TF_OSC400555j.C1.p16.gm
MWDYLQAPRYLLVVFNDVPVEQADAGFFNVELKIFDSPPADRGDNPSLNEYTPPSAKAFQNSFEYTDYPNPPIIVVLRGVNVSQPLIHRALAGQLQGILLRRKRRLGLFPHSLHPMVAWREEIINGRVYIIRKDLDNPLPLKSGLPPSQCHWKTLLKIFPILPGGILCNRIRPIYKNLRNKRETFAELRNARRAQRQNARLRQIRPRQGPATLGINALDNLVSRSRRSSSSVADSTSAPATTDPIYDSTTTPAAAPAVAPPNFPPAAAASPASSPSVASCSAHHMGDDLKASIEALSKDMALMHESIKANAASIAANAKAIAALATTTSSSTSGARPGFGDQPPDRPPKHWRPDFPHYDGKSDPLIFINRCESFFLQQRIMQEEKVWMASHNLLEGAQLWYMQVQEDERGTPTWTRFKELLNLRYGPPLRSAPLFELSSCRRTGTVEDYQDRFQALLPRAGRLDEEQRVQLFTGGLLPPLSLQVQMQNPQSLAAAMSLARQFELIEQYTAVPAKAPGRGVLPAPAPRPQLALPAPAGAAKPAPPAATAADNRPVRRLNQAEQEERRRLGLCFNCDEKYSRGHNKVCKRLFFVDSVEDEDEEAPEDEVDAEAPLGATTLVALVDTGSTHNFIGESAAARTGLSVQPRPRMTATVANGEKVACPGVLRHAPITIEGMPFHVDLYVMPLAGYDIVLGTQWMAKLGRMSWDVTTRALTFDLEGRTICWQGAPNQDGPAVRAASADDSLLGGLLDSFADVFTEPTGLPPQRGRDHAIVLKQGTSPVAVRPYRYPAAHKDELERQCAAMISQGIVRRSDSAFSSPVLLVKKADSSWRFCVDYRALNALTVKDAFPIPVVDELLDELHGARFFSKLDLRSGYHQVRMRPEDIHKTAFRTHDGLYEFLVMPFGLCNAPATFQALMNDVLRSFLRRFVLVFFDDILIYSDTWADHLRHLRAVLTVLREHKLFIKRSKCAFGVDSVAYLGHVISAAGVAMDPAKVQAIREWPQPRSARAVRGFLGLAGYYRKFVHNYGTIAAPLTALLKKEGFAWTEAATAAFDALKAAVSSAPILAMPDFTKAFTVECDASSHGFGAVLIQDGHPLAFFSRPVAPRHRALAAYERELIGLVLAVRHWRPYLWGRHFTVKTDHYSLKYLLDQRLSTIPQHHWVGKLLGFDFTVEYKPGAANTVADALSRRDTTEDASVLVLSAPRFDFIERLRQAQDVDPALVALQAEIRSGTRAGPWSMADGMVLFAGRLYLPPASPLLQEDFVRTCEVCQRYKAEHLQPAGLLLPLPVPQGVWTDVALDFVEALPRVRGKSVILTVVDRFSKYCHFIPLAHPYSAESVAQVFFAEIVRLHGVPQSMVSDRDPVFTSAFWSELMRLVGTKLHMTTAFHPQSDGQSEAANRVIIMYLRCLTGDRPRQWLRWLPWAEFVFNTAYQTSLRDTPFRVVYGRDPPSIRSYEPGDTRVAAVAKSMEERSEFLEDIRYRLEQAQAIQKKYYDKSHRAVSFQVGDWVLLRLRQRAPASLSLAVSGKLKPRYFGPYRIAEMINEVAARLALPAGARLHDVFHIGLLKKWHGAPPDAPPPLPNVHHGAVACEPERVIKARLARGVRQVLVQWKGTSAASATWEDREPFFARYPALQLEDELPLDGGGDVIGRTRGCGRSGHGQWLGWKG

SEQ ID NO: 16592 - protein, 1461 aa, Oryza sativa
  Clone ID: TF_OSC420199j.C1.p34.fg
MGDDLKASIEALSKDMALMHESIKANAASIAANAKAIAALATTTSSSTSGARPGFGDQPPDRPPKHWRPDFPHYDGKSDPLIFINRCESFFLQQRIMQEEKVWMASHNLLEGAQLWYMQVQEDERGTPTWTRFKELLNLRYGPPLRSAPLFELSSCRRTGTVEDYQDRFQALLPRAGRLDEEQRVQLFTGGLLPPLSLQVQMQNPQSLAAAMSLARQFELIEQYTAVPAKAPGRGVLPAPAPRPQLALPAPAGAAKPAPPAATAADNRPVRRLNQAEQEERRRLGLCFNCDEKYSRGHNKVCKRLFFVDSVEDEDEEAPEDEVDAEAPVFSLHAVAGVAVGHPILLRVQLGATTLVALVDTGSTHNFIGESAAARTGLSVQPRPRMTATVANGEKVACPGVLRHAPITIEGMPFHVDLYVMPLAGYDIVLGTQWMAKLGRMSWDVTTRALTFDLEGRTICWQGAPNQDGPAVRAASADDSLLGGLLDSFADVFTEPTGLPPQRGRDHAIVLKQGTSPVAVRPYRYPAAHKDELERQCAAMISQGIVRRSDSAFSSPVLLVKKADGSWRFCVDYRALNALTVKDAFPIPVVDELLDELHGARFFSKLDLRSGYHQVRMRPEDIHKTAFRTHDGLYEFLVMPFGLCNAPATFQALMNDVLRSFLRRFVLVFFDDILIYSDTWADHLRHLRAVLTVLREHKLFIKRSKCAFGVDSVAYLGHVISAAGVAMDPAKVQAIREWPQPRSARAVRGFLGLAGYYRKFVHNYGTIAAPLTALLKKEGFAWTEAATAAFDALKAAVSSAPILAMPDFTKAFTVECDASSHGFGAVLIQDGHPLAFFSRPVAPRHRALAAYERELIGLVLAVRHWRPYLWGRHFTVKTDHYSLKYLLDQRLSTIPQHHWVGKLLGFDFTVEYKPGAANTVADALSRRDTTEDASVLVLSAPRFDFIERLRQAQDVDPALVALQAEIRSGTRAGPWSMADGMVLFAGRLYLPPASPLLQEVLRAVHEEGHEGVQRTLHRLRRDFHFPNMKSVVQDFVRTCEVCQRYKAEHLQPAGLLLPLPVPQGVWTDVALDFVEALPRVRGKSVILTVVDRFSKYCHFIPLAHPYSAESVAQVFFAEIVRLHGVPQSMVSDRDPVFTSAFWSELMRLVGTKLHMTTAFHPQSDGQSEASNRVIIMYLRCLTGDRPRQWLRWLPWAEFVFNTAYQTSLRHTPFRVVYGRDPPSIRSYEPGDTRVAAVAKSMEERSEFLEDIRYRLEQAQAIQKKYYDKSHRAVSFQVGDWVLLRLRQRAPASLSLAVSGKLKLRYFGPYRIAEMINEVAARLALPAGARLHDVFHIGLLKKWHGAPPDAPPPLPNVHHGAVACEPERVIKARLARGVRQVLVQWKGTSAASATWEDREPFFARYPALQLEDELPLDGGGDVMWGRTYVRRRRARDVRRAAERAARAEAERAAAADQATVSG

SEQ ID NO: 16593 - protein, 1172 aa, Oryza sativa
  Clone ID: TF_OSC404812j.C1.p11.fg
MESMEERLMDTLKALALKVDGVEDIAKRLTQIDLKLAQQGEWLDRVQTKVDLSMTSLGQVQQEQSQVWKLEVGWHDWTMLKMAIAGEFEGAQLGNVGKRHFQKRDPVVWKQPEKPKLATGELWKAQQLKEYRRAHDLCFKCGDKYVPGHVCVKPDNAQLKAMEVQEDQVILSDDNLDAVVASDMVEDDCNLSLHAMAGTCSASTLQLRAMVGNQVILILVDSGMDWLTKHSPMQCDWVARSIQFPYQGDLITLQGIQSTPFSAVTEASVHQVVKWTQGNYIWAMAVLEPDFSKGSPPVELAVQSVLDKFSSVFTATNSLPPHRVLDHSIALIPNSVPVNSRPYRYSPTQKDEIEKQVLEMLNAGLITPSCSPFASPVLLVKKQDNSWRFCVDYRRLNSLTIKNKFPLPIVDELLNELAGTKFFSKLDLRSGYHQIRMLETDEFKTAFKTHHAHFQFRVMPFGLTNAPATFQCLMNSIFAPFLRKFVLVFMDDILIYSRSLEDNIHHIELVLQLLQQHQLCAKLSKCSFPQNKLEYLGHIISAEGVATDPEKTRVMQDWPLPSNVTELRGFLGLTGYYRKFVKHYGILAKPLTMLLQKNAKFVWTPQAQSAFVALKEAMCSTPVLALPDFAKPFVIETDACATGIGVVLSQEGHPVAFYSKALGIVNQRLSIYEKEFLAIMMAVDRWRSYLLRGPFVIKTDHKALCHLDDQTLDTELQKKAMTKLIGLQYKFQYKKGVENKSADALSKEILNSYAVDSSAQQLLCELAVSSPNAKGFSLSNGLIRKAAWQDVSMDFIEGLPLSKGANVIFVVVDRYTKFAHFLPLRHPFSALQVAKVYLNNVASLYGLPKSIVSDRDKVFTSNFWQTLFKRFEIPLHLSTTYHPQSDGQTERVNQCLEMYLSPSNSPNADQLFQERAMFSSLLKHHLSRAQNRMKQTADAKRTLRSFQPGDLVLLKLQPYAQKSVVARPFPKLAFKYFGPFPVVAKVGSVAYKLQLPDHSEIHPVFHVSQLKQYIPDASPVFSTLPSTLQLDATELIPSEILDRRMVKKDNAAVVQVLVRWGTLSPELATWEDYDVLRARFPLALVWGQAGARGGGGKCHVCHYRTSQWRQRKENRGKRKVRRRVFAKKAYCVKRVNHTQKSNGISSCANYCGFYLEVYRLPIPPNLALLIDA

SEQ ID NO: 16594 - protein, 1347 aa, Oryza sativa
  Clone ID: TF_OSC401158j.C1.p5.fg
MSIAEGEVVNLNQKVVDLSTNLDRILGSLKGVEAWIPSVDAGMQGLRRSVEGIKARVIKLEAQSSTATPPPNGHRVDNKYQGEATAAESAQERTLVKSKIQIPQSAVNFEVGESSEWGIGNSQFGTQGPRLPKTEFPKFDGDNPKLWKKKSEKYFDMYQVPYATWASFATLHFVGNAALWLQTYEELHAVESWSELCVAVNGKFGRDRYQQFLEKLDNLKQEGTIEEYYSRFEELMHKVLVYNRGYDETFFVTKFLGGLKTEIKAAIKLHRPGTVDAALSLAKTQEELLMEVNLKAYHKTTIKESFKNNFKVPSLAKGILGPPPDEIKKTEERPKWEEQYDSLNAARRARGECFKCGEKFGPGHKCPKAVQLHVLDELLEVFQFSDEPGQVEESSSDEELLLSENALFGTEGKRTIWLQGLIQQVLILIDSGSSSSFMASHLVDRLHLVPNSIPSALVMIIDGGKLFCDEMAEQVEWWCQGNTFSSNFKILGLGGYDLILGMDWLEAHSPMWIHWGRKTGMHKKGVISQLIQLCSIQEIAANQEAIPREIEAVLQHYQGLFQEPTELPPHRTFDHEIPLLDGAKPVNIKPYRYAPKQKDEIEKQVTQMLQHGVIQPSHSPFASPVLLVKKKDGTWRFCVDYRGLNDITVKNKYPMPVVDELLDELSGLKWFTKLDLRSGYHQIRLVEKDEFKTAFKTHQGHYKFRVMPFGLTNAPATFQGLMNTIFAHAIRKFVLVFVDDILIYSKTLAEHVCHLKSVLTVLQQHQLYIKRSKCSFSQPSLEYLGHIIGAIGVATDPQKVQAIRDWPVPKNLKQLRGFLGLAGYYRKFIRNYGVITKPLIELLKKGTFFFWSTLEHTAFQEVKQCLQQAPVLAMPDFNQQFVIETDASDKGIGAVLMQAGHPIAFLSKALGPKAQGFSTYEKECLAILMAVDKWHQYLQYAEFAILTDHRSLTHLCDQKLSTPMQQKAFLKLLGLQWMEVVVDGYHHDPATKQLLVELSLHPDGVNNFTLVNGIIKFKGRIWLGKHVEAQQAVLLSLHNSGVGGHFGIAATYQRIKSMFAWPGLKRDVKAYVQSCAICQQAKAIISDRDRIFTSALWQELFRLSDVKLNMSSSYHPQTDGQTERLNQCLEAYLHCAVYSSPALFARKPTSFGVIDMGQSTIPDVQQLLVNRAKLNELLHHHLVRAQQRMKAQADKHRSKRQFAPGDMVYLRLQPYVQLTMAKRSCHKLSFRYFGPYKVLERIGAVAYRLALPAGSLIHLVVHISLLKKAVQPDTPVSSDLPLTCSTDEVEVYPKAILRRQLIKRGGSSIPSVLVRWSGLPDTLATWENLADLWRRFPSALAWGQASP

SEQ ID NO: 16595 - protein, 371 aa, Oryza sativa
  unsure (1)..(371): unsure at all Xaa locations
  Clone ID: TF_OSC414007j.C1.p20.np
SKFTWPGFKKDVEQCEVFQQAKAEHGMAPDLLRPLHVPLQVWEIPKSGRFYIILVVIDKFTKFAXLIPLSHPFTTLTVAQAFMSNIYETLTCQLFKLAYVKLNMSLFKLAYVKLNMSSSYHPXTDGQSEMLNQCVEAFLWCDVHACLTKXSQXLSQAQHXYNTDFHRALGKXPYEILFARKHTYFGEVNLGQSIMPDVQVWLQEYSQLNVVLRHQLIKAQMVVHQANKHRTERWLELGDLVYLKHQLLIHQPYMQITVAXRSYHKLSFKYYGPYRVLDWVRAVAYKLELLVCSQIHLVVHLWLLKKALKVGTQVITDLPKLCDTTAEVVPEEVLQHQLIKSGRAMIPHVLIQWTRLPMELATWENLCQLXQ

SEQ ID NO: 16596 - protein, 149 aa, Oryza sativa
  Clone ID: TF_OSC16508j.C1.p1.np
VPVSMNNPCFWSKLQPYRQTAFGIRGALKLRSKFYGPFKIMEKVGRVAYKLQLPEGSNIHPVFHVSQLKKHIGSRAVPMANLPSVGPDGQIKTEPVAVLKRRMIPRGGVAVTQWLVLWHNLSPSEATWEDASMIQSMFPSFILEDKDQL

SEQ ID NO: 16597 - protein, 1414 aa, Oryza sativa
  Clone ID: TF_OSC30417j.C1.p2.fg
MAQDGKLDLLLKMMEEAEKEREEMDRKREESEALNLVELQLLKLAMESRIPLVEKQVSELGGSANDLAKRVNSLQASVEKCQREVQQNALYKGESSQGPTQFPNDDDLNGNSPNPFLFTPQQGWRNPPQFNSVSPFTPENSGCPIFDSGMASIGGNVPSMSCPQFDGENPQMWRDNCEIYFEVYGVHPANWVKVALLNFTGSASFWLQSVRNELVGISWLELCDRVCPQTGSVTEYVERFDSLMHQLLAYDNALTPRYFLTKFVDGLKDDIRGAVMLQRPEEILEGSRKPSYRKSDGTNFNKVFSRPTQPTVWPKSPAQTTGDDRKLIESGKIRVKGLIQGTKLLMLIDSGSSHSFLDENIVQTMQGVTSLPQPVKVKVASGEVLICDKQLPDYAWWLQGRCYRTNFKLLSLPGYDAILGIDWLQGLGVMRIIWVQKWLEYEINGSPVRIQGVMPKVDACPLISGDKLMGLCKMGALMHLFQITSETDIHKPEIPIMIQEVMNEFNSVFEEPQGLPPRRRCDHSIPLIPGSKPVNLRPYGYNPAQKDEIEQQVRDMLKSGVIHPSVSPYSSLALLVNKKDGTWRLCVDHRLLNAITIKSKYPLPVIDELLDELAGTGWFSKLDLRAGYHQIRLVAGEEPKTAFQTHFGHFEYRVMSFGLTGALATFQGAMNETLASVLRKCALVFFDDILIYSPTLEAHAQDLRTVLQLLQDHQWKVKLSKCSFALKELNYLGHTIGVAGVSTDPSKVQDIVNWAIPTTLKKLRGFLGIAGYYHKFVKNFGVISKPLTNLLRKGVEFVWTPEVHESFEQFKKALASAPVLALPDFTKPSVIETDASEIGIGAVLSQDKHPIAYMSKALGPRTRGLSTYEKECLAILLAIEHWRSYLQYAEFTILTDHKSLMNLTDQRLHTPWQQKAYTKLLGLQFKICYKKGIHNEAADARSRCDHNSSLEVVAISQHLNRAQQFMKSQADKKRSFRAFAVGDWVYLKLQPYVQTSVAARANHKLSFKFFGPYEIQEKIGVVAYRLVLPASSSIHPVFHVSQLKAAQGFKGDASVHLPVQSSTKQVPVAILDTRVRKSGMSVIPQVLIHWSDDVIANATWEDLEDLRTRFPRALAWGQSSFQGGNIVKAALGADADIAKEEKIEGRGRKNVKAAQVLTTIERWQQCRVVDNKLMAMVDGLMEDGAGSGEDDRGGWHNSAAPFAENSRERESEDSQSWALLSFGIRAMSAPASGSSRTHRRTGRRLSPSPPRVSGRQLVVQRIVKEDGSVYYPILRRSNYSDWAVLMRVNLQAQGLWDAVDTGDVPYQEDCQALSAILRAVPAEMVRPLAEKDSAKDAWDALKSMRVGADRVKESRAQKLRQTFESMRFKNGEHLEDFSLRLQSLEMICLKRRLFENCFASFPGGIAKWLYRLKP

SEQ ID NO: 16598 - protein, 1353 aa, Oryza sativa
  Clone ID: TF_OSC412872j.C1.p11.fg
MSSTVTNVADDWKKGLAEVLDRLDSIRGKLSDLDNEQQAHHIAIQRLERAGRDRSPRRNNRDRDDDHDNDGRRGDRPPRYHKIDFPKFNGQGDPLHFLNRCEQFFQGQRTPEEEKVWLASYHLLDGARQWYMRIERDLGTPTWRRFSDLLNLHFGPPLRQAPLGKLAACRRKTKVAAYIDRFLDLLARAGPLTEEQQVDLFTTGLQEPLSIDASSSAAPTPSQPDAASSVGQASTQVAGRTVRRLSQSEMDERRRKGLCFNCDELYARGHKKVCKRLFLLDLAYDDDDDEVEGAAPAVEPETLRISLHAVTGVRPSNAMHLHVRLGDATLHALVDTGSTHNFLSQEAAARVHLPLVQRAGLRVTVANGDKVPSPGMFQDARISIDTEVFITDLYVLPLGGYDLVLGMQWLSTLGQILWDFGQLTMSFWHKDHMVLWRGLPTGASPAAHVATTRDLLDDLLTEFADVFATPSGLPPPRHQDHRITLLPDTAPVAVRPYRYSARHKDELERQCRDMEAQGIIRRSSSAFSSPVLLVKKADGSWRFCVDYRALNSRTVKDKFPIPVVDELLDELHGARFFSKLDLRSGYHQVRMRDADVEKTAFRTHDGLYEFLVMPFGLTNAPATFQSLMNEVLEPFLRRFVLVFFDDILIYSPSWSSHLQHLRAVFNTLRAHKLFVKRSKCSFGDTSVAYLGHVVSGQGVAMDASKVQAVVDWPRPCSARALRGFLGLAGYYRKFINDFGAVAAPLTRLLKKDGFLWSPEAEVAFGRLKKALTTAPVLALPDFDQPFIVECDASGTGFGAVLHQDGGPIAYFSRAFAPRHHALAAYERELIGLVQAVRHWRPYLWGRRFVVKTDHFSLKYLLDQRLATLPQHHWVGKLLGFDFEVAYKPGRQNTVADALSRRDEPAASLCAITTPVFDWLQDLHTANDTDPALVALRDQILAGNRTAPWALTDGIVTFKQRMYIPPASALLQTALAMVHDDKHEGIQKTLHRLRREFHTPGDRRVVQEFVKACAVCQRNKTEHLHPAGLLLPLPVPSAVWSDVSMDFVEGFPRVAGKSVILTVVDRFSKYAHFITLSHPYSAESVARAFYTDIVRLHGIPTSIVSDRDPVFTSTFWNALFAATGTKLHMSSAFLDDIRYRLEQAQQHAKKFYDRHHRELQFVVGDWVWLRLRHRVPASLATPVKGKLGPRYYGPYKVLEIINKVAYRLALPAGARLHDVFHVGLLKPFVGTPPTSPPALPSTLHGAALPQPAQVLKSRMARGVHQLLVRWDGLPASATSWEDLDDFRTRYPAFQLADELFVEEGRDVMWGIQYQRRNRRQQPEQAPLDTKEELGVNGFKKGEVNPVCSFLIYGN

SEQ ID NO: 16599 - protein, 1118 aa, Oryza sativa
  Clone ID: TF_OSC414256j.C1.p13.fg
MEKATATTKVAGRRQRGMDSSPAHEGDGVPVGFRRREAVAEMAHTAAELAAAAAWRGGGPSGNGTRPEMGGGDGARRAWRDGGRGRGRGRPLELMKRVEIGRSLLGQCVQNLEEVLESVRRENRRAEVVGGARGSFKSGGFSSVSARAIPGVGGRADDRRSQDDHRTPEDKIAALQAYRRAKGLCHTCGEKWSKEYKCGPTVQLHIVEELLGMFPSEAADGCDSDCREDEVTESEGVLCQISKEAILEFADKLSTQQYFCPAIKVKVADGGSIFDEPQGLPPSRVFDHSIPLLPGAKPVNLHPYRYNPAQKDEIEKQVREMLQQGVIQPSANPFSSLVLLVLKKDGTWRFCIDYHHLNAIIVKNRYPLPIIDELLDELLGACVFTSLDLRAGFHKIHMKLEDEHKTAFKTHNGYYEFRVKRSKCTFASSQLTYLGHVISDAGVSTDPKNIAAVVRWAVPQNVKEVRGFLGLAGYYRKFVRHFGVISRPLTDLLKKHVVFVWTSEHQAAFDALKAALTSAPVLALPDFTQTFEIETDASDRGVGAVLMQVDHWRSYLQFGEFIIRTDQRSLIHLGDQRLATLWQQKALTKLLGLQYKLVYRKGVENRAADALSRCDSPEILQLSALSVCVPSWLDEVRDSYASHPHTSSLLSQVLLQPESAPHFSVTDGVLRYKGRIWLGHNVGLQQKVLGALHNAAVGDHSGVQVTYTRLRRLFAWPGLKKSVQLFVDSCSMCKQAKAERVRYPGLLQPLPVPEHAWQVVSLDFIEGLPLSLGFNCILVVVDKFSRYAHFIALAHPFTAFDVALAYMQNVYKLHGLPQSMISDRDCIFTSNLWSELFKLTDTQLRMSSAYHPQTDGQTERVNQCLETFLRCFVHACPRKWFRWLALAEFWYNTTPHSALGTTPFEALYGHPPRHFGVRYIAECAVPDLTEWLQERQIITNLLRQHHLRAQQRTKSQADKHRSDRVFAVGDWVFLKVTARVGPVAYRLQPPYDCAIHPVVHVSQLRKASPPQSAVAVRPLPLVESEELIPVQIIARRLYKRGAAAVEQVKVRWMGQSSSDATWEDLAVLKQKFPTVPAWGQAGCPEGGHVTADDNPIKTIRRSARERRPNTRVTGPEWV

SEQ ID NO: 16600 - protein, 2192 aa, Oryza sativa
  Clone ID: TF_OSC401612j.C1.p11.fg
MKHLNDVRVGSKVARMYLVQANCVGGYKGRYFYECVECDLGGNLLCCDSCPRTYHLECLNPPLKRAPPGNWQCPRCRTKKVSLKLLDNADADTSKRERTRRMRTSTTSDSPSPSPQNKASFNTSRGAAFRDDEPGAKDNEVEKRKPLILHLKKRSTKELSTDTTSSKSGLLGKSSEEKQEKHGSALKVKKHLHPMELSPKKYKNKKQHNHRDSKRSEAKKVQYLASDVDSDSSMEPSTSLEHSESPPPKRKSLDGRTPASSTKKGKKKVKFVDKKHPENAVHITEKEHGGAGDKITTQGDLQVDRILGCRLQTSQIISPAHASSEQIDMAPPSASGAPEPSQALLKGLHEEIQSSNSDTNVTEDACADELANDGGENNLDCSDAQKESNVRSHGHKESLNAKEIMNTASACSADQIVTVKDAGAVQTYVTASVNGEYETVTDIPEEKNDTKHPVSKADTEVHTKQEHTPDSKLHGKIQETELKEHDGTTYEFLVKWVGKSNIHNSWISESELKALAKRKLENYKAKYGTDEIEEALIKWCALPYDECTWERLDEPTMVKYAHLVTQFKKFESQALDKDKGGSHAKPREHQEFNMLVEQPKELQGGMLFPHQLEALNWLRKCWYKSKNVILADEMGLGKTVSACAFLSSLCCEYKINLPCLVLVPLSTMPNWMAEFASWAPHLNVVEYHGSARARSIIRQYEWHEGDASQMGKIKKSHKFNVLLTTYEMVLVDAAYLRSVSWEVLIVDEGHRLKNSSSKLFSLLNTLSFQHRVLLTGTPLQNNIGEMYNLLNFLQPASFPSLASFEEKFNDLTTTEKVEELKNLVAPHMLRRLKKDAMQNIPPKTERMVPVELTSIQAEYYRAMLTKNYQVLRNIGKGGAHQSLLNIVMQLRKVCNHPYLIPGTEPESGSPEFLHEMRIKASAKLTLLHSMLKILHKDGHRVLIFSQMTKLLDILEDYLTWEFGPKTFERVDGSVSVAERQAAIARFNQDKSRFVFLLSTRSCGLGINLATADTVIIYDSDFNPHADIQAMNRAHRIGQSNRLLVYRLVVRASVEERILHLAKKKLMLDQLFVNKSESQKEVEDIIRWGTEELFRNSDVAVKDNNEASGAKNDVAEVEFKHKRKTGGLGDVYEDRCADGSAKFIWDENAITKLLDRSNVPSTVAESTDGDLDNDMLGTVKSIDWNDELNDDPGATEDIPNIDNDGCEQASEAKQDAANRVEENEWDKLLRVRWEQYQTEEEASLGRGKRLRKAVSYRETFATIPNEALSEDSDEEDEPKREYTAAGLALKEKYEKLRARQKERIAQRHVIKNYADDRLEEFMKLYDSSANPLRIVEDPNPVQPSGAKRLGESTAEMKQSSKKTKRYPEIPQELYAKLTGNAASSKHHPKAADISNSGTPHHLLPVLGLCAPNADQMNSYKGSVCGPSTKEQKRASGELANKPLLTPAVDHSSEQKHDGQPTPCKPMFPGSSEETLRRLNNIIPDSYFPFQPIPPISGKGIGDHVENPVSSIPSFQGKLGLPNFSLEDSIPLKHLKSVPDLFPNLSLGTSNEYLRNCVPELPNSSFLPSFMADIAGTSKQKNKFMADMSGLLPGLAINPVQQIHSSMPENHKKVLDKLMMRAQYSSSKFLKNASNKFLKKSLKPDYWSEDELDALWIGVRRHGRGNWEAMLRDPKLKFLSHRSHEELASRWILEEQKIIEEPMPTATRSSNSTSFPGISDAMMSRALNGSSFSKLRMEPPKLQSHLTDIQLGCNDIPTRFSHVEPTNYMNLSEGGPSLTPWQDFKNRSGHSGDFPGPLDKWEKPDMGLIPPFMPNPFMKESIGSLPINRHSSNSIQQNEVGSSSHESILHGFSDGQAKLFHEMQRRVKLGKLPIEMNLNHTKLSDPLAENSGDFESSKPNKLPHWLQEAVRAPPSKPPECELPATVSAIAQSVCLLLGEQKPAIPPFPIPGPRLSLPKDPRSAPKKRRVHKVQQASSLVDHSKTTVGQGDHNSTPSAPLSMEAAPASPAVIKSSDTPSLNLNSPSSSSAGSRGQDASTPSTFEEPERTMEVSEPASVAAATCPSRPEPPETGTHRIEFSAVDDMDTGSCRSPVRDTPDPDNQKSELSGSGNTPTELSVLPLVDAPGTSSEPAVVPVSSDEESTQEGVPGKAVSTGDQEKRTPPDESENSGAANPVSAAQTADEDKVDEMITDEH

SEQ ID NO: 16601 - protein, 1532 aa, Oryza sativa
  unsure (1)..(1532): unsure at all Xaa locations
  Clone ID: TF_OSC400800j.C1.p28.np
MKSMEERLLDAMNAMAAKDDIATHLMXIDLKLEQQGERLGRVKTKVDLSLTSLDQVQQEQTWVXRALKAVIVAPSPPPPLPPETPHQAPTSSEPQPPPPPPLGTFTSLTSSEPQPPPPPPLGTFTSLPPGDCEHCDMGHRQWTPKMDFPKFDGNGVKVWIDNCETYFAFYQITEAFLVSATSMNLMGDAANWYQTWKLEVGWHDWEMLKTAISREFDVHLWSVKMDELLLLKQTSTVIEYCSKFSELVYQIRLYDPLLCGSVLVSHFMLGLKDDLRSFVQAAQPTTVTQDCLVALAQEGAHIGQPINQCRDNAVGRGNEKPKLARGELWKAQQLKEYRRAQGLCFKCGDKYVSGQVCVKQEAELKLVQEEPVILFDDILDAVTAPELVEEDFNLSLHALAGTCSSATVQLRALVGNQVILIFVDSGSSHSFVNSDLCAKLQLPTTATLPISVKVANGEVLSCDAKIPQFTWWVQGYHFSFTMRLLPMGXYDVVLGMDWLTQYSPMTCDXAAKTIQFSYQGAEIILQGVASPIVIEVTEVSATQVVKWDQGNDIWAMAMLEPVAALSSSSSEYPAIQQLLQQYSTLPPDRVLNHSITLLPNSVPVNSXPYRYSPAQKGEIEKQVFEMLTAGLITPSCSPFASPVSLVKKKDNSWRFCVEYRRLSSLTIKNKPLPIAEELLDELASTKFFSKLDLKSGYHQIRKLEADEYKTAFKTHHGHVQFRVMPFGLTNAPATFQCLMNSIFAPFLRKFVLVFMDDILICNKSLEEHGHHLELVLXLLQQHQLCAKLSTCSFATSQLEYMGHIIFAEGVATDPEKTQAMASWPIPTNVTQLRWFFLTGYYRKFVQHYGILAKPLTMLLQKNTKFVWTPQAQEAFAALKTAMCTTPVLTLPDFSKPFVLEIDACATGIGAVLSQEGHPVFYRKALGIANQKLSIYEKEFLAIIMVVDKXRSYLLTSPFVIKTDHKALYHLDDQSLGTDLQKKAMTDLQKKAMTKLIGLQYKFQYKKGVDNKSADAFSRVGHLFISVVQPAWVQEVPNSYVVDLFAKXLLQXLAITSPNSQGFTLSHGLIRKADKIWIGVNSALQTKLIAAFHSFAIGRHCGIQATYQRVKKLFVWKGLKKSMEEFVXQCAVCQQAKHEHCSYPGLLQPLTIPYGAWLDISMDFVEGLPTSKGSSVILVVVDRYTKFAHFLPLKHPFSALXVAELFLNNMASLYGMPKSIVSDRDKVFTSNFWQTLFKRFEVPLHLSTAYHPXSDGHTERVKQCLXMSLRCAVSSSPHXWCAWLPLAQFWYNTNYHFALQCSPXKSLGTDPSYGLLPAMSVNASSTDSDSPVADALLRERAMFSSLLKHHLTCAQNRMKKTADLKRTRRSFQIGDLVLLKLQPYAQKSVVSQPFPKLVFKYFGPFPIVDKIGSVAYRLQLPDHSGFHPVFHEXQLKQFVPDAKPVFSSLPSPLQLDITELVPSAILDHRMLKKGNALVVQELVRWGSLAPEWATWEDYEVVRARFPEPIAWGQAPARRGRGGGGANVTPDTLM

SEQ ID NO: 16602 - protein, 1644 aa, Oryza sativa
  unsure (1)..(1644): unsure at all Xaa locations
  Clone ID: TF_OSC411504j.C1.p5.np
KLIFRSKSTTWRSKTRDSRRLCWRFKRRSDMVVKQGETQEMLLKLKSVAGWRPQVDAAIQGLHEEGGNSSNTSQASRMAEEEGGNSSNTSQASRMAEEGSHQTPLLPTPSTPPLFSGTAASELGPDGHRVANFHRGKASGVVHTLGPPPVKGTYHEFSVPHGIEFGANSSRGNRDLHGEQGFNHRLPKLDFPQFDGSDPQGWRLRCEHYFGVYGTHPNLWVWVATIYFMGRAASWLRSSRAHEVFVDWGRFCEAVNRKFDRNQHRQLIRQLDQIKQTGSVSEFYEWFDDLMNQLLTYDPMYNTLNLVHQFIEGLRFDIRKAVLLHCPKDLESALVLALLQEELSERNQEQRKFGDGSQKFKNAYPLPLPPTKALKSEEKTQSANLSDKVSALRSFRRAQGLCYLCAEKWSPTHKCSGTVQLHAVQELFALFPDNVNEDQAGISSEDSDSSLLAMSVHAVQGTDSQSTIRLQGKIQGLNILMLVDSGSSASFVSDQLADRLTGVQFLAHPLSVKVANGQVLHCQKEMPSAEWFVSGQKFLTTFKVVALGGYDAILGMDWLTKYSPMHIDWQLKSIHLIVMGHEVLLRGVQSNTSDCALISSQHLQHLHSIDSLSSIPDAVQSLVQEFSHLFELSSIPDAVQSLVQEFSHLFEEPSGLPPARDYDHTIPLIPGAVPVNVRPYRYTPAQKDEIEKQVKDMLQKGIIQPSASPFSSPVLLVKKKDGTWRFCVDYRHLNAITVKNKYPLPIIDELMDELAGACWFSKLDLRLGYHQIRMAVGEEAKTAFKTHNGHFEFKVLPFGLTSAPATFQGVMNTVLADQLRQNVLVFVDDILVYSRTLEEHKNHLRQVFETLSKHQLRVKLSKCSFAQTQLSYLGHIISADGVSTDPEKIQVVRQWPVPVSVKDVCSFLGXAGYYRKFVRHFGIISKPFTELLRKGQPFIWTQHHQKAFDTLKQSLISAPVLVMPDFQKMFVVETDASDRGIGAVLMQDQHPVAFLSKALGPRTQVLSTYEKESLAIILAVDHWRSYLQHEEFLIRTDHRSLAFLDNQRLTTSWQHKAMTKLLGLRYRIVYKKGLENGAADALSRRSSDGLPICALSVGLPDWLQDVVSGYKSDPEALQLLHSFKEGTPHSAHFELQNGILYFKKRVWVGNNRQFQQQVLANLHTAALGGHSGIQVTYQRVKQLFAWPGLRQTVQDFVHSCVVCQQAKPEHVPYPGLLQPVQIPEHAWQVISMDFIEGLPRSASYNSILVIVDKFTKFAHFLPLSHPFTAVSVAQLFMDRIHSIHGLPLAIISDRDRVFTSIFWKELFRRSGTQLRMSSSYHPQTDGQTERVNQCLEMFLRCFVHACPSRWSQWLSLAQFWYNTSFHSALMLTPFEAMFGHKPRHFGLSVDSVGVPSALDSWMQDRHNMQSLIHHHLVRAQQRMKSQADSKRTDRVFAVADWVFMKLQPYVQQFVMTRANQKLAFKFYGPFQILQRVGSVAYKLQLPATSLIHPVVHVSQLKKAVAASEVVQSTLPRLDPDSGHLATPVEVLQQRLRRRGDKMIVQALVRWSGTSSSTTSWEDLEELRHRFPSATAWSQAVFQGRGNVTSGTGTPDDEEQVSKIAGSVQSTAQQRHVRVTRPNPNSRVALPFRRPCWARRSRTAA

SEQ ID NO: 16603 - protein, 542 aa, Oryza sativa
  Clone ID: TF_OSC411151j.C1.p1.fg
KNQSEHLEHIKLVMQALAANQLVVRLKKCDFGLDRVNYLGHIISEDGVSTDPKKICAIKNRKAPRNVTEVQDIKRSYEEDVLAHKILSLIDTDGDPERNYKCESGLLKFKGRIYVGETTEIRQLLLEVYHTSCFGGHSRIRATYHRIKQLFYWPSLKRQVEHYIRECPTCQVTKAEHVHIPGLLNPLEIPDMAWAHISMDFIEGLPKSQGKDVILVVVDRLTKYTHFLALSHPYTVEQVVQIFMDNIHKLHGMPIAIVTDRDRVFTSTFFQEIFKIHKVKLRFSTAHHPQTDGQTERVNQCLESYLRSMTFQEPQKWFSWLALAEWWYNTTYHTSIQMTPFQALYGYPPPQISEFSIPCNISEEARVTLEDKAMILQKLKGSMGEAQRRMKFYADKGRTERTLEVGDMVYLKLQPYRQVAMGIRGSLKLRSKFYGPFKVIEKMGSVAYKLQLPEGAGIHPVFHVSQLKKHLGPRAIPMPNLPAVGPDGQIKTEPAAILQRRMVPRHNEPVIQWLILWENLTPADATWEDASYIQAVFPNFQP

SEQ ID NO: 16604 - protein, 1160 aa, Oryza sativa
  Clone ID: TF_OSC414256j.C1.p10.fg
MADPRVKRLEMGEIKGLLSSICASMSSQGPGFGGTAGASTSGIARGAAGLAASAAATVSNTATVAGSSSVPPGFSPRPNTTGLQTGAGATPLTSGAQGAMTSVGNVNFQIEPNTVNPSFGPVFTTATRTHVLPERRNFNFPERESQEDVGMNHYGIDTNQPWRYPTRQPGGTAVGTRAGMPNPGGGMYWQEPPRYLHGVIPNPYTEMSLRSQRLELTLFNGEDAVGWLQQCEKFFEMTGTPVDQWVNLASGHLVGRAGKWFRNLAIPWYCLNWQQFYLMVLDRFTEANAHEAVELLQNAKQTGSVMQYIDKFEDCVSLVKRDHPYLTESYILSCFIGGLRADIKHDVCGQKPQNLLAGYWYAKVYEKASIAKRLSYQSEFNRNKPQFQPAQSSGTRFVNQKNTTQGVEKEKKTCCYHGEEEGWELEDVCGLSAIECQNRQEQVPYAYHRRLLDELNGAKVFTKLDLRSGYHQIRMVEGDIPKTAFKTHMGHFEYLVMPFRLTNAPATFQALMNQIFGKLLRKCVLVFFDDILIYSRDLREHEQHLRIVLNILRSHKLFAKRSKCTFAVGSIEYLGHIVSGEGVATKPSKIQDVVDWPVPKNVSKLRGFLGLTGYYRRFVKGYGTICRPLHDLLKKNSYQWGVEQQKAFDNLKEVMTSCPVLALPNFNQPFVLETDACGIGIGAVVIRTDQQSLKFMATQRLTEGIQHKLLLKLMEFDYSIEYKKGKENKAADALSRRDTDGDKCLAITLVYPAWVEDVKNNYMGDEKYAKLVTGEELNEGAEGFTLQSGLLRYKNRIYVGQSTDIRQRLLQSFHNSTFGGHSGMKVTYHKLKKIFYWPKMKKDVDRQVTECPTCQIAKPEHIHVPGLLDPLQIPEMAWTHISMDFIEGLPKSHGKDVILVVVDRLTKYAHFVAMSHPFDTQDVIQVFMENEPKEWYKWLPTAEWWYNTSYHTSLQVTSYEAMYGVTPPHIGERAIPGNVSEEARATVQQREDMLARLKENLAKAQTRIKKLVDRLRSERQFELGDMVYLKMQPYRQNAFGLRGSLKLRAKFYGPFRVLEKIGKVAYKLQLPEEANIHPVFHVSQLKKHVGRQAIPLPNLPLVGADGTVKTEPLAVLARRVIPRQNEPVVQWLIHWENLTPEDATWENATFIQATFPHFRP

SEQ ID NO: 16605 - protein, 1479 aa, Oryza sativa
  Clone ID: TF_OSC900307j.C1.p21.fg
MVTKTRSQESMDGVEELTEMRVEIATIKKDLGALKGLKNEMAEVKKLLKVMCASLGEGDPEKRPETGEASERVSGAPHDVNATTALADIIDGSGPMLTGTAPIMSQGGGFFIEPNVTQPRMSNCMASMPFVAGSNAVYAEAIIKGPRLEISLFEGDDVIGWLKQCEKFYELTGTPHEQWVNLALAHLSGRAAWWFRGVGIPWQLISWPQLAAMMCDRFCEASDHEAVEQLQNVKQANLSVTQYIDKFEECVDLVRREHPYLQEQYLNSCFIGGLRGDIKHDVSGQKPQGLLQSYWYAKNYERAANAKRAIYNFNRNRNQQQFAGNQGRPMGPRNQLRGEVDKKEEKKCWFCKEPWFPRHQCKVKQALHALLVEDEEQGEDSEGNAEEVIQEEEPPVEQEKPVQEGAKVELMCISQNALQGTTRPDTFLVMILINGRRAVGLVDSGSTGTFMDQEFALKSKCPIHQTLAKKIVVAGRGELLSEDQVPEIKYQIQGEDFSNGFNLIPLKGYEIILGADWIFTHSPITLDLKQRELVITKEKQKIILQDFTKPGKRARVGEKKMGKLIRKGAVGCVIQIHTISVEKENEKHVIPPEIQEILLKFPQVLKEPQGLPPRRKCDHTINLKTGSDPPNLRPYRVPHYQKESMENIIAELIQSQEIQISDSPYSSPAVMVRKKDGSWRLCVDYRQLNGQTIKNKFPMPIIEDLLDELHGSRVFSKLDLRSGYHQIRMHPDDVHKTAFRTHLGHYEYNVMPFGLTNAPATFQALMNQVLAPYLRKFVLVFFDDILIYSKNKEEHLEHIKLVMQALLDNHLVIKLKKCEFGLDRIAYLGHIISSEGVATDPEKVEGIRRRKIPNNITELREFLGMAGYYRRFIKGYGVICRPLHDMLRKDAFQWGPEQTTAFEELKLRLSTSPVLTMPDFSQPFVIEADACNTGIGAVLMQTGKPIAYLSKALGPKAAAQSIYEKEAMAILEALKKWRHYILGNKLVIKTDQQSLKYMMNQRLVEGIQHKLLLKMMEYDYSIEYKAGKENLVADALSRGKISEAVPAESCQAITVVIPEWVTDIKRSYEGDVLAHKIISLIGTDMDPEQLYKEESGLLKYKGRIYVGSVTKIEHVHIPGLLSPLEVPDMAWSHITMDFIEGLPKSKGKDVILVVVDRLTKYAHFIALSHPYTVEQVVEAFMDNIHKLHGMPLVIVTDRDRIFTSNLFQELFKARRVNLRFSTAYHPQTDGQSERVNQCLESYLRNMTFKEPQNWYSWLALAEWWYNTTYHTAIQMTPFKALYGYTPPQINEFSVPCNVSAEARVSLEEKEAIIQNLKSSMDAAQKRMKHYADRNRTERELQVGDMVYLKLQPYRQNALGVRGSLKLRSKFYGPFRVEQKIGQVAYKLQLPEGANIHPVFHVSQLKKHLGRHAVPMPNLPLVGPDGQIKAEPVAILQRRMIPRRGEPVVQWLVLWRNLSPADATWEDATFIRATFPNFEP

SEQ ID NO: 16606 - protein, 1347 aa, Oryza sativa
  Clone ID: TF_OSC401048j.C1.p10.fg
MAGANDDVWRQRFDDMMRRLEELSGLITDIDQQQRTQTLAINRLENGARAPSSRFDDLSDVGDRNGGRFAHHNVGRGDRYGRGGDGFHGHGRPGGHRFDGDGDRPPRYHKLDFPKFDGRGDPLPFLNRCEQFFRGQRTPEDNKVWLASYHLLDGAQQWYTRLERDHEPPSWHRFSELLNMRYGPPLHSTPLGELAACRRTTTVDDYAERFLDLLTRTGYLSEDQQLGEDDTDNDSATDQADAAATLRISLHAATGVRASDAMHITAHLGDTDLYTLIDSGLMHTFLSQDTAARVGRAPQPRMGLNVTVANGDKVACPGVFPDMPLQIAGEEFATDVYVLTLGGYDLDFTVLTMSFWHRVTLHGLPGHQRPRALACAPAALLDSLLEEFADVFTEPTGLPPARDRSHRIQLLPGTAPVAVRPYRYPVRHKDELERQCRVMEENGLIHRSTSAFSSPVLLVKKADGSWRFCVNYRALNERTVKDKYPIPVVDELLDELHGAAIFSKLDLRSGYHQVRMHPDDIDKTAFRTHDGLYEFLVIPFGLTNALATFQSLMNDVLRPFLRRFVLVFFDDILVYSPTWTSHLQHLRTVFTALWAAQLFVKHTKCSFGDPSVAYLGHIISQHGFAMDAAKIQAVAEWPRPRSPKELRGFLGLASYYRKFIQDFGSVAAPLTQLLRKDSFAWAPATDDAFQRLKLALTTTPVLSLPDFNRPFVVECDASGTGFGAVLHQGEDPIAYFSRPIATRHHALAAYERELISLVQAVRHWRPYLWGRQFIVKTDHYSLKFLLDQRLSTIPQHHWVSKLLGFDFVVEYKPGKQNAAADALSCRAAPDSQAFVLSTPTFDLLKDIRTAGDTDPALQALRDEINSGTRTTPWAVIDGLVTYKRRIYIPPGSPWVSVVVAAAHDDGHEGIQKTLHRLRRDFHTPDDRRVVHDHIQGCLTCQRNKTDHLHPAGLLLPLPVPSAIWSDVAMDFVEGLPRVGGKSVILTVVDRFSKYAHLIALAHSYTAETVARAFFVDIVRLHGVPESIVSDRDPVFTSAFWTALFTATCTKLHRSTAFHPQSDGQSKAVNKAIAMCLRCMTGDRSRQWLRWLPWAEYIYNTSFHAALRDTPFKLVYGRDPPSIRAYDASELRVAAVAQSIEERDAFLADVRLRLEQAQQYAKRYYDQKHREVSFEVGAWVWLRVRHRVPASLPEAVKGKLRPRFYGPYRVVAVINEVAYRLALPPGTRLHDVFHVGLLKPFVGVSPSAPLALPPIQHGAAQPVPRQVLRARLARGVRQLLVQWEGLPASATSWEDLDDFRNRYPSFQLADELLIEGGRDVMWGIPFRRRKQQAGLGAGRAIGPGGTAV

SEQ ID NO: 16607 - protein, 1319 aa, Oryza sativa
  Clone ID: TF_OSC401057j.C1.p37.fg
MAGANDDVWRQRFDDMMRRLEELSGLITDIDQQQRTQTLAINRLENGARAPSSRFDDLSDVGDRNGGRFAHHNVGRGDRYGTDEFRCADAASDDARRGHESCSFVRTPRTRSPATPPATTRRPRHTTTSSGGQPPGAGSRAGHRRLTGRHATAINRTVRRLSPEEMDERRRQGLCFNCDEPYSRGHNRLCRRLFFLELGEDDTDNDSATDQADAAATLRISLHAATGVRASDAMHITAHLGDTDLYTLIDSGLMHTFLSQDTAARVGRAPQPRMGLNVTVANGDKVACPGVFPDMPLQIAGEEFATDVYVLTLGGYDLDFTVLTMSFWHRVTLHGLPGHQRPRALACAPAALLDSLLEEFADVFTEPTGLPPARDRSHRIQLLPGTAPVAVRPYRYPVRHKDELERQCRVMEENGLIHRSTSAFSSPVLLVKKADGSWRFCVNYRALNERTVKDKYPIPVVDELLDELHGAAIFSKLDLRSGYHQVRMHPDDIDKTAFRTHDGLYEFLVIPFGLTNALATFQSLMNDVLRPFLRRFVLVFFDDILVYSPTWTSHLQHLRTVFTALWAAQLFVKHTKCSFGDPSVAYLGHIISQHGFAMDAAKIQAVAEWPRPRSPKELRGFLGLASYYRKFIQDFGSVAAPLTQLLRKDSFAWAPATDDAFQRLKLALTTTPVLSLPDFNRPFVVECDASGTGFGAVLHQGEDPIAYFSRPIATRHHALAAYERELISLVQAVRHWRPYLWGRQFIVKTDHYSLKFLLDQRLSTIPQHHWVSKLLGFDFVVEYKPGKQNAAADALSCRAAPDSQAFVLSTPTFDLLKDIRTAGDTDPALQALRDEINSGTRTTPWAVIDGLVTYKRRIYIPPGSPWVSVVVAAAHDDGHEGIQKTLHRLRRDFHTPDDRRVVHDHIQGCLTCQRNKTDHLHPAGLLLPLPVPSAIWSDVAMDFVEGLPRVGGKSVILTVVDRFSKYAHLIALAHSYTAETVARAFFVDIVRLHGVPESIVSDRDPVFTSAFWTALFTATCTKLHRSTAFHPQSDGQSKAVNKAIAMCLRCMTGDRSRQWLRWLPWAEYIYNTSFHAALRDTPFKLVYGRDPPSIRAYDASELRVAAVAQSIEERDAFLADVRLRLEQAQQYAKRYYDQKHREVSFEVGAWVWLRVRHRVPASLPEAVKGKLRPRFYGPYRVVAVINEVAYRLALPPGTRLHDVFHVGLLKPFVGVSPSAPLALPPIQHGAAQPVPRQVLRARLARGVRQLLVQWEGLPASATSWEDLDDFRNRYPSFQLADELLIEGGRDVMWGIPFRRRKQQAGLGAGRAIGPGGTAV

SEQ ID NO: 16608 - protein, 2630 aa, Oryza sativa
  Clone ID: TF_OSC400891j.C1.p34.fg
MWKTQPGGTSRDGRGGGSTARANAGTGYPTRSRTSGNPQFSAPTNGANQRAMASLRSPLRGGPDMPTSRRCSPRLSGTQQDEVAEVARVGMLKRASNNASNSSTSRAPTRSSSTTTASSKDVAEEHSSGVGSTSSLSKKRKRMTAKSYRSLFKRSKKASSTERARKILPMGMWQRATLVHQHISIETCPQNKVAESRLEVEGRDRPTGHSRQNSISSLQSAPIPPIHYEEPESGHGDGEPLSIQKEVASSQFKVTASDEMEGNSNICVACGTPGDLNRVCDSGPVMEKAAKEATMFLVWIIGWNICLLRLLFGIHSVADGIESLWNVKEGMQNGKQYLVKYKNLAHVHNRWVPEGVINDTPGGCDLLSLFNKRDHKEKTNWKKEWTEPHHLLRKRPLMPPKEADDFFCSSRANIEHCNVEWLVKWRDLGYEHATWELETACFLRTPQADELKRKYENRRKAAKQSSIPVETKVKHKTFQKLQRLPDEWPPGFDNDHLFSINQLLEFWCKSHGAVLVDDKEYVTKTILFTLTVLPDVCQPLLIVTTPASLSAWEIQFNHLAPFINVVVYDGQKDTLKLIQDLEFYDNRRCMMLQVLLSHPDAILEDIETIERIRWEAVIVDYYENSAFKYFEQLKKISTDFRMVLLGSPIKDNVPEYMNLLAFLNSEDKGYSDYVNADDALVMSKARFTHHIAYERKTDSSKFLEYWVPSCISQPQLEMYCSILLSKSSVLRSEMETDSVGALHDIYLSLKKCCDHPYIVNEFLRSSLSNNSNVTENIDTVVHASGKLLVLDKMLNEIKKKSLRVILLFQSDRAGGNKMGNILEDLMHHRFGPESYERVEYRAVLSRKQAAIDKFNNKTNGRFVFLIENRACLPSIKLSSIDAIIIYGSDNNPLNDLKALQKIKIESQFERVSIFRLYTPFTVEEKSLVLARQGIVIDNNIQDLRTSLKHSLLRWGAAFLFSRLDEVQQDDHASKSSEMERHFIDEVIVEFLTKLSTTVEDSTEVHRKSISKANMSGELYSRNITLMGEKEGISVLEDNPAEFWLNLLDGRSPHVSCISEPLQSRVTKSQTMDEVNAPAEEINEARKKHRKVGEIMGSSSKVVSDKSNDDALPDICTTSGPALQPVDVTQQKSVQSEGSESLMSTPKNLHAQMKQELSKLIKVLQLPNTIQFNGAKIAGQVLIEVDNVTLLVEQFFEYLLNNHVVVQEPKYIFHALNIALCWRVASIHNFKVDHKESLALAEKRLKYECNEELARLVYDSLKRKFPKKAGATGSNCQSTSVEKTKPSQQETSNILRNDHIFPKQRMDLHDNFMNGALQEGSFVAAQMVSEEQELIAVPGTHMECHFSTDELPDIVEKRINLIDNVFSVREYRIFDKQQSQISELEKYTQNKTARLKTVCNLVLEHICRSHADVETRNDTIKQTVQWFTMLMYAFLEHMRLQHSKLESLQSNTWAEERQLKEKLCLEAKSGQLDHTFDQQIALPDSNFVMQEFIHLKEQSSNSHVSGSAVSDCQQLCHDRLKMVNTLVRNVVPSEPISAQTVRNGSVEVVMVAGQPAPEVVDFPENNTCYSPDGIGLQKAKSPSIRPSNDDSINQESSASEYTSTENVERDNANPSTLPGVATSPAIGIYANLESTMVASTQNLTIFPASKEVATQSNLSTLPGSQTVETSQQPPAEAKLTENLGVTAWDVQPEMQTTTSTLDSPSARMCPDNNNQTVHQPDTSTSPLQEGSTSCHLTSVDATAGVTAKVDDTAAADPLDSETQSYTAAHKPAALLVSTEVETQTDQSSMLERQSISVPLVQSSLSSQNPPAEAEPASTLSRETARDVQPERQQSASVLETSLQRMHPDDDSQTKHQLETVLSQRGETCGHLGDAREIVDANDSNTVCDVRAHLESPIFATPQSLVICQGLSEVGSQGNISNMSSQQSTDLSAQQNLAPSPLPPAEAERTGLLTTQPAQNFQPELQPSTSLFDASLESNNISQTDCQSDRAVVFLQEGATTQQHLLDTGVVVDDIVAEEPSHSESPTYIIHETAALVVSTEVETQTCQSNIPIQQNTSHPAQQSPETSRHSIASPVGLEATQEFQPEMQPSTSGQDQSEELEQEGMSSSAIQDLQPEMQPPNSVQGQYPGAVLCIAAAEDLQPLMQSSTPVPNQLAEANQEGMLSAAAAQNLQCETQRLTSTQDAPFERTDLSGIPVPRSITTAHQSVVPSWDLQTGVEPTGALCMETTHERQSELPSGSMQERSAETRANLVQRSCTTETCDLQPQLDLSSTIQTVQLEGIRSEDMNQIGVQSNSALSSEQPTQPLPVAPLVFNYQRFSDEPLKNELERLKHTSNVLSKVHEQKRKQLLVEYNQEMEKLKQKYDSLLQKEDSFYAQKEAELDTIYRKVFINQSLAENFRRKFLPLSAAQGGSTRPTIGQLVQSSQEPSARIVAEQVTASPVTLSSAVRPQVLHSSGPYVQPSLVVQPSSQATQPQSILPGNMYRAMSSSPFSSTPMPMPHGTYRAAGAQPHAPSPHLQQLRMPSPYATSHGNQHQRPSILASLLPFVLPSSSNPSLTAPLSLNTVVHRTSGPLNAGAGSQHAGSQISGVNPSGSSASASLNTWLTARLALTSEARGTVSSTEVVCLSDDES

SEQ ID NO: 16609 - protein, 2071 aa, Oryza sativa
  Clone ID: TF_OSC900030j.C1.p7.fg
MSDARSRRSVASSTRRQQDAELATTEERRRATAQTTAAAARAARLAAAELAATRVEAETEAAEDVARAAKVEVETLRSSINGSIAGDITADRELEELARGRARERAERWAAAHLHGGGPRDRAPADGNPDGRGRAGGSAALSPLTGAMVTTASRRWSGTLVPAKRTAKEAWDAIAAARIGSDRARKSTLQALRKEWENLAFKPGEDVDDFALRLNTLLQKMVQYGDDTYDEERAVEKLFRCVPEKYRQIARSIESLLDLSTMSIEEALGRLKVVDGDEPQPLSGPITIGGKLHLTREQWEASQGDGRKGESSSPTGGCKPRKAWGGVQLRLLTGVYYIPALRNSIISVGQLDENGSRVLVEDGLMRIWDRRRRLLAKITRGTNRLYILSAQVAQPVCLAARRDDEAWQWHERFGHLHFEALKRLSAKEMVRGMPCLDHVEQLCDVCVVTKQRQLPFPQQTSFRAKEQLELVHGDLCGPVTPATPGGRRYFLLLVDDLSRYMWVMVLGSKGEAADAIRRTQAAAEAECGPKLRVLRTDNGGEFTAAEFASHCADEGIQRHYTAPYSPQQNGVVERCNQTVVGMARALLKQRGMPAIFWGEAVVTAVYILNRSPIKALDGRTPYEAWHGRKPAVSHLRVFGCLAFAKELGHIGKLDDRSTPGVFIGYAEGSKAYRILDPETQRVRTARDVVFDEGRGWVWDKAVDDGSTPTYDDFTIEYVHFERAGGVGSSSSPSVSTPVPEPPPTPTPTHPRATTSTTTSSSSTPPQPVSPRAPAPTATPPGTSTPTPARVERSPVEFATPFSHDEERIDAYHDGEQLRYRTMQDLLGDQPVPGLVPRDLEAQLHLACDDGEPRSFAEAEKHAAWRAAMRSEMDAVQENRTWELADLPRGHRAITLKWVFKLKRDEAGAIVKHKARLVARGFVQQEGIDYDDAFAPVARMESVRLLLALAAQEGWGVHHMDVKSAFLNGDLKEEVYVHQPPGFVLPGKEGKVLRLHKALYGLRQAPRAWNAKLDSTLKGMGFEQSPHEAAIYRRGNGGNALLVGVYVNDLVITSTKDAEVAAFKEEMKATLQMSDLGPLSYLGIEVHQDDSGITLRQTAYAKRVVELAGLTDCNPALTPMEERLKLSRDSTAEEVDATQYRRLVGSLRYLTHTRPDLAFSVGYVSRFMQRPTTEHQQAVKRIIRYVAGTLDHGLYYPRCPGKAHFVGYSDSDHAGDIDTSKSTSGILFFLDECLVSWQSVKQQVVALSSCEAEFMAASAASTQALWLARLLGDLLSRDTGAVELRVDSKSALALAKNPVFHERSKHIRVRLSNMQRGSTTTTIGSCNLRWATGFGSVSLATPVKGKLGPRYYGLEIINKVAYHLALPAGARLHDVFHVGLLKPFVGSPPTTPPALPSTQHGAVLPALAQVLKSRVSHGVRQLLVRWDGLSASATSWEDLDDFRTQYTVFQLEDELFVEEGRDVMWGIPYRRRNRQGTLLSNSFSVPDVSCVPDLTMQHMSAGQLADRNYRVILDPNFCYIQDRCTGQLVGTGPRRRDSQRLWELDWIHLPSTASASLVGSVFAASSTSSFAQWHHRLGHICGSRLPTMIRRGLSGHVSGHESLHQCQGCRLGKQIQLPYHSREYLSGALRHVLYEYGTLAQFSCPGAHAQNGVVERKHRHLLETARALLLGSCVPPHFWAEAVFTANYLVNIQPSSALHGGIPYEHLCSKLPDYFGLRLFGYVCYVLLAPHTTSASLVDPLSFLFLPDASIASTRPESQLAMAEEIAALERTGMWDLVPLPAHVCPITCKWVYKQEHGRDYDETFAHVAHMTTVRTLFAVASIREWSISHLDVKNAFLNGELHEEVYMRPPPGYSIPEVETPMELNVHLCATYGEPLSDPTHYHHILHYTRVLRVLRYLRGTIVHRLFFPRSSSLQLQAYCDATWASDSSDRRSLSAFCVFLGGSLISWKTKKQTAVSHSSAEAELHAMALVIAEVTWLRWLLEDFGVSVSMPTPLLSDSTDAISMARDPVKHELSKHVGVDAFYTRAQVQDGVVAPRYVPSEIQLADLFTKAQTGAQHRFYLSKLSVLDPP

SEQ ID NO: 16610 - protein, 1573 aa, Oryza sativa
  Clone ID: TF_OSC401439j.C1.p13.fg
MPRGPRVEDPVLEEVQPWETAVDELRLSMMDLQRKVEEDHKLVQEQLQNQAVQAQVYKDEVMQNLLSIQQMLGGTTSCMGQEIKGTPKTPGFAQSVVGGGKAVDTNAASTSRHPLFDYRNLSCPMTTQAIETTDLPPTVFTPKPVSTPPSEWNTSVYFTTPTVPPPIPPVPPPPPNQNNLPQNQNYNPYNMNYQYTPFYYPPYPPYNTPWNLPQYNYPPPSHTPPNQPFLPQNWDRRFGPYHDPNGRERTQYAENAHRRSKHVDFPIFDGECPESWIRKAEKYFALNQTPEEEKVLVAEIYITGRADQWISSSDVLTEQLTWPEFKSMICQRFAAKSNIEVIDTFRNLKQYGSVDVYIDKFEEVMALVKRNRPNLTEQYFLDYFISGLKDHIKRPLKSLHIQSLVDAYEHARNYDVPPRSSPTVAVSQSKEMPKLPVKPALKDDKPSPFTAPKSFGRCFKCQEPWVPGHGRVCKATKQIYLVTLDDDGEEMPDNAAAQFTTPPGSPAHEATTHTDLSLHALEGTNSVATTFTIHVCIGKMSATALIDSGSTSTFISPKFVSKAGLEIVNNDPIPVKVANGGTLYTGARCVDVPYMIQQHQFISTFRLLNLKGYDIVLGCDWIYHHSPLTLNLKTRELTIHKDGLLELTLPDIKPVALPPQRDCDHTIPLIPGAKPVNVRPYRLPYQKKNALEELVQQLLTSQTIQPSMSPYSSPAILVKKKDGTWRLCVDYRQLNASTIKNKYPIPVIEDLLDELQGAQIFSKIDLRSGYHQIRMHAADVHKTAFSTHLGHFEYLVMPFGLTNAPATFQALMNKILAPYLRKFVLVFFDDILIYSKSATEHAQHLSLVLQLLRHHQLFAKPSKCVFGQDQVEYLGYIISSSGVATDPVKVQAVQNWPTPTSITELRGFLGLAGYYRRFIKNFGIICRPMFDALKKNNFHWQEVQQQAFDAIKLQLAQAPVLAMPDFSLPFILEADASGHGIGAVLMQNGRPLAYLSKAIGPKAAALSTYDKEALAILEALKKWKHYFLGTSLIIRTDQASLKYINEQRITEGVQHKLLIKLLSYDYKIEYKKGQENKAADALSRMQQLNALTTTVIVPQWITEVAASYSTDPKCHELESHLHIAPQSHPPYTLKGGILRYKDHIVVGAGNTLREQLLVSFHDSALGGHSGERATYQRMKQLFYWPGMKLAVTQFVKACPVCQKNKTEHNMPAGLLQPLPLPEMAWSHITMDFVEGLPKSEGKDVIWVIVDRFTKYAHFIPLSHPFTADQILTQFLEHFYKLHGLPTVIVSDRDRIFTSSTWKEVFEKAGVKLHFSSAYHPQTDGQSERVNQCLENYLRCMTSSKPRKWKALLPHAEWWYNTTFHTSLGMSPYQALHGIKPPLLAELLLPGSLLEGERNKQEAKAALLETIKSHLVKAQARMKYFADQHRQERTLEVGDMVYLKMQPYRHNSLGLHSSLKLHSRYYGPFRVLERIGSVAYKLLLPVTSQIHHVFHVSQLKKHLGSRAVPEQGLPLIDAEGRILSTPLAVLDRRLIPRNNEPVVQWKIHWANLPESAATWEDAAFITKVFPSFTP

SEQ ID NO: 16611 - protein, 1509 aa, Oryza sativa
  Clone ID: TF_OSC900392j.C1.p8.fg
MALLPPLAPPTETAQFPEGAGMAAWFSEAAGTVWSCGLEMAPFPAAARAVALSRSLPSREMDEKVEIFVVDLTEVSEQYEFLALDFIRSEPGGGRHFCKRKQGRELVPELFLQKNWMVTKTRSNETILDMEELNEFRVDMANLKKEGLLLELCKQKNVEEVDGDTDAAVAAVAAEKANKTVSSDTGGAGPSNPTAGNPPEVRFAIEHNTISVEGVGSSRGPQDAAAVMNGWVFDTSMGTHRPNVFGNGSQQGFDRVGGIPRRFQGNSGGRALKWYRGIGLPWQVITWPQWCAMVCTSFSAADVHEAMELFQNVKQHGQIVEHYIDKFEEYMDLVRRDHPYLQEQYLNSCFIGGLRSDIKHDEAWFPGHQCKVKKALNALLLEEEEYEGTEEVGREKKAQEKVLEETEHAPEEIDQEELMYVSQNAMQGATRPDTFSVIIQINGRRAVGLVDSGSPSTFMDQEYAIRNDCPLVSTDSKKVVVAGGGELKSEVQVPDILYQIQGETFSNKFNLIPLKGYDIILGADWIYKYSPITLDLKKRELGITKGEKVITLQDFTNTGKHLLVDSSKVDKIIRKGGLGYLFQITQVAEESDVEESISIPDDIQDILQRFPTVLEKPKGLPPQRGCDHVITLKDGAIPPNLRPYRVPHHQKEAMEKIIAELIESKEIQVSNSPYSSPAVMVRKKDGSWRLCVDYRQLNAQTVKNKFPMPIIEDLLDELNGAKIFTKLDLMSGYHQIRMSRPDIPKTAFRTHLGHYEYQVMPFGLTNAPATFQSLMNQVLAPFFRKFVLVFFDDILIYSKDREEHKEHIRLVLQVLKANNLVIKPKKCAFGLSSVSYLGHIISQNGVATDPGKVEKIVSWPIPKNVTDLRKFLGMTGYYRRFIQGYVLICRPLHDMLKKEGFQWGEKQTEAFKFLKQKMCSSPVLTLPDFSKEFTIEADACGTGIGAVLMQGDRPIAFYSKSLGPKAAAQSIYEKEAMAILEALKKWRHYFLGSKLVIKTDQQSLKHMMNQRLVEGIQHKLLLKLMEYDYIIEYKAGKDNVVADALSRLPQDQLQTEICNAITVVIPKWIIDVQNSYEGDVQAHKILSMIGTNSDPDQHYSFENGILRFKGRIYVGEETSIRTNLIRDYHCSAFGGHSGMRATHHRIKALFYWPGLKKTVEMFIRECPVCQITKVEHIHIPGLLNPLEVLDMAWTHITMDFIEGLPKSKWKDAILVVVDRLTKYAHFLALSHPYSVEQVVEIFMNNIHRLHGMPMAIIIDRDRIFTSQLFQEIFKSMKVQLRFSTSYHPQTDGQTERVNQCLESYLRNMTFQEPHQWYSWLSLAGWWYNTTYHTSLQMTPFQALYGYPPPQINEFSISCNVSAEARTERSLNVGDMVYIKLQPYRQTAFGIRGSLKLRSKFYGPFKVLEKIGQVAYKLQLPEDASIHPVFHVSQLKKHLGQRAVPMSNLPSMGPDGQIKTQPVAVLQRRMIPRNGVAVTQWLILWENLGPADATWEDAAVIQSMYPTFHP

SEQ ID NO: 16612 - protein, 420 aa, Oryza sativa
  Clone ID: TF_OSC405185j.C1.p13.gm
MEEDEEEDDELLMEMTSDDELLFLNGIHVRLDLERTLTTAPIKLSAPLCQSLESMEGKLLEKLELLTQKMEAMDDKMTKHGGRLDQAVVKVDLALEAVGKLQQDQLQAARLQKSLASSDQGVQESDSQTELCAISYPQILKWQKGCDIWAAVLLEPTDNADSQSISEVVAPLLSEFADVFQEPKCLPPHRTFDHAIFLYPDDAPVNSKPYRYSPLQKDEIECQVKDMIDSGLKSDVANFVKQCQICQQAKSEHCKLPGLLTPLPIPKEAWVDISMDFIEGLPKSDGFTVILVVLIKWSSLPAHQATWEDYEVLKTRFPSAPAWGQAVSPAGGRLETISCQPRLVDVPLPNNALSAVQATTSEVSKLIIPTNQSLQLHDPPSPNERTKKTLLDSQKSCRMRHIPCVMRMAKLAHQDFRGST

SEQ ID NO: 16613 - protein, 1700 aa, Oryza sativa
  Clone ID: TF_OSC401078j.C1.p4.fg
MAFFSNSGSRADSGGYNLNEKAEDEAAYESVGDRDVDLNSRQWNLNEKAEDAYHSDEEQYDGGRSGPNSSENKSVQNARKINGPSGPWGTNFLKDCGPTQTAKEEQLTSNRGMEYGSAASSHDDMDASGEDDELNRGHGEVPAEEMLSDDYYEQDGEEQSDSLLRGGMRRPSCSTSGAAAESVSSRQKKKPTKYNAYEDEDDDEYNDENDDEDDDDADEDDPDDVDFEPESDTEKAADKDKFVDSENSDEEEDDELELSDDDEDDFVENKRQCKRLKVGGTKTSKGRKLPVQVQRKRGVSFTDEDSSGKDSDAPSDTDISHRAKKPDKLHQKTVGRKDVFSNVDSHEVRTSGRRRTARNISYAESEESDDSEEKLAKQQKVLKEDPEEEEGETIERILWHQPKGVAEEALRNGQSTQPTVISFTSDVDQSWDDVEFYIKWKGQSFLHCQWKTLSELQNVSGFKKVLNYMKRVTDELRYKRSLSREEVEVHDVGKEMELDLIKQYSQVERIFADRVSKVDGDDLVPEYLVKWQGLPYAESTWEKDTDIEFAQDAIDEYKAREAATSILGKTVDFQRKKSKASLRRLDDQPEWLKGGKLRDYQLEGLNFLVNGWRNDTNVILADEMGLGKTIQSVSMLGFLHNAQEINGPFLVVVPLSTLSNWAKEFRKWLPDMNVVVYVGNRASREICQQHEFFTNKKGGRHVKFHTLITTYEVILKDKAALSKIKWNYLMVDEAHRLKNCEASLYTTLLEFSTKNKLLITGTPLQNSVEELWALLHFLDPSKFNSKDIFVERYKNLSSFNETELANLHKELRPHILRRVIKDVEKSLPPKIERILRVDMSPLQKQYYKWILERNFQNLNKGVRGNQVSLLNIVVELKKCCNHPFLFESADHGYGGDSIGDRNKVERIVMSSGKLVLLDKLLMVRMLDILAEYLSLRGFQFQRLDGSTRADLRHQAMEHFNAPGSDDFCFLLSTRAGGLGINLATADTVIIFDSDWNPQNDLQVLDHLVIQKLNAEGRLEKKESKKGGSMFDKNELSAILRFGAEELFKEDKTDEETKKKLESMDIDEILERAEKVETKGGEGEEGNELLSAFKACSVHYHMTCDSDIMLKFYTSVANFSSGEDDATFWSRLIQPDASDMVEETLAPRAARNKKSYVEDHQLDKNSNRKRRGIDAQEKPRRRSSRTMDTAVSLPLIDGSAHQVREWSFGNLSKKDATRFVRAVKKFGNPSQIGLIVDDVGGAIAKSSVDQQLELFTLLIEGCQDAVKNNMDAKGTVLDFFGVAVKAHELIARVEELQFLARRIARYKDPVRQYRIQAPYKKPQWSASCGWTETDDARLMVGIHWYGYGNWEKIRLDPKLSLTAKIAPATLGERETFLPRAPNLDNRASALLQKEFANLRGKSSKAKGGPRQAIDNESNGGARSLRGRQKDTKIKEDNNSIKDDFKKRKVVEPEAREEGEISESEAETKYRQDKEEKWLEWCSEVLDDEQEILKRLDRLQNTSVNLPKEKVLSRIRKYLQIIGNKIGEIVDQHSESYKQSRMAMRLWNYVANFSSMSGEQLHDLYLKLSQDQMEAGVGPSHGGNFASVPPNRGPKSNQLHPSRNQRSTRSVQYVSESFNNGENTGNSEAWKRRRRSEPDNQFDNQPLYQAPPIMTNGNRLQESSSSAGILGWAPVEMRRYGNERPKRGVHPSRFPPGHGPLL

SEQ ID NO: 16614 - protein, 1100 aa, Oryza sativa
  Clone ID: TF_OSC400825j.C1.p42.fg
MSSLVERLRVRSEKRPLYTLDESDDDLPPRGGGGKGRDRHSDGPTERIEREDAVSPLTEMEKILDCEETKPDASEETSSSESGSKKKPVKRYLIKWKGISHLHCTWVSESEYLETAKIYPRLKTRLNNFHKQMDSTDKSDDDYSAIRPEWTTVDRILATRKSSTGEREYYVKWKELTYDECTWENDSDIAVFQPQIERFNEIQSRRKKSTDKCKSVTREIRQYKESPKFLSGGTLHPYQLEGLNFLRYSWYHNKRVILGDEMGLGKTIQSIAFLGSLFVDKLGPHLVVAPLSTLRNWEREFATWAPQMNVVMYFGSAASREIIRKYEFYYPKEKPKKLKKKKSSPSNEDKKQSRIKFDVLLTSYEMINMDSTVLKTIEWECMIVDEGHRLKNKDSKLFGQLKEYHTKHRVLLTGTPVQNNLDELFMLMHFLEGDSFGSIADLQEEFKDINQDKQVEKLHGMLKPHLLRRFKKDVMKELPPKKELILRVELTSKQKEYYKAILTKNYEVLTRRSGGHVSLINVVMELRKLCCHAFMTDEPEEPANSEEALRFSDVINILIPLPAFYYFQTHIDAEVLEFSDISCCYLFISRLNKHNAIFEVVDIWRLLESSGKMELLDKMMVKLKEQGHRVLIYSQFQHMLDLLEDYLSYRKWSYERIDGKIGGAERQIRIDRFNAKNSTRFCFLLSTRAGGLGINLATADTVIIYDSDWNPHADLQAMARAHRLGQTSKVMIYRLVSRGTIEERMMQLTKKKMVLEHLVVGRLTKGTNIVQEELDDIIRHGSKELFDDENDEAGKSCQIHYDDAAIDRLLDRDQADGEEPVEDEEEDEFLKGFKVANFEYIDEAKALAAKEEEARKKAEAEAANSDRANFWDKLLKDRYDVQKVEEHTTMGKGKRSRKQMAAADEDDITGLHDMSSEDDDYSYDDDVSDNDTSLQSGLAGRRGPYSKKKQRSNVDSLPFMEGEGRALRVYGFNQIQRTQFLQTLMRYGFQNYDWKEFTPRLKGKSVEEIQRYAELVMIHLLEDINDSGYYADGVPKEMRTDETLVRLANISLVEEKVAAMEQGKITKLFPSYLLYEFPSLVGGRVWKAEQDLLLLKALIN

SEQ ID NO: 16615 - protein, 1364 aa, Oryza sativa
  Clone ID: TF_OSC412868j.C1.p3.fg
MSSLVERLRVRSEKRPLYTLDESDDDLPPRGGGGKGRDRHSDGPTERIEREDAVSPLTEMEKILDCEETKPDASEETSSSESGSKKKPVKRYLIKWKGISHLHCTWVSESEYLETAKIYPRLKTRLNNFHKQMDSTDKSDDDYSAIRPEWTTVDRILATRKSSTGEREYYVKWKELTYDECTWENDSDIAVFQPQIERFNEIQSRRKKSTDKCKSVTREIRQYKESPKFLSGGTLHPYQLEGLNFLRYSWYHNKRVILGDEMGLGKTIQSIAFLGSLFVDKLGPHLVVAPLSTLRNWEREFATWAPQMNVVMYFGSAASREIIRKYEFYYPKEKPKKLKKKKSSPSNEDKKQSRIKFDVLLTSYEMINMDSTVLKTIEWECMIVDEGHRLKNKDSKLFGQLKEYHTKHRVLLTGTPVQNNLDELFMLMHFLEGDSFGSIADLQEEFKDINQDKQVEKLHGMLKPHLLRRFKKDVMKELPPKKELILRVELTSKQKEYYKAILTKNYEVLTRRSGGHVSLINVVMELRKLCCHAFMTDEPEEPANSEEALRFSDVINILIPLPAFYYFQTHIDAEVLEFSDISCCYLFISRLNKHNAIFEVVDIWRLLESSGKMELLDKMMVKLKEQGHRVLIYSQFQHMLDLLEDYLSYRKWSYERIDGKIGGAERQIRIDRFNAKNSTRFCFLLSTRAGGLGINLATADTVIIYDSDWNPHADLQAMARAHRLGQTSKVMIYRLVSRGTIEERMMQLTKKKMVLEHLVVGRLTKGTNIVQEELDDIIRHGSKELFDDENDEAGKSCQIHYDDAAIDRLLDRDQADGEEPVEDEEEDEFLKGFKVANFEYIDEAKALAAKEEEARKKAEAEAANSDRANFWDKLLKDRYDVQKVEEHTTMGKGKRSRKQMAAADEDDITGLHDMSSEDDDYSYDDDVSDNDTSLQSGLAGRRGPYSKKKQRSNVDSLPFMEGEGRALRVYGFNQIQRTQFLQTLMRYGFQNYDWKEFTPRLKGKSVEEIQRYAELVMIHLLEDINDSGYYADGVPKEMRTDETLVRLANISLVEEKVAAMEQGKITKLFPSYLLYEFPSLVGGRVWKAEQDLLLLKALIKHGYARWQYISDDRDNGIFEAARQELRLPTANELISSHSNNETNGNLESTQEGQSNPTSMIHYRDTQRKIVEFIRKRYHLLERCLNLEYAVIKTKTPVPDDLAEQDFPGGHRPAVPDYSEMLRELPVLEPISKEVAPEGTTDQSQVSHLYNKMCFVLEDSAVPALNSHFGDKAASSGLANSLHKFEAVCEDVSRILRSHENGTTPKEEVMLDASSKETTSPKDPATEVPSSASKEATPPVQDPVIEAVKEEPPTVKAEDKMEIDS

SEQ ID NO: 16616 - protein, 159 aa, Oryza sativa
  Clone ID: TF_OSC423269j.C1.p6.gm
MPRGISRLNDGDVVEFSVGSGNDGRTKAVDVTAPGGGALTGGSRPSGGGDRGYGGGGGGGRYGGDRGYGGGGGGYGGGDRGYGGGGGYGGGGGGGSRACYKCGEEGHMARDCSQGGGGGGGYGGGGGGYRGGGGGGGGGGCYNCGETGHIARECPSKTY

SEQ ID NO: 16617 - protein, 241 aa, Oryza sativa
  Clone ID: TF_OSC102138j.C1.p12.fg
MAAAARHRGTVKWFNDTKGFGFISPDDGSEDLFVHQSSIKADGFRSLAEGEQVEFAISESEDGRTKAVDVTGPDGSFVKGGAGGGGGGGGGFGSRGGGGSGGGGRSYGGSWGGGRRSGGGGPGGGCFKCGESGHMARDCFNGGGVGVGGGGGGGGGAGGGCFKCGEMGHMARDCFNSGGGGGGGGGGGGGGACYNCGETGHLARDCYNGGGGGGGGRFGGGGDRSCYNCGEAGHIARDCHK

SEQ ID NO: 16618 - protein, 210 aa, Oryza sativa
  Clone ID: TF_OSC401232j.C1.p22.gm
MRGAALNAGCTACLLPSVDGAGRSSLLLLQGGGSGWPAKRGGERLLGLGGEGKMVSERVKGTVKGFDATNGFGFITPDDDGEDLFIHQSSLKFDDYRSLNDSDVIELSVGSGNDGRNKAVDVTALGGDTHTGGFRPSCAVGARRPLPSTAAPLSSALNSVRCAVIRSPPPSLYTIGRAVVVVHHQPLVVVLTTSAERRFGEEVLDRMRGG

SEQ ID NO: 16619 - protein, 119 aa, Oryza sativa
  Clone ID: TF_OSC411506j.C1.p5.hg
MKGFDATNGFGFITPDNGGEDLFVHRSSLKFDSYRSLNDGDVIELSIGSGDDGRTKAVDITALGGGAHTGGSRPSCGQIPTAASRRLSTSPRCLLALDVLLLPAPRRSPPLVIPSSSPG

SEQ ID NO: 16620 - protein, 197 aa, Oryza sativa
  Clone ID: TF_OSC401879j.C1.p14.fg
MASERVKGTVKWFDATKGFGFITPDDGGEDLFVHQSSLKSDGYRSLNDGDVVEFSVGSGNDGRTKAVDVTAPGGGALTGGSRPSGGGDRGYGGGGGGGRYGGDRGYGGGGGGYGGGDRGYGGGGGYGGGGGGGSRACYKCGEEGHMARDCSQGGGGGGGYGGGGGGYRGGGGGGGGGGCYNCGETGHIARECPSKTY

SEQ ID NO: 16621 - protein, 273 aa, Oryza sativa
  Clone ID: TF_OSC401093j.C1.p13.fg
MSSPFLGSSSSSASSPLSYLTPPRPPPPPPPLLMVRHGLARWLTDLDDELMVFDDDLGVQGQGYAAAANGGIGGGGVEAVNAAAAPRQGGRHAGHPPLPRPPPRQCPRCGSANTKFCYYNNYSRTQPRYLCKACRRHWTEGGTLRDVPVGGGRKNSKRAAGGGKAGATASTAASAHVVAPAAAPPTSSSFPDLLRQMLMAPATAGGGGGYSIDLTAWQQMAAFAAPPQAATGDVGGAVGAASTAAPDANCGGGGVQYWNGWLQDDMPGLDGSC

SEQ ID NO: 16622 - protein, 513 aa, Oryza sativa
  Clone ID: TF_OSC400138j.C1.p15.fg
MTTRRTRKERKQMGGGGKCKRGKRGKIAAKRRRGQVRCCSSSSSSGGARRRARERESEESLGEMGECRGGGGGGDGLIKLFGKTIPVQPDAKFLILGSASLGEFSDVQQHSGSSSSSTESDVQETAAVAVADPSPRSEVVDGESPPQPGGEAASHQQQQKEMKLKKPDKILPCPRCSSMDTKFCYFNNYNVNQPRHFCKHCQRYWTAGGAMRNVPVGAGRRKNKNATAAAHFLHRVRACAAAAAMPAAPHDATNATVLSFGGGGGGHDAPPVTLDLADKMTRLGKEGLVAHARNADAAAACSEVSSNRDDEQIGNTVAKPANGLQQHPPPPHHHHHSAMNGGGIWPYYTSGIAIPIYPAAPAYWGCMIPPPGAWSLPWPATVQSQAISSSSPPTSATPSVSSFTLGKHPREGGDHEARDHHGNGKVWVPKTIRIDNADEVARSSIRSLFAFRGGDKADDNNDDDGTGVHKLATTVFEPKRDSKTAKHPAITSLPLLHTNPVALTRSATFQEGS

SEQ ID NO: 16623 - protein, 318 aa, Oryza sativa
  Clone ID: TF_OSC401827j.C1.p1.fg
MAAAGILPVSGGGGASSARPVSMAERARMAKIPQPEPGLKCPRCDSTNTKFCYFNNYSLTQPRHFCKACRRYWTRGGALRNVPVGGGFRRNKRGTKPSNSKKPAAAVAGGVMAPPHAQLQLPFGFDGGGGGGHGSIIGGGGGGGASRLGFPELSSLHAAAAVDYQLGGGGGGDGLGLERQRLPHFPFLARSNAAVHPPPLMSTAAGVSYPFGDVAAGGLGGDMPANAASVAGSAGLITQMASVKMDDIDNHPPPSAATTTASSPIEFLGLRGSLQFWGGGGGHRGGGDGAGGSAAPGGGGGGWSDLPAFDLSTSGNIL

SEQ ID NO: 16624 - protein, 438 aa, Oryza sativa
  Clone ID: TF_OSC401231j.C1.p3.fg
MRISEEKPCTDQELDADQMNSSSFNSSSECENQTPSNDEMTGSESKSEAAQTEGGGSSEEKVLKKPDKILPCPRCNSMDTKFCYYNNYNINQPRHFCKSCQRYWTAGGSMRNLPVGAGRRKSKSSTANYRSILITGSNLAAPAGDAPLYQLSIKGDQTATAVKFAPDSPLCNSMASVLKIGEQSKNAKPTSTAQPRNGETQTCPASGTTSDSPRNEPVNGAVSGHQNGIVGHSGVPPMHPIPCFPGPPFVYPWSPAWNGIPAMAPPVCTAPAEPANSSDNGSTASVQWSMPPVMPVPGYFPVIPSSVWPFISPWPNGAWSSPWIQPNCSVSASSPTSTSTCSDNGSPVLGKHSRDSKPQGDDKAEKNLWIPKTLRIDDPDEAAKSSIWTTLGIEPGDRSMFRSFQSKPESREQISGAARVLQANPAALSRSQSFQETT

SEQ ID NO: 16625 - protein, 389 aa, Oryza sativa
  Clone ID: TF_OSC401894j.C1.p43.fg
MEEMLMAANAAAGANPNPAATAPSSVTGGALRGGGGGGAPPVAGGAGAGSTERRARPQKEKALNCPRCNSTNTKFCYYNNYSLQQPRYFCKTCRRYWTEGGSLRNVPVGGGSRKNKRSSSSAASASPASASTANSVVTSASMSMSMASTGGGASKNPKLVHEGAQDLNLAFPHHGGLQAPGEFPAFPSLESSSVCNPGGPMGTNGRGGGALSAMELLRSTGCYMPLQVPMQMPAEYATPGFALGEFRAPPPPPQSSQSLLGFSLDAHGSVGGPSAAGFGSSAGLQGVPESTGRLLFPFEDLKPTVSSGTGGGGASGGGAGVDGGHQFDHGKEQQAGGGGGGPGGHDTPGFWNGMIGGGSGTSWGIVKRRMKGRTRLGRKKEKWTPITMH

SEQ ID NO: 16626 - protein, 129 aa, Oryza sativa
  Clone ID: TF_OSC414619j.C1.p1.fg
MQEFHPVPGLAGRLFGGAAAAAAVAAVEEVRCPRCDSSNTKFCYYNNYNLSQPRHFCKACRRYWTKGGLLRNVPVGGGCLKPKRPAPPEFFFLHRGGGISLLLATQTDCVLSACLTVSGDSSRFAFVML

SEQ ID NO: 16627 - protein, 215 aa, Oryza sativa
  Clone ID: TF_OSC400431j.C1.p37.fg
MEVAEGRTVAAAAAGGGGLGGGARTEAEGLACPRCESTNTKFCYYNNYNLAQPRHFCKACRRYWTRGGALRNVPVGGGTRNKVAPAPCTGRRKRAAHAAHAAAPPPTTTASSAPLPLMPPAVAYELPFLPPPPPLPLAAVDPDRRLLDLGGSFTSLLAPAQLHNGHFTTGFLLGTMSSAPPPPPPPATSTPSPAPAAHPPVSDSIWAMGWPHLSI

SEQ ID NO: 16628 - protein, 276 aa, Oryza sativa
  Clone ID: TF_OSC413680j.C1.p1.fg
MQEQQPETGRRPAQQFATVDLRRPKGYAAAPATPQPGSAATAAAAAGPAATAAAAAAGEGDPCPRCESRDTKFCYYNNYNTSQPRHFCKCCRRYWTKGGTLRNVPVGGGTRKKSSSSSSSSSSSSAAAAAPAAKRQKTSKKRRVTTPEPLAATTPVLTEAAADSAAKTTTEATSEKKTTTSTTTTTPPAPDTTSEITTELVVPAVEEDSFTDLLQPDSAAVTLGLDFSDYPSITKSLADPDLHFEWPPPAFDMASYWPAGAGFADPDPTAVFLNLP

SEQ ID NO: 16629 - protein, 431 aa, Oryza sativa
  Clone ID: TF_OSC415629j.C1.p30.gm
MIFPPAFLDSSSWNDNNNNNHNQQQQQQHAHGHHQHHQVAAGCGGGGGGGDGNSHELLQQQSMIPGTLADGGGGGGAVGPAKPMSMSERARLARIPLPEPGLKCPRCDSTNTKFCYFNNYSLSQPRHFCRACRRYWTRGGALRNVPVGGGYRRHAKRAKPKPASAAGSASAATTTAGSTPAGSTTTTTTSSTCATPNAPALPAMLGGNLSILPPLLRLADFDAMSLGSTFSGMAAAAGKPPPVDAAGCYSVGAATGLEQWRLQQMQSFPFFHAMDHQAAMAAPPPAMAMPGMFQLGLDGDGHGSGGGEDGGELHHAMPSSKREGYPRGMYGDHHLAGGYTSYSSATTVFVVVLVMVCAWKFEKCTEKEEEDELKKEVHALVQWWNRLGQKEEESQTGRSVASTEVLGVGDPPPQVGSGAAADLRGSASARE

SEQ ID NO: 16630 - protein, 175 aa, Oryza sativa
  Clone ID: TF_OSC401137j.C1.p11.fg
MANLPSTAAAAAADASGFKLFGKVIQPDGQRGVEESAAAQAPPHPHPPAPPVMEAAAAAAGTSQTLQAAGGGGGGGGGGGGEPLPCPRCGSRETKFCYFNNYNVRQPRHLCRSCRRYWTAGGALRRVASASPGRRRPRPSAARSAAAAAASASAASPPAAVPAASEGAESVDSRS

SEQ ID NO: 16631 - protein, 347 aa, Oryza sativa
  Clone ID: TF_OSC17105j.C1.p4.fg
MAPAAGDDAVVPRKGAGGGGTTTPPPPPPAQQQQQQPLPPPPPQEQGLRCPRCDSPNTKFCYYNNYSLSQPRHFCKTCRRYWTKGGALRNVPVGGGCRKNKRSRSAAAASRLSLNLPTVEGIGGAAADPAAAAAARLGFLGGGTTMMMSSSTSPLGGAAAAVADFQQGGAVGMLPLPRLQSPAGGGVGHHQYVPFGEWPSGDIAGGNAVNGAAGHGAQQRLATMFLGPPGSASAAAAAAQANDGGGNGAQATASGHAAGGGGGAFMHMAGSVPSMEAAMPSATSWFMDSCSYGLPSPPPPATAAVAATTSSNLNSGGRSSGGDDNATSNCGSAIPAWGDISTFAMLP

SEQ ID NO: 16632 - protein, 371 aa, Oryza sativa
  Clone ID: TF_OSC900120j.C1.p17.fg
MAPAAGDDAVVPRKGAGGGGTTTPPPPPPAQQQQQQPLPPPPPQEQGLRCPRCDSPNTKFCYYNNYSLSQPRHFCKTCRRYWTKGGALRNVPVGGGCRKNKRSRSAAAASRLSLNLPTVEGIGGAAADPAAAAAARLGFLGGGTTMMMSSSTSPLGGAAAAVADFQQGGAVGMLPLPRLQSPAGGGVGHHQYVPFGEWPSGDIAGGNAVNGGGGHGAVSSTIASSIESLSFINQDLHWKLQQQRLATMFLGPPGSASAAAAAAQANDGGGNGAQATASGHAAGGGGGAFMHMAGSVPSMEAAMPSATSWFMDSCSYGLPSPPPPATAAVAATTSSNLNSGGRSSGGDDNATSNCGSAIPAWGDISTFAMLP

SEQ ID NO: 16633 - protein, 206 aa, Oryza sativa
  Clone ID: TF_OSC900263j.C1.p6.fg
MAPAVASSPSLVLSAAAATASNKRPADSDASPPHQGDRTGQQEKKQQQLECPRCRSTNTKFCYYNNYSTSQPRHFCRACRRYWTHGGTLRDVPVGGASRRGGGGKRRRVSADADPSSASPPPPTTSTTDAYADLPAGFPFLSDGAFLPQFGLAGVAPAAFSWASAVPDLYNCGIAPWDDGTAVTGAAWDNFADIAGLDLSWPPPGN

SEQ ID NO: 16634 - protein, 359 aa, Oryza sativa
  Clone ID: TF_OSC400755j.C1.p13.fg
MAGAGGAATAAAGGGGGGGVAAGRSGGGGGGGAAAAAGAGAPDPRAEALRCPRCDSANTKFCYYNNYSLSQPRHFCKACKRYWTRGGTLRNVPVGGGCRKNKRSRSGGAAPGGGVGRGGPGGGAAAAVSSAGGGAAGTSPASSLALPQPGSLPSLSSALGLTGGTSLASLLLGSGGSGGDHLGLFQAMQSVVSDAAAFEMHQQHQSQVDHLLGLGYGAAGAQIQAAKPWLHDGGATGGLLDGFYAPLLSGSIVPGLEELQVKAEATTGDHQQKSSAAAAGEQSWDLPTPSSSNVEASIIASDALMAAAAASMNPAVSAAAASTAPSAQSLLYWGNGGIGAAAAAWPDLANCGSSIATLF

SEQ ID NO: 16635 - protein, 355 aa, Oryza sativa
  Clone ID: TF_OSC408710j.C1.p17.fg
MPPHHGGLMAPRPDMVAAAVAASGGGGGGGGPTGGTAVRPGSMTERARLAKIPQPEPGLKCPRCESTNTKFCYFNNYSLSQPRHFCKTCRRYWTRGGALRNVPVGGGCRRNKRTKSSKSSSSTSAAGSASATGGTSSSTSSTATGGSSSAAAAAAMMPPQAQLPFLASLHHPLGGGDHYSSGASRLGFPGLSSLDPVDYQLGGGAAAAAAIGLEQWRLPQIQQFPFLSRNDAMPPPMSGIYPFDAEAAADAAGFAGQLLAGTKVPGSSGLITQLASVKMEDSNAQSAAMNSSPREFLGLPGNLQFWGGGNGAGPGGNGDGATGGSGAGVAPGGGGSGGGWADLSGFNSSSSGNIL

SEQ ID NO: 16636 - protein, 403 aa, Oryza sativa
  Clone ID: TF_OSC401232j.C1.p3.fg
MVFPSVPAYLDPPNWNNQQGQPPRPANVGGGDAQHLPVGPTAAAAAPGEIGGLPTSSSSASAAAAAAQQARPNSMAERARLARAPQPEPALKCPRCDSTNTKFCYYNNYSLSQPRHFCKTCRRYWTRGGSLRNVPVGGGCRRNKRSGKSSSAAAAGASSSSSKPSSSAARQLPGGGASPMPSAAASTQPGGAAAGAIIPPSGLSSMSHHLPFLGAMHPPGPNLGLTFSAGFQPLGGMHHHVDTADQFPVASGGGATIGASLEQWRVQQQQQQQPQQHQFPFLGGALELPPPPPMYQLGLEATRAAGTGATAAAAFTLGQTSATATTSRQEGSMKLEDSKGLEMSLQRQYMAALRQGDGVWGNNNGGNGGSDGGGNGGGGSWTMNFPGFHSSSGGGGDDGGGVL

SEQ ID NO: 16637 - protein, 493 aa, Oryza sativa
  Clone ID: TF_OSC400397j.C1.p44.fg
MAALRQGDDPAIKLFGRTIPLLLDPPAAAAAAADEENSVLENSVLSFLDFLATFGVMPNLGNGVKTNNDLPLVSDKLLIVKGIPFCPNNSKKNDLQGISRPDGRIEIDSMTEDVKTEPDGSVPEKILKKPDKILPCPRCNSMETKFCYFNNYNVHQPRHFCRNCQRYWTAGGAMRNVPVGAGRRRNKHVSKYCQAMMTCNNTVAPGDVSDVVHHQVITHGSSLLPATLKENETPTEFISEVPPCKSSASILDIGEPNDTDLVPLASGDNKEEKSCASSVVVSSCSENLMPDNAIMKEPNNRSGCCNGVALPFPTGPALVLPWSLGWNSVALMPATQCSMQPVLGLKDGIPCPPSWPPQLMVPAPGICTPVVPIPLVPPLWSCFPGWPNGMWNAQCPGGSSSLVLGKHSREESLQEEEKTRNYLWVPKTLRIDDPAEAAKSSIWATLGIKPDDKGIFKSFQPNVAKNGTAPESPQALQANPAAFSRSQSFQETT

SEQ ID NO: 16638 - protein, 440 aa, Oryza sativa
  Clone ID: TF_OSC401896j.C1.p16.fg
MGECKVGGGGGGGDCLIKLFGKTIPVPEPGACAAGDVDKDLQHSGSSTTEPKTQENTVQDSTSPPPQPEVVDTEDSSADKNSSENQQQQGDTANQKEKLKKPDKILPCPRCSSMDTKFCYYNNYNINQPRHFCKNCQRYWTAGGAMRNVPVGAGRRKSKSVSAASHFLQRVRAALPGDPPLYAPVKTNGTVLSFGSDLSTLDLTEQMKHLKDKFIPTTGIKNTDEMPVGLCAEGLSKTEESNQTNLKEKVSADRSPNVAQHPCMNGGAMWPFGVAPPPAYYTSSIAIPFYPAAAAAVAAYWGCMVPGAWNAPWPPQSQSQSVSSSSAASPVSTMTNCFRLGKHPRDGDEELDSKGNGKVWVPKTVRIDDVDEVARSSIWSLIGIKGDKVGADHGRGCKLAKVFESKDEAKASTHTAISSLPFMQGNPAALTRSVTFQEGS

SEQ ID NO: 16639 - protein, 205 aa, Oryza sativa
  Clone ID: TF_OSC401539j.C1.p71.fg
MAPAAGGFKLFGKVIMQCGVSEGTQDKAQGFVVAREKVEPEEEEEEEQRVPAAATSGQRASIKREAADRDEEQRQGGGDAAGQPTQRRLQDSAEARAAAAAPLPCPRCRSRDTKFCYFNNYNVNQPRHFCKACHRYWTAGGALRNVPVGAGRRKNRPLGPLAVAHHNHHHRAAAGFVLGFPNPSSPTSPSPVYTDRWPVTPDRPF

SEQ ID NO: 16640 - protein, 320 aa, Oryza sativa
  Clone ID: TF_OSC409189j.C1.p1.fg
MAKLASCMTASIYSTAINPRNKLNRNNKGIVPEEHGMGSSSPSAELIACPRAPMQAAAAAADRRLRPQHDQPLKCPRCESTHTKFCYYNNYSLSQPRYFCKTCRRYWTKGGSLRNVPVGGGCRKNKRAPPKKAAAHAQPAVAVAAALQGRHMETGLHLSFSGMQHHLAPPPPAAATAADPLCSLGLFDWKQYDPVFAGSGGGGSPVAALESAGGSEAQFMGAGMMGIGGGGVAEYHALSALRFAAGLGDHLALPFGAVRAEHDAVEVKPVAAERLLSLEWCGEASRTAAPESSISSLGGLGLWSGMIGGGHHHHGSSAAI

SEQ ID NO: 16641 - protein, 365 aa, Oryza sativa
  Clone ID: TF_OSC400070j.C1.p16.fg
MANKQWAAGSVVARARPCVRVRTLRGRRAGDGRAPDACRSDTLVKNVCHDSVTGSEHSKMENQSGWFYVTISKESQKRRRKREAQEFQSIPGLAGRLFGGAAAADIRRAQAQQGPASRCGGIPSPEAVKCPRCESTNTKFCYYNNYNLSQPRHFCKSCRRYWTKGGVLRNVPVGGGCRKTKRSGSSSAASSAPSTPTAATDNAKNQRRASASSPRSSSGGSGNTSPTAAAATTPTTPATPSSNTIAVINHATTTTTTTNPFPTDVPPPAPIFADQAAALASLFAPPPPPPLPVFSFAAQAKTEDGIASVLLAGQTTAPTAATVADMTPFTSLDAGIFELGDVPPAAYWNAGSCWTDVPDPNVYLP

SEQ ID NO: 16642 - protein, 439 aa, Oryza sativa
  Clone ID: TF_OSC423196j.C1.p8.fg
MASGSLLLPPACLQHPLPAAAAASGGVGGSSREQCPRCASHDTKFCYYNNYNTSQPRHFCRACRRYWTLGGSLRNVPIGGSTRKRPRPPVRRPPVHFTAAAAAAAAAAPPHHHHHHHGGPLTPPPATSSSSQQAGLLGSLFALGAAPLLEGRVGVGFDLGLGLPGPGHHHAVAGGGGPAAAVATSSSSSAAAPLLWPTGLLDSSSNNAETWRMAAGGMWPEFTAAAAQNIRLVIDIGDTTIQVPLNGPTVVQNIGRQAAAAVAGDSSAGGVSEKTGGAGGGGGEEWMQEQDGLLCMRGRRCGRRGGCLPRPRDWFAALLAADPAAAAVTRDQAGKAMLYLIVNTCTFATSLAVLPDAVRRRRRLRVEEGHRVADHQHDDGRRAVRRGDVRALRRRRLPAHGPFVGTVVAAVTVVVVRCNLALPFRGGDAGHGCSWVSRL

SEQ ID NO: 16643 - protein, 134 aa, Oryza sativa
  Clone ID: TF_OSC400755j.C1.p28.gp
FCYYNNYSLSQPRHFCKACKRYWTRGGTLRNVPVGGGCRKNKRSRSGGAAPGGGVGRGGPGGGAAAAVSSAGGGAAGTSPASSLALPQPGSLPSLSSALGLTGGTSLASLLLGSGGSGGDHLGLFQAMQSVVSD

SEQ ID NO: 16644 - protein, 320 aa, Oryza sativa
  Clone ID: TF_OSC400259j.C1.p105.fg
MLPYAPRPPSLLVDRRYKQGAEAAPNCPRCDSPNTKFCYYNNYSLSQPRYFCKGCRRYWTKGGSLRNVPVGGGCRKNRRGKSSSSARSAADAVSSGRDAAFGHRFPGPVRPDMVLEGMVGNPANPGQAMPDVAAAADGSTIDLAMLYAKFLNHPPTDAGLGAVTPESGGHVDEAFDTFSASSDLSPGILAAASAQFDPNQDGFGEWSSPASGNDPTSTATTATTSMLCTDASVQAALGELNFAMDQSCFDSLGLPTDVAGAGSLSSWCSIVPSLSTWEEPKYDSLDSFPDDAMSLHECMIGAPDHDWSVDCQGLEALYMP

SEQ ID NO: 16645 - protein, 349 aa, Oryza sativa
  Clone ID: TF_OSC405553j.C1.p2.fg
MDQLKGASALNHASLPVVLQPIVSNPSPTSSSSTSSRSSAQATQQRSSSATSSPHGQGQGGGAAEQAPLRCPRCNSSNTKFCYYNNYNLTQPRHFCKTCRRYWTKGGALRNVPIGGGCRKPRPMPAPVAKPPMSCKAAPPLGLGGGPVSWASGQQAATAHLMALLNSARGVQGHGGSNVHRLLGLDTMGHLQILPGAPNGAGAGTAASLWPQSAPRPVTPPPPHMDSQLGMGTLGHHDVLSSLGLKLPSSASSSPAASYYSDQLHAVVSNAGRPQAPYDVATASLPCTTAVTSLPSALSSVSAAAPTSNTVGMDLPPVSLAAPEMQYWNGPAAMSVPWPDLPTPNGAFP

SEQ ID NO: 16646 - protein, 167 aa, Oryza sativa
  Clone ID: TF_OSC900050j.C1.p4.fg
MPRHFCKSCRRYWTKGGSLRNVPVGGGSRKSSTSSSSAAAAAASSSSSPSSPAKSPKRSKNSKRRRVSPPPPQPVPAPPPPTTADAADVAAPTAPEATTKKAPEDLTAAAATQPAVALGLGVADGGGGGKEHLDTSPFEWPSGCDLGPYWPTGVFADTDPSLFLNLP

SEQ ID NO: 16647 - protein, 471 aa, Oryza sativa
  Clone ID: TF_OSC401036j.C1.p10.fg
MASGGALSPVEEKPTVVKTTKAEQHEEEAAVAVKSAAEMMKKSSPCCPRCNSIKTKFCYYNNYSMAQPRYFCRECRRYWTQGGSLRNVPVGGGCRKSKRSSASSASASAASPPAPAVGAAPPVVPALSSAISKLLQSEPMAAPCADFPNVLPTFVSTGFELPAAAGDRLSLGSFGAFGNLSAAVAAPGGGGGSSTTTSFMDMLRGVGGLFDGVGNSHQMGGNGGGGGSYYAPLITGAGNGMLMPPPPLPPFSGSLMQHGMQGLFANHAMGGGGGGVMNAGEDGSVMAGLGGGQWPPALGGADEQQGGGDGGEAVMTKDTGGGASSSASRPDYFYGWNSAAGGVVAGGGIGGNAAAATGATPWQGLIDSSSAMMPTTTQTTLFVGSYDKGVNHALQDNQEVHMLKILGVITAPKSPPKEALNIDVLPDLLKLDNGFSTHRVLTSPYLACKLWEKEMKQQNIGVGQQISSKAW

SEQ ID NO: 16648 - protein, 262 aa, Oryza sativa
  Clone ID: TF_OSC400765j.C1.p2.fg
MLGSDQLEHRPAPSAPRAEPDDVADDVEVEAFRDIHPEPSPPHLPPPPLRQPSWDAASHRSLSSSGAGGGGDVELFATMSREFTAMVAAGSSSAPSPDVPGDAPAAADLNLLQLARIGENEPAAEANALAIVPAAAGSGPPAPVEQVKKEEVEAKVAAWQAEEVAKINNKFKREEVVINGWESQQVDKATAWLAKIERKLEEERAKATEKARNEAAAARRKAEERRASAEARRGRKTAEVLDRANFCKAAGRVPSKRSFFSF

SEQ ID NO: 16649 - protein, 294 aa, Oryza sativa
  Clone ID: TF_OSC407314j.C1.p3.fg
MLHEQHAPPPQPEPEVSLQLSAPATAADDVAAGDDEEVTVVTTYRDIHPLTPPSPTTTTTPPTRLGSAAYSWDTASSHRSVSSEEQFMTMSREFTAMVAAGTTMQTGPNDGNNGGDQLTSIGEDELEETNPLAIVPDSHPIATPARSRASQLEVVPAAGPSPAPPVEARQVKKEEVETKVSAWQTAEVAKINNRFKREEVVINGWETEQVEKASAWLKKIEVFLMTEQLTQRKLDEQRAKALERTQNDIAKARRKAEEKRASAEAKRGLKLAKVLELANFMKAVGRVPTKRSFF

SEQ ID NO: 16650 - protein, 294 aa, Oryza sativa
  Clone ID: TF_OSC407323j.C1.p1.fg
MLHEQHAPPPQPEPEVSLQLSAPATAADDVAAGDDEEVTVVTTYRDIHPLTPPSPTTTTTPPTRLGSAAYSWDTASSHRSVSSEEQFMTMSREFTAMVAAGTTMQTGPNDGNNDGDQLTSIGEDELEETNPLAIVPDSHPIATPARSRASQLKVVPAAGPSPAPPVEARQVKKEEVETKVSAWQTAEVAKINNRFKREEVVINGWETEQVEKASAWLKKIEVFLMTEQLTQRKLDEQRAKALERTQNDIAKARRKAEEKRASAEAKRGLKLAKVLELANFMKAVGRVPTKRSFF

SEQ ID NO: 16651 - protein, 543 aa, Oryza sativa
  Clone ID: TF_OSC401520j.C1.p20.fg
MALPAVGPRGATDPDPAPSPLRVHGIGIGSHASRGTAPRGEEEEEEEEWRGDGDAGSEEEEGEAVSDSFSHSLRECQKQRKLRAEGAALLLSPAKHELTGGGGGSIELLVLSPRCLVGGNVGGMSKSSTASSRSRSGTFPSPGTPNYHRHCASTMQYPKGWSSERVPLGGGTNRRYGGSGVVLPFNNGRKLPSKWEDAEKWILSPVSCDGIGRMSAPAPHHRRPKSKSGPLGHPGGIPGAYAAASPFVPCFDGVLAAANFAAHSPFSAGVLMPEHVRNGDFSSGRGRSGDDGSSRSYSAEKDPYILRSASIHAWTETLMEASAFANISEETAQDDKLQGLRGETPAISSPIIKKDVATQMSPDDSISSSPKARHSCSSLPSGHPIKEPNSNALKPEVRDVQVDDQVTVTRWSKRHVTRGSDRRSTNIVEWRKKTIETRAPSFDEKERESCVSKCKREEAKITAWENLQKAKAEAAIRKLEMKLEKKRSSSMDRILGKLRTAQKKAQDMRSAVSDVAAHVSQQIRINQEVRFFLAVAAGGDGVI

SEQ ID NO: 16652 - protein, 316 aa, Oryza sativa
  Clone ID: TF_OSC12505j.C1.p18.fg
MLSEQTAASGSSSSSRGADDREIVISTGREIVVRSSGGEEREEEVVVEEELEEPEFRDIHALSPPPTPTPSQPSSSYHRRRRESWESAAGSRHTSIRSVGSDTAPSELFPTMSREFSAMVAAAANANAAAAAAANGGDSSRAGVDDALGRIGEDELEETNPLAIVPDSNPIPSPRRAHLALPAPGDVSSAGGGHGDEVSVGQVKKEEVESKIAAWQIAEVAKVNNRFKREEVVINGWEGDQVEKANAWLKKYERKLEEKRAKAMEKAQNEVAKARRKAEEKRASAEAKRGTKVARVLELANFMRAVGRAPSKRSFF

SEQ ID NO: 16653 - protein, 531 aa, Oryza sativa
  Clone ID: TF_OSC401648j.C1.p50.fg
MEYERIHKVQAGALSPTKLRMKLLGTHNRVRVISNSSSRTSPSKNTEPSQAQNRLLVCDVLEEVSGSSDGSKCSSAINKTEALEKDPPLDINKVEDMTKSSVQQPASSNSSMIHPVRTIEEESNDCDSGIDNASTSSFEFHGGEKTAAQNPTSGYFSRQTSSKWNDAEKWIVNKQNVQQNISKGAPQNQSAQQMNSAAGRGFIVPKISNRNIIPRPMQNMKRPSPASSASRSILERLSFGSHQPKLVRHADVCTVNNAGVTSEYQTKATDNSSSIEIRPYKDPKAIPAVHSVSVRDVGTEMTPIPSQDPSRTGTPLGSMTPTRSPNCSIPSTPVGGRSTASPGDDNTDDGPYFNRKGGTNEISDDEMRLKTRKEIAALGIQLGKMNIATWASKEELELVSASPSIADLERMKKEYAARAAAYEEAENFKHTARFKKEELKIEAWESLQKAKIESEMKRIEEHAEKLRSEAMAKMAEKLEMTRRLAEEKRASANARMNQQAAKAVHKAELIRQTGRVPGSCILCCSGCFCQH

SEQ ID NO: 16654 - protein, 203 aa, Oryza sativa
  Clone ID: TF_OSC401780j.C1.p8.fg
MAGEALKEAGATPAAANAGEEKAVIPAASTSPVISKTDDDTEPPADDSKALVVFVEKVADKPHAEKATATATPTRTSNDRDIALAKVETDKRESLIKAWEENEKAKAENRASKKLLDIISWENTKKAVIKTQLKKKEEELERKKAEYAEKAKNKEAIVHKEAEEKRAMVMARRGEEVIKAEEIAAKYRATGVTPKKHIGCFGA

SEQ ID NO: 16655 - protein, 182 aa, Oryza sativa
  Clone ID: TF_OSC402101j.C1.p10.fg
METQEAKRADVAAAPATATGGEAVKPAAGDAGAVTKTNAADGPSAPAGKAATPTGSVDRDAILANVELERKLSMIKAWEESEKSKAENKAQKKMSSILSWENTRKAAIEAKLRTQEEKLERKKAEYAEKMRNQVAAIHKAAEEKRATVEATRHEEIIKYEEMAAKHRSKGTTPTKFLSCFGS

SEQ ID NO: 16656 - protein, 171 aa, Oryza sativa
  Clone ID: TF_OSC408029j.C1.p2.fg
GGDQLTSIGEDELEETNPLAIVPDSHPIATPARSRASQLEVVPAAGPSPAPPVEARQVKKEEVETKVSAWQTAEVAKINNRFKREEVVINGWETEQVEKASAWLKKIERKLDEQRAKALERTQNDIAKARRKAEEKRASAEAKRGLKLAKVLELANFMKAVGRVPTKRSFF

SEQ ID NO: 16657 - protein, 510 aa, Oryza sativa
  Clone ID: TF_OSC401731j.C1.p33.fg
MEYERIEKPFPTQGGGFSPKRLRAMLLGVEKRRKGQEEEEEGDAGEVDDEYGAVPKSSVRSDADSDARRGGSMCEEYKDVDVVSTISESSSSLETGSGHRSRDTHSMGSRVRVPEEDSCDSESVASNFEFHKERGASARSVTAAIVPPFSKPAPSKWDDAQKWIASPTTNRPGRAGGVPQRKMEKTSFGGGRLPATKVVLEATEEIDTKRVDPSQEKREIGWQKAVNWAPPDPYPEVETCAKSALAEEITVADSAVTFSRHDSSATLQSATTCIPPPPTVRSVSMRDMGTEMTPIASQEPSRTGTPVRATSPDCSRPTTPRKTIGPNAIGAVIGHGECSNVELSEQELQMKTRREIMLLGTQLGKTNIAAWASNKEEEKDASLSLKGVPMDQSTQKVTEIRAAAWEEAEKAKYLARFKREEIKIQAWEDHQRAKIEAEMRKIEVDVERMRARAQDKLMSQLASARHTADEKRAAAELKRSRAAAKTAEQADHIRRTGRMPSSIGCWNWCS

SEQ ID NO: 16658 - protein, 426 aa, Oryza sativa
  Clone ID: TF_OSC101572j.C1.p8.fg
MLLGLEKNQHNGEDTSPEANDSGELDDQSKSTTPEMVLHSSIILIYGFTKSLIASTGSMECSTSTEMSSNSGHRSRNRAQDDDSFDSESSSSGPPTVKRPAAVTALLPPFSRPTPSKWDDAEKWISSPTANRGGRVGSAAGAAPKKSALAFPEHVSRPPAVAKVVAEVPINTGTLVKNSVALAQPISFNPAQSASIVDEPAPAVRSVSMRDMGTEMTPIASQEPSRTGTPIIASSPTSSRTPTPQRNAEISIGEFGPNKMEMSEEELQMNTRKEIMDLGQRLGKTTIAAWASKEEKSTTSFANVITDKAVEIDREARAADWEEAEKAKYLARFQREEVKIQAWENHQKAKIEAEMKRMEAKIEIKRAREQDRLSSKLAAARHKAEARREAAESRKNQEAARTEEQAAQIRKTGHIPSSISCWCWCL

SEQ ID NO: 16659 - protein, 171 aa, Oryza sativa
  Clone ID: TF_OSC400879j.C1.p25.fg
MAEVAPPAPAPEPTKDIAEERAAVPAPEESKAMTVVDDAEKAAATGGSHERDALLTTVATEKRISLIKAWEENEKAKADNKAAKKLADIASWENSKVAEIEAEIKKYQEYLERKKAEQVEKLMNGVAKVHRAAEEKRAATEARRGEEVVKAEEAAAKYRAKGEPPKKLLFG

SEQ ID NO: 16660 - protein, 493 aa, Oryza sativa
  Clone ID: TF_OSC402100j.C1.p4.fg
MEPKSSSSSHYLQPSATLPSTRRNSFQGVGAEAGGGGGGMNPFGPTFSDPLCSLNLKETSEFVRSSFPMATMARSNSSNGATGNGGHGYHRETSTASSSSSSSASAQRRRAEQQQQQVPATPGRPLLFFNSSSPAHHQLVSARRSVPSKWEDAEKWVRQASSDHHGGHHHHHGKGSKLQEEKRASAVRRSVDADVTALALYTAPAAEVFLKDKFTDNVEPSKESFVFRSSYCEPTKNTAAQAVAAGNGIDHRRDIGTEMTPLGSSTTSRCHTPIKSTSPARHNTPASRSGPLVPYAGGGGGAGQDISDLADCHFAKLDLGAQFDAMLINWSSKEEEEEEVSKSLRHFEASVAAVGEKRGGAGDCRWEDDDRAKSCIRYQREEAKIQAWINLESAKAEAQSRKLEVKIQKMRSNLEEKLMRRMTTVHRRAEEWRATAQAQHLQQLKRAAEQVRRAKATSHHHHHHHLAGSNASCGCFPCNGSNNIISGNLLNYY

SEQ ID NO: 16661 - protein, 206 aa, Oryza sativa
  Clone ID: TF_OSC400524j.C1.p27.fg
MAEEEAKKVEVEVTEAPPAAAAAAETEPAAKDVAEEKAVIPAPAPPAEEEKPPVDDSKALAIVEKVADEPPAEKPAQGGSNDRDVALARVETEKRNSLIKAWEENEKTKAENKASKKLSAILSWENTKKANIEAQLKKIEEQLEKKKAEYAEKMKNKVAIVHKEAEEKRAMVEAKRGEEVLKAEEMAAKYRATGHAPKKLIGCFGA

SEQ ID NO: 16662 - protein, 427 aa, Oryza sativa
  Clone ID: TF_OSC417639j.C1.p12.fg
MEYERIHKVQMGVMSPTKLRMKLLGSHGGSIGRVDEAKKSPRASPARLDADEDDDDHPKNSLLPQELDEDYPKDQSDSSRSRSDASHGRAGNGYDSGGFEFYREERPPPPPPAAVAVVGGTFFRQVPSKWNDAEKWLAGRHVVHSNPIFSKKAAAAAAAVSGRVAPEASASSSPPSVASRQRQQKRLRVSSEAAAVSMRDVGTEMTPMASKEQSRSGTPAGAATPSLSPLCSVPTSPRGAASASSASSERELQIRTRREIAALGLQLGKMNIASWASKDDDDELPRASPEKRPRPRPRPHSGDGGGEAKKREFEARAMAWQETHKCKLALRFQRKEVKIQEWESCQKAKFEAKMRHAEVQAEQMKARAKQKLSRRLSALSHKAEGKQARVEARRSRQAARLARQVHRIRETGAAPSRLRRCCSWLFL

SEQ ID NO: 16663 - protein, 245 aa, Oryza sativa
  Clone ID: TF_OSC900142j.C1.p22.fg
MWSEAHGISTSPLMKKVKVIDCLSCCEHFFNGYYEGRMYQNLWPEMLKLNDWPISNHFEELLPSHGVKYINSLPFQAYTNLKSGLLNVSTLLPDDILKLDMGPKSYIAYGYAQELGRGDSVTKLHCDLSDADANDLACPIKSESAEEGALWDIFRREDVPKLKLYLDKHSKKFRHIYCSAVQKVCNPVHDETFCLTKEQKRKLKEEHGYFTTRKSIFAGGGNSSSQADGRSTCSPKFTGGLEVRI

SEQ ID NO: 16664 - protein, 875 aa, Oryza sativa
  Clone ID: TF_OSC400337j.C1.p7.fg
MGLSDYDLMGVAVPGTGVGGPHPEALKERMLCNLWEVYTLAQRNRKFNELLNDEAIMMKPSKESKKRGAGKKQEEEENNTISIEDEMCDANNKKGKKMLTGENALMCHQCQRNDKGRVIWCKSCNNKRFCEPCMKRWYPGLSEVDFAAKCPYCRKNCNCKACLRMIGVEKPPEKKISEENQRRYAFRIVDLLLPWLKELQQEQMKEKELEGRLQGIGGFSNCLFTFLFAGVSMDEVKLEQADCDMDERVYCDRCKTSIVDFHRSCKACSYDLCLACCWELRKGEIPGGEEAKSVQWEERGQKYVFGNISKDEKKRVSSKRHMETPSTETCNDMAVAGDPNNPLLLWKANSDGSIPCPPKEIGGCGASSLVLRCLLPEIMLSELEHRANKVIKREAFDKAINETSDQCPCFYHTSKIRTNATREAANRKGSSDNYLYCPDANNIQEDDLSHFQMHWSKGEPVIVSDALRLTSGLSWEPLVMWRALREKKTNGDVEDEHFAVKAVDCLDWNEVEINIHMFFMGYMRGRRHPMTFWPEMLKLKDWPPSSMFDQRLPRHGAEFITALPFPEYTDPRYGPLNLAVRLPAGVLKPDLGPKTYIAYGCYEELGRGDSVTKLHCDMSDAVNILMHTAEVSYDTEQLDKIAKIKMKMREQDLHELFGVSESGAKGKADDEASKISCNMENKHTSNQSTKGLDINALPPDDSGSDIGDKPSFCQSEVSHPIHDQTFYLTVEHKRKLKEEHGVEPWTFEQKLGDAVFIPAGCPHQSCIKVALDFVSPENVGECVKLTGEFRRLPSDHRAKEDKLEIKKIALNALKEVVNFLDPLPKGSKNRDEVVEVTKPKRKYGNRRGDLKSGEDQPIDESIEERKPKKRGRSKR

SEQ ID NO: 16665 - protein, 997 aa, Oryza sativa
  Clone ID: TF_OSC400891j.C1.p23.fg
MPPKRKRGGGRPRKAPEDAAAKENGEKTNKEEETQASPEENGAGQTQASRTARKRRKGPVADPSSTELPPRKLRDRRNVPAVDYKENKHTKKMDGTSTMCHQCQRKDSGRVVRCRNGAEKNRRHRYCVKCIKRWYPHLTEDDFENCCPVCHNNCNCKTCLRTNVINKGDKEFADGKNKIKYSLRIARFLLPWLKQLHQEQMLEKSVEATIKGIDVTDLEVPQAQFNNDERIYCDNCRTSIVDFHRSCKSGHYDLCLSCCQELRQGLTTGTVVTCDTAVDVPEIEGKEGLQEGSSHSSAVGQGASDQQNDRLIGSAAPSEDCTPSLIWRAKSNGSIPCPPNAGGCGDCLLELRCLFKENFISDLLDKVNSVVNKETEQELGGSRCSCFTESGEVNNETSRKSACREDSNDNYIYCPTAREVQSGALDHFQQHWLNGQPVIVRDVLELTSGLSWEPMVMWRALREKRDKKEHERLSVIALDCLTWFEFMYHQDVLVVPVSYLGFNSTIETTLYFKLVDINIHMFFEGYSRGAVGSEDLPVLLKLKDWPQHSSFEERLPRHGAEFMSALPFREYTDPKSGPLNLAVKLPKHVKKPDLGPKTYIAYGVAQELGIGDSVTKIHCDMSDAVNILMHTDEVELKAERITAIEKKKESLRKDGKNLHVLRPDHDDDTSIALSESTEVPRSRGLENGSSIKQPAPNVAVMDQGGVHTDMVADEAEGNLSLSNGQSPNQSDAHNMDITFSKGETDHSICTINGGEEMGNGFGREDKCKSSHGVGSSESSDCQRRSRRRDACSSSATGEINETSMETNKFTISIEPKDDHPFVEGNQTEGGALWDIFRREDVSKLHDYLMKHAEEFRHYNYETVKQVSHPIHDQCFYLTNEHKRKLKEEHGIEPWTFEQKLGEAVFIPAGCPHQVRNLKSCIKVALDFVSPENVQECIRLTEEFRLLPKGHRVNEDKLEVKKIALYALDQAIDDITGKSCNERTKDEGEEEASAPSVS

SEQ ID NO: 16666 - protein, 595 aa, Oryza sativa
  Clone ID: TF_OSC420889j.C1.p1.fg
MGSAPLLGTTVDEEDFSPPSTSGRGRGGRKQGRGRGGNSCHQCKRVKPRPEEMVRCQLCGDKVFCAACIKNKYPEMQQAEVRDKCPFCRNICNCTRCNPSDKSDGPRNPFVRRCNSSSSVKRRVKTAASGLRCRVDTAALQAKAIDKLEANSRINNESAMLDKADTLDVRTDEVDTETKSKYANYMLHYLAPHLTKLNKDQMSEIEKEAKIQRLELSQLSVEQAACRHDERVFCDHCKTSIFDLHRSCPGCSYELCIVCCKELREAKLMGSCKEELFSYPNRGPDYMHGGDGDSVPELINYKQGDLSSNQSKDIQWRVDSDKIYCPPTELGGCGNHILQLRRIFSKDWLSKLEVDAFQMRKQLEPSDIIGRDTCECSCSTDHASSRKAASREDSTDNYIYCPTLDNGKPEDLTHFQKHWVKGEPVIVQQVLKKMSCLSWEPPDMWSKVHGTGTSPEMKNVKAIDCLSCCEVEICTQDFFNGYYEGRMYQNLWPEMLKLKDWPTSNHFEELLPSHGVKYMNSLPFQPYTNLKSGLLNVSTLLPDDILKLDMGPKSYIAYGYAQELGRGDSVTKLHCDLSDAFMKSPWASSFSSLKT

SEQ ID NO: 16667 - protein, 917 aa, Oryza sativa
  Clone ID: TF_OSC401978j.C1.p35.fg
MAAEEVEAAAIDGSGEEAKRKSGKQRGSGAKGRRRNGDRAFRPPAMRPEEEGRGVATRPGALRERKPPPNAFNAPDDDEDVEKTDQLLEPLNKPKRRDAGKKRGPRKKKVDQENIKTHRHNANAVKGKMLVNDKVSKTEKKQREENVDRYPDLPENEFAAKCPYCRKNCNCKACLRMRGVEEPPRKEISKENQIRYACHVLRLLRPWLIELRQEQMAEKELEAKIQGVSVDQIKVEQAELRKGEIPGGEEVEILDPEERDKDYAFGKILSDGENQRDSLKCRSDTQNSESNKGMASDENQKKALLLWKANSNGSIPCPRKEKEDCSFSSLDLKCLFPEKLLPELEDRSEKVFWSETFAKELGRTSELCPCFDHSGKIRSDSKKLRQAANREDSSDNYLYCPVATDIQDADLLHFQMHWAKGEPVVVSDTLKLTSGLSWEPMVMWRAVRERTKGKAEDEQFAVRAVDCLDWCEVEINIHMFFMGYTRGRTHPRTYWPEMLKLKDWPPSSSFDQRLPRHGAEFISALPFPEYTDPRYGPLNLAVKLPGGVLKPDLGPKTYIAYGFSEELGRGDSVTKLHCDMSDAVNILTHTAEVPCETYDAVQIKNTQKKMKMQDDMEIYGMIESGSELKPSACPVELGNKAVGEAPKASCSKENVHTLKDKSNGWWRKYTFGLDINASPPDDAGGDARDEALSYESVVHSDVAQCPNHNHETNNSDDARIGAQRCQKKAKGRPPKTGSGVSEHQESGGALWDIFRREDSEKLQDFLRKHAPEFRHIHCNPVKQVIHPIHDQAFYLTAEHKRKLKEEYGVEPWTFEQKLGEAVLIPAGCPHQVRNLKSCIKVALDFVSPENVGECVRLTKEFRRLPSSHRAKEDKLEIKKMAFHALNEVLNFLDPPSSEGSKEAAEKPRRGRGRPRKH

SEQ ID NO: 16668 - protein, 913 aa, Oryza sativa
  Clone ID: TF_OSC420010j.C1.p2.fg
MEAAAAAAAVPRGAAVQALRRQAVAMQRALMPDKTVCEKHYVQAKKRAASSALRASLRRSSASASAARGTTPPARMAVGRPISGRVAGEPVHVAELVVAPLRPPPRRRQPVHGLPMGNAAGARTAAELVGRGSAGLVACSSAAGAAAAATCHQCRRVANTICCTSCDRRGYCTNCISRWYSDIPIDDVRKARVQEISAVDKLEYLHSILASVLPVLKQIYSDQCFEIGVDTKAYGLRTDIIRAKVNPDEQMCCDTSNYPRSDFCKVPVFDYHRHCPRCLYDLCLDCCRDIRRSRTSVARGEYAEGRVVDRSKDTSNKRARMEPSAESANDKSVPQRRDIKNIDIRSLFPTWRVNNDGSITCGPHEAGGCGSSKLVLRRIFKINWISKLVKNSEEMVNGCKVHVLENGCSSCNDGRTLELTGHRNFGVSTCSNNGGIDRFCVFSPVLEDLKSEGIIHFRKHWIKGEPVVIRNAFEPSLSSSWDPLNIWRGIQEIMDEEVDDDVIVKAVDCSNQAEVDIELKQFIKGYSDGHKGEDGELMMLKLKEWPPPSVLEEFLLCQRPEFIVNFPLVDFIHSRWGLLNLSAKLPPDTLQPEVGLKLLIAYGRHQEAGKDPVRRFVLSSTRVKVHMLMHTAKGHDVCPKRLQPERSEKIANGMTMHVNAHAPVQNLNVDMGEQSPDHVSSKFDERAHASALRLQEKSSDAKLNCGFEGSSTELSCSSHSEEPKVNGSERSQAGSVWDVFRRQDISKLNEYLTANWEELAASSQVKNPIYEQSIYLNKYHKRILKDQYGIEPWTFQQHIGEAVFVPAGCPFQVKNLQSTVQLALDFLSPESLGESARMAQEIRCLPNDHDAKLKMLEIGKISLYAASSAVREIQRITLDPKFNLDLKFEDQNLTQAVSENLARVTKQRNVPCS

SEQ ID NO: 16669 - protein, 913 aa, Oryza sativa
  Clone ID: TF_OSC401726j.C1.p12.fg
MEAAAAAAAVPEELRCKRSDGKQWRCSAPSMPDKTVCEKHYVQAKKRAASSALRASLRRSSASASAARGTTPPARMAVARPIYGRVAGEPVYVAEPALPPPPPPPRRRQPVHGLPMGNAAGARTAAELVGRGSAGLVACSSAAGAAAAATCHQCRRVANTICCTSCDRRGYCTNCISRWYSDIPIDDVRKARVQEISAVDKLEYLHSILASVLPVLKQIYSDQCFEIGVDTKAYGLRTDIIRAKVNPDEQMCCDTSNYPRSDFCKVPVFDYHRHCPRCLYDLCLDCCRDIRRSRTSVARGEYAEGRVVDRSKDTSNKRARMEPSAESANDKSVPQRRDIKNIDIRSLFPTWRVNNDGSITCGPHEAGGCGSSKLVLRRIFKINWISKLVKNSEEMVNGCKVHVLENGCSSCNDGRTLELTGHRNFGVSTCSNNGGIDRFCVFSPVLEDLKSEGIIHFRKHWIKGEPVVIRNAFEPSLSSSWDPLNIWRGIQEIMDEEVDDDVIVKAVDCSNQAEVDIELKQFIKGYSDGHKGEDGELMMLKLKEWPPPSVLEEFLLCQRPEFIVNFPLVDFIHSRWGLLNLSAKLPPDTLQPEVGLKLLIAYGRHQEAGKGDSVTNLMINMADVVHMLMHTAKGHDVCPKRLQPERSEKIANGMTMHVNAHAPVQNLNVDMGEQSPDHVSSKFDERAHASALRLQEKSSDAKLNCGFEGSSTELSCSSHSEEPKVNGSERSQAGSVWDVFRRQDISKLNEYLTANWEELAASSQVKNPIYEQSIYLNKYHKRILKDQYGIEPWTFQQHIGEAVFVPAGCPFQVKNLQSTVQLALDFLSPESLGESARMAQEIRCLPNDHDAKLKMLEIGKISLYAASSAVREIQRITLDPKFNLDLKFEDQNLTQAVSENLARVTKQRNVPCS

SEQ ID NO: 16670 - protein, 678 aa, Oryza sativa
  Clone ID: TF_OSC900031j.C1.p1.fg
LRTDIIRAKVNPDEQMCCDTSNYPRSDFCKVPVFDYHRHCPRCLYDLCLDCCRDIRRSRTSVARGEYAEGRVVDRSKDTSNKRARMEPSAESANDKSVPQRRDIKNIDIRSLFPTWRVNNDGSITCGPHEAGGCGSSKLVLRRIFKINWISKLVKNSEEMVNGCKVHVLENGCSSCNDGRTLELTGHRNFGVSTCSNNGGIDRFCVFSPVLEDLKSEGIIHFRKHWIKGEPVVIRNAFEPSLSSSWDPLNIWRGIQEIMDEEVDDDVIVKAVDCSNQAEVDIELKQFIKGYSDGHKGEDGELMMLKLKEWPPPSVLEEFLLCQRPEFIVNFPLVDFIHSRWGLLNLSAKLPPDTLQPEVGLKLLIAYGRHQEAGKGDSVTNLMINMADVVHMLMHTAKGHDVCPKRLQPERSEKIANGMTMHVNAHAPVQNLNVDMGEQSPDHVSSKFDERAHASALRLQEKSSDAKLNCGFEGSSTELSCSSHSEEPKVNGSERSQAGSVWDVFRRQDISKLNEYLTANWEELAASSQVKNPIYEQSIYLNKYHKRILKDQYGIEPWTFQQHIGEAVFVPAGCPFQVKNLQSTVQLALDFLSPESLGESARMAQEIRCLPNDHDAKLKMLEIGKISLYAASSAVREIQRITLDPKFNLDLKFEDQNLTQAVSENLARVTKQRNVPCS

SEQ ID NO: 16671 - protein, 84 aa, Oryza sativa
  Clone ID: TF_OSC29814j.C1.p1.fg
MQFEDGGDVHVGAGEGEDGGRVTVDELTRCLRCGISANATPHMRRGPEGRRTLCNACGIAWAKGKVRKVIDSDTPMDNAMFAQM

SEQ ID NO: 16672 - protein, 1451 aa, Oryza sativa
  Clone ID: TF_OSC404332j.C1.p19.fg
MTMMTPPPLEPEEDEMLVPHQELVAADAAQPMEVVAQTEAASTAESQPAEDPQTSRFTWTIENFTRINAKKHYSDAFVVGGYKWRVLIFPKGNNVDHFSMYLDVADSANLPYGWSRYAQFSLAVVNQIQQKYTIRKDTQHQFNARESDWGFTSFMPLSELYDPSRGYLVDDTVVVEAEVAVRKMVDYWTYDSKKETGYVGLKNQGATCYMNSLLQTLYHIPYFRKAVYHMPTTENDMPSGSIPLALQSLFYKLQYSDNSVATKELTKSFGWDTYDSFMQHDVQELNRVLCEKLEDKMKVTNLRTVVEGTIEKLFEGHHINYIECINVDYKSNRKESFYDLQLDVKGCRDVYASFDKYVEVERLEGDNKYHAENHGLQDAKKGVLFLDFPPVLQLQLKRFEYDYMRDTMVKINDRYEFPLQLDLDRDDGKYLAPDADRSIRNLYALHRYKFDDERVTKEDTKKALEEQYGGEEELPQINPGFNNAPFKFTKYSNAYMLVYIRESDKDKIMCNVDEKDIAEHLRVRLKKEQEEKEHKKKEKAEAHLYTIIKVARDENLKEQIGKDIYFDLVDHEKVRSFRIQKQLLFTTFKEEVAKEYGIPVQFQRFWLWAKRQNHTYRPNRPLSPHEETQSVGQLREVSNKAHNAELKLFLEVELGPDLRPLPPPEKSKEDILLFFKLYNPEKEELCFVGRLFVKALGKPSEILTKLNEMAGFVPNEEIELYEARAKFMMLYLWDNLVYVTPLRRVLGEIKFEPNVMCEHIDKKATFRASQLEDGDIICFQKSPIPDSDTQMRYPDVPSYLEYVHNRQVVHFRLLEKPKDDDFSLELSKLHTYDDVVERVARQLGVDDPAKIRLTSHNCYSQQPKPQPIRYRGVEHLLDMLIHYNQTSDILYYEVLDIPLPELQGLKTLKVAFHHATKDEVVIHSIRLPKNSTIADVINDLKTKVELSSPSAELRLLEVFYHKIYKIFPLHEKIENINDQYWTLRAEEIPEEEKNLGPNDRLIHVYHFMKDPLQNQQIQNFGDPFYLAIREGETLAEVKERIQKKLQVPDEEFCKWKFAFISMNRPDYLQDSDVVSARFQRRDVYGAWEQYLGLEHADTAPKRAYTANQKKLTRITAAVSAALGSVIVIADEIFASTYILTILSKKLYLMSRIKFGVTRSIFFSRHYDLNKAPVHLTLQLPTSPMDNPTPSSSSGGGGAAAAANASSDEHRKTSPATAADFFDEEHTFDDILLPVDLFDFTHGLDAGDGCYVDDQAAIGQKPLSPAPEPAAEQQPSPAPEHGDDERLVMYYQGQEYIFDPVQPQKIENIFHHLNGQEMIPQSIRPQPTNLVRPITVPEDFDRFAALTRYREKKRNIKFIKKADYSARKEVALRMKRSKGKFAPRVQTSENSLAHRKGITFCTNCGESSDATPMMRHAPNGTKSFCNACGLMWANSRKIRKIRNPTSGEQEDQ

SEQ ID NO: 16673 - protein, 209 aa, Oryza sativa
  unsure (1)..(209): unsure at all Xaa locations
  Clone ID: TF_OSC30845j.C1.p1.np
IPAAPKFAIGYRDFAVLAVRHRWVQTKEAAELDYXSSAHAAMAAAAAPASAANNGGGNWPGQDSCLTAAPGRGAHSKRSCATAATAAAWHTLGPHPTFXSSLSSSRPSSDFPSSKKLSATRLNGSSGSRGKKSPGPAGVKVGMEAGVYVRCMHCASEKTSXLLTGPLGPKTLCNACGLRFMSGRLMPEYKAAAMPPLWLTTSGGDHSSI

SEQ ID NO: 16674 - protein, 295 aa, Oryza sativa
  Clone ID: TF_OSC413617j.C1.p3.fg
MASSTFSLFFPMSNGQCWPPSTVEESAAYDDHSTVTTSPSSPSSSSTGSVDCTLSLGTPSSRRAEPVAAAAPAANHGAPVPAHYPSLSAATVSWDATAESYYCGQQGRPATGAAKCAAGAGHDALLDRRCANCGTASTPLWRNGPRGPKVRRRRRSLSPSLFSISAVHFAVSPTYVVSLTLPPSYVSLQSLCNACGIRYKKEERRAAATTTTADGAAGCGFITAQRGRGSTAAKAAPAVTTCGEETSPYVVGGGGGGGEVADAAYLAWRLNVVPPAATATAFSVWPERASLYHYN

SEQ ID NO: 16675 - protein, 436 aa, Oryza sativa
  Clone ID: TF_OSC100956j.C1.p1.fg
TPLWRNGPPDKPVLCNACGSRWRTKGSLTNYTPMHARDDIDAEEPRASKLKPPTLKLKEQKQLKKNPSHITMENGPFSDQNFRKMGDPDLSNRSGSGSALSYSESCAPYGTADASEMTASAQSHAWESLVPSKRRSCVTRPKPSQMEKLAKDLNSIMHEEQLLYLSGSSEEDLIYHSATPVDSFEMGYGSMLLRPNSKSLEEESEASSIPADNKSYITSESYSGSVSFVYSESKATSNQNVITEQPKKFLVQTSDNARRANLHTENQDTLENANSPLVSLHMEGKDSEETRVKTSASNRLTKSTMNPLKRPHDTHFQSSVELRGTMRSPKRVSKYGDAMGLKCQASFMPKPGNGKDLACSDRALNLFMLPPDKLSMLVPPQYANTDSDQDLLLDVPLNARHPEAELLCQPSQLSSVAHSSTSEAGNAGGEGRLKQP

SEQ ID NO: 16676 - protein, 619 aa, Oryza sativa
  Clone ID: TF_OSC400173j.C1.p8.hg
MSGHHEAKPYQPRRGPAPADEEAAPAAAADEAEAEAEVEAMERYEQEQEYEEGEEGEEEEYEGGEGVPMDADASAAAVAGMDPHGEMVPVAGGEAGGGYPHVASNTLTLSFQGEVYVFESVSAERVQAVLLLLGGRELAPGSGSVPSSSAAYSKKMNFPHRMASLMRFREKRKERNFDKKIRYTVRKEVALRMQRNRGQFTSSKSKAEEATSVITSSEGSPNWGAVEGRPPSAAECHHCGISAASTPMMRRGPDGPRTLCNACGLMWANKGTMREVTKGPPVPLQIVPAATNDVNGIVEATGVEQHNSAVEEAVSAANGHESQSGVAVMRRPLDQGLTAQNASSSSCLPSPPRVRDETSATTAMAAAATAAGDEELESLLRNFHRFSQGYKDALVEAQALRVNCSSESERRQALESHVADLKSDNERLRRLYTETLFKFTNQMKFHTESRNLKEELEKANTRLLSMEEEYKREIEQLKLGSEMNSNDLENKLSCAVVQQATNEAVIKQLNLELEAHKAHIDMLNSRLEQVTADVHQQYKNEIQDLKDVVIVEQEEKNDMHRKLQNTENELRIMKMKQAEQQRDSISVQHVETLKQKVMKFRKENESLKRRLAISELDCS

SEQ ID NO: 16677 - protein, 375 aa, Oryza sativa
  Clone ID: TF_OSC404775j.C1.p2.fg
MEGEHHHHHQDHHQGHFQAFSLQPKDPPVLFPFVISRRSSSSSPSDSTTLSYGSDHHLTQQQQHQHQAMLEPQNMIGGSSAGIFATPFPTVKSIRDDMIERSQFDPYDTEKLQASCGLAKVVAGGKWSAVPAAKMKITRKMGEPSSGVTGGAATTVAPKKPRRRPAQAYEDHGHGGAMGQAFGVIRVCSDCNTTKTPLWRSGPCGPKSLCNACGIRQRKARRAMMASGLPASPNAAGPKAAAHSGAAAVAAAQPKVKKEKRADVDRSSLPFKKRCKVVQVEDHQTLPAATNAAAAAAMEETAESATVAPPPAPTTRGGTLVDSIGLSWSKTHAAATASCSFRPSPVAPGFAAAVQDEITDAAMLLMTLSCGLVRS

SEQ ID NO: 16678 - protein, 658 aa, Oryza sativa
  Clone ID: TF_OSC401181j.C1.p1.fg
MPDAAAAAAAAQDADAVMRDAPADAAAGGGDNDDDDGDDGTEEDEEEDDDEEGDEEELPPAEDPAAPEPVSALLPGSPNQLTLLFQGEVYVFESVTPEKVQAVLLLLGRSEMPPGLANMVLPNQRENRGYDDLLQRTDIPAKRVASLIRFREKRKERNFDKKIRYAVRKEVALRMQRRKGQFAGRANMEGESLSPGCELASQGSGQDFLSRESKCQNCGTSEKMTPAMRRGPAGPRTLCNACGLMWANKGTLRNCPKAKVESSVVATEQSNAAVSPSGIDNKELVVPNPENITASHGEVLHSFKGDWGEIGEIVTRFPRTRFPNYSTVSLRGSSAREITRDALLQKVSEERQLRSHLRRAAAAALSIQQLTKSANHLMWPFQKEVHRVIRHVAVVHMWRVWRRYSVIRIVSEQLHEEWEALINQPDINLTKQWISSMMLRPFLFFVTQPSSWYKGQQDKTLNSISACFKIILNSINSMDASKNLCSFAVGTPEERCNHSCCKDGNMVQITDTAMRLAVSLTDCKTWKKITSEDTRAADASVESLIEFIGASQSGTYSCLRRYIVNLGSHALEKKISSISTDDQFLITASAVTIALRPFHSMRAGRGADLNGASKEYFTLILTIPDLCKRLPPLLLPAIKHISILQPSLDILLGALFKG

SEQ ID NO: 16679 - protein, 1484 aa, Oryza sativa
  Clone ID: TF_OSC416374j.C1.p12.fg
MPDAAAAAAAAQDADAVMRDAPADAAAGGGDNDDDDGDDGTEEDEEEDDDEEGDEEELPPAEDPAAPEPVSALLPGSPNQLTLLFQGEVYVFESVTPEKVQAVLLLLGRSEMPPGLANMVLPNQRENRGYDDLLQRTDIPAKRVASLIRFREKRKERNFDKKIRYAVRKEVALRMQRRKGQFAGRANMEGESLSPGCELASQGSGQDFLSRESKCQNCGTSEKMTPAMRRGPAGPRTLCNACGLMWANKGTLRNCPKAKVESSVVATEQSNAAVSPSGIDNKELVVPNPENITASHGEVLHSFKGDWGEIGEIVTRFPRTRFPNYSTVSLRGSSAREITRDALLQKVSEERQLRSHLRRAAAAALSIQQLTKSANHLMWPFQKEVHRVIRHVAVVHMWRVWRRYSVIRIVSEQLHEEWEALINQPDINLTKQWISSMMLRPFLFFVTQPSSWYKGQQDKTLNSISACFKIILNSINSMDASKNLCSFAVGTPEERCNHSCCKDGNMVQITDTAMRLAVSLTDCKTWKKITSEDTRAADASVESLIEFIGASQSGTYSCLRRYIVNLGSHALEKKISSISTDDQFLITASAVTIALRPFHSMRAGRGADLNGASKEYFTLILTIPDLCKRLPPLLLPAIKHISILQPSLDILLISKDKIFEEITKLEKSGVSSGGSGTIPYCGWALGNLVTLATEHDDLSNSGCFVQGLDCCLYVDAINCVSQSLLKFFEENKEMLLSFGDSVDTSFIKENDTSDSCSRTLFMDLLKPIYQQWHLRKLLVLAKEDAVCKRQNNHDPDTQTHSRSLKLLDIVCFYYHMLRIFSLLSPSIGSLPILNMLSFTPGFLVDLWGALEIYIFGQAVHKLQGPKHERESATSSSGEHVSSMRQRRNFKDTSNKWSNVFQKITGKSNDAEDTNLVDNPLNSEQNGEALILWDIEAMRQGSECIGKDLMQMLYLFCATYGHLLLVLDDIEFYEKQVPFTLEQQRKIASSLNTFVYSTFIQNGGSSSKPLIDVTVRCLNLLYERDSRHKFCPISLWLAPARNGRIPIAAAARAHDAAFATLPGNQFFGIPIRSSVLTTIPHVYPFEERVQMFREFIELDKASRRVTGEVSGPGPGSIEIVIRRGHIVEDGYRQLNCLGSKLKSCIHVSFVSECGLPEAGLDYGGLSKEFLTDLSKAAFSPEYGLFSQASASDSSLIPSNSAKLLDNGIDMIEFLGRVVGKALYEGILLDYCFSPVFVQKLLGRYSFLDELSTLDSELYRSLMQLKHYEGDVEDLCLDFTLTEELGGRRIVHELRPGGKNISVTNENKLHYVHAIADYKLNRQILPFANAFYRGLGDLISPSWLSLFNANEFNQLLSGGLQDFDVDDLRNNTKYTGGYTESSRSVKLFWEVIKGFKPTERCMLLKFVTSCSRAPLLGFKYLQPSFTIHKVPCDVTLWATIGGQDVDRLPSASTCYNTLKLPTYKRSSTLRSKLLYAISSNTGFELS

SEQ ID NO: 16680 - protein, 271 aa, Oryza sativa
  Clone ID: TF_OSC417054j.C1.p4.fg
MRKPTPYVSLHDVVAFDFVDGDVPFDDLVDGEGLCCPDDPFEEVMRCLSAVDDPFLAAFKLDCSPPTPAADADVDSRSEEHMHADVGGGLDLQRAVGGGDEKAGTPSTVDDVPWLQASAVARKPRRAPAAVRKRVWSLVSPQLATAAAAAVDNSRDEVSSGGGGGGEGGEHCSRPAKRRRKCGEEKRCGHCQTTETPQWRVGPDGPSTLCNACGIRYRIDHLLPEYRPSTSPGFGSDGYSNRHRKVVKLREKKRKKAMLAATATALTSGPV

SEQ ID NO: 16681 - protein, 222 aa, Oryza sativa
  Clone ID: TF_OSC411828j.C1.p3.hg
PPHHDGRPRVAARVARIWTPGHKPPSSSPDIYLVRRTPKLPVTRPPRTKQAPPTAPAPAPPPPPPQPASPKTKTKAKAKKPKRKRSCVHCGSTETPQWREGPTGRGTLCNACGVRYRQGRLLPEYRPKGSPTFSPSVHAANHRQVLELRRQQRQSTNPSTPPPPPVSAAEPIPDEQKEEVVSVPVAAAAPATDGGAASSLDALLLDGPSAPLIVDGDDFLVS

SEQ ID NO: 16682 - protein, 353 aa, Oryza sativa
  Clone ID: TF_OSC404988j.C1.p3.fg
MSTIYMSQLPATLPLMEGDQDQGLYPAFHRAKDPPILFPFMIDSAVEHQGQIYGDQGLRRQQVLGESNQQFNDHMMMGGSDVFLTPSPFRPTIQSIGSDMIQRSSYDPYDIESNNKQHANGSTSKWMSTPPMKMRIIRKGAATDPEGGAVRKPRRRAQAHQDESQQQLQQALGVVRVCSDCNTTKTPLWRSGPCGPKSLCNACGIRQRKARRAMAAAANGGAAVAPAKSVAAAPVNNKPAAKKEKRAADVDRSLPFKKRCKMVDHVAAAVAATKPTAAGEVVAAAPKDQDHVIVVGGENAAATSMPAQNPISKAAATAAAAAASPAFFHGLPRDEITDAAMLLMTLSCGLVHS

SEQ ID NO: 16683 - protein, 225 aa, Oryza sativa
  Clone ID: TF_OSC401615j.C1.p47.fg
MGSSDQKVIGIAAAAAAAAEEAGRRCCVECGATTTPMWRGGPTGPRSLCNACGIRYRKKRRQELGLDKKQQQEHHPHHHQQQQQQYQRQQQQQQQEDHSDAASSVKDSSSSSSNKSSSLQVISEIVISRSKSDCEGAMEGNCVPLKRLVQQVDFLLSSTGITESCQCVAVSCANQMGLQKAANVLLFLVPIRVLTMENNSCDILHIIRIIGRGCGIESKTRIIDR

SEQ ID NO: 16684 - protein, 387 aa, Oryza sativa
  Clone ID: TF_OSC400622j.C1.p13.fg
MASEWEMAMGVDLGMGMSTYHNASGGIAAAPMMGHHGGGGGGGGYSAAHHHHHHYYGMPHQAAMGDAMRVDDLLDLSNTPGAHDFFPASAAAAAAGDHGHHHHHHIGGMGEPSGATPSATSSDHQTSMLSFADDFYIPTEDAAELEWLSKFVDDSYSDMPNYQSSAHAAMAAAAASAANNGGGSSAGQDSCLTAAPGRGARSKRSRATAAAAAAWHSLVPRPPSQSSPSSSCSSSDFPSSNKPSGTARPNGSGGGSRGKKSPGPAGAEVGMEAGVRRCTHCASEKTPQWRTGPLGPKTLCNACGVRFKSGRLMPEYRPAASPTFVLTQHSNSHRKVMELRRQKELLIIRGSHRDAAAAAAAAAAAAAAGSAAATGRPELMFRDYGVC

SEQ ID NO: 16685 - protein, 176 aa, Oryza sativa
  unsure (1)..(176): unsure at all Xaa locations
  Clone ID: TF_OSC400622j.C1.p23.gp
AAWHSLVPRPPSQSSPSSSCSSSDFPSSNKPSGTARPNGSGGGSRGKKSPGPAGAEVGMEAGVRRCTHCASEKTPQWRTGPLGPKTLCNACGVRFKSGRLMPEYRPAASPTFVLTQHSNSHRKVMELRRQKELLIIRGSHRDAAAAAAAAAAAAAAGSAAATGRPELMFRDYGVCX

SEQ ID NO: 16686 - protein, 308 aa, Oryza sativa
  Clone ID: TF_OSC405544j.C1.p2.fg
MAAEPPADGRDPPADDGAAGDGAVESAAAEALLSAASEQLTLVYQGEVYVFDPVPPQKVAPFFTPSKIFFHRVRLVLPFRPFGSSVPIFGEFENRVQAVLLVLGGSDMPPGLVSMAVPTTFDEKSTTVAARRVASLMRFREKRKERCFDKKIRYSVRKEVAQKMKRRKGQFAGRADFGDGSCSSAPCGSTANGEDDHIRETHCQNCGISSRLTPAMRRGPAGPRSLCNACGLMWANKGTLRSPLNAPKMTVQHPADLSKTGDTDDSKANLCAEHNQTTMKTDTEMVPEQEQKADVLPPTKEEDSMATS

SEQ ID NO: 16687 - protein, 219 aa, Oryza sativa
  Clone ID: TF_OSC400014j.C1.p11.fg
MVGDKDAAALAGELTGDAGASLNGFFDHTGLESAVVGEGQGEGEEEEELEWLSNKDAFPSVDTMAAEVESAAPGAPARAAVGPRTKGLRRRRRVTAPWSLAPLLSRPRQAAAAAADAGAPRRRCTHCAVDETPQWRLGPDGPRTLCNACGVRFKSGRLFPEYRPANSPTFSPLLHSNSHRRVMEMRLQSEEDASAASRVNAKARRAERAAARLAGKDKK

SEQ ID NO: 16688 - protein, 528 aa, Oryza sativa
  Clone ID: TF_OSC401803j.C1.p31.fg
MVVVDGLHDGGGGDLQALLDDAGVDDVAARGGGEVEEEVERPSNEDAFPAVEKMATAAAAKGLQCRHCGTTETPQWRHGPEGHRTLCNACSMRYRSGKLVPEYRPLRSPTFSPELHSNRHHRVLQLRRRPGPQSAAPSPAAVARYGGEAKEEEEELAWVSNKDAFATVETTMAPSPRVVETPPEHDHRPANTPTTSPEPHSDRPRRVVQLPRRLQEPSASANLAHAVAATARAGRECAHCGTTKTPAWRLGPDSRRKLCNACGNKYRSGQLNSTTFSQNSQEQKKKSKSSACSRERKRSAVAATVVVGGGLRDDAAAIADEHLDGGDLQALLDDVALDDVAARGGGDAGEAKEEEEELEWLSNKDAFPTVETMSPAPPENRTKAPVPPAGWQCRHCGSTETPLWRERDGPAEAEHVRKEETPPNITPATKHRRIVDLLRCSTALNTAAKAVERRCTHCGTTKTPAWLSGPDSRGKLCNACGKQYRKGRLVPEYRPLNCPTFSPELHSNAHAHRRRRESPVAIAIAGEK

SEQ ID NO: 16689 - protein, 202 aa, Oryza sativa
  Clone ID: TF_OSC102322j.C1.p22.fg
MGARAGALSVAVSGDRVLGRDCRVVLLWPAGEAGHRRRQVRRRRRARRAPRPPLRQLRHRVHAALEERPSRTQVHFAVSPTYVVSLTLPPSYVSLQSLCNACGIRYKKEERRAAATTTTADGAAGCGFITAQRGRGSTAAKAAPAVTTCGEETSPYVVGGGGGGGEVADAAYLAWRLNVVPPAATATAFSVWPERASLYHYN

SEQ ID NO: 16690 - protein, 309 aa, Oryza sativa
  Clone ID: TF_OSC418119j.C1.p10.fg
MDVHPPNAAASSLEELFPHQPATESDRSGIEWLSVYVEDCLSTSASCTNPVSAELPPITMASQGAAKPKLPPRSSTNARKKKRSLASVISDTDDQHCITLFVEPPLLLLDHKDWLAESELILPKKDKDEELVQEQEQEEEENYKMSAGMQFQQEQLVITCSYCLSSQSPQWWDGPSGPTCDACRLRIEARNGHTTSSKKRYGQEIDKEQDIGKRRDKKKIKKAVYVNDELLSEEPMKRCTHCLSYKTPQWRTGPLGPKTLCNACGVRFKSGRLLPEYRPANSPTFVSDIHSNSHKKVMQLRNSVPHPRK

SEQ ID NO: 16691 - protein, 214 aa, Oryza sativa
  Clone ID: TF_OSC413566j.C1.p12.fg
MAGGQYYYRQCGGVAEEDSRSPYGGGGAAVDCTLSLGTPSTRRAEAGAYGGGLQPWDVPSSARPGGGGGGKQDGAGVAPCNKEAPAAGRLPRRCANCDTMSTPLWRNGPRGPKSLCNACGIRYKKEERRAAAAVAPTPPPSLDTGAGYAYCYSRQPPPPPAPQWGCYGQAAAKSASYAMFDAADDGPCLSWRLNMMPSSPAFAVGERPGLFQYY

SEQ ID NO: 16692 - protein, 418 aa, Oryza sativa
  Clone ID: TF_OSC101319j.C1.p7.np
MAGVGFVEDMLREQSLLEATCGDLFDHIDDLLDFPKEESAADVLLLDAPAPGSPLSSRIIGGHATMAAAPPPPPQMMALPPPPAPAKDDASALFDAAGALGAEVFDRKDAHIGPCDELDMDMAQLEWLSGLFDDGTIPHEPSFPGVNCAAPIKASALTANAGVVLPDKAEEALFRSSSPISVLEHSGFNVATNGGSSSSSSSSASSSSESFSGSGRAWSAPVSPRPEPPVLVIPARARSKRSRPSAFPAVRGAPAATETTILVPTPMYSSTSSHSDPESIAESNPHPPPMKKKKKAKKPAAPAAASDAEADADAADADYEEGGALALPPGTVRRCTHCQIEKTPQWRAGPLGPKTLCNACGVRYKSGRLFPEYRPAASPTFMPSIHSNSHKKVVEMRQKATRTADPSCDLLQYIRRRD

SEQ ID NO: 16693 - protein, 136 aa, Oryza sativa
  Clone ID: TF_OSC900385j.C1.p23.fg
MDSSSVEKGSGSIDPDERTASGEPKACTDCHTTKTPLWRGGPSGPKSLCNACGIRYRKKRREALGLDAGEGGAERQEKKKSKRERGEEVTMELRMVGFGKEVVLKQRRRMRRRRRLGEEEKAAILLMALSSGVIYA

SEQ ID NO: 16694 - protein, 429 aa, Oryza sativa
  Clone ID: TF_OSC401000j.C1.p33.fg
MPSYAHHHSSLGDDEEENGRFLSLCLLGFWNFGNLWFLLCVYVGAFWTEKDGKMDALKSSCRSEEAADEGAAAAPSAWGMVERDGFSVEDLLDLEEFCEAEKDAAEENEQALALVAAPEEEKSKDDSQPSSVVTYELVAPPPPPPEIVDLPAHDVEELEWVSRIMDDSLSELPPPPQPPASVVASLAARPPQPRQLQRRPQDGAYRALPPASYPVRTPTICALSTEALVPVKAKRSKRSRATAWSLSGAPPFSDSTSSSSTTTTSSCSSSASFSSFSPLLKFEWHPLGGTSDLPDDHLLPPGKKSKHGKNGKNKPKKRGRKPKQLPPHPSGAAASAPAPGDRRCSHCGVQKTPQWRAGPEGAKTLCNACGVRYKSGRLLPEYRPACSPTFVSAIHSNSHRKVLEMRRKKEVGSGLLTAAAAAAPAVASF

SEQ ID NO: 16695 - protein, 387 aa, Oryza sativa
  Clone ID: TF_OSC401779j.C1.p10.fg
MSSFAHHHHGSLVEKDGRMSALRSSLRPYEAAEEMAAAAAAGGPAAAWGAVERGAGMMGDGFSVEDLLDLEELCEVDRDGGEQGEAAAAAAAAVEKERSSDSHGSSVVSYEPMPLLPPVMDLPAHDVEELEWVSRIMDDSLAELPLPQLPAAAAALAACGKPQHRRPHEGAASALLDPMRTPTICALSTEALVPVKSRRSKRSRASVWSLSGAPLSDSTSSSSTATTSSCSSSASFSPFLQYVDFPALVASDLLDEQPRSKKSKHGKNGKQKPKKRGRKPKHQQPPHLAAAAGGGAALPATGDRRCSHCGVQKTPQWRAGPEGAKTLCNACGVRYKSGRLLPEYRPACSPTFVSSLHSNSHRKVLEMRRKKETPVIVAAAAPAVASF

SEQ ID NO: 16696 - protein, 387 aa, Oryza sativa
  Clone ID: TF_OSC401064j.C1.p72.fg
MEVTAEFGGAYYGGAAGREKKALQQGCGDHFAVDDLLVLPYGEEDETTREGEATGGKEEAAGFGNASADSSTITALDSCSNSFGLADGDFPGELCEPYDQLAELEWLSNYMNEGDDAFATEDLQKLQLISGIPSGGFSTASVPSAQAQAASAAASMAVQPGGFLPEAPVPAKARSKRSRAAPGNWSSRLLVLPPPPASPPSPASMAISPAESGVSAHAFPIKKPSKPAKKKDAPAPPAQAQLSSVPVHSGGSAPAAAAGEGRRCLHCETDKTPQWRTGPMGPKTLCNACGVRYKSGRLVPEYRPAASPTFMVSKHSNSHRKVLELRRQKEMHQQTPHHHQPQVAAAGGVGSLMHMQSSMLFDGVSPVVSGDDFLIHHHLRTDFRPPI

SEQ ID NO: 16697 - protein, 386 aa, Oryza sativa
  Clone ID: TF_OSC900183j.C1.p21.fg
MEVAAADYAGGVRVKKEAGGCGGSGDMFLVDDLLDLPCDEEEEETGLCGAYGGGGAGLGAGVVGGGGDDRAAGNASADSSTVTAVDSCSNSFSGLADGDFSGGLCEPYEQLAELEWVSTYMGEETLPTEDLRKLQLISGIPAAPRAPPALAVSAVQLPAGGAGALPTEAPVPGKARSKRSRVAPCSWSSRLMVLPPPPASPPSPASAVISPSESGTAAPAFPAKKAAKSAKKKDGPSPAPAPNAAAQAAAEGRRCLHCETDKTPQWRTGPMGPKTLCNACGVRYKSGRLVPEYRPAASPTFVVSKHSNSHRKVVELRRQKEMQLLHHHQQPPPHVGAGGGGAAGGLLHVTSPLLFDGPTSSAPLFAGADEFLIHNRISPDYRRQAT

SEQ ID NO: 16698 - protein, 143 aa, Oryza sativa
  unsure (1)..(143): unsure at all Xaa locations
  Clone ID: TF_OSC225j.C1.p10.np
WLEWRLGWVVFXRSICGLQGSGSIDPDERTASGEPKACTDCHTTKTPLWRGGPSGPKSLCNACGIRYRKKRGGAGARRRRGRRGAAGGKRERGEEVTMELRMVGFGKEVVLKQRRRMRRRRRLGEEEKAAILLMALSSGVIYA

SEQ ID NO: 16699 - protein, 815 aa, Oryza sativa
  Clone ID: TF_OSC400773j.C1.p134.fg
MSLRPSERMGIRQKGYKASMDAAEGRRRREDITVILRKADRDRALKEKRRRPTATAAAEGLPQAAHSSAIEKKLESLPMMVQGLYSDDSSMQLESTTQFRKLLSVDHCPPIDEVIRSGVLPRFVEFLTREEYPQLQFEAAWALTNIASGTAANTMAVIEHGAVPIFVKLLSSPREDAVWALGNVAGDSTKCRNLVLMHGAMLPLLQQLNEHAKLSMLRNSAWTLSNFCRGKPQPDFKHVEPALPVLRELILSQDEEILTDSCWALSYLSDGSNDNIQAVIETGVCDWLVELLSHPSPVVLIPALRTVGNIVTGDDAQTQSKLTKTADTGQNYLQNYGFNPQYYGTTDLVLTLSMCIVGHPQALPCLFNLLTTTQKKSVKREACWTISNITAGTKEQIQAVIDSNIIAPLLHLLQHAEFDVKKEAVWAISNATSGGTFNQIEYLVSQGCIKPLCDLLVHQDSKTVLTCLEALDNILRVGEAKKNLGACNMNIFVPMVDEADGLDKIEDLQNHDNVEIYNKAVYVLESYWVQEDDQQPFLIPSVSESESDNEMFQFGSFGKVSVKCPIWMEMHRSCLFRGLSRIGESSYPSHGLVLLTCYEAAVRRLVHMDYGSPHKGVGTGNWSVGEGHTLACVVGLAITFTFLSVARKRLPVNRDTQSRCDDGTDPELGPITLPSLPFLSSPLSPVLMFSLVVGIGVAEEGRRSCVECRATTTPMWRSGPTGPRSLCNACGIRYRKKRRQDLGLDLNQPQKQEHGEVIPEVKDSNSNSNNCNSGSGNSSSNLQVVPKRRLLMGVEEAALLLMTLSSPSASTLLHG

SEQ ID NO: 16700 - protein, 332 aa, Oryza sativa
  Clone ID: TF_OSC101253j.C1.p2.fg
MSHHDGSKPYQPRRGPERPPPPAPADDAAAHVAPTVDHLAAVAAEAEAMARFEEEHRALGAEEEYEEEEDELEEEEEEMEEDEDAQHHEGVGGEVAVPMDAEAAAQLDPHGGMLAASGAVQPMASNQLTLSFQGEVYVFDSVSPDKVQAVLLLLGGRELNPGLGSGASSSAPYSKRLNFPHRVASLMRFREKRKERNFDKKIRYSVRKEVALRMQRNRGQFTSSKPKGDEATSELTASDGSPNWGSVEGRPPSAAECHHCGINAKATPMMRRGPDGPRTLCNACGLMWANKVKMPSSRCHANLGMLRDLSKAPPTPIQVVASVNDGPFLSSC

SEQ ID NO: 16701 - protein, 784 aa, Oryza sativa
  Clone ID: TF_OSC400406j.C1.p1.fg
MAIDGFLLLSNSLAAAAAAFSSALSATCTPEMRRRLASGPQDRCPHTSAISEGTGYSTRWERGVGGGDAMMHMLVAPDGGGGGEMPPPYGGAAAAPPPPMEQELELHRDNADDGLDGHVRCLRCGISGNATPHMRRGPDGPRTLCNACGIAYRKGKMRRMIEAEPPIDEAALAKLVPEVGMEFESEDKAYEFYNKYAGHVGFSVRKSTSHKSSGNITKVRTFVCSREGYNRDKKSLEAKKPRLDTRIGCPARLIIKVTPESKYRVTDFKADHNHQLAPPSTMHMLRSQRILTELQSGEAELSDDSVMTPTTKATGDLVVRQIGFLRSISLLPADYKNYLRSKRMKAMQLGDGGAILKYLQTMQMENPAFFYTMQIDEDDKLTNFFWADPKSREDFNYFGDVLCLDTTYKINGYGRPLSLFLGVNHHKQTIVFGAAMLYDESFESYRWLFESFKIAMHGKQPAVALVDQSIPLASAMAAAWPNTTQRTCAWHVYQNSLKHLNHVFQGSKTFAKDFSRCVFGYEEEEEFLFAWRSMLEKYDLRHNEWLSKLFDERERWALAYERHIFCADIISALQAESFSSVLKKFLGPQLDLLSFFKHYERAVDEHRYAELQADFQASQSYPRIPPAKMLKQAAHTYTPVVFEIFRKEFELFMDSVLFSCGEAGATSEYKVAPSEKPKEHFVRFDSSDCSCICTCRKFEFMGIPCCHMLKVLDYRNIKELPQRYLLKRWRRTAKSANEENQGTLLFLICMRIHFAEAHDAGDLNLNIIPSARCLLHDTGVEAVR

SEQ ID NO: 16702 - protein, 291 aa, Oryza sativa
  Clone ID: TF_OSC900101j.C1.p2.fg
MASATSTTPDLSLHISLPSGGAAVGTTAPPGLGNGGAVGGAGGGKAAGGGDPWRRLDGSTASTELSLSTPQQQQEGSTSAADVLPWRLRQPTAAAASVPVTLPTIPMDGATPKSVLELMDVKDLTLAHVKSHLQMYRTVKSTDKPAAASGPMDGSGSGSGSGDDELLAGDGRQATSSGADADRRMSFTEHRSSSEGAASHAGGGGDGDCSSSAVNSDTIRARSNSPRGLWALTSDLILADILEMCNQGPLPVLLCPLLSLPLLPVSTDTVADILRFNNRRNLCIGHQTLFF

SEQ ID NO: 16703 - protein, 141 aa, Oryza sativa
  Clone ID: TF_OSC31068j.C1.p1.fg
MATTTCSRRGATPKSVLELMNVKDLTLAHVKSHLQMYRTVKSTDRSSHIASGEAQLQQQAGMEVAMEAAAGGGGNGGGGGGGVVLPMMPACDDMVGICSSPAPPAAATSSAAAYFLCATTTSTATAPLAVVPSPPAPTIPT

SEQ ID NO: 16704 - protein, 286 aa, Oryza sativa
  Clone ID: TF_OSC400549j.C1.p9.fg
MGNLAAAAAASSAAAGGGGAGDAGGSGDGYLSDGGLLLSSGKRRRAQERKKAVPWTEEEHRTFLAGLEKLGKGDWRGISKNFVTTRTPTQVASHAQKYFLRQTNPNKKKRRSSLFDMMATDMSPAPNCPVLPPSMGKLHDMVAMTKQLQNSSLEGVSSSSTVNLAPQVARDLPPPIPSFKATNVDSSLSKMNHMDGFLRAPMLFRPIPRIAEGASSSTPATASIADLEFQANLTACSNALFASPRRKPKKADPPAEKDLDLTVAPPSQQTRASISSQNAVGVIQVV

SEQ ID NO: 16705 - protein, 265 aa, Oryza sativa
  Clone ID: TF_OSC422332j.C1.p27.fg
MEQHEEAAERKPSPPVIFRLFGVEVRGGGGGVDEEEYEEEEVEGGLFIKKSSSMPNLTSIDPLPVPADGGKRRASDDSELASGQQKRRRRKVQERKKGVPWTEEEHKKFLEGLRQLGKGDWRGISKNFVTSRTATQVASHAQKYFLRQTNPGKKKRRASLFDVVAECSDDQLPSPQSVGTKPPTQDIIHTDRGDVPILSYPVARGFRGDSVQVDELTEYVKRLKAAEDMSLSMISGLEMASSSISSLELSIAPPHCAIEAAIKVL

SEQ ID NO: 16706 - protein, 310 aa, Oryza sativa
  Clone ID: TF_OSC400601j.C1.p105.fg
MAATAAVAAIASSVKRATNNRRKQRRAKVQSGRQHRQRKRRLVWTDELQKMFREAFNQLSLTQNLNSYHSVLIIKIQEDYEKNTRCPQKYFKLMKLMIDPMNDLSLTRDNIASYLQKHKKRLQKEYQKHQNLLEQKDQQLPIVDNTNTSSIQQKNMHYESCYNEHSNKQPKLKEPTLLTANYHGLRNMHHHHKNIINMEPSNVLRPPNLNNAKGFNMPFNKEGVDEAIYQSQLMAHQVYANHVDATAQTTWEVTMTQDMRPISQVHQHGCETTPVDSSNNTNGISENNNYHVGRKNSRANMVGILWPLLR

SEQ ID NO: 16707 - protein, 300 aa, Oryza sativa
  Clone ID: TF_OSC401371j.C1.p1.fg
MGPDNGANNNSNLAARQRLRWTNELHERFVEAVTQLGGPDRATPKGVLRIMGVQGLTIYHVKSHLQKYRLAKYIPDSSADGNKAENKDPGDLLAGLEGSSGLQISEALKLQMEVQKRLHEQLEVQRQLQLRIEAQGKYLKKIIEEQQRLGGVKSETPAAGASVTLPSDQFPDSERTDPSTPAPTSESPTQGVPSNRDNGGQNEATKSPQRDDSLSRHEPLTPDSNCQPGSPTASPKHERAAKRQRGNGAEFSETDFALPHSIFESSSGSEFQQCSMSYSAVELGSLKVALCRGVDFCSSG

SEQ ID NO: 16708 - protein, 412 aa, Oryza sativa
  Clone ID: TF_OSC401174j.C1.p9.fg
MEVDHADRDGARRRCREYLLALEEERRKIQVFQRELPLCFDLVTQTIEGMRSQMDAAGSEETVSDQGPPPVLEEFIPLKPSLSLSSSEEESTHADAAKSGKKEEAETSERHSSPPPPPPEAKKVTPDWLQSVQLWSQEEPQQPSSPSPTPTKDLPCKPVALNARKAGGAFQPFEKEKRAELPASSTTAAASSTVVGDSGDKPTDDDTEKHMETDKDNDKDAKDKDKEGQSQPHRKPRRCWAPELHRRFLQALQQLGGSHVATPKQIRELMKVDGLTNDEVKSHLQKYRLHTRRPSSTGQSSAAAGVPAPPAPQFVVVGSIWVPPPEYAAAAAAQQHVQLAAAGNNASGSANPVYAPVAMLPAGLQPHSHRKQHQQQQQGQRHSGSEGRRSGDAGDGSSSSPAVSSSSQTTSA

SEQ ID NO: 16709 - protein, 376 aa, Oryza sativa
  Clone ID: TF_OSC405568j.C1.p3.fg
MVIDEDKCHADSTSYMLSAELNFSVTVFTSPIKALDFLQNHAEGVDLVLADVHMEEMNGFDFLKVARELHKSIQVIMMSTETTMYTMKRCVKLGAQFLVNKPLDAGTIKNLWQYVDLKVLRMEKIKDLLQGIGDESTCANETNSLAENPKNDTKKKYYLMWTPHLQKKFLHALQILGKDASPKNIKKIMGVDNIDCRQIAAHLQKHRLRLTKDLKKASFTTDTSKDESNSRIGPAESHHVCRNASTLQPRSNTQPTETTMQILSEDAEYDDVYAAMRRALQYGIVFDESKHSSDPSGDEDEQVVVGGDQDGCANEANDIDSSGDHHQVAAVVTKPCNANASQEIINKMTNSDGMQATKGSKAAVFRLVDYSESDSD

SEQ ID NO: 16710 - protein, 355 aa, Oryza sativa
  Clone ID: TF_OSC900405j.C1.p11.fg
MCVQGDSGLVLTTDPKPRLRWTVELHERFVDAVTQLGGPDKATPKTIMRVMGVKGLTLYHLKSHLQKFRLGKQPHKEFSEHSVKEAAAMEMQRNAASSSGIMGRSMNHDRNVNDAIRMQMEVQRRLHEQLEVQKHLQMRIEAQGKYMQSILEKAYQTLAAGDVAAAVACGPAGYKSLGNHQAAVLDVCSMGFPSLQDLHMYGGAGGGHLDLQQQQPPASTMESFFACGDGGGSLGKTAAKTRHYGGAGKSPMMWGVDDDDDDDDPAGKCGGGGHHQLQMPPPPMMDGGIDVMDSLAADVYETKPIMSGDSTGSKGGGYDVAAAASKLERPSPRRPPQLGSPSVMAGAQTRNLSYG

SEQ ID NO: 16711 - protein, 689 aa, Oryza sativa
  Clone ID: TF_OSC412867j.C1.p2.fg
MEERKGLMGRERDQFPVGMRVLAVDDDPVCLKVLETLLRRCQYHVTSTNQAITALKLLRENRDMFDLVISDVHMPDMDGFKLLELVGLEMDLPVIMLSVNGETKTVMKGITHGACDYLLKPVRIEELRNIWQHVVRRKFGNRERNNLDFSKECNKPQSADTDHGPYQPTCGSSDQNGRSSRKRKELHGEDDDEGDDNDYQENDEPSAAKKPRVVWSVELHRKFVAAVNQLGIDKAVPKRILELMNVEKLTRENVASHLQKYRLYLKRLGAVASQQASIVAAFGGRDPSFLHIGAFEGLQSYQPFAPSAALPSFNPHGLLTRTSAAAAFGLQELAAPSSTIQTSTGNVTVGHCLEENQQANLAQGLTAAIGQPQLQQNWIHQEGNGLSDVFSGSSLTNTLSSTLQRVPSSSLPPQELLECKQAKVSMPPSIRIPPSSSALLERTLGVSTNLGDSSISQQGALPIDGGFSADRLPLHSSFDGAVATKLDTSLAASQREIGQQGKFSVSMLVSPSDNLALAKNAKTGASSSGSTIILPLDTARHSDYLQFGGASNSLQKMDGQKQDHIQSSNIIWSSMPSTQLPSDTQIHNTQNQRLDSGSFNHNIGAHLADQTNASASILPQMKFDTRISEEKMKQKNTYDLGSSKLQGGFNSSGCNFDGLLNSIIKVEKDDLPFMDNELGCDLFPLGACI

SEQ ID NO: 16712 - protein, 396 aa, Oryza sativa
  Clone ID: TF_OSC417054j.C1.p12.fg
MVGGGRERNGGVRQYNRSKVPRLRWTPDLHHCFVHAIHKLGGQDKATPKRVLQLMGVGGLTISHVKSHLQMYRNMRNDLGMQGIQVQQVDQEHTYGGGVEVWTDMQQCDHDECDVPCCSCHSPKPRKEPLLHLQLKSSGMNIDEPGTRARIAAPNVRSCRDDAAASATETRRRRGGRPEEVDDDANASTSPRISQLQLLRLRGHGIRESDMSPSTSLQCYYVRSQRTTTMPPGAAAAAAGGDGGSQCYAAPRYSSSSKLKFLGFVVTSGPPPPRLPPPAACCCGSDDNIPFQVGTFAPHRVAPPTASCGGGGGGGRAEARPSSSYRSVWFEPAAAAAASNNGVAPDGEHDDGCSLSLSLALDTGCAGAGGSLVSSTTSSSSGSRISLDLSLSTLDS

SEQ ID NO: 16713 - protein, 288 aa, Oryza sativa
  Clone ID: TF_OSC417459j.C1.p2.gm
MVGGGRERNGGVRQYNRSKVPRLRWTPDLHHCFVHAIHKLGGQDKATPKRVLQLMGVGGLTISHVKSHLQMYRNMRNDLGMQGIQVQQVDQEHTYGGGVEVWTDMQQCDHDECDVPCCSCHSPKPRKEPLLHLQLKSSGMNIDEPGTRARIAAPNVRSCRDDAAASATETRRRRGGRPEEVDDDANASTSPRISQLQLLRLRGHGIRESDMSPSTSLQCYYVRSQRTTTMPPGAAAAAAGGDGGSQCYAAPRYSSSSKLKFLGLVSSTTSSSSGSRISLDLSLSTLDS

SEQ ID NO: 16714 - protein, 201 aa, Oryza sativa
  Clone ID: TF_OSC415628j.C1.p3.fg
MRWPEELHRRFVHAVRRLGGCHEATPKRIMQLMGAKGVSISHVKSHLQMYRNSNNSSNVNRRHPVTPQIDWTTTAQQDEQQRRQMSSFSFLATRTVPAAGIGSHSHQRPHRRQALHAGDDDGCELTLSISGGAAEESKDGGSSITDDDDELLIQPPAPNIINDDGSTRHGHRHPFACSTQPLPPAAINLELTISSPCCWLT

SEQ ID NO: 16715 - protein, 467 aa, Oryza sativa
  Clone ID: TF_OSC900208j.C1.p22.fg
MSTQSVIAVKQFSGPDKIAQAYTVPQPSAHVLSNANYDYDLCGSTNSTSLSCAIQSSNIKTESISSSSLPKILPFSTDSNGESSLSRMSQAEFSDPILSSSSTFCTSLYTSSPMNSGSCRKTGYLPFLPQPPKCEQQQNSAGQSSSSLMLLDADLRNSGHADDEHTDDLKDFLNLSSDCSFHGKCSAMAYNEQMEFQFLSEQLGIAISNNEESPRLDDIYDRPPQLMSLPVSSCSDQEDLQDARSPAKVQLSSSRSSSGTASCNKPRLRWTPELHERFVDAVNKLEGPEKATPKGVLKLMKVEGLTIYHIKSHLQKYRLAKYLPETKEDKKQEEKKTKSVANGNDHAKKKSAQMAEALRMQMEVQKQLHEQLEVQRQLQLRIEEHARYLQKILEEQQKARESISSMTSTTEGESPEFAPMEKTEDKAETSSAPLSKCRITDTDAECHSKVDNKKTKPQADLEMVHDE

SEQ ID NO: 16716 - protein, 249 aa, Oryza sativa
  Clone ID: TF_OSC400570j.C1.p9.fg
MFEGCYGGVGSAAAAAARDPKPRLRWTPDLHERFVDAVTRLGGPDKATPKSVLRLMGMKGLTLYHLKSHLQKYRLGRQSKKSAGLELAVADSGDALKYQVEVQRKLQEQLEVQKKLQMRIEAQGRYLKEILEKAQKNISLDANGSANLSSTRSQITDINLALSGFMDNATQVQEENNELMKPISDDNLKVNNLGFQLYHLGSQESKDVKCTPKTEELLLLDLNIQGGYELSSRGMQGCELDLKINQQRR

SEQ ID NO: 16717 - protein, 350 aa, Oryza sativa
  Clone ID: TF_OSC400084j.C1.p5.fg
MAVFGEALAVKLLSEPYVQRSIALKWQRGCQMYEPKPFSSIVLAHNDPVSHNQQIERINNNVVSNSGGNSSNSNFAARQRLRWTDDLHDRFVDAVTQLGGPDRATPKGILRIMGVQGLTIYHVKSHLQKYRLAKYIPDPTADGAKSDKKDLGDLLADIESSSGMEIGEALKLQMEVQRQLQLRIEAQGRYLQKIIEEQQRLSGVLGESGKLGALGPAPGEPYQDSNKTDPSTPVPTSESPIRDKAGSGLFKTISSHDDCREPLTPDSSCRAGSPLESPPRASKRIRVSSDIDHRGNNEFPPPLKVPEPSSGSDFRQESSVLLSSSAVHFDSLESLDADENVFTNGSGSDD

SEQ ID NO: 16718 - protein, 392 aa, Oryza sativa
  Clone ID: TF_OSC402805j.C1.p18.fg
MERHLFLHGGNTQGDSGLVLSTDAKPRLKWTPELHQRFVDAVNQLGGAEKATPKTVMRLMGIPGLTLYHLKSHLQKYRLSKNLQGQANVGTTKNALGCTGVADRIPGTSALAMASASAIPQAEKTIQIGEALQMQIEVQRQLNEQLEVQRHLQLRIEAQGKYLQAVLEQAQETLGKQNLGPASLEDAKIKISELVSQVSNECLSNAVTEIRESSSIHRLEPRQIQFVESSANNCLTAAEGFKEHRLQNHGVLKAYDDSTLFCRKQSQDQESQYSLNRSLSERRMGHLYSGKQYHKSEGSDSDTEVLHEYITPQKNGGGSTTSSTSGSKEINVEKLYLDEPSCKRQTVDYQRESKLLDFDQQSSGKNLDLNTHNIDDNDQGYRHFDLNGFSWS

SEQ ID NO: 16719 - protein, 288 aa, Oryza sativa
  Clone ID: TF_OSC404146j.C1.p1.np
VPSNGGNNNPNMAARQRLRWTNELHDRFVEAVTQLGGPDRATPKGVLRIMGVPGLTIYHVKSHLQKYRLAKYIPDPSADDNKNKDEDKDPGNLLSALEGSSGMQISEALKLQMEVQKRLHEQLEVQRQLQLRIEAQGKYLQKIIEEQQRVIGAGLPEPRQAQLPDSEKTNPPTPVPISESPVQENSQSQVEPTKSPSHDDALPCGEPLTPDSSCRPGSPTLSPKHERAAKRQRSDAGDVTAFADGEFVLPPGIFESSTGSEFLQAYAHLDAPIFGTKKSLQPCQYVNL

SEQ ID NO: 16720 - protein, 694 aa, Oryza sativa
  Clone ID: TF_OSC22451j.C1.p8.fg
MAATQATAARKFPEGLRVLAVDDSPVCLMLLEALLRRCKYQPTMTRDAATALRMLRERPGDFDLVISDVHMLDMDGFKLLELIGLEMDLPVIMQSANGELETMMKGVTHGACDYLVKPVSLKDIQNIWQHVWRKRKLDIRNHNGGYNDGGELVGATRTKRKYTRKMRNDGDNYGENKENMDSTLKRQRVVWTPELHRDFVIAVHELGVDRAVPRKILRMMKVDYMTRENIASHLQKYRLYLKRISTQTGMDPDQFPEKWKYMNELDALKNYCENGRYRLTPAIASSSSSNPFARMNSASALATNGFLPTHSVQLKNSQRNMAMGTVGHGGSPGNNPVFQPLQNSSNARKCFPSGPSGSSFANISNGLVLDTDDSGSSYAGMFCKSMWETSNGSPSCHSGNSSANKSNNGVSAPANQFQVQSKFGFSALANQFPVQSNCGFSAPANQYQVQSNGGFSVPANQFPVQSNGEFLAPTNQFPVQYPEVNNQPLVQMNQSSTNHFSTIGNDYQFPDLANCSKYWQPTAPSMFPDLGHNDGTSFRPSQANIANINQLSSFAASSGQEPMFGDELHGQMSPIMSTISLSDFDDQMGSFNIGNDTSPAEMMHDNFSLGSDSNISSSTPTDSSFGSTFPDFHLDSPEMPAQMLNGGDEDGILLPVLDDTVDQQDLFDQLDENNGREKLGSGRCVRKGPFECFF

SEQ ID NO: 16721 - protein, 691 aa, Oryza sativa
  Clone ID: TF_OSC6952j.C1.p2.fg
MAPVEDGRGVEFPVGMKVLVVDDDPTCLAVLKRMLLECRYDATTCSQATRALTMLRENRRGFDVIISDVHMPDMDGFRLLELVGLEMDLPVIMMSADSRTDIVMKGIKHGACDYLIKPVRMEELKNIWQHVIRKKFNENKEHEHSGSLDDTDRTRPTNNDNEYASSANDGAEGSWKSQKKKRDKDDDDGELESGDPSSTSKKPRVVWSVELHQQFVNAVNHLGIDKAVPKKILELMNVPGLTRENVASHLQKFRLYLKRIAQHHAGIANPFCPPASSGKVGSLGGLDFQALAASGQIPPQALAALQDELLGRPTNSLVLPGRDQSSLRLAAVKGNKPHGEREIAFGQPIYKCQNNAYGAFPQSSPAVGGMPSFSAWPNNKLGMADSTGTLGGMSNSQNSNIVLHELQQQPDAMLSGTLHSLDVKPSGIVMPSQSLNTFSASEGLSPNQNTLMIPAQSSGFLAAMPPSMKHEPVLATSQPSSSLLGGIDLVNQASTSQPLISAHGGGNLSGLVNRNPNVVPSQGISTFHTPNNPYLVSPNSMGMGSKQPPGVLKTENSDALNHSYGYLGGSNPPMDSGLLSSQSKNTQFGLLGQDDITGSWSPLPNVDSYGNTVGLSHPGSSSSSFQSSNVALGKLPDQGRGKNHGFVGKGTCIPSRFAVDEIESPTNNLSHSIGSSGDIMSPDIFGFSGQM

SEQ ID NO: 16722 - protein, 284 aa, Oryza sativa
  Clone ID: TF_OSC409883j.C1.p6.fg
MERAGYGVGVGGAGAVGAGVVLSRDPKPRLRWTPDLHERFVEAVTKLGGPDKATPKSVLRLMGMKGLTLYHLKSHLQKYRLGKQNKKDTGLEASRGAFAAHGISFASAAPPTIPSAENNNAGETPLADALRYQIEVQRKLHEQLEVQKKLQMRIEAQGKYLQTILEKAQNNLSYDATGTANLEATRTQLTDFNLALSGFMNNVSQVCEQNNGELAKAISEDNLRTTNLGFQLYHGIQDSDDVKCSQDEGLLLLDLNIKGGGYDHLSSNAMRGGESGLKISQHRR

SEQ ID NO: 16723 - protein, 178 aa, Oryza sativa
  Clone ID: TF_OSC404146j.C1.p3.fg
MGVKGLTLFHLKSHLQKYRLGKQSGKEMAEQSKDASYILGAQSGTNLSPTVPTPDLKESQELKEALRAQMEVQRKLHEQVEVQRHVQIRMEAYQNYIDTLLEKACNIVSEQLNGFSISDHDLTSAGVMLSSSDTLSPSIFHQLSVSSISLHSPGGKSSPFAADADLFFQKAPEKRKSY

SEQ ID NO: 16724 - protein, 299 aa, Oryza sativa
  Clone ID: TF_OSC900288j.C1.p13.fg
MALQAAALLSFFLSFFLFFFFLSVLASPDYPCKGNLCSDCILMMYHAKKFSVPFGPQSTQSNEHMSNIGAFGGSNMGSPANPAGSGKQRLRWTSDLHNRFVDAIAQLGGPDRATPKGVLTVMGVPGITIYHVKSHLQKYRLAKYIPESPAEGSKDEKKDSSDSLSNTDSAPGMQINEALKMQMEVQKRLHEQLEVQRQLQLRIEAQGKYLQMIIEEQQKLGGSLKACEEQKLPHSPPSLDDYPDSMQPSPKKPKMDNLSPDSVRDVTQSDFESHLIGPWDQEAAFRVDEFKADPGLNKS

SEQ ID NO: 16725 - protein, 217 aa, Oryza sativa
  Clone ID: TF_OSC11575j.C1.p2.fg
ATPKQIRELMKVDGLTNDEVKSHLQKYRLHTRRPMPSPAPPTAATPQLVVLGGIWVPPEYATQAAGPAIYGAHPATQPHYTAAVAAQEYYHHHHHHLQHHPAAAALVHHRAVAPPPPLPPQQQLAPPYSAKSSASARLGSPDSDGRGSGGGGGAAASGAGRDMSESIEEEGEGEEREDDDDDDEMAATNNAHAVDGDDDNDEINTTTTTSAGAITTN

SEQ ID NO: 16726 - protein, 243 aa, Oryza sativa
  Clone ID: TF_OSC101630j.C1.p11.np
VHMFPAGLRVLVIDDDCSYLSVMEDLLLKCSYKVTTYKNVREAVPFILDNPQIVDLVISDAFFPTEDGLLILQEVTSKFGIPTVIMASSGDTNTVMKYVANGAFDFLLKPVRIEELSNIWQHIFRKQMQDHNNNMVGNLEKPGHPPSILAMARATPATTRSTATEASLAPLENEVRDDMVNYNGEITDIRDLGKSRLTWTTQLHRQFIAAVNHLGEDKAVPKKILGIMKVKHLTREQVASHLQ

SEQ ID NO: 16727 - protein, 852 aa, Oryza sativa
  Clone ID: TF_OSC900310j.C1.p4.hg
MGSSSASAAQHEEAAAAAAFVLGGVDMRMLAARTATGALARAGGGEAAAAAAAAARFEDCIRSLEAEKAKMEVFRRELPISVHLIADVIEWLKDEVEKQRLLRRRQVEAPAAAPPPEMFAPPATAKRKSAASAAAEGVKAEADANDKRSWMSSAQLWSCGSHTSTSTSNGGSVKKQQHKVSNAFMPLATLPAFAKSLEKADAAVPDLSLSSRVAMADAPACPAAPSATSSAVTDVAVAQRQQAVQRKARRCWSPELHRRFVAALQRLGGPQAATPKQIRELMKVDGLTNDEVKSHLQKYRLHTRRASDGGDGGGDHQTVGGRLWPLPPEQYTTSQHSTSQSGSPQGPLQLTVSSSHAVSVTAGDSCDGGEEEEEDGNPIHSGSEGKTSTISRAAAAAAAVWLSTSPPALFPTGETSPACLWRFLLRGKLLRRLRRCGCGSGARRAAAAAMREAVTVQVGGFANYVGSHFWNFQDELLGLADDPDADPVFKNAALDMDVLYRSGETHQGVATYCPRLVSVDSRGSLGSLSSSGNLDFDKFDNYGSAQEVVSDWSQIEEMNERLRFFVEECDHIQGIQFIVDDSGGFSSVAAQFLENIADDYTNTLVLLYCVRDPMTLGPSRRNQRESIMRALHDAVSFSKLSSFCNLMNMVTALDVAMPAPSLTDRDAMGNIEMKLHSLTPEISDEDEDPYSVESLVVHGALDRGGQRTSISQVKDSVCSVYEARETKPKFSHLSASLCPLPVPLPFPSIFRGNIGRHGEILSDHTEESQPKGSLDIESIPMAARLRSSSAVLPFIERRSGSLQKHGVARGAIGSLVLHDWGFGREEVEDMGEHLAKLLRPFHPEMDLTSDSD

SEQ ID NO: 16728 - protein, 552 aa, Oryza sativa
  Clone ID: TF_OSC401249j.C1.p76.fg
MRRSGAPPQENYSESRVRLVQINLAYSAFIPTDWNNLETAESRPKSTGLNKVRAFEEPMRRACSAAPSGFQKTSLRIPSPSTHEAPTGAQQKTRKLKPGAENNQSYPVGVRLYKLELETKKNQISKENDSEDIMNTKKIKLHDCHFGSPLCDPSPAPHLLSSAAAAGLSFHPGLVSSAAQHQQHGAGGWLHEEYYAPRSSPPSSLLAQTCVGSNATAFYAAENLPQFDFPALGTAAAAAAKAPFRSSESELYRPVDPLLLRADHSVRTYYVRPQKRDSGERTPLPPPSQQQHQDRIHGLFAGAPTTRLLSGEPKIHSFPPQVAAKPILPAMDAPSLQNQMENQLTRNCIGAATPVTPTGNLAGSGAPSKTRIRWTQDLHERFVDCVNQLGGADKATPKGILKLMNSDGLTIYHIKSHLQKYRIAKYMPASSEGKQLEKRATGNDMQNLDPKTGMQITEALRVQLDVQRRLHEQLEIQRNLQLRIEEQGKRLQKMFEDQLKASRSVMEPQELDDVVAFAAGDGDDDAFDDVDVQLLAVAGSGYDDAGFQSKIS

SEQ ID NO: 16729 - protein, 331 aa, Oryza sativa
  Clone ID: TF_OSC900221j.C1.p21.fg
MREEEEPSWFARWEEQLPAPDELMPLSQSLITPDLAVAFDIPTHGGGGGGGVGGGVVGGDGVGGGGGGGGGGGGGVGAGEMNGGASSAAGSSGGGGGGGGGDEPARTLKRPRLVWTPQLHKRFVDAVAHLGIKNAVPKTIMQLMSVDGLTRENVASHLQKYRLYLKRMQGVGNGGGGGGGGGAGAGGSHSSGSGTDAATEHLFATGPVPFLPPGRAPAGGDPYPPFAPMGGHHHHPPQIGHFHHHPAARPLGHYGSGPGAGFDHGFLSRAVAGGGPPVGPPGMHHRMVGPAAGMAMMAPSPFAEELELGSRGGGGGGGRRELTLFPTTGDH

SEQ ID NO: 16730 - protein, 691 aa, Oryza sativa
  Clone ID: TF_OSC401801j.C1.p6.fg
MAPVEDGGGVEFPVGMKVLVVDDDPTCLAVLKRMLLECRYDATTCSQATRALTMLRENRRGFDVIISDVHMPDMDGFRLLELVGLEMDLPVIMMSADSRTDIVMKGIKHGACDYLIKPVRMEELKNIWQHVIRKKFNENKEHEHSGSLDDTDRTRPTNNDNEYASSANDGAEGSWKSQKKKRDKDDDDGELESGDPSSTSKKPRVVWSVELHQQFVNAVNHLGIDKAVPKKILELMNVLGLNRENVASHVQKFRLYLKRIAQHHAGIANPFCPPASSGKVGSLGGLDFQALAASGQIPPQALAALQDELLGRPTNSLVLPGRDQSSLRLAAVKGNKPHGEREIAFGQPIYKCQNNAYGAFPQSSPAVGGMPSFSAWPNNKLGMADSTGTLGGMSNSQNSNIVLHELQQQPDAMLSGTLHSLDVKPSGIVMPSQSLNTFSASEGLSPNQNTLMIPAQSSGFLAAMPPSMKHEPVLATSQPSSSLLGGIDLVNQASTSQPLISAHGGGNLSGLVNRNPNVVPSQGISTFHTPNNPYLVSPNSMGMGSKQPPGVLKTENSDALNHSYGYLGGSNPPMDSGLLSSQSKNTQFGLLGQDDITGSWSPLPNVDSYGNTVGLSHPGSSSSSFQSSNVALGKLPDQGRGKNHGFVGKGTCIPSRFAVDEIESPTNNLSHSIGSSGDIMSPDIFGFSGQM

SEQ ID NO: 16731 - protein, 432 aa, Oryza sativa
  Clone ID: TF_OSC401261j.C1.p3.gm
MGRVFPALLPGHIISGQIRQQLSGGVGVGGAAAAASSNDRPPLCVQGDSGLVLTTDPKPRLRWTVELHDRFVDAVTQLGGPDKATPKTIMRVMGVKGLTLYHLKSHLQKFRLGKQHKDFNDHSVKDAMDMQRNAASSSGIMGRSMNDVHVNEALRMKMEVQRRFHEQLEVQKHLQMRVEAQGKYMQTILEKAYQAISSSGDCATWHAGYKSLGSQAVLDIGSSMSFPSLQDDLQLYGGSHLDHLHQQHEQMEIRPSIDTFLAFNYSSSTGKSPMVWPGADDGGGEPAKISGDHQLQMAAPATTTMMMEAITMSGGDSMGSKGFEGQMSSKLDMRSPPPQQTVLPVGSERMSSPIVGAKARNISYGRNVHVNGADKKAQSQEQQEAEKHLQMRVEAQEKYMRSMMEKAHQALASGATWPAANEQAKISPPGRK

SEQ ID NO: 16732 - protein, 556 aa, Oryza sativa
  Clone ID: TF_OSC7339j.C1.p2.fg
MAATAAYLPLRAQAQVGLAPLRPSGSAAAGARLPGRTARRRLAARGGPEAAGIRAEAVPGGGGVARRAAMVPPYNVLITGSTKGIGYALAKEFLKAGDNVVICSRSAERVESAVTDLKKEFGEQHVWGIVCDVREGKDVKALVDFARDKMKYIDIWNHKKAGFSPYLCVPLAQINNAGSNAYSYKPLVETSDEALMEVITTNTLGLMICCREAINMMRNQPRGGHIFNIDGAGSDGRPTPRFAAYGATKRSVVHLTKSLQAELQMNEVNNVMVHNLSPGMVTTDLLMSGATTKQAKFFINILAEPANVVADYLVPNIRAIPTNQSMKPTYIRFLTGLKAYSRIFSRIAFGARRNKIMSNSQPAQEDDCMSSILVSRLIRAMQPTRSYLRWSDDLHKMFVEAVAYHGGPYEAKPTAVKETMQAMGVTSLTTHNIKSHLQKYRESFSSGVGSLHDHDLLRTTSPSKEALDLASEMVRDNDAAMAEIEMLNDLLLDHDIEMVETSFSVDDLQMMERELMSEIKLIEHNFEISESALDEYMDDLANYAFDLTGPANSSSP

SEQ ID NO: 16733 - protein, 448 aa, Oryza sativa
  Clone ID: TF_OSC900146j.C1.p4.fg
MCPDIEDRAAVAGDAGMEVVGMSSDDMDQFDFSVDDIDFGDFFLRLEDGDVLPDLEVDPAEIFTDFEAIATSGGEGVQDQEVPTVELLAPADDVGVLDPCGDVVVGEENAAFAGAGEEKGGCNQDDDAGEANVDDGAAAVEAKSSSPSSTTSSSQEAESRHKSSSKSSHGKKKAKVDWTPELHRRFVQAVEQLGIDKAVPSRILEIMGIDSLTRHNIASHLQKYRSHRKHMIAREAEAASWTQRRQIYAAGGGAVAKRPESNAWTVPTIGFPPPPPPPPSPAPIQHFARPLHVWGHPTMDPSRVPVWPPRHLVPRGPAPPWVPPPPPSDPAFWHHPYMRGPAHVPTQGTPCMAMPMPAARFPAPPVPGVVPCPMYRPLTPPALASKNQQDAQLQLQVQPSSESIDAAIGDVLSKPWLPLPLGLKPPSVDSVMGELQRQGVANVPPACG

SEQ ID NO: 16734 - protein, 232 aa, Oryza sativa
  Clone ID: TF_OSC416785j.C1.p7.fg
MPGVRLNHHHHHQPPAAAPFVGAAPLPHHPRSGGACYCDPCHVAGAWRRGGCGGGGARGVLPAKRAPRAPRMRWTSTLHARFVHAVELLGGHDRATPKSVLELMDVKDLTLAHVKSHLQMYRTVKNTERPAASSDQADGFENGSAGEICDENSLDLHGGCRPEAMSAAARHGREDWSGFHESNTGTMQTLKDMQSKSLEIISDMNSCVSETTSSTSELNLEFTLGRPQNRPN

SEQ ID NO: 16735 - protein, 587 aa, Oryza sativa
  Clone ID: TF_OSC415689j.C1.p8.fg
MSRPQPPPLLPVLPELGGLQALTSSSASLATWLRGGGREEVAAINLDGGDAVILVVVPPHLAGHGGQGRPPHYSIERRRSQPQFECHAYVKGVKYLVFEFRGVIRLTAIAHGVVGDVFLGSEAPVVTSSISKYAGLVFGGAHRDVSALGEEKLSFFGKSSQQKRISTNQLYNSGIPVTVPSPLPAIPATLDENIPRIPDGQNVPRERELRSTPMPPHQNQSTVAPLHGHFQSSTGSVGPLRSSQAIRFSSVSSNEQYTNANPYNSQPPSSGSSSTLNYGSQYGGFEPSLTDFPRDAGPTWCPDPVDGLLGYTDDVPAGNNLTENSSIAAGDELAKQSEWWNDFMNYDWKDIDNTACTETQPQVGPAAQSSVAVHQSAAQQSVSSQSGEPSAVAIPSPSGASNTSNSKTRMRWTPELHERFVDAVNLLGGSEKATPKGVLKLMKADNLTIYHVKSHLQKYRTARYRPELSEGSSEKKAASKEDIPSIDLKGGNFDLTEALRLQLELQKRLHEQLEIQRSLQLRIEEQGKCLQMMLEQQCIPGTDKAVDASTSAEGTKPSSDLPESSAVKDVPENSQNGIAKQTGMRIH

SEQ ID NO: 16736 - protein, 233 aa, Oryza sativa
  Clone ID: TF_OSC419196j.C1.p4.fg
MATTAATAPDLSLHISPPSPPDMAAGGETMEQLAEPKLCLGFGTAAAAAAEQYNNGGCNLQQQQRLHQPSQIQRFKKSASGGSPVCSGGATGTGGVAAARSGNGGGGGKRSSRAPRMRWTTALHAHFVQAVELLGGHERATPKSVLELMNVKDLTLAHVKSHLQATYLLDLVQMYRTVKGTTDRTCAEGHGQMRDMGFLRRGGGGVDGFDVLGNTSSIAIANIRAFNLKDANI

SEQ ID NO: 16737 - protein, 539 aa, Oryza sativa
  Clone ID: TF_OSC401660j.C1.p24.fg
MLEVSTLRSPKADQRAGVGGHHVVGFVPAPPSPADVADEVDAFIVDDSCLLEYIDFSCCDVPFFHADDGDILPDLEVDPTELLAEFASSPDDEPPPTTSAPGPGEPAAAAGAKEDVKEDGAAAAAAAAAADYDGSPPPPRGKKKKDDEERSSSLPEEKDAKNGGGDEVLSAVTTEDSSAGAAKSCSPSAEGHSKRKPSSSSSSAAAGKNSHGKRKVKVDWTPELHRRFVQAVEQLGIDKAVPSRILELMGIECLTRHNIASHLQKYRSHRKHLMAREAEAASWTQKRQMYTAAAAAAAVAAGGGPRKDAAAATAAVAPWVMPTIGFPPPHAAAMVPPPPHPPPFCRPPLHVWGHPTAGVEPTTAAAPPPPSPHAQPPLLPVWPRHLAPPPPPLPAAWAHGHQPAPVDPAAYWQQQYNAARKWGPQAVTPGTPCMPPPLPPAAMLQRFPVPPVPGMVPHPMYRPIPPPSPPQGNKLAALQLQLDAHPSKESIDAAIGDVLVKPWLPLPLGLKPPSLDSVMSELHKQGIPKVPPAASGAAG

SEQ ID NO: 16738 - protein, 432 aa, Oryza sativa
  Clone ID: TF_OSC405553j.C1.p18.fg
MLQRNLPNLSLRISPPAVSSAAAPVSSGTPTTAARTTLPTGVITDAEGGGEVAAFFGNPSSGSEPPGLSLGLGPTTPAHADAGGGRHGDHHLQPQGCAPFKRAAARASQLPAGSKRSVRAPRMRWTTALHARFVHAVELLGGHERATPKSVLELMNVKDLTLAHVKSHLQMYRTVKSTDRSSHIASGEAQLQQQAGMEVAMEAAAGGGGNGGGGGGGVVLPMMPACDDMVGICSSPAPPAAATSSAAAYFLCATTTSTATAPLAVVPSPPAPTIPTRFHECIYGDVDVVIQSISMLINVLLHGIDKSCLALTFLEHRRTDQTPALEKGVAIVDSLHRCQKHNYSPVLQDALHQGAEEDHLITGNLPMGGASAQASIEAMATTNSSSPASSSPSLASLEQLLPEDSFAPNLEISLGRHNWNMDHPEELSLKYL

SEQ ID NO: 16739 - protein, 322 aa, Oryza sativa
  Clone ID: TF_OSC417454j.C1.p3.fg
MGFYSSYHHPSTWPSTSPSPLAAPPGAASSPLDPTAAFLSSPHHRMLSAASGRLNGMLSVSDTLRSYGVPGAAAPGVIGGAHHHHHHLHGGQPFVGALASRFMPKLPAKRSMRAPRMRWTSTLHARFVHAVELLGGHERATPKSVLELMDVKDLTLAHVKSHLQMYRTVKSTDKPAASSGPADGGSGDEEFAGGGQAASGGGDSMCLRGGGGGGVAAAAFAEHGRSASEGAASSVGGGGGGDMDQSSAGNTSTTRWSNSSRDPWLSSNSCNMDAHRSVGLSSPIENLEPCRSSSSQVSNHELSSPSLEFTLGRPDWHGADHD

SEQ ID NO: 16740 - protein, 253 aa, Oryza sativa
  Clone ID: TF_OSC100626j.C1.p5.fg
MGISGERKGAARQYNRSKVPRLRWTAELHRSFVRAIDCLGGQQKATPKLILQLMDVRGLTISHVKSHLQMYRGTRHGIGQNDMQPQLHLKQHSFGSDEQSPKEFMCPPIKRAKVGTEASGKYRCMEGSSDMRSSAPPAGTRYFIDDCMRLQEVSMDRRRSDQHDAAAAARARAPAAAASSLHQALGFWVQGRREEPFMVHQISKPKAHQLNHMVRNMKISCKENHESRFFMSLVMVLLLISADLVSRETPSKL

SEQ ID NO: 16741 - protein, 1153 aa, Oryza sativa
  Clone ID: TF_OSC401719j.C1.p42.fg
MAMRGEPWRRQEGEQAQAEADRERELDLFRSGSAPPTVEGSMGALHAAAAADVFLEDELRADPAYHSYYYSNGNINPRLPPPLLSKEDWRSAQRLRPGLGGIGDGRKPRGGGGGRGGGGAGGMGPGDGLIGMPGLEIGRQNSFSGFGTIKRLSVAKVLVLKLLIILFKAKEITSDLYMMQDDSYQHDTDRQGANCNGTDLLSSSKVQYGLHRETGAISGLHSDSKAPCLPENQNESSHSYASIIGSSLSRSASPDPELVRRVPSPCLPPIGVKLGATDKKNNVGSSSFNCSSPNIIESDDLVSALSGMNLSSSRAMNGNTMDQSKLHQDVDDVRKFLFDQYMDQTNGNQRHSYMKRSEQGHVKVPQEYSGASMNPSVMRSQINAGGFTSFNNSSVGSGFASPRLGSRSPGGSLSSRQNLTGASNLPNYVGIGSPTAASAHQMPVDPLYVQFLRAAEIAALAANCEDPLMDRANLGGSYMDLFGPQKAYLSPLLQSQKQYSYYGNLGVGLGYAGNSLTSPILPSSPGGPGSPLRHGDRSMRYPSGMRNFGGSFGSWNSDLGGKMEANLVPSLLEEFKSNKSKSYELSEIAGHVVEFSADQYGSRFIQQKLETASTEEKDMVFAEIMPQALTLMTDVFGNYVVQKFFEHGSSAQIKELADQLIGRVLALSLQMYGCRVIQKAIEVVDLDQQTKMVAELDGQVMRCVRDQNGNHVIQKCIECIPQHAIQFIVSTFYGQVVMLSTHPYGCRVIQRVLEHCDDPKTQQIMMDEILQSVCLLATDQYGNYVVQHVLEHGKPHERSAIIEKLIGQIVQMSQQKFASNVIEKCLAFGNPVERQVLIGEMLGSSNESEHLEVMMKDQFANYVVQKVLETCDDQQREMILTRIKAHLNTLKKYTYGKHIVARVEKLVAAGENPSIMGEEAPEEYELGGGEDERVMEWETGLPGADELTPLSQPLVPAGLAAAFRIPPEPGRTLLDVHRASAATVSRLRRASSSSSSSFPAFASKGAGTGADEAESGGGADGGNGNTNNSSSKRARLVWTPQLHKRFVEVVAHLGMKNAVPKTIMQLMNVEGLTRENVASHLQKYRLYVKRMQGLSNEGPSPSDHIFASTPVPHASLHDQVPSPYHPHPHHHSYNNAAYAATVSSYHHYHHANH

SEQ ID NO: 16742 - protein, 741 aa, Oryza sativa
  Clone ID: TF_OSC900191j.C1.p18.fg
MAENNGAVPPGCKLPAGGFFGRLHVLVVDDDAAYLEELKLMLLLAGYAVTGKTTAEEALKEVDQNPEDYFHIVMTDVHMSGMDGFDLLHRINGRVPVIMFSEGEDVVMVMRTVMNGACDYMVKPMTSEAIKFIWKHVLRWRLSALPANASSSLQPSDHLAAALAAVAPPPPPAVQLPAAPAQAGNRDGEAHEEAELSTQPPALVPSGVQEAAAAVWSSRGDGQEAPPPAVAAAAKAPSKKRGASEVSDRGSNNLEATTGRKKVRTRFTWTTVSHTSFVRAYEQLKDQEGPKKIKQLMELDGIFVTKTQVSSHLQKYRSWLENERKKEEATSSSPCNPLSYTNCLDRGNYVGVGAKEIENFISSHQRSLGTAIGQESTIEQASLHSEITSVSRDAHENGNSQARGSAMSNGPKKIKQLMELDGIFVTKTQVSSHLQKYRSWLENERKKEEATSSSPCNPLSYTNCLDRGYSTWKQSSVITEGQQSSSFSGRPIHSMATSNGCLTTTDTQAGNYVGVGAKEIENFISSHQRSLGTAIGQESTIEQASLHSEITSVSRDAHENGNSQARGSAMSNGTSGTRGVLVTNENLLHVVSASLPSNMGQPTQPSQSFCTNELAANYSIISDQNPGTSHPTSSSAINNQNSKTQEMSVSQTVELGCGNDVMLDWPELVGLEDQLDNDVLMNSFFDGDLLQQGVVTAIDGTQEMLAFDSTGDLGSVPPRGLNNEIASHENTNGKNGASSGP

SEQ ID NO: 16743 - protein, 716 aa, Oryza sativa
  Clone ID: TF_OSC100899j.C1.p12.fg
MEELLGLVRGFVDVLVLAGGRTSSGAAATWRSGDVKKALQWALFFEEVFKNLRDDGQYDESASELDAALVQLASSPNFPKGIEDIRSKTLAMARELVVKHFLKTTNAENLGAVLQAVVEMDMDGISASGECNVCQEYVQSILDMNLPSLMRTKNARDVGHSTSSDEFCEESLFTGNSQILLKELQKKLDSGSCISLAERELNTLLKSMKKDSFDSAGSTLCTSATAQKTQIIDKFILWKQWKAKCLSYLLDERTIRIMSGTNMIFNAPKEQWMGLFEPLKVSADSSQSGIIEVMELCLLGLVARQWNSLIESIMSHTFSSFPISKQYADLHQLLQGTTQDECQDKLLGFKEMDICEYARQSLESEPYILWLLPPVLTAAAMPPRSSLFKIYLVEIDKQLGEAASKDRKCNCGGDGIDQHQNSSNFTSDLYINKSESPNGKLSSESYAIDTSGCDSSLPPTQSLYKGNPSSLRMVYPKVSEQNSWSQEPLPGPFVCPTSVDFFDQQDMTIFDQQIQDNIAASPSTNLAKQNEWFSSGTSLQYLESSVSAGSVLKAVDATSTTPSNYLHCHAQRNTSNPPNFNEICSEATPKAVQKVMKVDGLTIYHVKSHLQKYRTVHHRPQLSDGRGMETTCEGLRVQIGLQKQLHEQLEIQRKLQLQVEEHSKYLAMIIEKQSESLRQLGALPRSLDAPTQVLDNRETCEGQTGDADSAEQKPEK

SEQ ID NO: 16744 - protein, 306 aa, Oryza sativa
  Clone ID: TF_OSC900143j.C1.p24.fg
MQAEVNISEAIASNFTSDLYINKSESPNGKLSSESYAIDTSGCDSSLPPTQSLYKGNPSSLRMVYPKVSEQNSWSQEPLPGPFVCPTSVDFFDQQDMTIFDQQIQDNIAASPSTNLAKQNEWFSSGTSLQYLESSVSAGSVLKAVDATSTTPSNYLHCHAQRNTSNPPNFNEICSEATPKAVQKVMKVDGLTIYHVKSHLQKYRTVHHRPQLSDGRGMETTCEGLRVQIGLQKQLHEQLEIQRKLQLQVEEHSKYLAMIIEKQSESLRQLGALPRSLDAPTQVLDNRETCEGQTGDADSAEQKPEK

SEQ ID NO: 16745 - protein, 355 aa, Oryza sativa
  Clone ID: TF_OSC401119j.C1.p16.fg
MGLDVGEIGVGAADLSLDLKMFAAKSFGRVRGKDTTTTAMGDCIRRLEEEMGKIEVFRRELPLCVRLLADVIDVMKEEVEKKGGDRKEDEEDAAGDKSNWMSTAQLWTGNSGGPDAAAADPEKQDKVRISSEAKSNGGAFVGSGAPAFARPKQSLMRKEDMAYDVRMPDLSLLSPPASAAAADESRRQVVGFSQAAARAAAMAASGPALSLQPQPQPAAAQQQQQARKTRRCWSPDLHRKFVAALQQLGGPQVATPKQIRELMKVDGLTNDEVKSHLQKYRLHNRPRVPSSTIVNQPIVLMQGLCYIPQEQSSSQSGSPEGPLHFSGSGMAGGGSSAATVSCEEEDGRSESYGWK

SEQ ID NO: 16746 - protein, 321 aa, Oryza sativa
  Clone ID: TF_OSC1299j.C1.p1.fg
MGSAGKEEEEEDGGGGAPAAAANNYGSSTTSSTTEEEGSGESRRRTSSSSSVRPYVRSKNPRLRWTPELHLSFVRAVDRLGGQDRATPKLVLQLMNVRGLSIGHVKSHLQMYRSKKIDESGQVIGGESWRSDDHLQMQGGGHGGQAYNLGHLSLPALHHRSITAGSGTIFQSRFGNSWSPWRCHGSYWLPAGHHLLVGSKPYYPPAAEAEAPFRRSSARYVARANTSNHPDFVQGSSSSPDDNIMNHQRPVLKEMICSEGSNHQEGPLNLDLSLDICPRGEKRKRECSWRKQEEDHDHATVAIGADQEAESCATGLSLSLF

SEQ ID NO: 16747 - protein, 314 aa, Oryza sativa
  Clone ID: TF_OSC401056j.C1.p7.fg
MEKTSAGKEEGSESKTAAANNDGSSTSSTTEEEESGESQRRTSSSSSVRPYIRSKNPRLRWTPELHLSFVRAVDRLGGQDRATPKLVLQLMNVRGLSIGHVKSHLQMYRSKKIDESGQVIGGGSWRSSDEQQYHHLQMQGGGDGGQAYNLGHLSLPAALHHRHITAGSGTILQSRVANAWSPWRCHGSYWLRAGHHLLVGSKPYYPPPPAEARANTSSNHPDFVQGSSSSPDDHTMNHQRPVVLKEMIYNEGSNHQGGPLNLDLSLDICPRGEKRKRELISWRKHEEDHDHTTIAIGGDQEAESCATGLSLSLF

SEQ ID NO: 16748 - protein, 329 aa, Oryza sativa
  Clone ID: TF_OSC401238j.C1.p21.fg
MVRRERIEGVRQYNRSKVPRLRWTPDLHHCFVHAIHKLGGQHKATPKRVLQLMGVGGLTISHVKSHLQMYRNMRNDDLGMQGIQQMDDQEQTFAGGMQIWTDMQLQDHHHECNGPYCRCHSSSKHAKGSLLLLHHHHQQQQLQRPNEMETRRAEASTQTGFLRSQGICERDVSSGLPVPAAYYSYYTPMAHGAPPAAADGAGHDDPPRLLGLVVMATTTRRGSREEHKATPPPENGAIRHGRKARRTTAAAEEEERDGDGDELSLSLTLDSGLSCRSSGGAGAYCCSEGSSSNWLISSPSSTTSLVAGGCSRRSTPAMLSSVVSLDLSL

SEQ ID NO: 16749 - protein, 368 aa, Oryza sativa
  Clone ID: TF_OSC900191j.C1.p19.fg
MAGSCSVASSNKSKLADEEFSPVGMRVLLIDESTTYLKIITKLLLNCGYKGLTVTNFEITYVWRVDEVTPKTAARDAVEELHENPWSYDMVLTEVHAPAGIDGFNLLQYAGTDMDLPVVVFSADDDKRTVLKCVNSGACDYLVKPLRHEELKNIWQHVYRRKLRSGGRRAAAAGNSSKGEIKKRFRWPKELHERFVSVVLQLGVDKATPNQILPLLNREDLTRDQRFRIALTKSKALPSCSTIPIGETVHGIPLALQAIGTGNNQHLIVPFNRITFVRPRGVEIGQNGVVGGLVTGNNNVVVPTATSIIARAFGREIVNGADLFDHGTLIRDSSSTSHDGAQNELGETNLAFELMAKKGSDVEPRIGG

SEQ ID NO: 16750 - protein, 507 aa, Oryza sativa
  Clone ID: TF_OSC400151j.C1.p40.fg
MASSSSDLTLDDHHHLTAVAAASGQATQKLQEFLSRLEEERLKIDAFKRELPLCMQLLNHAMEAYRQQLEAYQMGSQHSAAAAAAARAPLVLEEFIPVKNIGIDVVAADKAAAAGGNSVSSEKASWMVSAQLWNAPASASAADTAAKGPQTPKEHSEHHPLDTSPKLITALDGGGGGGGAFLPFSKDNAMGDGSAAAAAALPELALAPAEKAADAITIAAGEVDKKPYAHDNGVVARSREAQNGGKPPSTPSDGQAVPPPPQPHRKARRCWSPELHRRFVNALQILGGAQVATPKQIRELMKVDGLTNDEVKSHLQKYRLHTRRPMPSPAPPTAATPQLVVLGGIWVPPEYATQAAGPAIYGAHPATQPHYTAAVAAQEYYHHHHHHLQHHPAAAALVHHRAVAPPPPLPPQQQLAPPYSAKSSASARLGSPDSDGRGSGGGGGAAASGAGRDMSESIEEEGEGEEREDDDDDDEMAATNNAHAVDGDDDNDEINTTTTTSAGAINY

SEQ ID NO: 16751 - protein, 642 aa, Oryza sativa
  Clone ID: TF_OSC101746j.C1.p5.fg
MRAAEERKGVVPAARRRDQFPVGMRVLAVDDDPVCLKVLETLLLRCQYHVTTTNQAAIALKMLRENRDMFDLVISDVHMPDMDGFKLLELVGLEMDLPVIMLSVNGETKTVLKGITHGACDYLLKPVRIEELRNIWQHVIRRKFSTRDRANLDFYEECNKPPNADSDHVHGHVTCGSPDQSGRPSKKRKEYCSEEEDEGEVNTQDIDDPSAPKKPRVVWSVELHRKFVAAVNQLGIDKAVPKRILELMNVEKLTRENVASHLQARNSFHYLLFISMYCPRNNPAALGTQGVPASKSIQTMSGSHTLSHSINDANKYHLSLPGNQKGNLGQGLATSLGQTQMQQKWIHEETDDLSTILSGNGLSNGMSGTLQSVTSSPLLPQELAECTQAKIVSQPSIRTSSVSSEHIEGAVGVSSGLLESRVSQQSTIPLSGFSANGLLIHGSFNNTCANKLGGTSSSCAPARSSNDLMVARDTKGGASSFGGAMLLPPDTEQKYLNFGGGNGLKQKFDDRTADSLFDLKFVWSSVPSSQLASNIGAHHAMSQRWNNSSSNSSNIGARMIGQATSSGSTVIPQMKTDFLVSGDMAMPKNASDLSIPKLQSELSSSSCSFDGLLNSIVKVEKDDVTFSDDLGCGDFYSLGACI

SEQ ID NO: 16752 - protein, 2135 aa, Oryza sativa
  Clone ID: TF_OSC400505j.C1.p2.fg
MAPPRELDLSDEVEGEEDGTTDFVFRLAGDPIPLLPTTSSPLPLFDLQSPPSRPLAVSNRRAAVFLAHPNGFMAATTKALIEASKEAREKGKSTTRCARDCCVADIPLPGVSLLELSRDESVLAACAGSVIHFFSASSLLTDKDVEPLSSCTLEGSSTVKDFKWLNHASKAFIVLSKDGLLSQGSLGEGLKDIMENVDAVDCCKEGTHIVLSKKNTLNILSSDFKEICCMPLLFQLWSDDSDSDDASIKVDSIGWVRDDSIVVGSVRLNEEGNEEGYLVQVIRSGGNTFFENSSKSVVFTYVDFFRGIMDDVLPSGVGPNLLLGYLHRWDLMVTSNKKSIDEHISLLKWSSATDDKKTVVYLEMLEDKYSPRIDLQENGDDNVILGFGVENVSLFQKITVTVGPEQKEVAPQHILLYLTGEGKLNIYYLARISDPSELPQTKLSAIEDSDVMKEISPVTVSGKEFTPSATSSLDKSIRPDGAELSSVQPDRDLHGSTDMKNSSPVSKAKEIVASSPAPASFLAPASNLKPGISFSFSTANSVSLSPAGSNTSSELGSSWQQSSSSNFVNNQLGKGSIPSTQPVGAFGGSQNSKKDGNLSFNKSSVFTSDGSTLVKPGERNEPGFGSHPLQSSYTTDKKVPSSVGLSSKSSPSISPIKPSSAGPSSTGFRTGNLEAFPTSRGSPLPQESIDKPHDRTHAVVDHSKNFKLGAMFDTEQDLSKKFYSINDMTKELDTLLSYIEKDGGFRDACITFQERPLSMFEGDLQNFLELLQIFKNKIAEQCSRVEDLRNKMFQGTSTTRVSARQAYMKGIVDQSSDTQYWDIWNRQKLSPEFEAKRQNILKANQNLTNQLVELERHFNNLEMNKFGETGRVASSRRAIYSSKARSSQTQISSVYNALNSQLAAAEQLSDCLSKQISALNISSPSTKRGSVAKELFESIGLDHTMDAAKFSGGTPSKSVKRYPSTREHITSISGPSKTAEPETARRRRESLDRSLASLEPQKTTVKRIAQQQRLKISSDLPFRSNKKIFDSQMAAMSQEKSSSSPTSSIVESYANKLHYPSEVLHEKTKPSGPQHNTLFKWVKESAGPSQGPQHKYPELPGQLKSSDQTPKLGSSSPLSFSYSHKDVWDNISSSNVPSSGTTHTMPKSSTLTFKTTVIPKTNTSTLPDLSPLMTGSKFSLSPLTVKTLSGDSGGASSIITKNKQGGQAMPYLGTTKGLDVSPQNMGGAFRDLNKPSLSPEPPKSALLQGKTVQLGKITETVQSPVKAKPEVAFQPPAFPPTPVAQSSPCSIKPTVPSSATSSSSTMQESAAKTSDVLSPTGPSILPSKESMTKPSSPLPDGTISSSLLSIPMPVKESSTGLNKIVSKPEVVTSEVTGTTVSASTSSSVPITEGKPSSIPATSGSLPSIPVSAPKVVPVSAESVVVTSTGKDVGPSNPSSDEDDMEEEVPSASSDLNLGALGGFGLGSVPSSSPPKSNPFGNSFTTSDNKSSGSSFTLTTSPGQLFRPASLSIPSSQPAQSSQSTSSSTFSSAFSSGLSGFGQSAQIGSAQQSGFGQPSQIGAGQQAGFGQPAQIQSGFGQPAQVGVAQQSGFGQPAQIGTAQQSGFGQPAQFGAQQALGSVLGSFGQSRQLGSFGAGGFGGFASASASGGFSSNSGFAGGATGGGFSAAAAPAGGGFAAAATGGGFAALASKGGGFAAAASSGGGFGGAAQGSGFSSVALMHAPKIVLRALAVAIVELPAPGIDTISQEHFAYLSTSDIRTWVSHQDSLTNLDEIVSNHPTTSRQTFQCMTGTEQMMYHQQQVQSDSQHLSSRPGLPPEKQFLLQGGADSSSGLVLSTDAKPRLKWTSELHERFVEAVNQLGGPDKATPKTIMRLMGIPGLTLYHLKSHLQKYRLSKNLQSQANASRAQGVLGCSTTEIDKPCEGNGSPASHLDLETQTNSSSMHINEALQMQIEVQRRLHEQLEVQRHLQLRIEAQGKYLQSVLEKAQEALGTIAVAETAATANASSSKRLQNEHTQLHHHQQQQQVGDGSVDSCLTACDCEGSHHSRSHGHRGEQDILSIGLPPFEPAAARSGKEHHYLLFPNEPSRRRSCSDERRREMSTLQASELDLSINGRSSSHSHRRENIDLNGAGWS

SEQ ID NO: 16753 - protein, 417 aa, Oryza sativa
  Clone ID: TF_OSC400832j.C1.p2.gm
MFPPGLIHHRPDGGEAGRAAGGGPSLVLTADPKPRLRWTADLHERFVDAVAQLGGPERIDPFRDTNVIGAVGDGANVIGAIMLDYSVNDVGTAKRVYSWKATPKTILRTMGVKGLTLFHLKSHLQKYRLGKQSGKEASEQSKDASYLLDAQGGMSVSPRVSTQDVKENQEVKEALRAQMEMQRRLHEQVEVQKHVQIRMEAYQKYIDTLLEKACKIVSEQLASSGFSISDNDLPELSGGVMCGSADTLSSSIFHQLSVSPINLHSPEGKPTPSGIEGQMILQKSPELKRNLALPSPPFVQPCVAPAPVVIVAQGSRRRDRQVVADLVRPSVVALGHRSTAVVVKPKVAAASSSPPSPSVDLPPPFWSPVSSPRRPQPVGAVRSRRRAVVRRRACAARAVVGDDVTADVIVAVSRGPP

SEQ ID NO: 16754 - protein, 417 aa, Oryza sativa
  Clone ID: TF_OSC405556j.C1.p2.gm
MFPPGLIHHRPDGGKAGRRAGGGPNLVLTADPKPRLRWTADLHERFVDAVAQLGGPERIDPFRDTNVIGAVGDGANVIGAIMLDYSVNDVGTAKRVYSWKATPKTILRTMGVKGLTLFHLKSHLQKYRLGKQSGKEASEQSKDASYLLDAQGGMSVSPRVSTQDVKENQEVKEALRAQMEMQRRLHEQVEVQKHVQIRMEAYQKYIDTLLEKACKIVSEQLASSGFSISDNDLPELSGGVMCGSADTLSSSIFHQLSVSPINLHSPEGKPTPSGIEGQMILQKSPELKRNLALPSPPFVQPCVAPAPVVIVAQGSRRRDRQVVADLVRPSVVALGHRSTAVVVKPKVAAASSSPPSPSVDLPPPFWSPVSSPRRPQPVGAVRSRRRAVVRRRACAARAVVGDDVTADVIVAVSRGPP

SEQ ID NO: 16755 - protein, 297 aa, Oryza sativa
  Clone ID: TF_OSC900052j.C1.p9.fg
MSSQQQHAGEAPASAAAAARARLRWTGQLHERFVLAVAELGGADRATPKSVLRAMAVPGLTLYHLKSHLQKYRQAVSRGGNGGGGGSGSLNDRSSSSERQPADHDGDSAADEPRTIAYDGDSDGDAKEGLRDSSRSMVQMQREVQRKLQEQIEVKRHLQLRMEAQGRYLQSVLRRAQQVLADHSLASSPEAATAELSELASAVDIECMSSSSPPRHHRQSAATDSCVTTTSSSEAESKAAGSKRLHTSDCTVEQPVQGKRAFNFLQRHNQADQEEEQEEEYAGAEDGSSSEIDLNSG

SEQ ID NO: 16756 - protein, 400 aa, Oryza sativa
  Clone ID: TF_OSC17597j.C1.p2.fg
MKEKEVLVEIVEDDELKRSIGRNQLDLNEEVMDVESEEGEVGDDEDDEDEEDDDDDDDGGSTTDVAGSRSSSNNSSTNNVSESKLKGDKDSGGGRLEGINGGEQRVPSVRQYNRSKLPRLRWTPDLHMAFVHAVERLGGQERATPKLVLQMMNVRGLSIAHVKSHLQMYRSKKLDHEGRQIRGAIASVFSPMDFHLMRGDRRFHDMLLQRAAALSSSRQEHGGFFSSRSGGGGGGLPPEASRLYGLLQHRQSPAIATMQTLDFKNSSFRNQEWSFSFNHQRKETMNPSSSSSTTAAIRRWPSAAGAVAVVAGERQRLAERFGYYTGNGGASSTSLPLITRAAMAAPPPMFAAAVAPPGRDHHRLPFGWHAGGGGGGGGNKNRSSSDPVVIDEALDSRRLE

SEQ ID NO: 16757 - protein, 543 aa, Oryza sativa
  Clone ID: TF_OSC400452j.C1.p14.fg
MGEVKENEVVEIFEHDHDNKIRSPENSVPPAMVLDLNEGFGEGSEEGGVGEDGDEEDDDEDDDDDDDDDGGSTSEVAGGGRSSSNNSSTNHNSGSDKDHDMNSSSSKADGGGDRVPTVRQYNRSKLPRLRWTPDLHMAFVHAVERLGGQERATPKLVLQMMNVRGLSIAHVKSHLQMYRSKKLDHESGHERGAISSVFSPMEFHMRRGDHRFHHHDMFFQRAAAAGVSPFSSRMLHENGGGFFASRNPGLPESSRLYGLFQRRQQAPMQKFDFKNCNSFSRNQEWAFNQQHAAARAAGAVNGHGPAKGLIHEMIFRKEGKPTSHLFDVRDAIASTRVTSATTAAAADHRLDGAGKAGNFDWIGSSSSRPLTRTMSAAAAATMGDHHHLRWRGGAAGSGNTTASSDPVVASEAALGSLLERAKTKATEAMRLETPVKMTAAAVAAEEINGRTPDLQLSLSPNAGDHRSAGEKRKFLSEQEVDSDKQQLPLTLSLSLRGGGDNGGGGGAEAAGRLEEEMTGSSSSKKAALGLSTLDLTMSIKALE

SEQ ID NO: 16758 - protein, 1196 aa, Oryza sativa
  Clone ID: TF_OSC400657j.C1.p5.fg
MSSQSVVAVKQITAPDKIVETCPSTKHSAHKLFDVKPDFQGLIDDNLSSSSQSSSIKIELIRSSSLPNILPFQKRSSEPEPESPLSHVSHPNVSEPVYSNSSTFCTSLFSSSSMETEPCRQLGTLPFLPHPPKCEQQVSAGHSSSSSLLVPGGDGDIGNAHDEPEQSDDLKDFLNLSGGDASDGSFHGENNAMAFAEQMEFQFLSEQLGIAITDNEESPRLDDIYGTPPQLSSLPVSSCSNQSVQKAGSPVKVQLSSPRSSSGSATTNKARLRWTLELHERFVEAVNKLDGPEKATPKGVLKLMKVEGLTIYHVKSHLQKYRLAKYLPETKEDKKASSEDKKSQSGSSGNDSVKKKNLQVAEALRMQMEVQKQLHEQLEVQRQLQLRIEEHARYLQRILEEQHKVSISSNSLSLKPPAESQPESPKPTSEKKEAESEAGAATSAQPSSEDKSPDAECKSSPPVCTTQDTQRRRLEKEKHGKTVDKETQKVSCNYCGKVVRTYNRLEHHLAGIRGNVYPCSLVPDSVRQSIKSSLEARKKDWIARKIGKHKSSELPPVRNLSLTSAHACRPLLQPITSGTDQEGSVSWHRCFVHFTNNLVQPGETTQVNAHDVSCNASSSQKGGQTIEVTRPPYQNPCMMNKPPEISSGQRIDPLSFSMENSSSQMQDSESSKEPTNDYLNSQARKSIGKLIFEAGLEPGILHLPSFKDMVDVLAWAQVAIPTYESIMEEQLREIQCHARDLKKHWEMNGCSVILDTWESRCGKSFISVLVHCSKGMLFIKSMDVSDIIDDVDELAVMLFRVVEEVGVLNIVQVITNDESPYMQAAEHAVLKRYGYSFFFTLCADHCINLLLENIAALDHVNEVLIKAREITRFIYSHAVPMELKGKYIQGGEILSSSNLKFVAMFITLGKLVSERINLVEMFSSPEWASSDLASRSSFRHVYEVVKTDNAFWSAAADILKLTDPLITVLYKLEADNCPIGILYDAMDCAKEDIKCNLRDKHGDYWPMVDEIWDHYLHTPVHAAGYILNPRIFYTERFSYDTEIKSGTNACVTRLAKNHYDPKKVAIQMDRYRRKSAPFDSDSAIQQTMEIPQVRWWSAHGTDTPELQTFAIRILSQTCFGASIYNIDRSISEQLHVVKRTYPEQERFRTMEYLHYNLRLAHCEPCVRGASGAQQHSRLTSQLGDWISSGQTTSYYK

SEQ ID NO: 16759 - protein, 339 aa, Oryza sativa
  Clone ID: TF_OSC405552j.C1.p1.fg
MGLDLSLDLKMFAARSAVRMAAAAAKEATGVEACIRSLEEERRKIEMFRRELPLCARLLADVIELMKEEAGKRRKDGDDAEAKAEDGDKTKWMSTAQLWVDSRGSDADSENDRRSGSTSPASRLLGGAEESSSRAVAPPPYFRREERVVLRPAMPLLPPASHRSPPPAAAAAATAAGDDHRHVVASSFATAVPSPVPAALSLQAQAQQQQQQARKSRRCWSPELHRQFVAALQQLGGPQVATPKQIREVMKVDGLTNDEVKSHLQKYRLHNRKSPGTASASHSIVLVGDLWASQEVSCSQSGSPQGPLQLSGSGVAVSAATAGDSCCEDDDKSEGYVRK

SEQ ID NO: 16760 - protein, 543 aa, Oryza sativa
  Clone ID: TF_OSC401760j.C1.p4.fg
MATAAATQSQPVRVVLRVRPHLPSEANSAEAPCVGLLGSHPGGEVTVQLKDQYTSRNECYKLDAFFGQESRVCEIFDQEVSAVIPGIFEGTNATVFAYGATGSGKTYTMQGTEDLPGLIPLAVSTVLALCTGTWCSVEISYYEVYMERCYDLLEPKAREIMVLDDKDGNLQLKGLAWVPVRSLEEFHEIYSIGVQRRKVAHTGLNDVSSRSHAVLSIRITTDVVKGKLNLIDLAGNEDNRRTCNEGIRLQESAKINQSLFALSNVISALNKKEPRIPYRESKLTRILQDSLGGNSHAVMIACLNPVEYQEAVHTVSLAARSRHVTNHMSSASKQETPKDKVDMEAKLRAWLESKGKTKSIQRMDGLLSPNAIKTPLSMSHKKQSASGRVSGRVVLPSLTPCKEDKTGSSLRKALSPISSNMDPQKQRTADDSNCLMLLELRTPMGSCNIVGKVTGATPLDKFIALGSNLKESLIQQYLDFLNVANKEELQKLKGIGERRAEYILELREDSPRPFKSLSDLGNIGLSSKQIQDILCKTATGIFK

SEQ ID NO: 16761 - protein, 978 aa, Oryza sativa
  Clone ID: TF_OSC410608j.C1.p11.fg
MARIKVHELRGKNKAELQAQLKDLKAELSLLRVAKVTGGAPNKLSKIKVVRTSIARVLTVISQKQKAALREAYKKKSLLPLDLRPKKTRAIRRRLTKHQLSLKTEREKKREKYFPMRKLAGSGKEVEDDVVRHGVEVDASLRGEREHVLGGIRATIGNEGVEEQMECGGRVGVEGWDGAEDDDCSVGARSGAEVVDDRGKHGGPEWAAVGVQCGEERGHEWEEARAGEAVQHAGGEGVVVEIDLHNPKNKRKNKILGMEQQQKQEPGGGGGGVRVVARICPCAPPPPPPDAALNFQVAALNDPALISFIPRRPTASAATAAASGRGDGPKDKQQQQQQKYRVDGCYLRDDPNHRVFHNEVKPLIDGRGGGGGGRGGAKACVVACGDAAAKRHLFMGSPDQPGLFTMAMAQLLDSSKAIGAAVTVSSYQVLQDTHILDLLEPKNHEVLILEDADGQTHLKGLSRVGVNSIEEFSQLCCCATNQQRHHPAKDSTQLQDWGHQGLIIYVSSFDQQGKECALAKINFLNLAGYVDPKQKKNEGLALLTGNKSMHALMNVVQALNSNQRFVPYRQSKVTRILQDSLCKSKTSGSVLIACLGCTKENSYQTSLTLTHAEDCCQDSVSTLALASRSSQVVNEQYYSLSLSAKKSSKSNMNLPTDAKTLSRTFIHKTMSMQEKNARPGFNNSGVKGGQTPTANRRTQPIISSTKKSGSSICTSIKMKENYAKPKISGRKLFCPSNNSLKEENATDVASTVVTETKSATEVQPLVGMEIRAALLNEDYALSNMEPENSCTDMGLTCSSITDNLVEKTPASSTLSSPKLSDRLREISNSLKLLSTRPVSVRAEKWDIECARRINTIAPEPKTPEVHLKFEQAEDPKDKLTARSTGIKKSLAQECLTFLNSANKEQLKSLKGIGDKRANYILELREESPELFKEISDLRDIIGMNSKELLLKSECFGQELAFCERISALQWFAAIMCSL

SEQ ID NO: 16762 - protein, 339 aa, Oryza sativa
  Clone ID: TF_OSC400896j.C1.p31.fg
MDGQWEEPQHAGRRRRQPEPGKNLIKIPSYQEVFGSGASSSAAPPSYNPPPTTAASSSSSSSSFSQAFSFLKSTEFYSPPPPPPQTTTPSLRYHLLHPDYLYYRIRELQKNFKLRVILCHIDVEDVVKPLHEVTRTSLLHDCTLLCGWSLEECGRYLETIKVYENKSADSIREHMDNDYLSRLTHALTSIRHVNKTDVVTLGSSFGSLSQVMNASMEELARCPGIGERKVKRLHDTFHEPFKRVSSRPNIVVPDTPDREKASGQPSSTNDGAQDAVEKPDASVNKKSSNVRSALTEAFAKYSEKIRNQNRDSTNVAGEDQTRRAISLLESDMIEGAALA

SEQ ID NO: 16763 - protein, 125 aa, Oryza sativa
  Clone ID: TF_OSC34362j.C1.p1.fg
MSTSAAASAAAEQQQEEGEHGPFPIEQLQASGIAALDVKKLKDSGLYTVESVAYTPRKDLLQIKGISEAKVDKIVEAGKNVLLVIIEQFYFDQTGGIETGSITEIYGEFRSGKTQLCHTLCVTCQ

SEQ ID NO: 16764 - protein, 352 aa, Oryza sativa
  Clone ID: TF_OSC401508j.C1.p12.fg
MASSAPSAAAGATPPDPLRRDRILSSKLYLDVPGSKAPVVYSPAYDIAFLGIEKLHPFDSSKWGRICKFLTKEGHLEKNRVVEPLEATKDDLLVVHSESYLNSLKSSLKVASIVELPPVAFIPNWLVQQKLLYPFRKQVGGSILSAKLALERGWAINVGGGFHHCSAEQGGGFCAYADISLCIQFAFVRLNISRVMIIDLDAHQGNGHEKDFANDGRVYTLDMYNAGIYPYDHVAKRYIDQKVELVSGTKTEDYLDQLDKALKVAESRFQPQLIVYNAGTDILDGDPLGRLKISPQGVVIRDEKVFRFAKDQSIPLLMLTSGGYMKSSARVIADSIINLSNKNLIELGSQLG

SEQ ID NO: 16765 - protein, 353 aa, Oryza sativa
  Clone ID: TF_OSC28316j.C1.p2.fg
MLEKDRIAYFYDDNLGEDCPVFDNLFEFCQIYAGGTLDAARRLNHKTCDIAINWAGGLHHAKKCEASGFCYINDLVLGILELLKYHARVLYIDIDVHHGDGVEEAFYFTDRVMTVSFHKYGDFFFPGTGDIKDIGEREGKYYAINIPLKDGIDDSGFTRLFKTVIAKVVETYLPGAIVLQCGADSLARDRLGCFNLSIEGHAECVKFVKKFNIPLLVTGGGGYTKENVARCWAVETGVLLDTELPNEIPDNEYIKYFAPDYTLKVSNVNMDNLNSKSYLSSIKVQVMESLRAIQHAPGVQMQEVPPDFYIPDIDEDELDPDERVDQHTQDKQIHRDDEYYEGDNDNDHEDGAR

SEQ ID NO: 16766 - protein, 623 aa, Oryza sativa
  Clone ID: TF_OSC400432j.C1.p32.fg
MASDMRSLNSQKGQSCGVSDQACHSKSKSGNDGKPSHAKANGVSSLSGSHNDEKILKENSGACNLNSDHANPLSVDGTKVSTARSELIDSSGHDGCLHVKNESCMACDDLLQESDKEQPGGTLEDLFSFNDEEDDDSDWEPSARLALSRWFCLNCTVPNMEGFTHCQNCDELKGSVVVGYDAFKAHLAQAALLSADAALPSVSTAVGFDERMLLHSEIEIKPNPHPERPDRLRAIAASLAAAGIFPSKCVMVPPREITKEELLRVHTSDHIDSVEQTKNMLYSYFTSDTYANGHSACAAKLAAGICADLANLIVSGRVRNGFAMVRPPGHHAGVKQAMGFCLHNNAAVAALAAQRAGAKKVLIVDWDVHHGNGTQEIFDGDNSVLYISLHRHEDGSFYPGTGAANEVGVMDGQGFSVNIPWSRGGVGDNDYIFAFKHVVLPIAAEFAPDITIISAGFDAARGDPLGCCDVTPAGYSRMASMLTACSQGKLLVILEGGYNLRSISSSATEVVKVLLGDSPVYDTDATEPSEEGIQTVLQVLSIQQQFWPVLVPSFASVLALQRSVFSRYTTEVNKMKRKHAGGAGPFWWKWGSKRLLYEVLFEGRCLRKTKDTGKEKLNDEAEP

SEQ ID NO: 16767 - protein, 384 aa, Oryza sativa
  Clone ID: TF_OSC400156j.C1.p3.fg
MAASGEGASLASAAGGEDGRRRRVSYFYEPSIGDYYYGQGHPMKPHRIRMAHSLVVHYGLHRLLELSRPYPASDADIRRFHSDDYVAFLASATGNPALLDARAVKRFNVGEDCPVFDGLFPFCQASAGGSIGAAVKLNRGDADITVNWAGGLHHAKKGEASGFCYVNDIVLAILELLKFHRRVLYVDIDVHHGDGVEEAFFTTNRVMTCSFHKYGDFFPGTGHITDVGAGEGKHYALNVPLSDGIDDDTFRDLFQCIIKKTAVAVGVEPDNKLPYNDYYEYFGPDYNLHIQPRSVENLNSTKDLENIKSMILDHLSKIEHVPSTQFHDRPSDPEAPEQEEEDMDKRPPQRSRLWSGGAYESDTEDPDNMKTETNDLSASSVMKV

SEQ ID NO: 16768 - protein, 371 aa, Oryza sativa
  Clone ID: TF_OSC10062j.C1.p2.fg
MGHNKEAHPETNKRVPAIVDALEKLELTSKHRGSQVLEIQDFQPASLDDIALVHSRSYITGLEKAMSRASDEGLIFIEGTGPTYATQTVMIYAHSLLFLFPQCFSRWKTFQECLLSAGAGITLVDSVVAASKLGPKPPLGFALVRPPGHHAVPEGPMGFCVFGNIAVAARYAQNQHGLKRVMIIDFDVHHGNGTCDAFYEDPDIFFLSTHQLGSYPGTGKIHQVGQGNGEGTTLNLPLPGGSGDYAMRCAFDEVIAPAAQRFKPDIILVSAGYDAHALDPLAGLQFTTGTFYMLAARIREVAAELCGGRCVFFLEGGYNLESLSSSVADTFRAFLGEPSLAARFDDPAMLYEEPTRKIREAIDKAKHLHSL

SEQ ID NO: 16769 - protein, 539 aa, Oryza sativa
  Clone ID: TF_OSC421577j.C1.p6.fg
MDPSSAGAGGNSLASASCGDAQKRRVCYFYDPEVGNYYYGQGHPMKPHRVRMTHALLAHYGLLAPAKMQVLRPLPARDRDLCRFHSDDYVAFLRAVTPETQFDQIRSLRRFNVGEDCPVFDGLYAYCQTYAGASVGAAVKLNHGTHDIAINWSGGLHHAKKSEASGFCYVNDIVLAILELLKLHERVLYIDIDIHHGDGVEEAFYTTNRVMTVSFHKFGDYFPGTGDIRDIGYSEGKYYCLNVPLDDGIDDDSYQSIFKPIISKVMEMYRPGAVVLQCGADSLSGDRLGCFNLSGKGHAECVKFMRSFNVPLLLLGGGGYTIRNVARCWCYETGVALGEELREKLPYNEYYEYFGPEYSLYVAASNMENRNTNKQLEEIKCNILDNLSKLQHAPSVQFEERIPETKLPEPDEDQDDPDERHDPDSDMLLDDHKPMGHSARSLIHNIGVKREITETETKDQHGKRLTTEHKVPEPMADDLGSSKQVPATSSYATDSCMLLVTYSEVLYDCFFCRSLQITTVSFVEEFQSVQAILDVETLV

SEQ ID NO: 16770 - protein, 508 aa, Oryza sativa
  Clone ID: TF_OSC17824j.C1.p4.gm
MDASAGGGGNSLPTAGADGAKRRVCYFYDAEVGNYYYGQGHPMKPHRIRMTHALLAHYGLLDQMQVLKPHPARDRDLCRFHADDYVAFLRSVTPETQQDQIRALKRFNVGEDCPVFDGLYSFCQTYAGGSVGGAVKLNHGHDIAINWAGGLHHAKKCEASGFCYVNDIVLAILELLKYHQRVLYVDIDIHHGDGVEEAFYTTDRVMTVSFHKFGDYFPGTGDIRDIGHSKGKYYSLNVPLDDGIDDESYQSLFKPIMGKVMEVFRPGAVVLQCGADSLSGDRLGCFNLSIRGHAECVRFMRSFNVPLLLLGGGGYTIRNVARCWCYETGVALGHELTDKMPPNEYFEYFGPDYTLHVAPSNMENKNTRQQLDDIRSRLLDNLSKLRHAPSVQFQERPPEAELPEQDEDQEDPDERHHADSDVEMDDVKPLDDSGSSYSGCSGTRLQFCLMTIHCGAAAVLLGLCCLPGGATPRVGQHKCRHTTLLQHALHNFIALTMVDLIWRKGHQS

SEQ ID NO: 16771 - protein, 528 aa, Oryza sativa
  Clone ID: TF_OSC900126j.C1.p11.fg
MDASAGGGGNSLPTAGADGAKRRVCYFYDAEVGNYYYGQGHPMKPHRIRMTHALLAHYGLLDQMQVLKPHPARDRDLCRFHADDYVAFLRSVTPETQQDQIRALKRFNVGEDCPVFDGLYSFCQTYAGGSVGGAVKLNHGHDIAINWAGGLHHAKKCEASGFCYVNDIVLAILELLKYHQRVLYVDIDIHHGDGVEEAFYTTDRVMTVSFHKFGDYFPGTGDIRDIGHSKGKYYSLNVPLDDGIDDESYQSLFKPIMGKVMEVFRPGAVVLQCGADSLSGDRLGCFNLSIRGHAECVRFMRSFNVPLLLLGGGGYTIRNVARCWCYETGVALGHELTDKMPPNEYFEYFGPDYTLHVAPSNMENKNTRQQLDDIRSRLLDNLSKLRHAPSVQFQERPPEAELPEQDEDQEDPDERHHADSDVEMDDVKPLDDSGRRSSIQNVRVKRESAETDAADQLLWLMCAQRCDGNRVAAENTKGTEPAADGVGSSKQTVPTDASAMAIDEPGSLKVEPDNSNKLQDQPSVHQKT

SEQ ID NO: 16772 - protein, 352 aa, Oryza sativa
  Clone ID: TF_OSC9612j.C1.p1.fg
MARAAAAGAPPPGAGRVGWRLGLACLAYLALWRMGGVFIHGGGGRSGGHWRGWRRLADVRGRRPVGRGSRATARHVLREVGRDDVVVVDGRAVSAQFAMAGVDPGTATVAGRRVYVRRPVGRGGTGVNGAKRRPVFDGLYSFCQTYAGGSIDGAIKLNHGHDIAINTLELACAATPSPSPTALPPPTPTSSSFSHLLGLSDPKTVGQGRGREPRRRPPAPTLTRRHPAPLLVTMPPAPSSMSPAAHYSAPDGRTLLLPRRSRSAPPPATVAAWEDGSERPCGTGNRCPTVSPRASASSPSSSSSTRRPPTPCAASPPPTPPSPMASAASSPVAYAALAGGLRSFPLRPEKIE

SEQ ID NO: 16773 - protein, 456 aa, Oryza sativa
  Clone ID: TF_OSC28291j.C1.p2.fg
MATGGNSLPSPSCADDKKRRVCYYYDPGIAHIKFSDDHVMVPARVAMAHSLVGVYGMLGDMRRLRTRPATEAEIRRFHSPEYVDLLRDLTPESYFNDAALRQKAEDDHGIGGDDDCPAFDRLWKYCRGYPGGSFAAARALVDGASDIAINWSGGMHHASACKATGFCYVNDIVLAINELLGTFRRVIYVDIDAHHGDGVQNAFLDSNRVMTLSFHRYGKITPHKDFFPGSGAINEIGDGAGEHYSVNVPLDAGVRDDVYHTLFKPIVGKAMEVFQPEAIVLQCGADSLSGDRLGGMELSVRGHAECVSFLRGFNLPLLLVGGGGYTINHVASAWCYETAVAVGKERKLPDDIEIPSHGYELMYKNQGNKLHYKTSTATAARKRSSSTEVTKGKVLEHLSQVKRAPSVQFQERRGGDNAAGVGLYYERPPSLEDDEPAQRLHRLCFPGLTKRIRLND

SEQ ID NO: 16774 - protein, 342 aa, Oryza sativa
  Clone ID: TF_OSC24451j.C1.p3.fg
MKPHRIRMAHSLVVHYGLHRLLELSRPYPASDADIRRFHSDDYVAFLASATGNPALLDARAVKRFNVGEDCPVFDGLFPFCQASAGGSIGAAVKLNRGDADITVNWAGGLHHAKKGEASGFCYVNDIVLAILELLKFHRRVLYVDIDVHHGDGVEEAFFTTNRVMTCSFHKYGDFFPGTGHITDVGAGEGKHYALNVPLSDGIDDDTFRDLFQCIIKKTAVAVGVEPDNKLPYNDYYEYFGPDYNLHIQPRSVENLNSTKDLENIKSMILDHLSKIEHVPSTQFHDRPSDPEAPEQEEEDMDKRPPQRSRLWSGGAYESDTEDPDNMKTETNDLSASSVMKV

SEQ ID NO: 16775 - protein, 510 aa, Oryza sativa
  Clone ID: TF_OSC421577j.C1.p3.fg
MDPSSAGAGGNSLASASCGDAQKRRVCYFYDPEVGNYYYGQGHPMKPHRVRMTHALLAHYGLLAPAKMEVLRPLPARGIDLCRFHSDDYVAFLRAVTPETQLGQVRALRRFNIGPDCPVFDGLYAYCQTYAGASVGAAVKLNHGTHDIAINWSGGLHHAKKSEASGFCYVNDIVLAILELLKLHERVLYIDIDIHHGDGVEEAFYTTNRVMTVSFHKFGDYFPGTGDIRDIGYSEGKYYCLNVPLDDGIDDDSYQSIFKPIISKVMEMYRPGAVVLQCGADSLSGDRLGCFNLSGKGHAECVKFMRSFNVPLLLLGGGGYTIRNVARCWCYETGVALGEELQEKLPYNEYYEYFGPEYSLYVAASNMENRNTNKQLEEIKCNILDNLSKLQHAPSVQFQERIPETKLPEPDEDQEDPDERHDPDSDMVLDDHKPTGHSARSLIHNIGVKREITETETKDQHGKRLTTEHKGPEPMAEDLGSSKQAPEFTIVSFVEEVHNVQAILDVEALV

SEQ ID NO: 16776 - protein, 166 aa, Oryza sativa
  Clone ID: TF_OSC401324j.C1.p28.gm
MLEKDRIAYFYDGHAECVKFVKKFNIPLLVTGGGGYTKENVARCWAVETGVLLDTELPNEIPDNEYIKYFAPDYTLKVSNVNMDNLNSKSYLSSIKVQVMESLRAIQHAPGVQMQEVPPDFYIPDIDEDELDPDERVDQHTQDKQIHRDDEYYEGDNDNDHEDGAR

SEQ ID NO: 16777 - protein, 131 aa, Oryza sativa
  Clone ID: TF_OSC401369j.C1.p85.fg
MVPARVAIAHSLVSVYGMLGDMRRLRTRPTTEAEIRRFHLPEYVNLIRNLTPKSYTNDVVLRQKAEDDHGIGLLGDDNDCPAFDRLWKYCRGYAGGSLAAARTLVNGASGSHRRRIVMFLFPFRSHIAPML

SEQ ID NO: 16778 - protein, 185 aa, Oryza sativa
  Clone ID: TF_OSC33840j.C1.p1.fg
MDPSSAGAGGNSLASASCGDAQKRRVCYFYDPEVGNYYYGQGHPMKPHRVRMTHALLAHYGLLAPAKMEVLRPLPARGIDLCRFHSDDYVAFLRAVTPETQLGQVRALRRFNIGPDCPVFDGLYAYCQTYAGASVGAAVKLNHGTHDIAINWSGGLHHAKKSEASGFCYVNDIVLAILELLKLHE

SEQ ID NO: 16779 - protein, 481 aa, Oryza sativa
  Clone ID: TF_OSC10030j.C1.p2.fg
MAGGGGNSLPSPSCGDDKKRRVCYYYDPGISTVDYGEGHVMVPHRVTMAHNLVAAYGMLGDMRRLRTAPATAAELADFHDEGYLALLQDLTPDGCGGDDGVGDMARARGIYAVEGKGGGRGVDNPVFDRLWDYCLRYSGGSLAAARTLGSGTADIAINWSGGMHHACRGGARGFCYVNDIVLAIRELLAHFRRVLYVDIDVHHGDGVQAAFEASNRVMTVSFHQHGGGFFPGSGAVADVGKKGPGRYCALNVPVSVGIGDEEYHRLFEPIMARVMEVFQPEAVVLQCGADSLAGDRLGELNLTTRGHAQCVSFIRSFNLPLLLLGGGGYTINHVASCWCNETAVAIGKEIPNDIPKHGFDVFYKNQEYKLHYKLETKHLHRNRNTANSIDGIRMAAMENLSKLKLEAAASVQFEERRHRSINVGDLYYDPREQEEEEESPTARLHRKLYFEPTGDQESPYTKHRCNVQPGESSSRKQRKLK

SEQ ID NO: 16780 - protein, 78 aa, Oryza sativa
  Clone ID: TF_OSC33846j.C1.p1.fg
MEMYRPGAVVLQCGADSLSGDRLGCFNLSGKGHAECVKFMRSFNVPLLLLGGGGYTIEMLHAAGVTRNTCCYSYGFIL

SEQ ID NO: 16781 - protein, 123 aa, Oryza sativa
  Clone ID: TF_OSC418633j.C1.p11.fg
MDAVGGGKVKKAAGGRKAGGPRKKAVTRSVKAGLQFPVGRIGRYLKNRRPVDLISAAPSPLAAPTLFPTTSVTPSTLFPIASVTPPPPPHWALLSASVMMAAAACRRRRPHEGDGEAGELTPP

SEQ ID NO: 16782 - protein, 1116 aa, Oryza sativa
  Clone ID: TF_OSC400014j.C1.p15.gm
MTMADGAGRDRSGLGPGKRKERVRPESTSRVLARAGSSDTTGLQCPYGQYEAPNCAVAVSCRLSSGHRAGRTTTRFSPASYNRKKGWLDNVLKKEDDTRSAVVVVRAVAGPELGGARQERLRELKTWFSGPLHAESAPGCGRSAAGESGDGRAAGKLQVAPCESRHRGRGDWWVWAAALLRLCPLLLAHHLLPEAGRRGLGGDDDDSPSSSPRLPPASSPTSPAGEEGDRREEGRRARKKAVTRSVKAGLQFPVGRIGRYLKKSRPVDLLSAAPSPSAAPTLFPTASVTPPTLFPTASVTPPTLFPTHAPQDIPLYPSSADMARKEGEGLDLVAMEEELDLYSWEPVVTLAISLLDRAISYLGEDTSWAEGRNKNRFGGFSSQMFYYLQPARGRFQDFRLRLINWPKSYCCGYEEIWKFRIAVELLEDLIEEIEHRRLEEDGRIPALFMNAKAKIAFKFATNDYFREEWDRLFQEFTTFRLEDLITDIEHLRLEESGKKISNKKFARSPDQYKQQARLFFLLERGVSRLRDQLPAVVEHVVSQDRELVDLEKEELHAELVGRDREKKQIVQCLIISTAGAEIKRVASAGHIQEYLSVRISRHCHNGKTPVIANEPGSAGADTAAGAAASIARAELPLPEPERVSDPAVPLPPPALVSEPPPTTATVAKVEDEEKPTAVAHQEAAPRDYAFQRALKTAENKSDPCGGRYIYVHELPPRFNDDMLRECERLSLWTNMCKFMSNEGLGPPLGNEEGVFSNTGWYATNQFMVDVIFRNRMKQYECLTKDSSIAAAVFVPFYAGFDVARYLWGHNISTRDAASLDLIDWLRKRPEWNVMGGRDHFLVGGRIAWDFRRLTDEESDWGNKLLFMPAAKNMSMLVVESSPWNANDFAIPYPTYFHPAKDADVLLWQDRMRSLERPWLFSFAGAPRPDDPKSIRSQLIDQCRTSSVCKLLECDLGESKCHSPSAIMNMFQNSLFCLQPQDGVRKGNVSIEDRLKSIHPDMVKKMREEVISLIPRVIYADPRSKLETLKDAFDVSVEAIINKVTQLRRDIIEDHEDKDFVEENSWKYDLLEEGQRTIGPHEWDPFFSKPKDKGGDSTNPSTNAAKNSWKNEQRGQN

SEQ ID NO: 16783 - protein, 153 aa, Oryza sativa
  Clone ID: TF_OSC33599j.C1.p1.fg
MAPKAEKKPAAKKPAEEEPAAEKAEKAPAGKKPKAEKRLPAGKGEKGSGEGKKAGRKKGKKSVETYKIYIFKVLKQVHPDIGISSKAMSIMNSFINDIFEKLAGESAKLARYNKKPTITSREIQTAVRLVLPGELAKHAVSEGTKAVTKFTSA

SEQ ID NO: 16784 - protein, 150 aa, Oryza sativa
  Clone ID: TF_OSC414554j.C1.p2.fg
MARTKQTARKSTGGKAPRKQLATKSDFDRWSYITISVQAARKSAPTTGGVKKPHRYRPGTVALREIRKYQKSTELLIRKLPFQRLVREIAQDFKTDLRFQSHAVLALQEAAEAYLVGLFEDTNLCAIHAKRVTIMPKDIQLARRIRGERA

SEQ ID NO: 16785 - protein, 232 aa, Oryza sativa
  Clone ID: TF_OSC100615j.C1.p3.np
QTRTKQTACKRDSRKQLATKATCKSAPATGGVKKPHRFRPGTVALREIRKYQKSTELLIRKLPFQRLVREIAQDFKTDLRFQSSAVAALQEAAEAYLVGLFEDTNLCAIHAKRVTIMPKDAARKSAPATGGVKKPHRFRPGTVALREIRKYQKSTELLIRKLPFQRLVREIAQDFKTDLRFQSSAVAALQEAAEAYLVGLFEDTNLCAIHAKRVTIMPKDIQLARRIRGERA

SEQ ID NO: 16786 - protein, 153 aa, Oryza sativa
  Clone ID: TF_OSC21552j.C1.p3.fg
MAPKAEKKPAAKKPAEEEPAAEKAEKAPAGKKPKAEKRLPAGKGEKGSGEGKKAGRKKAKKSVETYKIYIFKVLKQVHPDIGISSKAMSIMNSFINDIFEKLAGESAKLARYNKKPTITSREIQTAVRLVLPGELAKHAVSEGTKAVTKFTSS

SEQ ID NO: 16787 - protein, 40 aa, Oryza sativa
  Clone ID: TF_OSC401577j.C1.p1.hg
AEAYLVGLFEDTNLCAIHAKRVTIMPKDIQLARRIRGERA

SEQ ID NO: 16788 - protein, 118 aa, Oryza sativa
  Clone ID: TF_OSC420432j.C1.p1.fg
MSQRIHFLSRCQFESSQPLDPGVMVPKAEKKPAEKKPAEEKVHPDIGISSKAMSIMNSFVNDIFEKLEQEAARLARYNKKPTITSREIQTSVRLVLPGELAKHAVSEGTKAVTKFTSS

SEQ ID NO: 16789 - protein, 136 aa, Oryza sativa; identical to SEQ ID NO: 6937
  Clone ID: TF_OSC400405j.C1.p21.fg

SEQ ID NO: 16790 - protein, 137 aa, Oryza sativa
  unsure (1)..(137): unsure at all Xaa locations
  Clone ID: TF_OSC400405j.C1.p24.gp
MARTKQTARKSTGGKAPRKQLATKAARKSAPATGGVKKPHRFRPGTVALREIRKYQKSTELLIRKLPFQRLVREIAQDFKTDLRFQSSAVAALQEAAEAYLVGLFEDTNLCAIHAKRVTIMPKDIQLARRIRGERAX

SEQ ID NO: 16791 - protein, 155 aa, Oryza sativa
  Clone ID: TF_OSC401685j.C1.p36.fg
MAPKAEKKPAAKKPAEEEPAAEKAEKAPAGKKPKAEKRLPAGKGEKGSGEGKKDRAGRKKAKKSVETYKIYIFKVLKQVHPDIGISSKAMSIMNSFINDIFEKLAAEAAKLARYNKKPTITSREIQTSVRLVLPGELAKHAVSEGTKAVTKFTSA

SEQ ID NO: 16792 - protein, 135 aa, Oryza sativa
  Clone ID: TF_OSC13637j.C1.p1.gm
MVDPTETYNVCLFKVSKGVSRSTESTSSRKSVETYKIIFKVLKQTLTDTGVLSKAMPTMNSFFINIFEKLIQNTIKSIFGNMSALEWARVIVIETGLVQPSVWFGLNNYGGGALRIRGDPSTVASRTQVFNPLGT

SEQ ID NO: 16793 - protein, 417 aa, Oryza sativa
  Clone ID: TF_OSC401232j.C1.p26.fg
MAPKAEKKPAEKKPAAGEEKSAEKAPAGKKPKAEKRLPASKASSKEGGAGDKKGRKKAKKSVETYKIYIFKVLKQVHPDIGISSKAMSIMNSFINDIFEKLAQEAARLARYNKKPTITSREIQTSVRLVLPGELAKHAVSEGTKAGYHFTQQRKNLKMSSHHLALLRKVIGDGGDAVIGDGGGGLQRLPRRRPWSRGGGRAAPESTPPAKYARGRRPRRGSGGHAPHPESGGGGGGGGGAREWRDVGTTMRGGGGRGRGKSAQAADRCCRRMPMDGGPPTPTLAEVLSLSPPTTPRSRAPSSSRRRRMAAQTLATTAAGGQTAAEVARPPDSTPPAESGEEGGVGVHTGEEGKAAAAGEGSDPFFPIIAAPSLPSPTQPPLLLPRHRGALLVTEEIGRRRRCRWEAATARDGDGADR

SEQ ID NO: 16794 - protein, 99 aa, Oryza sativa
  Clone ID: TF_OSC3090j.C1.p1.fg
MRRRGGALEYGGYKRYVWRVLKQVHPDLGASAQTMDVLDMMMADMFERLADEASRLFKLSGRLTLTFREVQSAVRLVLPADLANHAISEGTKAISNYLS

SEQ ID NO: 16795 - protein, 146 aa, Oryza sativa
  Clone ID: TF_OSC402805j.C1.p30.fg
MARTKHPAVRKSKAEPKKKLQFERSPRPSKAQRAGGTPRQQTKQRKPHRFRPGTVALREIRKFQKTTELLIPFAPFSRLVREITDFYSKDVSRWTLEALLALQEAAEYHLVDIFEVSNLCAIHAKRVTIMQKDMQLARRIGGRRPW

SEQ ID NO: 16796 - protein, 153 aa, Oryza sativa
  Clone ID: TF_OSC401685j.C1.p34.fg
MAPKAEKKPAAKKPAEEEPAAEKAEKAPAGKKPKAEKRLPAGKGEKGSGEGKKAGRKKGKKSVETYKIYIFKVLKQVHPDIGISSKAMSIMNSFINDIFEKLAAEAAKLARYNKKPTITSREIQTAVRLVLPGELAKHAVSEGTKAVTKFTSS

SEQ ID NO: 16797 - protein, 124 aa, Oryza sativa
  Clone ID: TF_OSC400544j.C1.p6.gm
MVDPTETYNVCLFKVSKGVSRSTESTSSRKSVETYKIIFKVLKQTLTDTGVLSKAMPTMNSFFINIFEKLIQNNNKIYLWQYERARVQPSVWFGLNNYGGGALRIRGDPSTVASRTQVFNPLGT

SEQ ID NO: 16798 - protein, 320 aa, Oryza sativa
  Clone ID: TF_OSC419721j.C1.p9.fg
MSVQGLDLKTDLSLWVFGHTSVFRCCKPEQSAAAIVSFSLFRNCGGDIEPGPWRAYEVKKRMGSWIVNDSQQIRFWEDKWLGVTCYMTANLLATAHVLGELKIRFVILETGVGVPVMLFFTARDGNGESLQLVYFSIWKSYRSPMIVTGKPKFFFRWLVLSKLLASQLEERLPGSNLPPRYVFRHDTLHISIAKVLILLNCAKLTASVLIMSAARKSAPTTGGVKKPHRYPPWNCCSSYQKSTELLIRKLPFQRLVREIAQDFKTDLRFQSHAVLALQEAAEAYLVGLFEDTNLCAIHAKRVTIMPKDIQLARRIRGERA

SEQ ID NO: 16799 - protein, 393 aa, Oryza sativa
  Clone ID: TF_OSC400542j.C1.p17.fg
MAGKGGKGLLAAKTTAAKSAEKDKGKKAPVSRSSRAGLQEGGSMPVAPTVVVSATMEANHDRTLFPVGRIHRQLKQRTQANGRVGATAAVYSAAILEYLTAEVLELAGNASKDLKVKRITPRHLQLAIRGDEELDTLIKGTIAGGVVKSFVFFVTFHYFTLQADWIQHRYTVRGGWSTTQIRAKATNPNERLSFCSKSILASITNTSCPPAVYPQKLTYPLLSPLAVIQWCDCEGGGACMEGLTSEQMVAFQEAFLLFDKNGDGCITLEELAAVTRSLGLEPTDQELNDMMREVDTDGNGIIDFQEFLSLIARKMKDGDGDEELKEAFEVLDKDQNGFISPTELRTVMTNLGEKMTDEEVEQMIREADTDGDGQVNYDEFVIMMKNAERKISG

SEQ ID NO: 16800 - protein, 148 aa, Oryza sativa
  Clone ID: TF_OSC415633j.C1.p2.fg
MDVGVGGKAAKKAVGRKLGGPKKKPVSRSVKAGLQFPVGRIGRYLKKGRYAQRVGTGAPVYLAAVLELAGNAARDNKKNRIIPRHVLLAIRNDEELGKLLAGVTIAHGGVLPNINPVLLPKKTAEKADKPAKASKDKAAKSPKKQARS

SEQ ID NO: 16801 - protein, 153 aa, Oryza sativa
  Clone ID: TF_OSC21547j.C1.p2.fg
MAPKAEKKPAAKKPAEEEPAAEKAEKAPAGKKPKAEKRLPAGKAEKSSGEGKKAGRKKAKKSVETYKIYIFKVLKQVHPDIGISSKAMSIMNSFINDIFEKLAGESAKLARYNKKPTITSREIQTSVRLVLPGELAKHAVSEGTKAVTKFTSA

SEQ ID NO: 16802 - protein, 153 aa, Oryza sativa
  Clone ID: TF_OSC21552j.C1.p8.fg
MAPKAEKKPAAKKPAEEEPAAEKAEKALAGKKPKAEKRLPAGKAEKSSGEGKKAGRKKAKKSVETYKIYIFKVLKQVHPDIGISSKAMSIMNSFINDIFEKLAGESAKLARYNKKPTITSREIQTSVRLVLPGELAKHAVSEGTKAVTKFTSA

SEQ ID NO: 16803 - protein, 150 aa, Oryza sativa
  Clone ID: TF_OSC413661j.C1.p12.fg
MAPKAEKKPAEKKPAEEKAGEKAPAAGKKPKAEKRLPASKGEKGGEGKKERGRKKAKKSVETYKIYIFKVLKQVHPDIGISSKAMSIMNSFINDIFEKLAGEAAKLARYNKKPTITSREIQTSVRLVLPGELAKHAVSEGTKAVTKFTSS

SEQ ID NO: 16804 - protein, 136 aa, Oryza sativa
  Clone ID: TF_OSC900046j.C1.p14.fg
MARTKQTAKKSTASNVPRKLLVMKVARKSAPTMAGLKKPHRFKPGTVALREIRTYQKSTELLIRKLPFQRLVQEIAQDVRSYVRFQSSAVVALQEAAETYLVGLFKDTNLCVIHAKRVTIMPKDIQLARRIRGEKA

SEQ ID NO: 16805 - protein, 168 aa, Oryza sativa
  Clone ID: TF_OSC900015j.C1.p22.fg
MARTKQTARKSTGGKAPRKQLATKAARKSAPATGGVKKPHRFRPGTVALREIRKYQKSTELLIRKLPFQRLVREIAQDFKTDLRFQSSAVAALQEAAEAYLVGLFEDTNLCAIHAKRVTIMPKDIQLARRIRGLHPCLEQKMSLATCLISLAPNCSLLRFTSNFCKDA

SEQ ID NO: 16806 - protein, 130 aa, Oryza sativa
  Clone ID: TF_OSC100615j.C1.p8.gp
PHEADGVQVRDSRKQLATKATCKSAPATGGVKKPHRFRPGTVALREIRKYQKSTELLIRKLPFQRLVREIAQDFKTDLRFQSSAVAALQEAAEAYLVGLFEDTNLCAIHAKRVTIMPKDIQLARRIRGER

SEQ ID NO: 16807 - protein, 223 aa, Oryza sativa
  Clone ID: TF_OSC401217j.C1.p40.hg
MRGLGNRARLPEPRNFQSLPTPQNAKFSTAPARGLHSTENPAKRARSAPPPLTRGSLPDPTAGAAPPHHSRGSLPDPTAAHSPPNSIYIHPSQTKNPPHPNLATKKIPNSAVVFVAVAARMSGRGKGGKGLGKGGAKRHRKVLRDNIQGITKPAIRRLARRGGVKRISGLIYEETRGVLKIFLENVIRDAVTYTEHARRKTVTAMDVVYALKRQGRTLYGFGG

SEQ ID NO: 16808 - protein, 276 aa, Oryza sativa
  Clone ID: TF_OSC420396j.C1.p17.hg
MPQVLPGGSLLYRSLVRVRLFPSVDFVKDFLSVRGKYPYARGEKNLSKAKRQVPTPIVPWPRRRPNLAAPAGQNFELAASQTTKIPTIPPNHRSAPHATSTIRSSPRDPDPHRPFPPPSNGSRLPTPSSRPLLKPPPLSSPNPTPITTTSSPIPLAFLSLSCVEPPESSSSAAMSGRGKGGKGLGKGGAKRHRKVLRDNIQGITKPAIRRLARRGGVKRISGLIYEETRGVLKIFLENVIRDAVTYTEHARRKTVTAMDVVYALKRQGRTLYGFGG

SEQ ID NO: 16809 - protein, 153 aa, Oryza sativa
  Clone ID: TF_OSC27706j.C1.p2.fg
MAPKAEKKPAAKKPAEEEPAAEKAEKAPAGKKPKAEKRLPAGKAEKGSGEGKKAGRKKAKKSVETYKIYIFKVLKQVHPDIGISSKAMSIMNSFINDIFEKLAGESAKLARYNKKPTITSREIQTSVRLVLPGELAKHAVSEGTKAVTKFTSA

SEQ ID NO: 16810 - protein, 153 aa, Oryza sativa
  Clone ID: TF_OSC21545j.C1.p1.fg
MAPKAEKKPAAKKPAEEEPAAEKAEKAPAGKKPKAEKRLPAGKAEKGSGEGRKAGRKKAKKSVETYKIYIFKVLKQVHPDIGISSKAMSIMNSFINDIFEKLAGESAKLARYNKKPTITSREIQTSVRLVLPGELAKHAVSEGTKAVTKFTSA

SEQ ID NO: 16811 - protein, 260 aa, Oryza sativa
  Clone ID: TF_OSC900138j.C1.p3.gm
MNIKKINIKKTMAADILLHPCHRCNMVRAQPPSPRCTVSPPAGAGGGEKGRAQPLPLPSPWSAASPPTESGGGEGTAAATVITRGRRRLPSRYPPQAGSGEGEGGGKTSESSLVVKSIASLCAKAPAVGEVSCVAAVAWLGGAGSCKTGDDAVVLAAALALLALPDSITNLDTKEIRKYQKNTELLIRKLPFQRLVREIAQLFKHDMRFQSHAVLALQEAAEAYLVGLFEDTNLCAIHSKRVTIMSKDVQLARRIRGERL

SEQ ID NO: 16812 - protein, 103 aa, Oryza sativa
  Clone ID: TF_OSC400999j.C1.p2.fg
MAPRSVAISGRGTSGARRHRIVFRGYIQGIAKPVIRRLARKGGVKRISGLIYKETRGVLEIFLKNVICDAITYTEHAHRKTVMAMDVVYALKLQGRTIYDFGG

SEQ ID NO: 16813 - protein, 136 aa, Oryza sativa; identical to SEQ ID NO: 6802
  Clone ID: TF_OSC400785j.C1.p27.fg

SEQ ID NO: 16814 - protein, 650 aa, Oryza sativa
  Clone ID: TF_OSC21550j.C1.p1.fg
MAALTEDILLQIFSRVGSIKDLFKFAVTCRRWLRRFTDPAFLRGLCLDSGEGHRARLLGFFFQQTRFYRCEKMIKMRVTQQSSVCPPTFLPAPWSPLGLTDRTLTSFLAADDDTFNYAEPLAARCGIVLMRLVPRTALMIACSHLLGVCNPITGECHVLPPLNLSGLHRYLTSYAIITSTDSDLDGKQPPSSSSSGRSTFSQLYLVVQHKKDCNEYFYSYSAATCSWSAPTMCVDGRRFSLVGERSAVVHKGAAHWLFIDRVSSATQDDILYKLTAAVDTSEISLTRLPFVLEAHRSSAIPLAVPYPDYSHICQPREKWFNFNRGSMLVLYRSNGVFILDLEKKVMEKLLSRHGKATAERPSSSEGYIWKLSLLVITVTGLTPWQKAQNLNPKKEQPTTTALQKRGPLHIFLCNVSDPHGNASQPSNRKGTGRHTFIHVIDPRDKPLHQSAPTFTHYKLTAPVSSFHTAISQHISTHRSKAKPTDPLPLPEKKREASMAPKAEKKPAAKKPAEEEPAAEKAEKAPAGKKPKAEKRLPAGKGEKGSGEGKKAGRKKGKKSVETYKIYIFKVLKQVHPDIGISSKAMSIMNSFINDIFEKLAGESAKLARYNKKPTITSREIQTSVRLVLPGELAKHAVSEGTKAVTKFTSA

SEQ ID NO: 16815 - protein, 702 aa, Oryza sativa
  Clone ID: TF_OSC21552j.C1.p1.fg
MAALTEDILLQIFSRVGSIKDLFKFAVTCRRWLRRFTDPAFLRGLCLDSGEGHRARLLGFFFQQTRFYRCEKMIKMRVTQQSSVCPPTFLPAPWSPLGLTDRTLTSFLAADDDTFNYAEPLAARCGIVLMRLVPRTALMIACSHLLGVCNPITGECHVLPPLNLSGLHRYLTSYAIITSTDSDLDGKQPPSSSSSGRSTFSQLYLVVQHKKDCNEYFYSYSAATCSWSAPTMCVDGRRFSLVGERSAVVHKGAAHWLFIDRVSSATQDDILYKLTAAVDTSEISLTRLPFGAGGSPLLCVSGDGKLSVACVFPIHMRVWTQQDDTPATWLRTVIRIPLAVPYPDYSHICQPREKWFNFNRGSMLVLYRSNGVFILDLEKKVMEKVMDCLLPLFSDKLNRTAVAYEMDLVEFFVLQLSGYIWKLSLLVITVTGLTPWQKAQNLNPKKEQPTTTALQKRGPLHIFLCNVSDPHGNASQPSNRKGTGRHTFIHVIDPRDKPLHQSAPTFTHYKLTAPVSSFHTAISQHISTHRSKAKPTDPLPLPEKKREASMAPKAEKKPAAKKPAEEEPAAEKAEKAPAGKKPKAEKRLPAGKGEKGSGEGKKAGRKKGKKSVETYKIYIFKVLKQVHPDIGISSKAMSIMNSFINDIFEKLAGESAKLARYNKKPTITSREIQTSVRLVLPGELAKHAVSEGTKAVTKFTSA

SEQ ID NO: 16816 - protein, 438 aa, Oryza sativa
  Clone ID: TF_OSC413661j.C1.p14.gm
MARGLAVASLLLVALAVVARPPLALAVKDYPADASAVAKKSPASKADTPTTGKESVAGKTDVVTVAKKSPAGKADTSATYKEYAAAKADAVTVTKKSPAAKADTPTTSKESAAGKANAATVAKKSPAGKADTSATATGKEYAAAKADAITVTKKSPAAKADMPATGKESIAKVDAATVAKESTAGKTGKKAAAKEFTMSGKTNTEADAATVAKKSLAGKAGTPATGKEYAVTKADAATVAKKSPADKTGKESVVAKADTATVTKKSTAGKTGKKVAAKESPASHKTSMEAATKKSTANKTGTETAAKESTVSGKTDTETAAKESTAPGKTDTTAAVKESTAGKGDAPAMAEKSAAGPKVDKMRTCQTGERRDVVTHHEEIDGMFEKLVGEAAKLARYNKKPTITSREIQTSVRLVLLGELAKHAVSEGAKAVTKFTSS

SEQ ID NO: 16817 - protein, 102 aa, Oryza sativa
  Clone ID: TF_OSC420440j.C1.p11.fg
MAPKAEKKPVEKKPKAEKRLSESKASSKEGGAGDKKGRKKAKKSVEIYIFKVLKQVHPDIGISSKAMSIMNSFINDIFEKLAQEAAHLARYNKKPIATSREI

SEQ ID NO: 16818 - protein, 906 aa, Oryza sativa
  Clone ID: TF_OSC401115j.C1.p25.gm
MEMETLQLRAGTGCLWVCLLLCVAPSLVDYSIPLASVHRRSGEQVSGTSAFDVLHREKAAIRFLGSASCDCSLFNRDGSPSSPLACCTPSSTLATASSSCRATGLSATSIRVNLWLTAMKCFWVSTGKPMGVLNADQQKEFDEATTLFVGCILSVLGDRLVEVYMHMTDATELWDALNTKFGATDASNDLYIMEQFHVYKMADNRSVVEQAHKIQTMAKELKLLKCVLPDKFVAGCIIAKLSPSWRGFGTALKHKRQEYFVEGLIASLDVEEKAREKDVASKGDGGQSSTNVVHKAQNKSKGKYKAQQTTNFNKKKKNNNPNQDERTCFVCGQPGHLARKCPQRKGMKAPAGQTSKSANVTIGNTGDGSGYGRTGFHRPNGEWVTCFCSWCWHGRSEVYFGKDRAAEERVAYYWKEDVRSEMDSIIANGTWEVTERPYGCKPVGCKWVFKKKLRPDASHGLLIHQMDVKTTFLNEELDEEIYMDQPDGFVVEGFAVNEADKYVYYRHGGGEGVILCLVCLLLCVASSLVDYSIPLASVHRRSGEQVSGISAFDVLHWEKAAIRFLGSASCDCSLFNRDEGDAADRASNLTDATVDSLIESIIIKDGVKAKFFFNIMSLANSAGEKLLAFSQYILPMKFLERLLVKRLGWHVGKEIFMISGDTSADDREVAMDQFNNSADAKVLFGSIKACGEGISLVGASRVIILDVHLNPSVTRQAIGRAFRPGQQKKVFVYRLVAADSPEVKFHETAFKKEVIPKLWFEWSELCTTEDFKLNQVDIDDSEDELLEANAIRQDIKALYRRVGKGLSAAAAASKRRWTLALAAKKVVGRKLGGPKKPVPRSVKAGLQFLVSRYLENGRHAQRVGTGTPVYLAAVLGVAVAAAARRREGSSSSAGTPMAVAATAARW

SEQ ID NO: 16819 - protein, 280 aa, Oryza sativa
  Clone ID: TF_OSC4904j.C1.p4.gm
MPSLTYAVRLASGRSVPSVPWTGGGPLMWSRSTVDRPPRAAEMWGPLTGAAPSLDDLDPFLGTGGEGGHDGVGSAGVSSCPAAGFTAAQEGTAHCPLGVRAPAPADGVEVGTGHGGSGGREEAAAPAAGMRRQSTRGRNTGSGDGEESAAPAAGMRRQSTRGRSTGSGDGEESEALAAAVHAGKISREDAAARREIRKYQKNTELLIRKLPFQRLVREIAQHFKHDMRFQSHAVLALQEAAEAYLVGLFEDTNLCAIHSKRVTIMSKDVQLARRIRGERL

SEQ ID NO: 16820 - protein, 266 aa, Oryza sativa
  Clone ID: TF_OSC414180j.C1.p16.gm
MDDVGGGKVKKAAGGRKAGRPRKKAVTRSVKAGLQLPVSRIGRYLKKSRPVDLLSAASSPSAASTLFHAASMMPPTLFRTACLRNSVRLRTCTGRRAIKFLGSASSATALVLRGYCCCIGAFTKMSTEIGDKKMNDINGGNTALKSSAPSQPPKKGMKGYGSATAARPLPRLHLTNLAAAAAPDLRCPSRAARCPRPSRASTTASRSSPTRRPPPPGGPSPLPPPTGGPPRPRLRARRYDVVDESGTDNGEEYDATDDGECDPKTQ

SEQ ID NO: 16821 - protein, 115 aa, Oryza sativa
  Clone ID: TF_OSC4904j.C1.p5.fg
MQAAARKSAPCIGGVKKPHRYRPGTVALREIRKYQKNTELLIRKLPFQRLVREIAQLFKHDMRFQSHAVLALQEAAEAYLVGLFEDTNLCAIHSKRVTIMSKDVQLARRIRGERL

SEQ ID NO: 16822 - protein, 313 aa, Oryza sativa
  Clone ID: TF_OSC421349j.C1.p3.fg
MAACQQQIWQEGKQQQHLHHGGYDDLSSVYRGTVVLPRRQGGLAPEPPPPRPSSSSGRSAAAQATAMTIHSEAERRRRERINAHLATLRRILPDAKQDSDRNTIVKQRITKHRNCRLIGPQEKRRNQMREIDSEEMFQEMDKATLLASVVNQVKHLKTRATEATTPSTAATIPPEANEVTVQCYAGGEHTAAARTYVRATVSCDDRPGLLADIAATFRRLRLRPLSADMSCLGGRTRHAFVLCREEEEEEDAAAEARPLKEAVRQALAKVALPETVYGGGGRSKRQRLMMESRYSTAVVHTHVDPQYCWYNSR

SEQ ID NO: 16823 - protein, 383 aa, Oryza sativa
  Clone ID: TF_OSC400522j.C1.p16.fg
MEHHHLLLQLSPPPPPPPLPAAHLMMSPSFFDAGVFADVGGDWMEDLMHLGELFGVGVGGDDDDNGGVDGGVGGGDDRMQEWQNNCEGAGSPDHQPSCGDGDGDGDGDVSPRDGELGDGDGDNSATRKRRDRSKTIVSERKRRVRMKEKLYELRALVPNITKVRTQCLIARVGVAMAAPPCAIANTSLMIAWQMDKASIIADAVVYVKDLQAHARKLKEEVAALEEARPIRPPPPSAAAQRPQRQPRRVAAAAAQLARAADAAAVTTAAAAPHGARVAHVGAAQVGEGRFFVTVECEPAAAAARGGGGGVAAPVCAAVESLSCFTVESSTVGCSPDRVVATLTLKVSEAEEDVSAISECTVKLWVMAALLKEGFRPQPTVQIS

SEQ ID NO: 16824 - protein, 264 aa, Oryza sativa
  Clone ID: TF_OSC419674j.C1.p5.fg
MAGQQPQQQGPPEDDFFDQFFSLTSSFPGAAPGGRAAGDQPFSLALSLDAAAAAEASGSGKRLGVGDDAEGGGSKADRETVQLTGLFPPVFGGGGVQPPNLRPTPPTQVFHPQQSKQGGAAVGPQPPAPRPKLRRERIAERMRALQELVPNTNKTDRAAMLDEILDYVKFLRLQVKVLSMSRLGGAGAVAQLVADIPLSVKGEASDSGGNQQIWEKWSTDGTERQPAQWLTEFEHKMKWKMILMVMFIYLHFSKVEAEALVNGG

SEQ ID NO: 16825 - protein, 528 aa, Oryza sativa
  Clone ID: TF_OSC400961j.C1.p12.fg
MELCLLLAPSLKPCQGLPLTNTAIEASSSSLTNADLKLHLYRLRLSDGGHTMGKRERGDTKQKEDVGLWIRPLRGKEKVRVLGGGCSCGRPLISPCDRRFWSSGSEKEMNEKDATDLEERSEASEHGQALSFHGGAMFLQEAQIASPAAANNALTSMANPFPIPPGLWNPPSHNMGLGETSFSSLLGMLSAGAPPPFVATPGFVDSTAGFPCYNGGNLGAMINHPFPGIHQPLGDFQNGVEPCREIEDIEIEGSKNVSQTGEKQQGDGETTHAVDSSSKELSMPGRNGGAGHDEGTRVSCSKKRKRSGQDGGVKHAEGGEQLATVGSAQKNEDDEKGEPKRSSVASGKSSGKQIKDNAGSPKEDYIHVRREKISERMKYLQDLVPGCSKVTGKAVMLDEIINYVQSLQRQVEFLSMKLASVNPTLDFNIERILSKDIFQCRGTTASSAFGFFPDIVHPRLHPPKYTQVGMPSIVNPTDAFGRVIHAPLGTNSAFKEPKHQMPNNLNGEFQDVIEMPFTHDHHGSNDQP

SEQ ID NO: 16826 - protein, 68 aa, Oryza sativa
  Clone ID: TF_OSC32507j.C1.p1.fg
SDCGGGRKPEAGGGERKKERMKKMMRTLKGIIPGGDRMDTPAVLDEAVRYLKSLKVEVKKLGVRGSSS

SEQ ID NO: 16827 - protein, 330 aa, Oryza sativa
  Clone ID: TF_OSC401478j.C1.p51.fg
MPGELNFHLLHSLDAAAAAASSTAASASSQPTVDYFFGGADQQPPPPAAMQYDQLAAPHHHQTVAMLRDYYGGHYPPAAAAAAATEAYFRGGPRTAGSSSLVFGPADDESAFMVGPFESSPTPRSGGGRKRSRATAGFHGGGPANGVEKKEKQRRLRLTEKYNALMLLIPNRTKEDRATVISDAIEYIQELGRTVEELTLLVEKKRRRREMQGDVVDAATSSVVAGMDQAAESSEGEVMAAAAMGAVAPPPRQAPIRSTYIQRRSKETFVDVRIVEDDVNIKLTKRRRDGCLAAASRALDDLRLDLVHLSGGKIGDCHIYMFNTKVTTTN

SEQ ID NO: 16828 - protein, 177 aa, Oryza sativa
  Clone ID: TF_OSC415729j.C1.p2.fg
MAEEDNLALSVVCERSPGTAVEAASGRPPKAGSERARRQTMSRLYDELGALLPNLPPRASTTRIVEEAIACVGELRARTAELEAYSAVAAAAGRAARDGPAEVVASGKTSCFAVRLRAARARPGALTRVLEVFQRHGVAVLAATVARDGEETAVTVTTAAVAPRVLETIKAEIICAA

SEQ ID NO: 16829 - protein, 317 aa, Oryza sativa
  Clone ID: TF_OSC400284j.C1.p34.fg
MVKEEEIITEAAGARGYMEMLGLGEEAADYLMCLSPSSYLSSPAASTTTAVASPTCASYLAPHPYHHLLSFSGQDQYHGDDVFGLQYYGGDQVIPAVVPQKSSPTTECSSSVSSMSSSPTATAISSSKSPAFKKKGSRGCDQRKATAPAAATTTNKRPRVRRERLGERIIALQQLVSPFGKSDTASVLHEALGYIRFLHDQVQVLSSPYLQRLPPSARVPEQERGTPAAEEQPPALRPSDLRSRGLCLVPISCTEHVAGAGAGTGHGNGADLWSVAAGMAKATATVTAAVERSKEAAAAAAATAALLRADRPGQQLA

SEQ ID NO: 16830 - protein, 352 aa, Oryza sativa
  Clone ID: TF_OSC400996j.C1.p33.fg
MADEWWSASQRSHGTSACSAAPSPLTADRVSCGWTSPAAAAAAESTSSITFQDPSRSSAAHHQPLSDAASSLGDPHMVDWTQAFLSGRSDASFQAVLQDDMAASTRPFRAQPTAADEAVMTNPFRDMGVGQGLLLDQASAPLHGLSFDAGEPAVAPATHSITTSFGDYQHSASYDAAAAVMQFSQTPRAPSLPAAAQMQFLSGSYQLPFGGAPPLPSQLLLQAMQPKPSCSSNANTLLAKVRKEKLGDRITALQQLVSPFGKTDTASVLHEAIEYIKFLHEQVASLSSPYLKNGNPLQHFQQKGSESTKDAEQPKPDLRSRGLCLVPVASTYTVASETVPEFWHPTFGGTFR

SEQ ID NO: 16831 - protein, 323 aa, Oryza sativa
  Clone ID: TF_OSC900243j.C1.p6.fg
MADEHEWWNSPCSARTGDDEAACSTADADESAVGSTPMSFGHGGQPASLSDAAASSSSSSFLLAGQHMDYWTQDFMGGRAAAAATASFDTLLQLQLQGGDAASRRLLLGDHAAAPPRHLVVPGAPYGGGGGDDTAAPPRGLSPTPYEAADNLQQQQSFPGGHHVVSNTDRLHDHHQDAGSPSPATRSSPGSPAAAKKPRIEAPSPMPTFKVRKEKLGDRITALQQLVSPFGKTDTASVLHEAIEYIKFLHDQVASLSSPYLRCGRPVQLQHQQGSHKVNGNCEGKQLDLRSRGLCLVPVASTYTVASETATEFWHPTFGGTFR

SEQ ID NO: 16832 - protein, 87 aa, Oryza sativa
  Clone ID: TF_OSC4514j.C1.p1.fg
MSSRRSSRSSVSEEEINELISKLQSLLPSSRRRGANQASTTKLLKETCSYIKSLHREVDDLSDRLSDLMAGMDHNSPGAEIIRSLLR

SEQ ID NO: 16833 - protein, 273 aa, Oryza sativa
  Clone ID: TF_OSC407994j.C1.p7.fg
MVPRDRVNAAAAGGGGEGRLVQSGIVNKKCDKKAPKRIHKSEREKLKRDKQNDLFNELGNLLEPDRQNNGKACVLGETTRILKDLLSQVESLRKENSSLKNESHYVALERNELHDDNSMLRTEILELQNELRTRMEGNPVWSHVNTRPALRVPYPTTGVFPVQHLPHLPVTTTAAFPQQLPVIIEQHYAATPRELQLFPESATSEDSEPSQEHGISDHVTRPQPSKDAWQNRSRDAPTVAARESSLNRKIGYKVTLFVLTVFSEMGKSLYSVL

SEQ ID NO: 16834 - protein, 437 aa, Oryza sativa
  Clone ID: TF_OSC401215j.C1.p9.fg
MGDHQMMHAAPAAMYNGGGGTTSSHGVWWSNAVGVPAAATCSTTTELAGYTAWSSALAAGYDGMVADNGGKQAKSTTTASSESPGNNSSVTFQEPASIPDPAAVAAVPQPGLAGFTDWTQPFMNNGAGLHEFLQDGHHDMSASSLMNHSSNNLALQQAGHHHELLSSFGSDLLLSPTSPYGGFQSSLLRSLMEPTAKQQQQQPALAGLQQYHQYQQQMGHAPAAAAKFAQAVGARDSLQFTNDAPFWNPSAGFGMPAAVAVAAAAAQDQASVRSAKRSSPAPPRAAATLALKTAMEGVGDSSSVITKKETAFKKPRLETPSPLPTFKVRKEKLGDRITALQQLVSPFGKTDTASVLHETIEYIKFLHDQVGALSAPYLKNGAHQVPHLKNSSPDKSKHGEISLKGRGLCLVPISSTFAVASEVPVELWTPFGANFIR

SEQ ID NO: 16835 - protein, 530 aa, Oryza sativa
  Clone ID: TF_OSC401217j.C1.p16.gm
MPRRARARGGGGGGGEEVKVEDDFIDSVLNFGGGGGGEEDGDDGEEEQQQQQAAAAAMGKEFKSKNLEAERRRRGRLNGNIFALRAMSKEATLSDAIEHIKNLQNEVLELQRQLGDSPGEAWEKQCSASCSESFVPTENAHYQGQVELISLGSCKYNLKIFWTKRAGLFTKVLEALCSYKVQVLSLNTISFYGYAESFFTIEVKGEQDVVMVELRSLLSSIVEGEYSGGLFGHPVMDHAELTTEQVLKRDIPWESYMANKLISGTCLQLLRRYDHKPESQRGPLLDEDGPSYVRVFLNILRNISKEDTVEYVLALIDEMLAAVDYLSTTRVMPRLVEVVKGSTKEKVVRVVIMSIRNLLAKGAFAAQMIDLGLPHIVQNLKAQAWTDEDLLDALNQLEIGLKDNLKKLSSFEKYKQQVLLGHLDWSPMHKDPSFWRENINNFEENDFQILRVLMTIIDTSADTTALAVACYDLSQFLQYHPSGRIVVADLKAKDRVMKLMNHENAEVRKNALLCVQRLFLGAKYASFLQT

SEQ ID NO: 16836 - protein, 303 aa, Oryza sativa
  Clone ID: TF_OSC401884j.C1.p3.gm
MPWVRFLVRLVVFFRVIVRSSSETSAADAVMRSGAIAYYHTLTKVCQKKMQGDHGYYGGRDSPPQGYGYGGGYGYGGGYGYDAGGYYSGGGGGYPSAGAAAAAYEDPMVGRRTHDFPAPMNELEFQPSATCPKNYVIFDQTCTKSRVMFHPSLAHKFGGGSSAYDNNVYGGGGAHDAAKGAYRDSVGYDDDDSCSVRQKEDTDEIDALLSSEDGDEDDVVSTGRTPGYRDGSSPDSTCSSSYGGGQARPGRKKERMKKMVRTLKGIIPGGNQMDTPAVLDEAVRYLKSLKVEVKKLGVRGSDN

SEQ ID NO: 16837 - protein, 362 aa, Oryza sativa
  Clone ID: TF_OSC401860j.C1.p50.fg
MDQEKADGGGRRRRSRATSSSGSGASSTAAAAAAERKEMERRRRQDMKGLCVKLASLIPKEHCSMSKMQAASRTQLGSLDEAAAYIKKLKERVDELHHKRSMMSITSSRCRSGGGGGPAAAAGQSTSGGGGGEEEEEDMTRTTAAAAVVEVRQHVQEGSLISLDVVLICSAARPVKFHDVITVLEEEGADIISANFSLAAHNFYYTIYSRAFSSRIGIEASRISERLRALYTALATWSKDTYIAPTSKFGVGSGVELSSPWVPVWSDAAAGGGGGDARSEDRWMNRRKRLVPCGGGGGYIVVGNREKPAPCGGASCFVVGVRDVTVLMNRQKKLAPCGSVSGFVIGVREVAAPFLETAAAAS

SEQ ID NO: 16838 - protein, 265 aa, Oryza sativa
  Clone ID: TF_OSC403865j.C1.p1.fg
MESYYGAFHADEAAFFFPHHVPASPELPFGLIASPEPEPEPEQAAAEARQSAFQEYGGAVHAGAPAAAGAVTTGGTNIHRRVMDVLGRMGGGGGGGEKGEGEEMEEEEEVPQRRRRGQGADVESSRGFRHMMRERQRREKLSQSYADLYAMVSSRSKLQNVRNPPLIPLKWSVYQNRADKKPFVSLQGDKNSIVQSAAIYIHELKVARDQLQRRNEELKAQIMGHDEQQPCVTVQFEVDEPSSSIDSMIAALRRLKGMSVKARGI

SEQ ID NO: 16839 - protein, 359 aa, Oryza sativa
  Clone ID: TF_OSC401860j.C1.p28.fg
MASSSSSSSLCDNHLLQDDLIPWPSMPFAPAPNTFGLNHQWSQPPMLSSSTDQLSSYELESLQSVESQLAAAAPPTLSPHLQAHQLSTVLMMQELGFQWSSCAAPADQHSIASSTNNNSNVMMNEEELRPRPDQSLISNPRSCSATTLLPPPHLHLDGAVLPSINVSRLQKLAAGDEPLQICCKRQAAAAAVVGHSSIRDEHVPCPYAGPPAHLIQGPSNTLQLLRVTCVIFLPQKVLMKRNTNAAAQGRGGRHGSSTEHRSSTALPPSSKKPRLESHSSSMLPSFKVRKEKLGDRIAALQQLVSPFGKTDTASVLMEAIGYIKFLQDQVETLSGPYLRSSKNSKKLACRAAQQQRVKR

SEQ ID NO: 16840 - protein, 535 aa, Oryza sativa
  Clone ID: TF_OSC400570j.C1.p4.fg
MIVGAGYFEDSHDQSLMAGSLIHDSNQAPASSENTSIDLQKFKVHPYSTEALSNTANLAEAARAINHLQHQLEIDLEQEVPPVETANWDPAICTIPDHIINHQFSEDPQNILVEQQIQQYDSALYPNGVYTPAPDLLNLMQCTMAPAFPATTSVFGDTTLNGTNYLDLNGELTGVAAVPDSGSGLMFASDSALQLGYHGTQSHLIKDICHSLPQNYGLFPSEDERDVIIGVGSGDLFQEIDDRQFDSVLECRRGKGEFGKGKGKANFATERERREQLNVKFRTLRMLFPNPTKFISMMFFTDNSAMLLRVVLVLSQIMPYQIVGILKSYLAKFGLPPKLVKFWHYQYIDMVTNQNTPNCVHPNQNDRASIVGDAIEYIDELNRTVKELKILVEQKRHGNNRRKVLKLDQEAAADGESSSMRPVRDDQDNQLHGAIRSSWVQRRSKECHVDVRIVDDEVNIKLTEKKKANSLLHAAKVLDEFQLELIHVVGGIIGDHHIFMFNTKVSEGSAVYACAVAKKLLQAVDVQHQALDIFN

SEQ ID NO: 16841 - protein, 294 aa, Oryza sativa
  Clone ID: TF_OSC401768j.C1.p7.fg
MATGFVVVVAMCQLAGVRITQVCGNQNLGMVADTESSGSLGGSSNAASDKAVDGSLDKRSQEKAPKKTHKAEREKLKRDQLNDLFVELSNPERQNSGKATVLGDAARVLRDLVSQVESLRKEQSALLTERQYVGSENNELQEENIMLRAQILELHNEICARMGNNHLNQSNLAMSQPVANNGSNSATQPVPHHIWGNGPNLAMVHPTNTLSPLHNQHHQSAGASQVYASRPQELQLFPGTSVSTERERSRAGSGSTPATSSGLTDSLPGQLRLSLPQSSQEENSSGSKKGRKKG

SEQ ID NO: 16842 - protein, 431 aa, Oryza sativa
  Clone ID: TF_OSC418704j.C1.p1.fg
MASKKASPILYLSLSFCGPHAIGESERNYSANQIFLLMQSLKFGIEDLVAGIAVWVSVVAWQFFQGERAGVLMVWQPVAQTRFRVFKHENGIAVRVIACFQPSQDCQKILFAGCFLMGEKVNPWCHWSNPPWTESSANNLHPPDVSLDNTNSVALPTYLNSDGYIYSGVAASMPSIAASVTDRPVSFSSRFVTTLVPSVGLSTAETLRKRPLVFFHNVNNTFTVGPLLSKGTLDTVPELQGSNETNVTDVGAQNTECMHENTEEIDALLCSDSDEGCLKVQELNNRVRKYPMQNDTMSVESVASAGASQPAKKRRLSSGTDRSVVDTASSARPDHSVDQKHLSHDDDAQSCCIGEVESDHQFALREGEEAEGDDGPDDRKRRRERIQETVAALRKIVPGGIAKDATAVLDEAICYLKYLKLKVKTLGAVSL

SEQ ID NO: 16843 - protein, 262 aa, Oryza sativa
  Clone ID: TF_OSC402160j.C1.p8.fg
MVPSERGDVATAIRPAAADKLVHGPISDKKCRKKVPRKVHKSEREKLKRGHLNDLFGELGNMLASDQIQQPSAEADRQSNGKACILTDTTRILRDLLSQVKSLRQENSTLQNESNYVTMERNELQDENGALRSEISDLQNELRMRATGSPGWGHGATGSPLPVPPSPGTVFPSQQPMQPSPMTTSTVFPLQQPLPQPTVIEPSARQPLELKLFLEAPPAEDPEPSEDQEAPNNVARPQPRYPTEASSWPISLGLPRMEDEQM

SEQ ID NO: 16844 - protein, 467 aa, Oryza sativa
  Clone ID: TF_OSC401495j.C1.p1.fg
MYGGGAAAGGATTTTGSHGGGGGDWWSAAVSSCSAPAPETMQGFGGWSAAVVAVDGGGNTSRSAAGNTASSESPGSLATGSSITFQEPAGGVADPAAIAVHAQTVAGGGGGGWNQQPFLDGSGFHGYMSSSRNDHHTNHHHHQINTPSLMSNSSSNNGVMLQEHQHDQNYQFLSNLGFELLSSPTSPYGGGGGFRSSLLRSLTEPAAAAKPNDSPGFQQYHHHQPAMNLQPPAAAAGREPLQFTNSTAAPFWNPSSRFTVAAEGTALGGAGASPAQPTPASLAAKRALEGVGDSSSIITKKAKADSTPLKKSRTGTPSPLPTTFKACVYIYIIFNLSQMVIDFLPIKFHVRKEKLGDRVTALQQLVSPFGKTDTASVLHETIEYIKFLHDQVGALSAPYLKNRQQVPHLKNSTGVDNDGGGGGGEATAASKRDLTGRGLCLVPISSTFAVASETPVDFWTPFGAAFR

SEQ ID NO: 16845 - protein, 100 aa, Oryza sativa
  Clone ID: TF_OSC18429j.C1.p2.fg
MSSSRRSRTSSRLAAAPPPTDEQMAELISKLQAVLPTRGGEANAKASSAEVLQEACRYIRRLHREADALSERLAELLLLQPSDLAINGADVPDLIRSLLM

SEQ ID NO: 16846 - protein, 350 aa, Oryza sativa
  Clone ID: TF_OSC401762j.C1.p12.fg
MSQEGADLSQDVDESPYHTAVVTTNNLVRSIKAEKSNSSSSSGKPVETDIGLKVASPTMFGFNTKIEGTGKNMAVKREEGEGGGRPGVSSGVSTRDTNGKGKNAMDMEHALHIWTERERRKKMKNMFSTLHGLLPKIPGKVANAIEKFYISLIYQDLTDKASIVGEAIGYIKTLEDVVQKLETIKTERVRAHQWAAAAAAAVAANGGGEGSSHSHSQPPRHATAVTVAVAEPAPVAAAVNAQAPQKKAAAAAAPTLQTWSAPNITLTMAGVDAFINMCLPRQRASFTTVAFVLEKHQIDVVTSTISADHDKSLFSVHVRLNEASLQSTEGLTPEAKYKLAVSELMVRLAE

SEQ ID NO: 16847 - protein, 110 aa, Oryza sativa
  Clone ID: TF_OSC401615j.C1.p29.fg
MVAHATINNGRCDAAPAAAAKSRPAVMPPPASNHGAACKNSGSNKERRRMRRCVEVRRKMEALRRLVPGGGGGEDSGEELLFRAADYIARLQVQVKVMQLMVDVLEQTKD

SEQ ID NO: 16848 - protein, 395 aa, Oryza sativa
  Clone ID: TF_OSC401232j.C1.p30.fg
HRLQKQQLCRWIRHDDLDMLTDELERKRYRTLILMADTFLANDLRQFPSAKRKASLYTSTLANIFILMLKGSTGIQLLSLFSGYMKDDVSSAVETQLAESCRLESGVETCRLLVSSVAVKCEASNSPSTTVGFDRMIAADYDLFHHMSFSPSLQNLQSPTFFTTRSSESYLGESSIYGGGARPALAQFSYSQPIAATSAAHLVRWTAAGEPMTGDGGFRSSKRLKTATTATTQPPRHGVKCHAKPRNQTTKATCKKRSQKLGDRITALQQLVSPYGKTDTASVLHEAAACIRQLHQQIQILTAPYPGTSSSSASSQQQVVFSVLESCSHVMSFFTAIATVLWLQDAGGGGGTATELRRRGLCVAALSPAVVSLAAEGGRRRTDVEDQKRIWFSNQ

SEQ ID NO: 16849 - protein, 186 aa, Oryza sativa
  Clone ID: TF_OSC401860j.C1.p53.fg
MERKDVEKNRRLHMKGLCLKLSSLIPAAAPRRHHHHYSTSSSSSPPSSTKEAVTQLDHLEQAAAYIKQLKGRIDELKKRKQQAAALTTSTSNGGGGGMPVVEVRCQDGTLDVVVVSEAIREERERAVRLHEVIGVLEEEGAEVVNASFSVVGDKIFYTLHSQALCSRIGLDASRVSHRLRNLLLQY

SEQ ID NO: 16850 - protein, 1121 aa, Oryza sativa
  Clone ID: TF_OSC900050j.C1.p1.fg
MSRDFFSFAVDPWLRRLIRQKPRRSRVARNAGNKATTREHDFLSLYTTAAKDPSLQLHDAKPPPPSQGFFLRTHDFLQPLEKPTPAPTPPPTSQLQQQQQQAFPGGIGTFSISHVAGARPVAAAVVKAEPTPFVLWGQPAAAAAAHPVAALGHHHHHHQWTLPFAGVGQVAATAARQQQEWKGRVGGGGFMDSGSRSSGGAGFDDDDGVAARREVSSSLKGSVCVAERRREGRGEEGRRRSRELMEMEMEMYSRCARPSHIHQLHARLVVSGRLRCTSPSLALALLRAACRVRASPCLRPLAHHLLDHIPRPHPHLLHAAARLAYRLRLPSLALRHYVALRTHHPVFLPPAAAIADMLKSVRGRAAHAHALRVTAHAGDTRFLDNTLVAMYFACGDVQRARLVFEGMCDRDVISWTSLISGLVQNGSPLQGIQQFATMMHCDVRPDFVVLVTVAKAFMELDNLPGAESAHSLVVKGGFHDEQDVMITLTAMYASFGCLVAARALFDMVPPQQVNVILWNAMISGYSKNGFASEAVHLYKHMQLVARNLAPDSITLRSVIFACAQLGSTELAAWMEDCVCRSEYREDVLVNTALIDMYAKSGSISHARAVFERMHVDDRDVVVWSALITGYGVQGLVNEACTLFQDMKLAGVRPNDVTFLGLLSACNHAGAVEKGWSYFHSMKPDYGIEPQHQHYACVVDLLSRAGQLDRAYQFILNMPIKPEMTVWGALLHGCKMHGHSNMAMAECAAQHIFELEQSNAGHYVQLANMYASAGMWSQVAGMRVTMRERGVTKATGFSFIEVDGEMHSFHAWDHSHPRATEIFAMLCLLSPTPTGVGGVDSEGGWEGWELQWKWFQILRELLPHSDQKRDKATFLLEVIEYIRFLQEKVQKFEASVPEWNQENAKILPWSNIYFRSFWKNSQSKGQNPGDDLPDPSQFIRNGSSSGYNFTGKPDDNHNMVTSAAASGAQELVETDHAASVSYRSAETPTNITNNVTSQAQAQWASPAGVDDCAMNSEMLNNQQLAIDEGTISLSSQYSQQLLGTLTHALESSGVDLSQSSISVQINLGKRAVKRPGADGSSSSKELPSTSANNENMGHQLTMLGGGTEELPHPTKRHKSGNS

SEQ ID NO: 16851 - protein, 449 aa, Oryza sativa
  Clone ID: TF_OSC400070j.C1.p12.fg
MQLFQGEEPAHDFLSLRAGGGSSSPPFQHREEQHSSHSSRGYGMEIRRSLRPLDLAKQRGRSSGNGTAAGSAVDGASPAGSDSEEHVLPGGVGTFSIRHASGTPSREEAGSHGGVRRSAFAFAPALHGARMENAHETGGRSGSRAHRAPSTMWQDSAIDQRSIGQTPYEAFNSKTISYKYMVQEMCSKMQFFMLSFRLEILRELLPHTDQKRDKASFLSEVIEYIRFLQEKVQKYEEADPERNHEDSKSMPWAKVYYRSCWRNTKNTSQVQGEDLSPSTQDMNNEQYGPKHISAAQPALFNTQSVTSTTTSSSHMATGTPQNLEKNSTPSNQPPWLSMSTMRQESEPGNKMPNKHEKQTLHDENHSISSAYSQGLFNRLTEALKKSGLDPSQANIAVEINLAKRARDNTSDNSKIVCLIIILYLCPDFTSQINEDEEPIQITKRRCNKS

SEQ ID NO: 16852 - protein, 133 aa, Oryza sativa
  Clone ID: TF_OSC5610j.C1.p1.gm
AMELLLPTAAASGRRPRPAFPPRPHLVGAQAGFSAFASRWGLGGGSFPPPPSSSSKRKPDPASKGKAAAKKGKTAASGEDGGDGGEDEKPAYVHVRARRGQATDSHSLAERARREKINARMELLKELVPGCSK

SEQ ID NO: 16853 - protein, 249 aa, Oryza sativa
  Clone ID: TF_OSC400099j.C1.p2.fg
MEMTSYNDVDAGDMFAAADYYSAGAGGDLFDMVWPGRRRREEDNTSGCLPLSPPPPPELAVDDQLLAGGDGGGGKPVAVAVAEDDDSGERWTEDQVPTDEGICVMEKRRCKINENLKTLQQLVPVCDKSNNQASTLDKTIRYMKSLQQHAQAMSVGCSMKTAEAAGVTCPFLPPPPSSALLVIVEEGPTRPWDATARSTSAAATSFDHHHHGALIEKLLQVVQPYMLSLKTSVRENNAMVMQKPNFYHS

SEQ ID NO: 16854 - protein, 836 aa, Oryza sativa
  Clone ID: TF_OSC411335j.C1.p13.gm
MDAFGWSAPAAPCQPSCGPGGDDDDDVLLAAVLGASFELHSLVDGGGNGAAGAVRSDDAYGLDVDLPSHQMSLLRCQDGLSALHGDASPTAAAAAFLDSVDVLPVPAIAGATHDDGGLLDRFAFPNVAETTTVQAAASNTAFSGYSSNTTGGGNISSGESNTYTEVASTPCAVSTTTTTTALPPSKRKLPEKYPVVGTSPTTKTTTTSETAAERRSTKRGAGGSSSITFGGGCHGAGAAAALLGYGRGYEPDTEAIAQVKEMIYRAAAMRPVTLGGAASASDPDPQTVAARLRRERVSERLRVLQRLVPGGSKMDTATMLDEAASYLKFLKSQLEALETLGNGNGNGNLLHHGYYTGSRNATATAATEPVYEDSGYAALLGAHRGLILLPYRLAVAARHRRRSRPLDPPNHRRQSLGGLASYLPPPMAPLDSGGVTASSPLPPDPQSHPSNRVRIMRAPNPTPPRDSAMARRRKGSSYRRRRRRRRRAPAACGDNRIDDLTDDLLLIILRRLDTRSALATAALSRRWSGLARAGLEALDFMVGDILPPRYHRCIQLHESASGVFDGADELRTIVASIRRHERLAMRNMVASINNFLDADDGFAHGDGGGGAPRRRISRLRVEFIATHYHDCINRLVAKAVDTWGVEDLEVLGVPSSHQAGPARLAGLHTRGSLRSSVFSSCLQLQEVHLKSCPCKRGSSVFVDAPRSMIRQLVLECCGVPGFELHALPMLESIVVMQTWVRYKLGSFPRLVRLNLKRDGLRHKLNFCLPANLDLKPHLGFTPDITDQPSKLQHKRLKELVIIGFEGTERQIYFVNFVIEVSMVLELVSLSMAVFRK

SEQ ID NO: 16855 - protein, 211 aa, Oryza sativa
  Clone ID: TF_OSC412549j.C1.p7.fg
MEFDMAMDMMSQEQLMHIISQLDSALASSPSPSTSPSASPPRQSPAAHVPVPPGLLNTTMVSTSRAQAAPSAPLHPVAATAAVQSSSRGIMYTTTRQGVIDAAEEEEAAAPRPRRRNARVSSEPQSVAARLRRERVSQRMRALQRLVPGGARLDTASMLEEAIRYVKFLKGHVQSLERAAAALHMHGGHAAAAGFAGDAGDAVYSCPSYYA

SEQ ID NO: 16856 - protein, 191 aa, Oryza sativa
  Clone ID: TF_OSC400622j.C1.p23.fg
MKLRFVRKNNHKRRDRINQKMKTLQKLVPNSSKTDKASMLDEVIDYLKQLQAQVQVMSRMGSMMMPMGMAMPQLQMSVMAQMAQMAQIGLSMMNMGQAGGYAPMHMHTPPFLPVSWDAAASSSSAAAADRPPQPTGAATSDAFSAFLASQAAQQNAQQPNGMEAYNRMMAMYQKLNHQQQQQQDQPSNSRQ

SEQ ID NO: 16857 - protein, 338 aa, Oryza sativa
  Clone ID: TF_OSC400431j.C1.p55.fg
MAPPPPAPATTASPVAMLPAVTYMVIAAVLGSSSKGSSSSSARRFSTISMHLSMDDDDDQSAVYGVAMVDDLLTPSPSTHHAVAAAAGSFPSSSSSSASFRSASVSYSPDTSSSAAAAAATGFYPELSSQVAPLLPPPPLVRNEPQPGRYTAGLPPPPPPPVTGGAFRRYARHLGPRRAPKPGACGQRMFKTAMSALAKMHMETTYRRRQYYYQQAAAAAEAAPPPPSGNNQLQHTMSERKRREKLNDSFVALKAVLPPGSKKDKTSILIRAREYVKSLESKLSELEEKNRELEARLSTRPDDTKNDEEEVAAPPEAGGEVKREDPVEIEALDNFFIR

SEQ ID NO: 16858 - protein, 553 aa, Oryza sativa
  Clone ID: TF_OSC102138j.C1.p7.fg
MGRGDHLLMKNSNAAAAAAAVNGGGTSLDAALRPLVGSDGWDYCIYWRLSPDQRFLEMTGFCCSSELEAQVSALLDLPSSIPLDSSSIGMHAQALLSNQPIWQSSSEEEEADGGGGAKTRLLVPVAGGLVELFASRYMAEEQQMAELVMAQCGGGGAGDDGGGQAWPPPETPSFQWDGGADAQRLMYGGSSLNLFDAAAADDDPFLGGGGGDAVGDEAAAAGAWPYAGMAVSEPSVAVAQEQMQHAAGGGVAESGSEGRKLHGGDPEDDGDGEGRSGGAKRQQCKNLEAERKRRKKLNGHLYKLRSLVPNITKMDRASILGDAIDYIVGLQKQVKELQDELEDNHVHHKPPDVLIDHPPPASLVGLDNDDASPPNSHQQQPPLAVSGSSSRRSNKDPAMTDDKVGGGGGGGHRMEPQLEVRQVQGNELFVQVLWEHKPGGFVRLMDAMNALGLEVINVNVTTYKTLVLNVFRVMVVRDSEVAVQADRVRDSLLEVTRETYPGVWPSPQEEDDAKFDGGDGGQAAAAAAAAGGEHYHDEVGGGYHQHLHYLAFD

SEQ ID NO: 16859 - protein, 502 aa, Oryza sativa
  Clone ID: TF_OSC900412j.C1.p23.fg
LPGRAFARRGHVWLTGANEVDSKVFLRAILAKTVVCIPVVDGVLEIGTTEKVEEDMGLIQYARGIFMDQHGIHMKPTLSQHSTSNPVTHCTHQHPIQVQMQLGITSQTKFDYSDELNADEENDDTEEEGMSGSDTNNTDTERNSGQLQLQMQDQLNMVSNDHQTIPNNAVSSELMQCEMSEVVRDGCSNNILEDEIQMLMDCQNSNCQLNLQGPDEPCHSWHFLCEELQNDYQPATEDQVASPENTHYPKTLMTILHYNTLRQQEMNIKNYLPVSEKSSFSRWTTPEGIVTAVTGEQKHLNQGAGKAQVDAIQGDFSANHVLKERRRREKLNEKFIILRSLVPFMTKMDKASILGDTIEYVKQLRNRIQELESSSSSSRAAARAPSAAAAGRRRKRSAAAATATAAEGMSSSNGRNGGEAAEVVQVSIIESDALLELRCGCGGGGGGVVLLRVMQAMQELQLEVTAVQASCAGGELLAELRAKVVVMILICMKMQMQMQMQN

SEQ ID NO: 16860 - protein, 315 aa, Oryza sativa
  Clone ID: TF_OSC400903j.C1.p11.fg
MDEQRGRGGFDELVLLHQQQEQRRRREQQQEEEEEEEVRRQMFGAVVGGLAAFPAAAAALGQQQVDCGGELGGFCDSEAGGSSEPEAAAGARPRGGSGSKRSRAAEVHNLSEKRRRSKINEKMKALQSLIPNSNKTDKASMLDEAIEYLKQLQLQVQMLSMRNGVYLNPSYLSGALEPAQASQMFAALGGNNVTVVHPGTVMPPVNQSSGAHHLFDPLNSPPQNQPQSLILPSVPSTAIPEPPFHLESSQSHLRQFQLPGSSEFHKILFLHVLLSVKDGVSWRDNAKAPPIITSRKSARKRDELHQERIIHVEHQ

SEQ ID NO: 16861 - protein, 636 aa, Oryza sativa
  Clone ID: TF_OSC400765j.C1.p26.fg
MAGGEAHAALQAVAQSLRWTYSLLWQLCPHQGSSLVWGEGHYNGAVKTRKSTVMQPPPAEEEDDADHAARHRSRQLRELYDWLQQAGENSSGGVQTSSTTASRRPGAALSPEDLTETEWFFLMSASYSFPPGIGLPGRAFARRGHVWLTGANEVDSKVFLRAILAKTVVCIPVVDGVLEIGTTEKVEEDMGLIQYARGIFMDQHGIHMKPTLSQHSTSNPVTHCTHQHPIQVQMQLGITSQTKFDYSDELNADEENDDTEEEGMSGSDTNNTDTERNSGQLQLQMQDQLNMVSNDHQTIPNNAVSSELMQCEMSEVVRDGCSNNILEDEIQMLMDCQNSNCQLNLQGPDEPCHSWHFLCEELQNDYQPATEDQVASPENTHYPKTLMTILHYNTLRQQEMNIKNYLPVSEKSSFSRWTTPEGSDDNKTMISPGTTQRMLKSILMIVPSSHCSYRGAETPESRGGKGASGCHPRSESYPYPPMDKASILGDTIEYVKQLRNRIQELESSSSSSRAAARAPSAAAAGRRRKRSAAAATATAAEGMSSSNGRNGGEAAEVVQVSIIESDALLELRCGCGGGGGGVVLLRVMQAMQELQLEVTAVQASCAGGELLAELRAKVVVMILICMKMQMQMQMQN

SEQ ID NO: 16862 - protein, 310 aa, Oryza sativa
  Clone ID: TF_OSC423195j.C1.p3.fg
MESGGVIAEAGWSSLDMSSQAEESEMMAQLLGTCFPSNGEDDHHQELPWSVDTPSAYYLHCNGGSSSAYSSTTSSNSASGSFTLIAPRSEYEGYYVSDSNEAALGISIQEQGAAQFMDAILNRNGDPGFDDLADSSVNLLDSIGASNKRKIQEQGRLDDQTKSRKSAKKAGSKRGKKAAQCEGEDGSIAVTNRQSLSCCTSENDSIGSQESPVAAKSNGKAQSGHRSATDPQSLYARKRRERINERLKILQNLVPNGTKVDISTMLEEAMHYVKFLQLQIKLLSSDEMWMYAPIAYNGMNIGIDLNLSQH

SEQ ID NO: 16863 - protein, 209 aa, Oryza sativa
  Clone ID: TF_OSC401685j.C1.p98.fg
MSSSSGSGRSATEARALKIHSEAERRRRERINAHLTTLRRMIPDTKQMDKATLLARVVDQVKDLKRKASEITQRTPLPPETNEVSIECFTGDAATAATTVAGNHKTLYIKASISCDDRPDLIAGITHAFHGLRLRTVRAEMTSLGGRVQHVFILCREEGIAGGVSLKSLKEAVRQALAKVASPELVYGSSHFQSKRQRILESHCSIMSI

SEQ ID NO: 16864 - protein, 196 aa, Oryza sativa
  Clone ID: TF_OSC33102j.C1.p1.fg
MAGFSHLPQQMEHGLITNNGFLFCHGSHGGAATTTAPAIPEDASMETSSVVLDTSPQDKKRKPREEDTASLNSAHSKEAKENGRKRGGKKHSRDQMEEEAPQGFIHVRARRGQATDSHSLAERVRRERISERMRMLQALVPGCDKVTGKALILDEIINYVQSLQNQVEFLSMRIASLSPVLYGFGIDSDAFSDHSQ

SEQ ID NO: 16865 - protein, 291 aa, Oryza sativa
  Clone ID: TF_OSC400867j.C1.p1.fg
MADFSPHHSLLLKATAAGAAIATTNDPNISSFFLYNHSHGSQAPQPANAAAAAIVEDASLESSVSAVLDTSPSVDRKRKAAEDSAHSKDSCKDGKSRRGKKASKEVEEKSTTEDEPPKGYIHVRARRGQATDSHSLAERVRRERISERMRMLQALVPGCDKVTGKALILDEIINYVQSLQNQVEFLSMRIASMSPVLYGFGMDSDGLHDQKIGGMFQEALAMPNPVLNQSSPAPSQAIMDTTSTTSYSLQSQHGAISFSQDNGSYLMQAVGEPRQQEMLNQLVFNNMCSFQ

SEQ ID NO: 16866 - protein, 282 aa, Oryza sativa
  Clone ID: TF_OSC900128j.C1.p4.fg
MAGFSHLPQQMEHGLITNNGFLFCHGSHGGAATTTAPAIPEDASMETSSVVLDTSPQDKKRKPREEDTASLNSAHSKEAKENGRKRGGKKHSRDQMEEEAPQGFIHVRARRGQATDSHSLAERVRRERISERMRMLQALVPGCDKVTGKALILDEIINYVQSLQNQVEFLSMRIASLSPVLYGFGIDSDAFSDHSQKMEGMFHEAVAIPASVLNRGSSPAQSHAIMDTSNTSPTPYTLQVQGGSNNNSLSQDNGSYIMQTVGEPRQELFNQVVLNNYMCSFQ

SEQ ID NO: 16867 - protein, 499 aa, Oryza sativa
  Clone ID: TF_OSC900417j.C1.p6.fg
MAAAAAAGQISLDDLRNGGGVAANAGGGGGVHDDFLDQMLSSLPPSAWPDLAAGKAAEDDAEGMHHHHHQQQQQFGGPYDESAMLASRLRQHQISGGGGGGGGGAAAVKQMVLQQLADLRQGHHMMLQGLGGRSPAGGGGGGGDGGLLLPLTLGSGGSGGDVQALLKAAAANSAGGGDAGGVYGGGFAGSLHQQQQHFQPHPQTAPTIPTQSFGGGGGGGGGGTASGGGAAQPQAGAAGGGAPAPPRQRVRARRGQATDPHSIAERLRRERIAERMKALQELVPNANKLMQTDKASMLDEIIDYVKFLQLQVKASTYTKLLIHVLSMSRLGGAAAVAPLVADMSSEGRGGGAANGGAPAAAGSDSLTVTEQQVAKLMEEDMGTAMQYLQGKGLCLMPISLASAISSATCHLRPPVVAAAQQFPAGLGAAAAAAHHHQLSAAAAAAAMRGHLPGLNADGSVPASPSMSVLTAQSAMANGGGGAADGEGSQLKDAASVSKP

SEQ ID NO: 16868 - protein, 272 aa, Oryza sativa
  Clone ID: TF_OSC401648j.C1.p35.fg
MAETNHLLLLLLSPPRLRLLSWTPTTPLACAALSRAAKLSRDLVSEKGERGIRSFKKNIAEQHMHASLGLDQLAAIGSLYQFIRGGGEGKEAASQEEEQTPKLRSVIAHLVSRKRRRDRINEKLKALQELLPNCTKTDKVSMLDEAIDYLKSLQLQLQMLVMGKGMAPVVPPELQQYMHYITADPSQIPPIRPSEPRPFQITHATQQRQSNVESDFLSQMQNLHPSEPPQNFLRPPKLQLYTPEQQRRGLASSSGHNSGWITERNSSYNFLE

SEQ ID NO: 16869 - protein, 254 aa, Oryza sativa
  Clone ID: TF_OSC9961j.C1.p3.fg
MDDSSLFLHWAVSTLQHQHPAAVAVVADDDATFFSFQELCDTEEVVVVPVQEEVITEAHGAAERRRRWRRAGDGVRVTAGGRGIHHQEDLGAHGGAAAAYAQLEHVVAERKRREKINQRFMELSAVIPKLKKMDKATILSDAASYIRELQEKLKALEEQAAARVTEAAMATPSPARAMNHLPVPPEIEVRCSPTNNVVMVRIHCENGEGVIVRILAEVEEIHLRIINANVMPFLDQGATMIITIAAKASSSLLY

SEQ ID NO: 16870 - protein, 293 aa, Oryza sativa
  Clone ID: TF_OSC400878j.C1.p3.fg
MAGQQPPTGGAEDDFFDHFFSIPSAAAAGAGGVGGFGSGDHHPFPLALSLDAEGAGAARRLLDGGHDGGRTDRDPVQLAGLFAPVFGAAAGVQPPHLRAPPPPQVFHAQPKPGEGAMAAPQPQQPPAPRPKVRARRGQATDPHSIAERLRRERIAERMRALQDLVPNTNKTDRAAMLDEILDYVKFLRLQVKVLSMSRLGGAGAVAQLVADIPISVKGEASDSGSKQQIWEKWSTDGTEKQVAKLMEEDIGAAMQFLQSKALCMMPISLAMAIYDTQHSQDGHSVKPEPNTPS

SEQ ID NO: 16871 - protein, 477 aa, Oryza sativa
  Clone ID: TF_OSC407936j.C1.p27.fg
MAQQWRSLLFLLLLLLVPFAAAAGQDAPFVVAQKKVALSRPGPGVERLAVTLNLYNQGSATAYDVSLNDDSWPQEAFQLISGTTSKIVEKLDPGATASHNFILETKVQGKFQGSPAIITYRVPTKAALQEAYSTPMFPLDILAERPPQQKFELAKRLVGKYGSLVSVVSFVEPLPVPGFPAGCSNLEEKAAAAMAAYEYESSSCSSLDPTSMPMVYSPIVLQPQECPLSFVFDNAAAAAGDNKWVPGIQGSCPCSLGSTQDMDASWGKSRKHKRSNVGLKGLEEKKARRVVLHQHDDDVKKKAKEAAGGEPPAGYIHVRARRGQATDSHSLAERVRREKISERMKMLQSLVPGCDKVTGKALMLDEIISYVQSLQNQVEFLSMKLASLSPLMYEFGPGIDMHPDVLRQLAKMPHEMVQCMGQMGSTGISLQGLGGGPTGFAQDGSSHINMVVMQVGEQGQQQGSLHQVEMSSHCFFH

SEQ ID NO: 16872 - protein, 412 aa, Oryza sativa
  Clone ID: TF_OSC400431j.C1.p57.fg
MDSSSWIHGYTNANATGANSGFMCGYAASPVEFPQQQQLISMQMGMDDESAVYDGASMVGDLLMASSSAHHAGAGSFQYSSSTTSSSASFRSASVSCNPESSAAAAPELPAATGGAFSRYARHLRPRRPPKPGACGQRMFKTAMSVLANMHVAATYRRQYYYQQAAAAAAAEAAPAPPSDNQLQHMISERKRREKLNDSFVALKAVLPTGSKKDKASILIRAREHIKSLESKLSELEEKNRELEARLASRPAAKNDKGETAAAEAGDETKREDLVEIEVTTTSGGSGAAAAAATGGDQETCCTLNVDLRGGGGGGMSTTDVVLRTLQCLREQIGDGASLVAMSTSAGSGGRPPSANLTLQLKSPTYGRCSYKYEFTLFLVNRQKPTIKHIRYGSRKISMSLSMDDVTMISPR

SEQ ID NO: 16873 - protein, 370 aa, Oryza sativa
  Clone ID: TF_OSC400036j.C1.p73.fg
MSRVPTSWGFVYSRVNKVSEEPNVVNRITTAFWELQLPACSDEPISSGTPSSPSSPPTKETGDANTVVIDDLFLAHSDAILPAGGDQKEEHQLGDDLGQQQAATAMEIDDDVIYSLIRNWDNDSSSSWIELLDHAIVSPASCFVPWKRTELDKEAVAGGEAAQRLLKKVVGGGGAWMNRAAGSCSIKNHVMSERRRREKLNEMFLILKSLVPSIDKVDKASILSETIAYLKELERRVQELESGKKVSRPAKRKPCSETIIGGGGGGGGAGAVKEHHHWVLSESQEGTPSDVRVIVMDKDELHLEVQCRWKELMMTRVFDAIKSLRLDVVSVQASAPDGLLGLKIRAKYASSAAVVPAMISETLRTAVAGY

SEQ ID NO: 16874 - protein, 246 aa, Oryza sativa
  Clone ID: TF_OSC400710j.C1.p1.fg
MEFDMLNSNPEAQLELMNTMLQLEQLSAFPDHHGMVVPCSPTSPCMGAQGGHHHFSSVNHQPAHGVVSSGGANTGDGYRDQYYTQLLPAAAYSNAAGGGRGSEYHTTTTTRPASGGGGDGGVGPAAMREMIFHIAALQPVNIDPETVRPPKRRNVRISTDPQSVAARMRRERISERIRILQRLVPGGTKMDTASMLDEAIHYVKFLKTQVQSLERAAAANGHRPPPPTATSAAAATVAYPGLNGQW

SEQ ID NO: 16875 - protein, 304 aa, Oryza sativa
  Clone ID: TF_OSC6188j.C1.p1.gm
MEGGGLIADMSWTVFDLPSHSDESEMMAQLFSAFPIHGEEEGHEQLPWFDQSSNPCYYSCNASSTAYSNSNASSIPAPSEYEGYCFSDSNEALGVSSSIAPHDLSMVQVQGATEFLNVIPNHSLDSFGNGELGHEDLDSVSGTNKRKQSAEGEFDGQTRGSKCARKAEPKRAKKAKQTVEKDASVAIPNGSCSISDNDSSSSQEVADAGATSKGKSRAGRGAATDPQSLYARKRRERINERLKTLQNLVPNGTKVDISTMLEEAVHYVKFLQLQIKLLSSDEMWMYAPIAYNGMNIGLDLNIDT

SEQ ID NO: 16876 - protein, 361 aa, Oryza sativa
  Clone ID: TF_OSC400269j.C1.p50.fg
MAYSTNQIMILQHAWMLVGEANSQLIISTVAHSWYQSNSIEVVLWWFWSRIAQTPTEYGFFGQAMACRTDEENDDDPRALEHLDPLSMQQLAESLANELFNQPQEQQEEQHGYHNPSLRVLPFVGDINKPEGHTPAAAAIRDSFFSLTNGSSSSLNFSALEQQQDSGPMTKFCSPLSEMKRGGRRATSSMQEHVIAERKRREKMHQQFTTLASIVPEITKTDKVSVLGSTIEYVHHLRERVKILQDIQSMGSTQPPISDARSRAGSGDDEDDDGNNNEVEIKVEANLQGTTVLLRVVCPEKKGVLIKLLTELEKLGLSTMNTNVVPFADSSLNITITAQIDNASCTTVELVKNLKSTLRNF

SEQ ID NO: 16877 - protein, 776 aa, Oryza sativa
  Clone ID: TF_OSC401665j.C1.p25.fg
MKLRLRSMDQRGGAGGAAETHRVQLPDTATLSDVKAFLATKLSAAQPVPAESVRLTLNRSEELLTPDPSATLPALGLASGDLLYFTLSPLPSPSPPPQPQPQAQPLPRNPNPDVPSIAGAADPTKSPVESGSSSSMPQALCTNPGLPVASDPHHPPPDVVMAEAFAVIKSKSSLVVGDTKREMENVGGADGTVICRLVVALHAALLDAGFLYANPVGSCLQLPQNWASGSFVPVSMKYTLPELVEALPVVEEGMVAVLNYSLMGNFMMVYGHVPGATSGVRRLCLELPELAPLLYLDSDEVSTAEEREIHELWRVLKDEMCLPLMISLCQLNNLSLPPCLMALPGDVKAKVLEFVPGVDLARVQCTCKELRDLAADDNLWKKKCEMEFNTQDTCGCMMCKCIYSDQRKDIVLADKYTCGNYMQKPVTQPGRWLIILVYHSLLCQYITIGLSLLWYHLVDLVQDAPAAGIHFDCIIPLPINPYQLPPSAGACCSTTQASASAKDGGNMYSPPCSAAASSQGHCFAVGANQLASLDLAMDFDEPILFPVHNASLQEGIQFYNPTGDTQLSRNMSIDKCLKGSKRKGSGEGSSSLHSQEETGEMPQRELSMEHAGEKAGDADASREEYVHVRAKRGQATNSHSLAERFRREKINERMKLLQDLVPGCNKITGKAMMLDEIINYVQSLQRQVEFLSMKLSTISPELNSDLDLQDILCSQDARSAFLGCSPQLSNAHPNLYRAAQQCLSPPGLYGSVCVPNPADVHLARAGHLASFPQVYI

SEQ ID NO: 16878 - protein, 492 aa, Oryza sativa
  Clone ID: TF_OSC400641j.C1.p23.fg
MGQAGYFLCSEITASKLLTVTATRELKPPPPPRPSGRVLSRRARRRRSSVLAWRHRRCFGGLILQTWKKNHTISAVQQRSHLERFAALDEAPPPAPEETVVTGGEMVDYMLGQPPPTTPGPQSQVSFDKLTFSDVLQFADFGPKLALNQPAASDNGGGGGDDGDDDDDSYFLRFQSLPSLPAVPPPRGGAAAAHQVVDEQEGSKQTVDAGGVSESTTLVQQADGGGGRAEKAGEQGKSGRRKRPRTVKTSEEVESQRMTHIAVERNRRRQMNEYLRVLRSLMPGSYVQRGDQASIIGGAIEFIRELEQLIQCLESQKRRRLYGGDAPAPPARPVADGAVLPAPMQQPPPATPPFFPPSIPFPASSGAGDGTGAGVAKVALDLDASGGGEVGGGVREEMAENKSCVADIEVRVVGVDAMIKILSRRRPGQLIKTVAALEEMHMSILHTNITTIDQTVLYSFNVKIAGDARFSAEDIAGAVHQILSFIDVNYTL

SEQ ID NO: 16879 - protein, 412 aa, Oryza sativa
  Clone ID: TF_OSC401583j.C1.p44.fg
MASLLGLLFSSLLFSERCEARRRARSGGEVAMDEAEAAAAAAKMDELAGGGGGGGGDWSYLAADALAAASFTAFPFHHHHHHHHRDVLSASTPSSLLLNMDAATAAAMFDFQAAFPSSSVPPPPPTTTAALPPFHDFASSNPFDDAPPPFLAPPGQKLGFLGPPGGAFGGGMGWDDDDEIEQSVDASSMGVSASLENAAPVAAGGGGGGGGGGGRGKKKGMPAKNLMAERRRRKKLNDRLYMLRSVVPKISKMDRASILGDAIEYLKELLQRINDLHNELESAPSSSLTGPSSASFHPSTPTLQTFPGRVKEELCPTSFPSPSGQQATVEVRMREGHAVNIHMFCARRPGILMSTLRALDSLGLGIEQAVISCFNGFAMDVFRAEQCRDGPGLGPEEIKTVLLHSAGLQNAM

SEQ ID NO: 16880 - protein, 83 aa, Oryza sativa
  Clone ID: TF_OSC9102j.C1.p1.fg
RRRDRINEKLRALQELVPHCNKTDKASILDEAIEYLKSLQMQVQIMWMTTGIVPMMFPGTHQLMPPMGMGLNTACMPGVKLKA

SEQ ID NO: 16881 - protein, 584 aa, Oryza sativa
  Clone ID: TF_OSC416036j.C1.p25.gm
MEEDCKCIDRAKVAQPHAIITNGYHAGAVCWRWLGKCGGGPSGWRHRATAHRGSAAAVTAMALAAGDAEPLHVAGEWIAPEIGMGGFAYPFTPSPAWSRDAVFAGSPWAAGGVSSLADALVSYGAVDDEEAAFLGKTAASSPSTARLHEQQQLLLEAELLRHGDGLGFAAMDDDGGAAMLGALEPCAMPLTDSGGPPVICSSSSNDSSGSEHSAAMPAGGGFLVGEQQQHVPPAAYAAGGVLPSMAAGEETPQSFGFGSLFNGDLLQEATVSKYHHHQQQQQLGVVPSSQPHHLNDDIDFNTGKLMSFASGQQHVTPSIDSLQIDQKEFSSGLHHLNLSSLISGPLASFNATQSHRQPAEACGGKNGGAAPFVNLSEVLPKGNGSGSAGNGAPKPRVRARRGQATDPHSIAERLRREKISDRMKDLQELVPNSNKTNKASMLDEIIDYVKFLQLQVKSPGFLLSPRSSSGERQAGAGAVTGGLPGDQPELLDGGAMFEQEVVKLMEDNMTTAMQYLQSKGLCLMPVALASAISAQKGTSSAAVRPEKKKNGDGDGGGDEEDVKGEFDAPRRPPVGRPKEMRSRV

SEQ ID NO: 16882 - protein, 363 aa, Oryza sativa
  Clone ID: TF_OSC400621j.C1.p27.fg
MWEGGSHDAAAQLLPWFVGEPAAAAVGGYGGCVDVVGQGGVFGFGFEAAAAPVVTRQQRGGAAAAEGSSRGGGGKPAVVSGLLGSLQAELGRVTAREIMDAKALAASRSHSEAERRRRQRINGHLARLRSLLPNTTKTDKASLLAEVIEHVKELKRQTTAIAAAAAAGDYHGNDEDDDDAVVGRRSAAAQQLLPTEADELAVDAAVDAEGKLVVRASLCCEDRPDLIPDIARALAALRLRARRAEITTLGGRVRSVLLITADEQQQQHCDDVDDDEDGHRLLLRHGIDGAGAAADDDDECAASHRRHECIATVQEALRGVMDRRAAASSGDTSSSGGAVVAGGGGGSIKRQRMNYGVHEQCSV

SEQ ID NO: 16883 - protein, 215 aa, Oryza sativa
  Clone ID: TF_OSC900054j.C1.p12.fg
MVAARSGDDAELRLDVECLAAAPRWTRARRSHSEAERKRRERINAHLDTLRGLVPSASRMDKAALLGEVVRYVRKLRSEAAGSAAVVPGEGDEVVVEEEEVEVEGCSCDAGERQAARRVKASVCCADRPGLMSELGDAERSVSARAVRAEIATVGGRTRSDLELDVARTAAAGGGSNGASQLPALQAALRAVIMSQEELLAVESYKQRRFSADFA

SEQ ID NO: 16884 - protein, 937 aa, Oryza sativa
  Clone ID: TF_OSC400525j.C1.p17.np
MVSKRCSASTGNRIGRYRIKRRYILVLSSCQARVKNSKLLPYKDGVQNTAIVSINWADLVRSHQLGRYDTSSAYRSIGYRVLTSFYYLSLLVAESNQLSHEHTRTHERRLVLKYKSARRQGLTCRARVYSSSTHQPLGDNTSIIVPRDATYISKSTRDTLHPCARNDRSSCCAAGALRVCRTRSYYVVKHGSSAVGCIYIRRDAWELAPRHACTAMENDDDVEHPFYYFVHDDAAAGVDDHEELLASLGFLLPPPPPPPPPPQPDQGRSAFAAYQSTAAMASSSSSSESLSRRYHSSASNVHRRMHRFLRSIYDDAGDDAGATAEMQPAEGEQQQAAPSGGSARFRHIMRERLRRERLSQGYADLQAILPTGASSSKVLVKSLIRNYMSGGKNGGKNTIVAAAANYIRELEGRKGWLCAQNELLERTTPKPGAGMVVKVRAESELGSTVDVFEAVLRRLKAMDELQVTAIQSWFGAGGMWMDVAVESKRRAACTYAPPRWKLLRETRRVKRGRSSRIVKLIFLQLSVASTSANDSPIASRHAICTTEYSAFQLDRPPTSRPRHGHAPCSHRPSHARGHGRKIKGSQRFGAFLRGVRACSRLAGGARHVDAHVRTYVYARRYTVGSSNGPTDTCHVRADGAAVDRVRPIAAVSSSCPMHTARGVTPAGESGEGGGQGRDAARRRTHARTPGEQWTAGRHVISHMSPDIRAVVDRETQLLVCFRRRAVRYVLYRNEHDCSIVAGRQDDDGKRQRRDDNVCRGVVGRAGMQSGGGEYVDDNVCRGVVGRAGMQSGGGEYVRSSGGPSSPHRRGDRSSGGPSSPHRRGDAMDELDCGEHQLNGTTSVEIHLEDGPRVCACTALASALRLPALHPLPLHPAQVPIEVGGVEGGDGGKVEAGAVEDVTKEVKGEEEHEEVANGDKESVVDPFLDVEVGGDYRY

SEQ ID NO: 16885 - protein, 424 aa, Oryza sativa
  Clone ID: TF_OSC400283j.C1.p44.fg
MSSSSNNNKKMKAPLSFASSRQGSGGLSQISEDGIPDLTDSIHGAAHHHGRSEENVSTHDHVVRSFSSGGFSIGSWEDSNSIVFSTSTGKSGAHGNDDIIATLSNYESQLVAPREMAGVEKYLQMQHDQVPFRVRAKRGCATHPRSIAERERRTRISEKLRKLQALVPNMDKQTSTSDMLDLAVDHIKGLQSQLQIIRHYPENLQCWSGVATCMGPWKGRFTTLAGRSVLVQSVLFSIPVHESMAIGLPVWVIKAIDNKRRAFLWTALRAPLLGWPKGPSLADRLRHVRGIHFLCAGKWFFLWFAFQRRCWTADLIQKRGIDSHLGCPFCVQDLDTANHILFDCMFARWFQDWWSSFRACLPEHLYDSFDSLVFLVSWRLWKERNSRVFDSALSSISVVLEFIHSEGHMWSLAGVVAFGDLLGV

SEQ ID NO: 16886 - protein, 494 aa, Oryza sativa
  Clone ID: TF_OSC900117j.C1.p7.fg
MNQFVPDWSNMGDASRTLGEDDNLIELLWCNGHVVMQSQNHHRKLPPRPPEKAAAAAVQEDEAGLWFPFALADSLEKDIFSDLFYEAPVAATAEAAPAGPGAGADGEGKTCKGDAAMAEEERGGPGAASEAPRELMPPPKSTNASCSRQQTMSLADGGDNAGDLSELVRARRSSGGAARRKAEAGGGGGGASSSMLSAIGSSICGSNQVQVQQRTASEPGRRGAPPSAVGSANAIPCGGRDHGHGHEATTVASSSGRSNCCFGTTTTTEPTSTSNRSSKRKRLDTTEDSESPSEDAESESAALARKPPAKMTTARRSRAAEVHNLSERRRRDRINEKMRALQELIPHCNKTDKASMLDEAIEYLKSLQLQLQMMWMGSGMAPPVMFPGVHQYLPRMGVGMGAAAAAMPRMPFMAAPQPVVPTPPVNHLDLGVNHLQPPPTQGVGYYPLGAKAVQQQQNPPLHVPNGSIMPPPENAPNTGSGMGSFYFYFYFSSD

SEQ ID NO: 16887 - protein, 395 aa, Oryza sativa
  Clone ID: TF_OSC412646j.C1.p13.fg
MDGGRVGGDYISSLLSSSPRLDFGVPVLDAIVAPGGGGGGGDCGLDKLCGDPGFAERAARLSSFNNGGGGVGQRYGGAGAGLFGMPPPAPGDFAGGGSREASSVSDPASSAMKDAAANAKKRKSTAAAAAAAKGKGKEPPVGEEKESDGKRCKTGNGEKESSVKPKAEQAGSDSSVEDGGGGGQKQGKGKNAKPVEPPKDYVHVRARRGQATDSHSLAERVRRERISQRMKVLQDLVPGCNKVIGKALMLDEIINYVQSLQRQVEFLSMKLATVNPLDFSNLPTLLQKDMFQACGPSASSVFSLESSNSAFRFAEQGDVFQQFAQNSMESQCTLNQLDLALSQATNAAQYAFQDGTAGANLQQRNFWEDDLQSVFHIENGQSQENGVSAPNFHGW

SEQ ID NO: 16888 - protein, 236 aa, Oryza sativa
  Clone ID: TF_OSC406614j.C1.p6.fg
MASPEGSTWVFDCPLMDDLAAAAGFDAAPAGGFYWTTPAPPQAALQPPPPQQQPVAPATAAPNACPRSESGTRPSSKACREKVRRDKLNERFLELGAVLEPGKTPKMDKSSILNDAIRVMAELRSEAQKLKESNESLQEKIKELKAEKNELRDEKQKLKAEKESLEQQIKFLNARPSFVPHPPVIPASAFTAPQGQAAGQKLMMPVIGYPGFPMWQFMPPSDVDTTDDTKSCPPVA

SEQ ID NO: 16889 - protein, 256 aa, Oryza sativa
  Clone ID: TF_OSC32412j.C1.p18.fg
MDPAPSLAAELWRPHHHRHHFEASSVVTDQGSGSRGGGGSGRRRPRSDAGPEDDDLSKVVSTSAASGGGGGGGQDSDAPEAKRLKPMKSSDKNDSLRTEAGTDSGNSSKAADKNATPPEPPKQDYIHVRARRGQATDSHSLAERARREKISERMKILQDLVPGCNKVIGKASVLDEIINYIQSLQHQVEFLSMKLEAVNSHMINGIVAFPSKDFGAQPYNTAAGLTFDPQTTREFAQGSTSEWLHMQIGNAYERVT

SEQ ID NO: 16890 - protein, 362 aa, Oryza sativa
  Clone ID: TF_OSC400939j.C1.p8.fg
MALDTLCSAGGDVLIYDTFNASAAAAAAVVPPASFLFGNNNAGGAAGTETRVQVAAGAVPEVDQLLKQAQQPGRRKRRRRARSCKSREDAESQRMTHIAVERNRRRQMNEYLAVLRSLMPESYVHRGDQASIVGGAIDFVKELEQLLQSLEAQKRTLLMQPPPPPQQQREPKCDAADSTSAADQETPAAAAAAAAADGPPFARFFTYPQYVWCHNPAQDGGGGGGAAAENRAGVADIEVSLVETHASIRVMAARRPGQLLKMVAGLQALRLTVLHLNVTALGSLALYSISVKRFHGGKAIASLGPLGVFFLCALYLWYSTTVVEEGCGMATVDDIAAAVHHVLCIIDAEAASQMLLAGEASG

SEQ ID NO: 16891 - protein, 484 aa, Oryza sativa
  Clone ID: TF_OSC401130j.C1.p60.fg
MFRSAVAVSQLATTTTVWMDRGFNEMILSESVWNGGGGGGDGDGGAVVLPPEVGGVNAVDGSGMTMLERLVLDEALAAAILELQGIQAPGCGGGGGKVAVVPPPTAGDGGVEAAVAFAAMATGTPAYADVDADVLQRQRQHHHRHQGAMGMAAEYDVAPATPAVTLSAVPPPPPPPAFATAAASVDGGGAMDATVFSGIGNDDVVDAVSATVAMTTATATTSQCERVRGGGGGGGCGRKQRRPGRKRKAAEPTAAAAAADMSSQDNPLCSLLASNTAGADGGIQIAFSTSAPASKRAKPSLSSSSSSISFDGRGPGGNCGGGGGDDPLYEPDTEALAQVKEMIYRAAAMRPVTLGAEDAGERPRRRNVRISSDPQTVAARQRRERISERLRVLQKLVPGGAKMDTASMLDEAANYLRFLKSQIRELQTLDRRNYPNAAMSINTAAATTMATSSSPTYNNSNAAMPAFAFPETLGCGGGGVEQLI

SEQ ID NO: 16892 - protein, 291 aa, Oryza sativa
  Clone ID: TF_OSC29597j.C1.p1.np
LQSPSPQTHHQYATPPSPSSSSFRSFSAGTTTTTTSRDDNSSLMLAAAAASCHHQTTEVSSQILLPRPDKQHGGAAAAMAPPPPPAFRPYSRYLGPRRPPPPAAAGQRAFKKAISVLSPYSRYLGPRRPPPPAAAGQRAFKKAISVLSKIHAARLAQYYQIMEMAARASPAATAGGGGGENQQLQLQHVLSERKRREKLNDSFKALRDVLPPATKKDKASVLMRAKDYVNVLKARIAELEEKNRKLSESQQLHAGDGDGERDDGPDDDKIGQHEQISGRSGQFTEQVSRAS

SEQ ID NO: 16893 - protein, 360 aa, Oryza sativa
  Clone ID: TF_OSC29597j.C1.p3.hg
MEEHDHQYATPPSPSSSSFRSFSAGTTTTTTSRDDNSSLMLAAAAASCHHQTTEVSSQILLPRPGQAARRSSGGHGAAAAATAFRPYSRYLGPKKHLLRRPGAATTATGGGGGQRAFKKAISVLSKIHAARLAQYYQIMEMAARASPAATAGGGGGENQQLQLQHVLSERKRREKLNDSFKALRDVLPPATKKDKASVLMRAKDYVNVLKARIAELEEKNRKLSESQQLHAGDGDGERDDGPDDDKIEVNTSRSAADQGSSPNKCQELHLKIVLGSSSGCSAMDAVAGILQGLNEKRDVSLLATGHNSSSSSSSGRRRLLPRAKSSQQPASSSCDEEILKESVVKDDSPAAVKDVMQSET

SEQ ID NO: 16894 - protein, 223 aa, Oryza sativa
  Clone ID: TF_OSC412252j.C1.p6.fg
MVTDGECSAAAVRKGGSPAVRSHSEAERKRRQRINAHLATLRTLVPSASRMDKAALLGEVVRHVRELRCRADDATEGADVVVPGEGDEVGVEDEDDDEGERDEGCYVVGGGDRRWRRRVRAWVCCADRPGLMSDLGRAVRSVSARPVRAEVATVGGRTRSVLELDVVVASDAADNDRAVALSALRAALRTVLLNREELLAAAAAAATDGYKRPRFSPRCSSLT

SEQ ID NO: 16895 - protein, 312 aa, Oryza sativa
  Clone ID: TF_OSC401035j.C1.p20.fg
MELLLPTAAASAPPPPPAFPADPHLVDRAARFSAFASPSPPSPPPPPPPPPSSSSKRKPDPASKGKAAAKKGKTAASGEDGGDGGEDEKPAYVHVRARRGQATDSHSLAERARREKINARMELLKELVPGCTVSVRSKGTLGVQQRVMPSVGVQQQQHVVAPFFISKTEVSGTALVLDEIINHVQSLQRQVEYLSMRLAAVNPRVDFGGLDNFLTTECGRITGLNYKNGMDLEQVTWPDMGVHGARNLMQLQQQFWHGDLAHPLQPPSQWEKRTDTNPPVFSNSSSSLFGYDLASSALIGPQLLSLSLFQSV

SEQ ID NO: 16896 - protein, 393 aa, Oryza sativa
  Clone ID: TF_OSC400044j.C1.p26.fg
METFGWAGGGQLMHHDDIYLPRSVGCGRPFELDDAFLGACFGAQLQCDGGVGGGDGGGCLQGTSGFGAVAGDPLGLLCSGDVFASVAEGAGGAHDDGLLDAALAFSRNQLGGAACDGSDGGAVSNGAMLSSYSGTTGGNISSGESNNYSGGGGGYDAEVVSPTSTMSAATQSLHPKRKLYDDHHHPAGIAAAAAAPPLAPCPRPTTGAVAAKRRASTSATSITFGHQPHHHHAGATTAGYEPDMEAMAQVKEMIYRAAAMRPVHLGTEAAADKPRRKNVRISSDPQTVAARLRRERVSDRLRVLQKLVPGGNKMDTASMLDEAASYLKFLKSQVQKLETLGTTTTTSKLPQQYYSGNINSSNNHHGFLGFAANNNTISAGYANSNAGNATKLL

SEQ ID NO: 16897 - protein, 654 aa, Oryza sativa
  Clone ID: TF_OSC401892j.C1.p33.fg
MPGSREMSIISGGMWSDGNDFAELLWENGQAVVHGRKKHPQPAFPPFGFFGGTGGGGGGSSSRAQERQPGGIDAFAKVGGGFGALGMAPAVHDFASGFGATTQDNGDDDTVPWIHYPIIDDEDAAAPAALAAADYGSDFFSELQAAAAAAAAAAPPTDLASLPASNHNGATNNRNAPVATTTTREPSKESHGGLSVPTTRAEPQPQPQLAAAKLPRSSGSGGGEGVMNFSLFSRPAVLARATLESAQRTQGTDNKASNVTASNRVESTVVQTASGPRSAPAFADQRAAAWPPQPKEMPFASTAAAPMAPAVNLHHEMGRDRAGRTMPVHKTEARKAPEATVATSSVCSGNGAGSDELWRQQKRKCQAQAECSASQDDDLDDEPGVLRKSGTRSTKRSRTAEVHNLSERRRRDRINEKMRALQELIPNCNKACYVLQIDKASMLDEAIEYLKTLQLQVQMMSMGTGLCIPPMLLPTAMQHLQIPPMAHFPHLGMGLGYGMGVFDMSNTGALQMPPMPGAHFPCPMIPGASPQGLGIPGTSTMPMFGVPGQTIPSSASSVPPFASLAGLPVRPSGVPQVSGAMANMVQDQQQGIANQQQQCLNKEAIQGANPGDSQMQIIMQNVPVLKRSMAEEFHMVEDATRLQAVILDFQCSFL

SEQ ID NO: 16898 - protein, 566 aa, Oryza sativa
  Clone ID: TF_OSC413680j.C1.p2.fg
MGLQGNKATHDFLSLYAAAATATDYSPLPRHPDSKPSAPAPPPAQDFFLKTHDFLPQVEKRADQTPPPPPPPPPHAAVTAEKQLLHQHALAAAGAFTINHAVAAAATAVKQEPPFAPWCQPVAAVDPRGHQWSLPFAARAVAVASSRPQQQQQQPPPPERKGGGGFMDAGSRSSGGAGFDDDDGHAARREVSSSLKELTVRVEGKGGSCSGSAGTDQMPNTPRSKHSATEQRRRSKINDRFQLLRDLLPHNDQKRDKASFLLEVIEYIRFLQEKVQKYEVSYPEWNQENAKVVPWTNIYFRSSWKNAQNKGQVPADHSPDPPELLKNGSPYMFPFTGNSDNNNAVETAAASGAQDQAETDPMSRVSYRSVDTPSPNNVADKVTSQPHAQLVRPSPAENHTVNCDKLNNSDLAIDEGTISLSSQYSQELLNKLNHALENSGIDLSQASISVQINLGKRAMKRSTPAATSTSKVGFMSRIDTKSHYIMFVVIEIGAGNGCYTWSSLIRHLIVKQWAVSLGWVMALKNIDKPQSDTNQITADGLLLKTPDIQPFFAPNCVRGAPRFYVY

SEQ ID NO: 16899 - protein, 372 aa, Oryza sativa
  Clone ID: TF_OSC409193j.C1.p3.fg
MAQCGGGDVSRHRKGHLDTVESLCQGLLDDVMLDDDKCRAMFGYLQEWQDLASMCYGSLGGEPPLAPEASNGSGSSGGGGSFRKRRPDDAKGESNSICKRQRGKQQQQQQPCHPDQMAAAVGKGRPERARPGAKKKAEVASPKDSPATSASTVTAGQKTDYIHVRARRGQATDSHSLAERVRRERISERMRYLQELVPGCNKVTGKAGMLDEIINYVQSLQKQVEFLSMKIAASNPVVNFNIVEDLFGRQLSQAACNPAALPAMALPMAQVEPSCLQMSPLQQMQTSAGSSGYGLEMVVSNQYSPPGGPMSVPAGASVEPCLNVNGAAGWDIGSHGLFSGFDAPFQSVQSDCLLDNLKMEMSRSKKASDLRI

SEQ ID NO: 16900 - protein, 386 aa, Oryza sativa
  Clone ID: TF_OSC413853j.C1.p5.fg
MAFMNRQDPEASGFFSDDDSGQTAAIAAAAAMENEDFSYMLREFDYYTSSEDLFELMWQGGGGGGASSFDQPPPPVSYHRLSPPPPAMGTTTTTLLPEQPLVDDHHLPAAAAAPPSEEEMAAWLYPIVSGHEVAGGGWRSPEAQDDRRAAPAPEKKQMEKMPAAASPTTTMNKDETSDDSGERKKKKASSAAGKSKQASPRGCRSSQPYRKSGDSIDELFTKFHRRRFKITERFRTLQRLVPGCDKSNQASTLDQTIQYMKSLQHQLKAMSVVGSPPALLYPAAVHPQSYMHPPPPPPPVTMPMHPGMVLAAPPPGAAPPPGPPAMVPFGAMLPYPPYPAVLLPPAAATLYGRPPAPAPGVAARRHGSSGGGRISKSSSSSLCKKL

SEQ ID NO: 16901 - protein, 253 aa, Oryza sativa
  Clone ID: TF_OSC400346j.C1.p17.fg
MSGTPADGGGGGGGGGGGSGDDWFLDCGILEDLPAAACGAFPWDASPSCSNPSVEVSSYVNTTSYVLKEPGSNKRVRSGSCGRPTSKASREKIRRDKMNDRFLELGTTLEPGKPVKSDKAAILSDATRMVIQLRAEAKQLKDTNESLEDKIKELKAEKDELRDEKQKLKVEKETLEQQVKILTATPAYMPHPTLMPAPYPQAPLAPFHHAQGQAAGQKLMMPFVGYPGYPMWQFMPPSEVDTSKDSEACPPVA

SEQ ID NO: 16902 - protein, 475 aa, Oryza sativa
  Clone ID: TF_OSC101884j.C1.p4.fg
MDEVWCSLDSMPADIAAGIHQPPPPDLHDPSFWPAFADCAASFIAGGGGDNACFDELMAGGSSGDTRMVAMDDGDDGSGFLVGDAEAEHLMLSSSSPSSLSSGRSLSIDSAGSMSSFSLDAAAALAMSTLAVPHPYPPPVAHGMFASGDGGGGGGGAVDDHEDAIMRAMMAVISSASASPSSSGGSASSPTPFSRDSGAHHQPAGQPAMAAPQQPRGGNGGHVVVKSSSSSGGLAVPMDQKPGGGGRGRQQEEAAAASATNSSQLYHMMSERKRREKLNDSFHTLRSLLPPCSKLYTVFEWLPGNNLFHGNGSDNKDKTTVLINAAKYLKSLETEITELEGTNTKLEKHIAGGGGAADAAMRARRAQQRAKVQISKAADSQSQQLVSLTVMVMVECDVVELVLHILECLRWMKEISVLSVYADTYSPQLLLKAIANIKLQIVGGDWNEASFHEAMTKAANDATISCAPLAITAAQ

SEQ ID NO: 16903 - protein, 365 aa, Oryza sativa
  Clone ID: TF_OSC400608j.C1.p9.fg
MDANGGNGFGVESNASAVHGGMAMAWQWHGGQMSGGSSCAAAPPPVQQPAMDSLAWSSTVSPSTGAATAASGAGFLLPPAAVRGGFGSFPVNSGGIVEPAGDCSSESKKRRSDEIAGTDHANASNALADSGNETECSKDVNGEVIGPPATAAAGGKSKGKGAKDAGEAQKEGYSHVRARKGQATNNHSLAERLRREKISERMKLLQDLVPGCSKVTGKALMLDEIINYVQSLQRQVEFLSMKLSAVNPRIDLDIESLVNNSKDVLRFPGQPSSAPMGFSFSTEMMPGLQLSRPGILQGGVHGMINPDVFTSLMQKQQQNDKGAFREPQMHQTLDGSFRNTAQMPYPQVMSSEELSIRQDQDGFHM

SEQ ID NO: 16904 - protein, 315 aa, Oryza sativa
  Clone ID: TF_OSC102356j.C1.p4.fg
MGLDRCESEVGVRCPRLIRSDAGGDLAALGSSESEQPTRPARPRGKRSRAAEVHNLSEKRRRSRINEKMKALQSLIPNSSKTDKASMLDDAIEYLKQLQLQVQMLSMRNGLYLPPVNLSGAPEHLPIPQMSAALDQNSAKASDPSVVLQPVNQTSGALLPFELASQHKPLFLPGVPNATALEPRFLVESSRSNLQSLRFTEPAEMIYPDEMMLKHRLTSASESTIVPGTDEKSVRQNTYMMNADRFDRYALSKDQLQHIMPKNTESVLDMPHLQRILTKVLIVSDYKLTIQLPILDRLQTSDTKVRVEGRIKVNP

SEQ ID NO: 16905 - protein, 272 aa, Oryza sativa
  Clone ID: TF_OSC404982j.C1.p1.fg
MVLSKLRRRLRSVTPGERTPTATADDRDARAQRSGGGDDEDATAAPPPPTSSQLHHMISERRRRERLNESFEHLRGLLPPGSKKDKATVLAKTLEYMNLLIAQISELEAKNRALQTQIHQRANGSSSSRSSMIRTVNEVHHHHNHQWLAVAAAAGGSPERVQVHVIGGGDHDGGASASSSSSAPEVTVRVAVRAPERGGADVSELVLRVLALLKAMGGFTVVAVDARQPGGGGGNGVAQASLTLRATVRMLTLLKRMFRAKNHSSSDQIIRL

SEQ ID NO: 16906 - protein, 373 aa, Oryza sativa
  Clone ID: TF_OSC400679j.C1.p12.fg
MSTLVDALCAPCSDTALIYDTFNASAAASFLFDNAAAFCDADILGATATGEKEATSSAAAAAAEAAPPRKKRRRRAKSCKSREETETQRMTHIAVERNRRRQMNEYLAILRSLMPEPYVQRGDQASIVGGAIEFVKELEQQLQSLEAQKRTLLPHHKARCDDATPMHNASGSNVGAGGCMEPTTTTSNCSSSVTEDAPSADAPPFAQFFAYPQYVWCHSPRDSTTTTTAASASASASASSSSPATVAAALQSEHRSGLADIEVSLVETHASVRVMSPRRPGQLLKMIAGLQALRLTVLHLNVTTLDSLVLYTLSVKVEEGCSLTTVDDIAAAVHHVLCIVDAEAAASEHLLAAGQLATTATAVAKRELATYMY

SEQ ID NO: 16907 - protein, 310 aa, Oryza sativa
  Clone ID: TF_OSC400284j.C1.p3.fg
MAVDWIWERRRREEEYNHQMSQDELQQPGQVQWTPAPEEKSEIAVQFFTAPYPCQNGQLDHGEHHALGGIGACSSVHWQPDRGTCYWPPPLSGDGGGGSGSGSSGTGEGSYIGERCYYVGEPDVPIGLNLLVGDNDGAGVVLRDAAPQAKRRTQAGHGGDLGRQKKKARVSDKRNQESMQSGSCSDNESNCSQVNRRKVDRVAGGGNGKVPARRRSATIAQSLYARRRRERINGRLRILQKLVPNGTKVDISTMLEEAVHYVKFLQLQIKVEVQIVCHDQMLSSDELWMYAPIVYNGMDLGIDLNISPPR

SEQ ID NO: 16908 - protein, 362 aa, Oryza sativa
  Clone ID: TF_OSC401091j.C1.p1.fg
MWEAVGGGDGTALLPWPGSAAAAPLYMPPAAAAAAPFAAGEQLPVEQPFYFDGGGGVAGHNHHPHHHQYGMEAPPPMTMMQMGGGGSSSSRMVVSGLLGTLQAELGRMTAKEIMDAKALAASRSHSEAERRRRQRINGHLARLRSLLPNTTKFRKIHAFQSNNVHIFIMTDKASLLAEVIEHVKELKRQTSAMMEDGAAGGEAAAAPVVLLPTEDDELEVDAAADEGGRLVARASLCCEDRADLIPGIARALAALRLRARRAEIATLGGRVRSVLLIAAVEEEDPDEAGNDDDGEHGYGVAASHRRHELVASIHEALRGVMNRKAASSDTSSSGAGGGGGSIKRQRMISAHDQQGSFNSSGW

SEQ ID NO: 16909 - protein, 236 aa, Oryza sativa
  Clone ID: TF_OSC401731j.C1.p31.fg
MDGGGDPVDEFLIGGGGEDGDLGVFCDGVPTLPCDGGLGIDDVSGDTCCLDQSVLGKRGRDESSSSGPKSKACREKIRRDRLNDRFLELSSVINPDKQAKLDKANILSDAARLLAELRGEAEKLKESNEKLRETIKDLKVEKNELRDEKVTLKAEKERLEQQVKALSVAPTGFVPHLPHPAAFHPAAFPPFIPPYQALGNKNAPTPAAFQGMAMWQWLPPTAVDTTQDPKLWPPNA

SEQ ID NO: 16910 - protein, 447 aa, Oryza sativa
  Clone ID: TF_OSC26607j.C1.p1.fg
MDAGATARSSSSSAMMMNQKKPLLSDGELVELLWQDGGVVGHAQTRHRSSDVLARSGVTGEEETASAWFADGGGGGGGDDDALGLGMGRDIYSQLWHSFANVDGHAAGALALATPTPTPRAAARSDDVSSRLDEADLSICGSNAVVAPALPADDDDDIDAAAPREEEEEEEEGPGAARAAGASSSGGSGSGSGSYPLFKRGREELVDSLSEVADETRPSKRPAAKRRTRAAEVHNLSERRRRDRINEKLRALQELVPHCNKTDKASILDEAIEYLKSLQMQVQIMWMTTGIVPMMFPGTHQLMPPMGMGLNTACMPGAQAQGLNQMQRTTYYMNNSLPNQMPQIPSPAMNAPSVPDDMQNDNRIRGPRNPFLHCNDTLTATAQVDYYVKFHHYRSFRLQFLFILQYQFFSGARHRQYVKNIVAVWTQLEPASQKLHKNTTVTVSLFF

SEQ ID NO: 16911 - protein, 198 aa, Oryza sativa
  unsure (1)..(198): unsure at all Xaa locations
  Clone ID: TF_OSC26607j.C1.p1.np
TRPSKRPAAKRRTRAAEVHNLSERRRRDRINEKLRALQELVPHCNKTDKASILDEAIEYLKSLQMQVQMPPMGMGLNTACMPGAQAQGLNQMQRTTYYMNNSLPNQMPQIPSPAMNAPSPWSHQSIKCPFSFKLYNIIEYVCRIIGRLVGRKKYMPPQXVQIVQPHPISSLSGDIAAPPAGRVLRPAFIGGMELPTFG

SEQ ID NO: 16912 - protein, 173 aa, Oryza sativa
  Clone ID: TF_OSC418437j.C1.p9.np
VFLVGFIWAVHADISQQQQHLHVSISNSTAKICILFLKKKSLAPATATPRRGLGGRVQEGARLLFSSSQQQHARTHHTRSSRAMAAAMATRPSKRPAAKRRTRAAEVHNLSERRRRDRINEKLRALQELVPHCNKTDKASILDEAIEYLKSLQMQVQIMWMTTGVPMMFPGTQ

SEQ ID NO: 16913 - protein, 567 aa, Oryza sativa
  Clone ID: TF_OSC400235j.C1.p1.fg
MASAPPVQEEPLQPGTNHFRSLLAAAVRSISWSYAIFWSISTSCPGVLTWNDGFYNGVVKTRKISNSADLTAGQLVVQRSEQLRELYYSLLSGECDHRARRPIAALSPEDLADTEWYYVVCMTYSFQPGQGLPGKSYASNASVWLRNAQSADSKTFLRSLLAKTIICIPFTSGVLELGTTDPTFIIAYACHNMEQVLEDPKLVNRIVAYFQELQFPICLEVLMSTSPSPNETEDADIVSEGLITHNAIEEGQMVVSDECVSNANRDPITMEIDELYSIYEDLDLDMDLDLDTVRFLEDNGWPVNPSSFQLVPASSTEAVAAAAAANDVDGVANSQVSCFMAWKSAKSNEMAVPVVTGIESQKLLKKVVDCGARMSTGRGSRAALTQESGIKNHVISERRRREKLNEMFLILKSIVPSIHKVDKASILEETIAYLKVLEKRVKELESSSEPSHQRATETGQQRRCEITGKELVSEIGVSGGGDAGREHHHVNVTVTDKVVLLEVQCRWKELVMTRVFDAIKSLCLDVLSVQASAPDGLLGLKIQAKFACSGSVAPGMISEALQKAIGG

SEQ ID NO: 16914 - protein, 473 aa, Oryza sativa
  Clone ID: TF_OSC400431j.C1.p63.fg
MEDCSSWIHGYANANATAGNNGFMCGYAASCSPVEFQQQQQLVGSQIEHHLNQASLICNLFDQETMHKIKEILGFNLVGVAFYYGMQISMQMGMDDESAVYDGASMVDVLLMASSSPHHHAGAGSFQYSSPTSSSASFRSASVSCSPESSAAATTHFLGPPAPSAAAAGFHYPEVSSQAPLPLPLPPYEPQHGQYTTVLSPPPPAPELPATTTPATGGAFRRYARHLRPRRLPKPGGCGQRMFKTAMSVLTKMHVAATYNRQYYYQQAAAAAASASAAEAPPSGNQLQHMISERKRREKLNDSFLALKAVLPPGSKKDKTSILIRAREYVKSLESKLSELEEKNRELEARLASRPAAAAKNDKGETAAAPAPEAGDETKRKDLVEIEVTTSGGGAGAADAAAAAGGDQETCTLNVDLRGGGGGGGMSTTDVVLRTLQCLREQIGDGASLVAMSTSAGSGGRPPRANLTLQLKV

SEQ ID NO: 16915 - protein, 226 aa, Oryza sativa
  Clone ID: TF_OSC400099j.C1.p6.fg
MMSFPYSSGDLGEATTAAAAAVDMITLDQMFRDYDASTGDDLFELVWESCGGGEIDSGAGEVQPAGVPCCRRLLPGSSPEPTSEDEMAAWLSTIVTGSGGGGGDDVAAGGDHQDPAVKKPDGEPLTEKMDKKLPTRTEERRRVKHKARRNPGYAETHGLTEKRRRSRINEKFKMLQRLVPGCDKCSQSSTLDRTIHYMKSLQQQLQVDPPAAIYNRISVERIDMII

SEQ ID NO: 16916 - protein, 799 aa, Oryza sativa
  Clone ID: TF_OSC413939j.C1.p3.gm
MGHSNVWNSHPKNYGPGSRVCRVCGNPHGLIRKYGLMCCRQCFRSNAKDIGFIKAAACSGSLAGVGAQATMDLSLRGEAEAAPVYRPNSKHFTIEIHHGGFFCGMGVNRSYVDGKVSWFDYVNSREWGSSLHLLDLVAMLGYAAGPRLEVYWLLLGKRLADGLRIVDNEVEINVMNSVCNRVKNFVLYLDHSDHVSGSNHEDIVLSLISQLPKVMSPVRGCQQKEHGNQGGSNVGEPVCVVVDEEAEEIEDHGDYDSNDSEADDLDFVDIDYELQDDDDDLFEDNVDGDVLDQGLAPKKFNHKKVAGSKLKGKEVLREEGSDEESSDEEILELPDNTDEINLRFKSFNPEDMNNPVFKVGMVFPSLELLRKAITEYSLKNRVDIKMPRNDITRIKAHCAEGCPWNMADCKMTLPSFAKTVQKEWNLTPSRSKLARARRLALKEIYGDEVAQYNMLWDYGHELRRPIICLDGCHIKTKFGGQLLTAVGIDPNNCIFPIAMAVVEVESLTTWSWFLQTLKDDLGIVNTYIVDVMTKHCDCRRWSSLLAEVHDNMLDHMLLETPWLLAASSLNLADSGRNQPVSDRYLLVPHFAAAHRPLVASPASATNPRTILLAYKAIERFEYESIAFDVVFLHETEFIGLVITGNKRMFPMDEHFEQQQKKPKKKTRTSRSVSSSSTITDYETSSELVNPSCSSGSSVGEDSIAATDGSVVLKQSDNSRGHKQCSKDTQSLYAKRRRERINERLRILQQLVPNGTKVDISTMLEEAVQYVKFLQLQIKAKKTPPSPHLAALPPLPLRQI

SEQ ID NO: 16917 - protein, 187 aa, Oryza sativa
  unsure (1)..(187): unsure at all Xaa locations
  Clone ID: TF_OSC5815j.C1.p1.np
HGKGSNNKIXEMPDTAAGSSHARRAASPSSRRRRRPVASTSYRRATGRAATLLVGSGRRPAGDEDTKPVAGDAGHGGNGKGKVLDAAGEPPKDYIHVRARRGQATDSHSLAERVRREKVRREKISERMKLLQDLVPGCNKVTGKAVMLDEIINYVQSLQRQVEFLSMKLSTVNPQLDFDVDNFIPKD

SEQ ID NO: 16918 - protein, 348 aa, Oryza sativa
  Clone ID: TF_OSC401748j.C1.p10.fg
MELDEQAFLEELFSLRRDAWEYNAMGDFFSPACAAMDGFQERHQSTTTVSVLPTFTASYEQPPPAPAAGFDCLSEVYGNAAAAFGPNAGGGGGEYGGGGDMGFLDVVEPKASMVVDGGGLGVCKVEPGLQAEGGFSAAAAAPASKKKRVEGMPSKNLMAERRRRKRLNDRLSMLRSVVPKISKMDRTSILGDTIDYMKELLERIRQLQEEIEEQQQQETPGVLSVFRELNPNEMLARNTPKVAASIHCWIYNEEDDGINGVCEVQFDVERKEGGDTRVEIYCAAKPGLLLSTVSTLETLGLDIQQCVVSCFNDFGMHASCSEMQRERMSADMIKQELFKNAGYGGGCL

SEQ ID NO: 16919 - protein, 363 aa, Oryza sativa
  Clone ID: TF_OSC400265j.C1.p4.fg
MALEAVVFSEGYYFGCGGAMAAEAAAGGAWSWSHGYGGGVDQGKGAMELVVDDGVVNAFWDGGGGGASSSPVMAAVSGFIEEPDGGNSSVADAAPPPEHGGASVVGRDGSAAAPAAAAGRRKRRRARTVKNREEVESQRMTHIAVERNRRKQMNEYLAVLRSLMPASYVQRGDQASIIGGAINYVKEMEQLLQSLEAHRHARRARTDAAAALPFAGFFTFPQYSMSAVPTTTTTTVAAAATENGNAVAGAGAGDDADADVSGSKPSSVADIEVTMVESHANLKVLSRRRPRQLLRMVAGLQHHRLAVLHLNVASAGHMALYSLSLKVEEDCQLTSVDDIAAAVHGIVETIEQEQQQQQKQSCS

SEQ ID NO: 16920 - protein, 375 aa, Oryza sativa
  Clone ID: TF_OSC900037j.C1.p3.np
YENQGYVVQEVYVLSNQNYCCSEDDGLVELLWCNGHVVMQSQAPRKPPRPEKTAAAAAAMAEDESASWFQYPVDDLEKDLFTELFGEMTAAGGGGGDVRRAACKEERGAVAAFQSRMMPPPWPARGKAEFGDVDDVCGVSEVTVGESSMLTIGSSICGSNPAGVSEVTVGESSMLTIGSSICGSNPAGGEREGRRRHRRRRQKGARTATVASSSMRSRSCTAKAEPRDVAAGRQAEAARRRRHAGSPSEDVEFESAAATCSPAQKTTTAKRRRAAEVHNLSERRRRDRINEKMKALQELIPHCNKTDKASMLDEAIEYLKSLQLQLQMMWMGGMMWMGGGMAPPAVMFPAASTSIVPQRMLQGLKFRPKYPKFPV

SEQ ID NO: 16921 - protein, 663 aa, Oryza sativa
  Clone ID: TF_OSC400964j.C1.p82.fg
MTEILSPTKTILLADCSSKKAHAFNPRKGGGCKDAKGISLPCQPCDSKVFSHPLANRNRNGLVINCVLRQLQQQQQQLHKIKSAARQQFIPLSPLPLFTHLLPVQVLLFHSFTVPPLFLALSRTRKAPAFTLSPLAFPHPRRSGIWWLLASRVSFAGLGRSWELGNSGGLVGFRGELRQIFEMNCGPPDQLPPATAPSCFLNLNWDQSMDAAAGGHLDPALSSMVSSPASNSTGALHGISPQPHYGGGTPLSSPPKLNLSMMGQFHHYAAPPQVGGGGGGGGGLPILENLMPMGHLDQFLADPGFAERAARLSGFDARGGGGGGGYGGAGPAQFGLPDAGAAGASKEMELGNTRDESSVSDPAPGGAEIPPKGASDGNARKRKASGKGKGKDSPMSTSAAKEDSSGKRCKSTEESNAAAEENSGKGKAAQSNSENGGGKKQGKDSSSKPPEPPKDYIHVRARRGEATDSHSLAERVRREKISQRMKLLQDLVPGCNKVVGKAVMLDEIINYVQSLQRQVEFLSMKLATVNPQLDFNNLPNLLAKDMHQSCSPLQSSHFPLETSGAPLPYINQPQQGNPLGCGLTNGMDNQGSMHPLDPAFCRPMGSHHPFLNGVSDAASQVGAFWQDDLQSVVQMDMGQSQEIATSSNSYNGSLQTVHMKMEL

SEQ ID NO: 16922 - protein, 323 aa, Oryza sativa
  Clone ID: TF_OSC27232j.C1.p1.fg
MGAHGDHRHHHHHQEAGVLVDEEEEEVIEQACGGPTSGVVEQEVGGDGGGVCQDAAGMVFEATSSVGSVSATMGPPPIMCWPPPAQPVHGAIHHHHNLGGGGGQQSPFFPLLPPLPPQPPPPPPFFADFYARRALQYAYDHSGGASSSSDPLGLGGLYMGHHGSHVAGMMMPPPFAPSPFGDLGRMTAQEIMDAKALAASKSHSEAERRRRERINAHLARLRSLLPNTTKTDKASLLAEVIQHVKELKRQTSEITEEACPLPTESDELTVDASSDEDGRLVVRASLCCDDRTDLLPDLIRALKALRLRALKAEITTLGGRVKN

SEQ ID NO: 16923 - protein, 353 aa, Oryza sativa
  Clone ID: TF_OSC9960j.C1.p2.fg
MEDSSLFMEWAMETLQHLHPLPATPPPAGGGYAGDNATFPSLQALRESSVSQNGMAPPEPTAHEGHRASNSWSSGDTDSVSGGGGGAVMEHDGWSTSPNSVRCAAGGGGGGGGGGLWPVSWNFSSAMTQPCNDQATPSNPPTTTRARYGGGGVRYLPAAVSPSPSAQTRRASSKGNGGGGSGSSSAAPYAQEHIIAERKRREKINQRFIELSTVIPGLKKMDKATILSDAVRYVKEMQEKLSELEQHQNGGVESAILLKKPCIATSSSDGGCPAASSAVAGSSSSGTARSSLPEIEAKISHGNVMVRIHGENNGKGSLVRLLAAVEGLHLGITHTNVMPFSACTAIITIMAKE

SEQ ID NO: 16924 - protein, 190 aa, Oryza sativa
  Clone ID: TF_OSC17447j.C1.p1.fg
MSHIAVERNRRRQMNDHLKVLRSLTPAFYIKRGDQASIIGGAIDFIKELQTLLQSLEAQKKRRQQPQAHLISPASISASGGGSPSPTPSPRSLITSCSPTAAAGSSAGSSSSISPKDENKQQLQLVAELAACCNSPMADVEARISGANVLLRTLSRRAPPVRIIALLESLHLEVLHLNITTMDDTVLYSF

SEQ ID NO: 16925 - protein, 512 aa, Oryza sativa
  Clone ID: TF_OSC401546j.C1.p6.gm
MHAAHGGGGRQPVTILPISSSQLVVTGGDWPLLAYLEKALMALEAVVFPQEHLSCAAAMYAAPPSSLGCGVDMDEFEENGGVVLQEEAGVAVHGGGGGGAGGMMSLWVNAATCARSIAASGAVEEFWDERQYPVSSPPAAPTPAASGGGGGHAKAAARRRRRRPKVVKNKEEAESQRRNHIAVERNRRRQMNEYLAVLRSLMPPSYAQRGDQASIVAGAINFVKELEQLLQSLEAQKRRAEHAPPAPPFAGFFTFPQYSTTVGDNNAAGSGAADGEGGCGARPGAADIEVAMAESHANVRVLAPRRPRQLLRMVVALQCLGLTVLHLNVTTTADHLALYSFSLKMEDECRLSSVDEIAGAVNQMMSESEDEKSLSDEITDTSHLPWDPFWTRKCKYPSGGRSDNGWQRTEGWRAVGGASAGRRRGAAGGSEASAGRWVEQWGGRWKWSVGGAVGRATAGTRGGGRSERSGARRREIGETAGGREEHRAVGLPSSPSVIRGEEMGWKRGRSEQ

SEQ ID NO: 16926 - protein, 267 aa, Oryza sativa
  Clone ID: TF_OSC401369j.C1.p46.fg
MGSAPFGDAVAGGGLYEYQGYHGGFAGGHGLGQPAGRAPALDDGETEGMDASAAAAVAAMEMAKRNCGGGREEKAAMALKSHSEAERRRRERINAHLATLRTMVPCTDKMDKAALLAEVVGHVKKLKSAAARVGRRATVPSGADEVAVDEASATGGGGEGPLLLRATLSCDDRADLFVDVKRALQPLGLEVVGSEVTTLGGRVRLAFLVSCGSRGGAAAAAMASVRHALQSVLDKASSGFDFAPRAASLLGSKRRKVSTFESSSSSS

SEQ ID NO: 16927 - protein, 374 aa, Oryza sativa
  Clone ID: TF_OSC401762j.C1.p11.fg
MSQEGPNNHPQGTQETHDCPFTIATNTPLGSTKMGYSDSRKSDENNTSSKPASPVVSSDVVEIKETWENVVVADEEGEGGEDGFASDASESKSKSSSDEVDYELLDLLAGASEGCSGGNNNDEVKNFAYADHKMHVLRERERRKEMKNKFEILHALIPNLPEKTDKATIVEATINYIKNLQDKIHKMEMLKVEREHAIALATAATATAAASADTALQAPPPSEEENEEHDSVVAAATREMALADMVHAWEQQQEAAATGGSHGGHAVPPPPPAASLQTWTGPNMTASLTGDDGFITLSLPHQGGQKNLVAGAVSVLERHHIDVVTATVSASEQGDNLISLHCHLSPGSSSSQNLTPLDKFKLAMSELMLWVISV

SEQ ID NO: 16928 - protein, 266 aa, Oryza sativa
  Clone ID: TF_OSC413853j.C1.p7.fg
MAAWLYPIVGGHQVAAGGWLSPEAGDDRRAAPPAPEKKQMDNMPAVASPTMNKDEASDDSGERKKKKKKASSAAGKASRHRHAAGAHNLTEKRRRFKITERFRTLQRLVPGCDNKSNQASTLDQTIQYMKSLQHQLEATSAVGSPAAAVLYPAAVHPQSYMHPPAPPPPVAGAAAPVTMAPMPAGMVLAAAPPGAAPPPGPPATMMPFGAMLPYPPYPEVLLPPPPATLYGRPPAAAPSVAARRHGSTSGGGRISKSSSSSLRKEL

SEQ ID NO: 16929 - protein, 175 aa, Oryza sativa
  Clone ID: TF_OSC19716j.C1.p1.fg
VVQKKGNKNAQSKKAQKGACSRSSNQKESNGGGDGGNVQSSSTNYLSDDDSLSLEMTSCSNVSSASKKSSLSSPATGHGGAKARAGRGAATDPQSLYARKRRERINERLKILQNLIPNGTKVDISTMLEEAVHYVKFLQLQIKLLSSDDMWMFAPIAYNGVNVGLDLKISPPQQQ

SEQ ID NO: 16930 - protein, 324 aa, Oryza sativa
  Clone ID: TF_OSC900178j.C1.p3.fg
MEDSEAMAQLLGVQYFGNDQEQQQPAAAAPPAMYWPAHDAADQYYGSAPYCYMQQQQHYGCYDGGAMVAGGDFFVPEEQLVADPSFMVDLNLEFEDQHGGDAGGAGSSAAAAAAATKMTPACKRKVEDHKDESCTDNVARKKARSTAATVVQKKGNKNAQSKKAQKGACSRSSNQKESNGGGDGGNVQSSSTNYLSDDDSLSLEMTSCSNVSSASKKSSLSSPATGHGGAKARAGRGAATDPQSLYARKRRERINERLKILQNLIPNGTKVDISTMLEEAVHYVKFLQLQIKLLSSDDMWMFAPIAYNGVNVGLDLKISPPQQQ

SEQ ID NO: 16931 - protein, 303 aa, Oryza sativa
  Clone ID: TF_OSC417480j.C1.p2.fg
MTHNSSSSSSWDLDMSLGSHHHPLLFDQPPPPPPPPPPPPLPFHLHHHPLDPSPSSSLVPPPPHHHHHAHHLHHPLDLDQRRGHHDYGGGDQGGDEELRLQQEAAAGGGGGGQDGGGGGDQDADEELGAMKEMMYRIAAMQPVDIDPATIKKPRRRNVRISDDPQSVAARHRRERISERIRILQRLVPGGTKMDTASMLDEAIRYIKFLKRQVQELQHQPGPPPPPYPAGAAPAAGPSTSAVGPPGRPFLPLGGGGPMIDWVGLTRPVDIHGPTSSSSSSSMGGALGFGFGCGGGGQSSHGMH

SEQ ID NO: 16932 - protein, 303 aa, Oryza sativa
  Clone ID: TF_OSC417550j.C1.p1.fg
MTHNSSSSSSWDLDMSLGSHHHPLLFDQPPPPPPPPPPPPLPFHLHHHPLDPSPSSSLFPPPPHHHHHAHHLHHPLDLDQRRGHHDYGGGDQGGDEELRLQQEAAAGGGGGGQDGGGGGDQDADEELGAMKEMMYRIAAMQPVDIDPATIKKPRRRNVRISDDPQSVAARHRRERISERIRILQRLVPGGTKMDTASMLDEAIRYIKFLKRQVQELQHQPGPPPPPYPAGAAPAAGPSTSAVGPPGRPFLPLGGGGPMIDWVGLTRPVDIHGPTSSSSSSSMGGALGFGFGCGGGGQSSHGMH

SEQ ID NO: 16933 - protein, 399 aa, Oryza sativa
  Clone ID: TF_OSC400812j.C1.p6.fg
MYGSPVSKDLNLPVQPPAMSSSGLLRYRSAPSTLLAEFCDDFLPPAAAPRAASPDADNVFSRFLADHQIRDKSPPATAAAAAAAAHFPDDPTMATQHHHQQQMMFQHHPQQMASVEGLYRTVSSTGIDAATAAANAAGGGGGGLLRQSSSPAGFLNHLNMDNGYGSMLRAGMAAAGGGVGFRNGANAAAAADSPGGSGGRLKGQLSFSSRQGSLMSQISEMDSEELGGSSPEGAGGGGGGGGRGYLSGYPMSSGWEESSLMSDTNISGVKRQRDSSEPSQNGGGGGGLAHQFSLPKTSSEMAAIEKFLQFQDAVPCKIRAKRGCATHPRSIAERVRRTRISERIRKLQELVPNMDKQTNTADMLDLAVDYIKDLQKQVKGLNDSRANCTCSAKHQQYSG

SEQ ID NO: 16934 - protein, 236 aa, Oryza sativa
  Clone ID: TF_OSC900200j.C1.p12.fg
MDFDLFNSYPESQLDLMSTMLQLEQLTALSDQSLFMAAPTSPPVSPMGTPSPQFSPPPQMSVTTTTAGGGYQDQYNSMPATYGAGAGVHQLDFAMSSPGSDSGAPQGSSSSSSSEAMREMIFHIAALQPVEIDPEAVRPPKRRNVRISKDPQSVAARLRRERISERIRILQRLVPGGTKMDTASMLDEAIHYVKFLKSQVQSLERAAAATGAAAHRAAAFGAAYPAALPMQHHAPW

SEQ ID NO: 16935 - protein, 138 aa, Oryza sativa
  Clone ID: TF_OSC403397j.C1.p2.hg
HRIGADQDAHGNNVQAYASANTSRQRPPPSSNQLQHTMSERKRREKLNGSFVALQSRPYVLPPGSKLDKTSSILIGAREYVKFLESKLSELEEKNRELEARLVSSPAVVAKNDAEEAAAPPEAGGESRFKYPVLKIDF

SEQ ID NO: 16936 - protein, 265 aa, Oryza sativa
  Clone ID: TF_OSC400741j.C1.p5.fg
MVSEDPNLVNRIVAYLKELQFPICLEVPSSTPSPDETEDADTVFDGLIEEDQMVILQGEDELGDVVVAECETNGANPETITMETDEFYSLCEELDLDLGSYQLVPTSARETVAAAAAAANDVDGVAYSHASCFVSWKRANPAEKVVAVPMTAGIESQKLLKKAVGGGTAWMSNIDDRGSVAITTTPGSNIKSHVMSERRRREKLNEMFLILKSLLPSVRKVDKASILAETITYLKVLEKRVKELESSSREPSRWRPTEIGQGKAP

SEQ ID NO: 16937 - protein, 478 aa, Oryza sativa
  Clone ID: TF_OSC400736j.C1.p3.fg
MDYSAGSYMWPGNSGSENYNFVDGSSESYAEEGSLPPSGYFMGAGSDRSLKITENERNPTMLANGCLPYNTQAHPLSGQILPKGELPNNLLDLQQLQNSSNLRSNSIPPGVLQCNSTSGTFDAKLDTPGLAELPHALSSSIDSNGSDISAFLADVHAVSSAPTLCSAFQNVSSFMEPVNLDAFGFQGAQNVAMLNKTSLPNGNPSLFDNAAIASLHDSKEFLNGGSIPSFGTVLQALGAGGLKAAQQEQNIRNIPLPTFTSGSHLAVTDAQGPPLPSKIPPLIHDHNSEYPINHSSDVEPQANSAPGNSANAKPRTRARRGQATDPHSIAERLRREKISERMKNLQVLVPNSNKADKASMLDEIIDYVKFLQLQVKVLSMSRLGAPGAVLPLLRESQTECHSNPSLSASTISQGPPDMPDSEDSSAFEQEVVKLMETSIISAMQYLQNKGLCLMPIALASAISNQKGMAAAAAIPPEK

SEQ ID NO: 16938 - protein, 463 aa, Oryza sativa
  Clone ID: TF_OSC401380j.C1.p29.fg
MQPNARQMRGGGGGGGGGQDDFFDQMLSTLPAVWSELGSGKPAWDLTAGAVGGGGGASDDHSAAAFDDSALLASRLRQHQIDGGGDKPIMLQLSDLHRHHGLAAGDDSGGAAGFLPLSLFADRSQDDIDAAFKSPNGARGDHALYNGFGAAGMHGAAAMQPPPFGQGGSMPAQSFGGGAAASGGGGGGSASAAAAAGASSGGGAAAPPRQRQRARRGQATDPHSIAERVYHSPTTFPFSPPFFIASMPCCLRRERIAERMKALQELVPNANKTDKASMLDEIIDYVKFLQLQVKVLSMSRLGGASAVAPLVANMSSESNGNGNATSSSGNGEAANGSSNGDNNGGGTLRVTEQQVAKLMEEDMGSAMQYLQGKGLCLMPISLATAISSATSSSLLPRTGGGAGGSLHEGGNGTSPPLVNGTATGCDDAGVFFSVKFVVELSFLLLNEDCRGKEESKLLVQKGP

SEQ ID NO: 16939 - protein, 451 aa, Oryza sativa
  Clone ID: TF_OSC400506j.C1.p47.fg
MAICSTDNELVELLWHNGGVVAQPQAAQARVVSSSGRGQSASVLTGDDTETAAWFPDTLDDALEKDLYTQLWRSVTGDAFPAAAAAGPSSHHAPPPDLPPPAARPPMRSGIGSSWTGDICSAFCGSNHIPETAAQRCRDAGAALPPERPRRSSTHDGAGTSSSGGSGSNFGASGLPSESASAHKRKGREDSDSRSEDAECEATEETKSSSRRYGSKRRTRAAEVHNLSERRRRDRINEKMRALQELIPHCNKTDKASILDEAIEYLKSLQMQVQIMWMTTGMAPMMFPGAHQFMPPMAVGMNSACMPAAQGLSHMSRLPYMNHSMPNHIPLNSSPAMNPMNVANQMQNIQLREASNPFLHPDGWQTVPPQDKEFNVGFAQRVVFLEIAENIDMMNRLHPYCCYQQQEQQLGEPEDYVWEPYHHCKLPSSQQKPEGGDLEFMSKLVASIISC

SEQ ID NO: 16940 - protein, 28 aa, Oryza sativa
  Clone ID: TF_OSC403417j.C1.p1.gm
HMISERKRREKLNDSFVALKAVLPTGSK

SEQ ID NO: 16941 - protein, 263 aa, Oryza sativa
  Clone ID: TF_OSC401007j.C1.p1.fg
MDELVLSPSSFSATACFPTLDFEFCEVPDQWLLGLGHDELDKDAAASALAAAAASQSASNDDVPRNPPATTTTTKRRGRKPGPRSGGGGAPPIGHVEAERQRREKLNRRFCELRAAVPTVSRMDKASLLADAVDYIAELRRRVERLEAEARRAPLAPSAAAAAAWAAGLGAGAIGRDDLVVRMIGRDAAILRLTTAAAAARHAPARMMCAVRALNLAVQHASVARVGGATVQDVMVDDVPAALQDEARLRAALLHTLQLADTT

SEQ ID NO: 16942 - protein, 485 aa, Oryza sativa
  Clone ID: TF_OSC401238j.C1.p2.gm
MELMDDDGSSSLLEELMAPLRRGTPTTTPEDLWLQAYPMMMSPMCGDGVMLGDLLVGGGNARNTLASPPPPSFPLPVPLTTTTPCPPLHEVSFEFDSIDCLGEVCNPYKRSGGAVRATAAAQVMVAAMDPRREAASSAVAVAAVEEEERCKARRGAGGGGDSGELAPMFVFGGGGGAAASVRPRSCRPPQPGAPSKNLMAERRRRKRLNDRLSMLRSVVPRISKMDRTSILGDTIGYVKELMDRIKNLQVEAATGDSSSSSTENLSMLKLNTLKPPPSSSSGEETPLIRNSTRFEVERRENGSTRIEMACAAIPELLPSTLAALEALGVEIEQCVISCFDDFAMQASCLQAAAREQRSRFYIFRRCVAMLLCWYKYRNITPLRAPKTATPTGSSSSHLGRLLHRRPRLSAPSRPPPPDAPLAPIRPPSIGCASRAKPASISAARASRAEPASAAIGCASLRQAGLRPFHQTMPRRPEAAVSHALG

SEQ ID NO: 16943 - protein, 329 aa, Oryza sativa
  Clone ID: TF_OSC410031j.C1.p10.fg
MALEAVVFPQGHFGYGCGRDSPAYGMPWCDVLAAAGGGGGFGEFYGVDEWDDQLQVASVDEWEVASKDNSDASTEGKAAAAERAEPVAAGRRKRRRTKVVKNKEEIECQRMTHIAVERNRRRQMNEYLAVLRSLMPASYSQRGDQASIVGGAINYVKELEQLLQSLEVQKSLKNRSGAMDAAGDSPFAGFFSFPQYSTSPRTGCSAAASAGSSGSASSVVMDDTAGSAESGRQSAAIADIEVTMVEGHASLKVLARRRPKQLLKLVVGLQQLRIPPLHLNVTTVDAMVLYSFSLKVEDDSKLGSVEDIATAVHQILGSIQQQEAVLSIS

SEQ ID NO: 16944 - protein, 401 aa, Oryza sativa
  Clone ID: TF_OSC401398j.C1.p3.fg
MYGAPVSKDLSLQPAGVRTPPQMSSPGLLRYRSAPSTLLGEVCGDFVLPGGGGGGGQLQLQLQQQRPGSPDHAADTVLARFLAGHGGHDNKPPRPAAHFAPPEDSMASHQQQLMYQSHQQQQQMASAMEGLYRTVSSGGTESTAAAAGNSLLRQSSSPAGFLNHLTMDNGYGNMLRAGMGGGGGGGDPRLKGQLSFSSRQGSVMSQISEMGSEDEELAGGGGSPEAGSNGGGAARGGYGGGYAMGSSAWEEPSPPATSLLPDSSLPSKRPRDDLPRQLSLPAASKNSSKPPSSASAAASPEMAAIEKFLQFQDAVPCKIRAKRGCATHPRSIAERVRRTRISERIRKLQELVPNMEKQTNTADMLDLAVDYIKELQKQVKVLNDSRSSCTCSASKQKHFAG

SEQ ID NO: 16945 - protein, 549 aa, Oryza sativa
  Clone ID: TF_OSC400741j.C1.p8.fg
MADELVLQRSEQLRELYDSLLSGECGHRARRPVAALLPEDLGDTEWYYVVCMTYAFGPRQGCVWLPGKSFASNEFVWLTNAQSADRKLFHRALIAKTIVCVPFIMHGVLELGTTDPISEDPALVDRIAASFWDTPPRAAFSSEAGDADIVVFEDLDHGNAAVEATTTTVPGEPHAVAGGEVAECEPNSDNDLEQITMDDIGELYSLCEELDVVRPLDDDSSSWAVADPWSSFQLVPTSSPAPDQAPAAEATDVDDVVVAALDSSSIDGSCRPSPSSFVAWKRTADSDEVQAVPLISGEPPQKLLKKAVAGAGAWMNNGDSSAAAMTTQGSSIKNHVMSERRRREKLNEMFLILKSVVPSIHRGNTNYYFIRFTIFITINMNMGNARMTYIMKRRECNFFRTKFVKVDKASILAETIAYLKELEKRVEELESSSQPSPCPLETRSRRKCREITGKKVSAGAKRKAPAPEVASDDDTDGERRHCVSNVNVTIMDNKEVLLELQCQWKELLMTRVFDAIKGVSLDVLSVQASTSDGLLGLKIQAKVVISAAK

SEQ ID NO: 16946 - protein, 328 aa, Oryza sativa
  Clone ID: TF_OSC401695j.C1.p30.fg
MALEAVVYSHGGHFGGYGGGLMGGAPAAPWDVFAAAGGGGSWDDPGLFAAEASLDVIQGVDEWEVDQDQHASSSSKVAARPPVKAAAAAGKRKRRRAKAAKNREEIESQRMTHIAVERNRRRQMNEYLAVLRSLMPPSYAQRGDQASIVGGAINYVRELEQLLQTLEARRTIKDHIDGGAGESPSPFAGFFAFPQYSTATSGHGGGGDAHSRIVVKPAETTTTAAGGGAGAAIADIEASMVEGHASVKVQARRRPRQLLKLVAGLHQLGLTTLHLNVTTVAAMAMYSFSLKVEDGCKLGSVEEIATAVHEILERMQEEQAFADAKTSL

SEQ ID NO: 16947 - protein, 613 aa, Oryza sativa
  Clone ID: TF_OSC100243j.C1.p15.fg
MEADEDGANGGTGGTWTDEDRALTASVLGTDAFAYLTKGGGAISEGLVAASLPVDLQNRLQELVESDRPGAGWNYAIFWQLSRTKSGDLVLGWGDGSCREPHDGEMGPAASAGSDEAKQRMRKRVLQRLHSAFGGVDEEDYAPGIDQVTDTEMFFLASMYFAFPRRAGGPGQVFAAGVPLWIPNTERNVFPANYCYRGYLANAAGFRTIVLVPFETGVLELGSMQQVAESSDTLQTIRSVFAGAIGNKAGVQRHEGSGPTDKSPGLAKIFGKDLNLGRPSAGPGTGVSEADERSWEQRTGGGSSLLPNVQRGLQNFTWSQARGLNSHQQKFGNGILIVSNEATPRNNGGVDSSTATQFQLQKAPPLQKLPQLQKSHQLVKPQQLVSQQQLQPQAPRQIDFSAGTSSKPGVLTKKPAGIDGDGAEVDGLCKDEGPPPALEDRRPRKRGRKPANGREEPLNHVEAERQRREKLNQRFYALRAVVPNISKMDKASLLGDAITYITDLQKKLKEMEVERERLIESGMIDPRDRTPRPEVDIQVVQDEVLVRVMSPMESHPVRAIFQAFEEAEVHAGESKITSNNGTAVHSFIIKCPGAEQQTREKVIAAMSRVMNSG

SEQ ID NO: 16948 - protein, 613 aa, Oryza sativa
  Clone ID: TF_OSC22065j.C1.p1.fg
MEADEDGANGGTGGTWTDEDRALTASVLGTDAFAYLTKGGGAISEGLVAASLPVDLQNRLQELVESDRPGAGWNYAIFWQLSRTKSGDLVLGWGDGSCREPHDGEMGPAASAGSDEAKQRMRKRVLHRLHSAFGGVDEEDYAPGIDQVTDTEMFFLASMYFAFPRRAGGPGQVFAAGVPLWIPNTERNVFPANYCYRGYLANAAGFRTIVLVPFETGVLELGSMQQVAESSDTLQTIRSVFAGAIGNKAGVQRHEGSGPTDKSPGLAKIFGKDLNLGRPSAGPGTGVSEADERSWEQRTGGGSSLLPNVQRGLQNFTWSQARGLNSHQQKFGNGILIVSNEATPRNNGGVDSSTATQFQLQKAPPLQKLPQLQKSHQLVKPQQLVSQQQLQPQAPRQIDFSAGTSSKPGVLTKKPAGIDGDGAEVDGLCKDEGPPPALEDRRPRKRGRKPANGREEPLNHVEAERQRREKLNQRFYALRAVVPNISKMDKASLLGDAITYITDLQKKLKEMEVERERLIESGMIDPRDRTPRPEVDIQVVQDEVLVRVMSPMESHPVRAIFQAFEEAEVHAGESKITSNNGTAVHSFIIKCPGAEQQTREKVIAAMSRVMNSG

SEQ ID NO: 16949 - protein, 186 aa, Oryza sativa
  Clone ID: TF_OSC7102j.C1.p1.gm
PGTGVSEADERSWEQRTGGGSSLLPNVQRAGIDGDGAEVDGLCKDEGPPPALEDRRPRKRGRKPANGREEPLNHVEAERQRREKLNQRFYALRAVVPNISKMDKASLLGDAITYITDLQKKLKEMEDEVLVRVMSPMESHPVRAIFQAFEEAEVHAGESKITSNNGTAVHSFIIKCPGAEQQTREK

SEQ ID NO: 16950 - protein, 279 aa, Oryza sativa
  Clone ID: TF_OSC400553j.C1.p15.fg
MAQFLGAHGDHCFTYEQMDESMEAMAAMFLPGLDTDSNSSSGCLNYDVPPQCWPQHGHSSSVTSFPDPAHSYGSFEFPVMDPFPIADLDAHCAIPYLTEDLISPPHGNHPSARVEEATKVVTPVATKRKSSAAMTASKKSKKAGKKDPIGSDEGGNTYIDTQSSSSCTSEEGNLEGNAKPSSKKMGTRANRGAATDPQSLYARKRRERINERLRILQNLVPNGTKVDISTMLEEAVQYVKFLQLQIKLLSSDDTWMYAPIAYNGVNISNIDLNISSLQK

SEQ ID NO: 16951 - protein, 294 aa, Oryza sativa
  Clone ID: TF_OSC400390j.C1.p14.fg
MAAQASSKRGMLLPREAVLYDDEPSMPLEILGYHGNGVGGGGCVDADYYYSWSGSSSSSSSSVLSFDQAAVGGSGGGCARQLAFHPGGDDDDCAMWMDAAAGAMVENTSVVAGGGNNYCHRLQFHGGAAGFGLASPGSSVVDNGLEIHESNVSKPPPPAAKKRACPSGEARAAGKKQCRKGSKPNKAASASSPSPSPSPSPSPNKEQPQSAAAKVRRERISERLKVLQDLVPNGTKVDLVTMLEKAINYVKFLQLQVKVLATDEFWPAQGGKAPELSQVKDALDAILSSQHPNK

SEQ ID NO: 16952 - protein, 294 aa, Oryza sativa
  Clone ID: TF_OSC400498j.C1.p30.fg
MAMVAGDEAMSVPWHDVGVVVDPEAAGTAPFDAGAGYVPSYGQCQYYYYYDDHHHHPCSTELIHAGDAGSAVAVAYDGVDGWVHAAAAATSPSSSSALTFDGHGAEEHSAVSWMDMDMDAHGAAPPLIGYGPTAATSSPSSCFSSGGSGDSGMVMVTTTTPRSAAASGSQRRARPPPSPLQGSELHEYSKKQRANNKETQSSAAKSRRERISERLRALQELVPSGGKVDMVTMLDRAISYVKFMQMQLRVLETDAFWPASDGATPDISRVKDALDAIILSSSSPSQKASPPRSG

SEQ ID NO: 16953 - protein, 565 aa, Oryza sativa
  Clone ID: TF_OSC401508j.C1.p13.fg
MGRAAARLPGCLYLCLWAPAAAIAGGVQPNHLFCLDAWIGGGGGVGAGGGGGDRALELFEAYRGALCAAVSGCVPGWAYKEGAACMELTEHDLAASASLQVQQQFYHETGTKMAVFMGCDSGEIEVGLSAASATATAAVVGEMQQSILEELLQMPPPPPSPSSSSLLSLSVGSPEYSSLVRSMATSVGASAAADPSPVHGGLLAPVYGEFPGSDDDAAMAQAMLAVISTPAPPPPLWRPPRRRARSSSSPRRATAFKAYNAALSPRARPRPGAPGQRMIKTGISLLASVHMQTRSRELAAARQRDTHAAPPPPPPPPPPSSSQLHHMISERRRRERINDSFQTLRALLPLPPDSKKDKAAILASTTEYMDKLISQVSELGEKNRQLEAQLAARSGEAQWPAASGGGGGESSSERVQVDVVIAGSSASTDQPREVSIRVTVRAECDVSELVVAVLARLREMGRFAVVSVDAGRRSSSFAQASLTFRVMNYKYKTNSVTVGKSQLIVHTEKYKAGDVCDETSLKEAVAKAVDGAAFFKFQRTPFMHSKNYDQSDDLEGEAKLLPLDS

SEQ ID NO: 16954 - protein, 396 aa, Oryza sativa
  Clone ID: TF_OSC1723j.C1.p7.gm
MGDALCDQLLLVDSDGGEFIPHHADADADDLFTILETWEGCANVVAGGAPATTTTLGSPIAAAACISGVVGGQNHQQLPEPAAAKTVPATNNKRREEEVADRDGDGDDDDGSPQKRRKCCSPESSTTDVAAATTPKTAHIAVERNRRKQMNENLAVLRSLMPCFYVKRGDQASIIGGVVDYIKELQQVLHSLEAKKQRKVYTDQVLSPRPPATVAASCCSPRPPQLSPRLPPQLLKSTPPLSPRLAVPISPRTPPTPGSPYRLLRLPPPPPPASGSNYASPAMTPTHHETAAPSLDAIAAELSAYASRQALGGGLLLPDVKVEFAGANLVLKTVSQRSPGQAVKIIAALEGRSLEILHAKISTVDDTAVNSFTVKIGIECELSAEELVQVIQQTFT

SEQ ID NO: 16955 - protein, 401 aa, Oryza sativa
  Clone ID: TF_OSC400822j.C1.p1.fg
MGDALCDQLLLVDSDGGEFIPHHADADADDLFTILETWEGCANVVAGGAPATTTTLGSPIAAAACISGVVGGQNHQQLPEPAAAKTVPATNNKRREEEVADRDGDGDDDDGSPQKRRKCCSPESSTTDVAAATTPKTAHIAVERNRRKQMNENLAVLRSLMPCFYVKRGDQASIIGGVVDYIKELQQVLHSLEAKKQRKVYTDQVLSPRPPATVAASCCSPRPPQLSPRLPPQLLKSTPPLSPRLAVPISPRTPPTPGSPYRLLRLPPPPPPASGSNYASPAMTPTHHETAAPSLDAIAAELSAYASRQALGGGLLLPDVKVEFAGANLVLKTVSQRSPGQAVKIIAALEGRSLEILHAKISTVDDTAVNSFTVKYIFGQIGIECELSAEELVQVIQQTFT

SEQ ID NO: 16956 - protein, 372 aa, Oryza sativa
  Clone ID: TF_OSC400032j.C1.p27.fg
MPAAGGLARYGSAPGSLLASIADSVIRGRGVGVVDQLHHHQHQHQLPPPPPPQQQQMVGRYFSAESSGLTSCESSCRTTTTTSTAAAADVGRHPLERAYGGSGEIHVDASSAAVPLFRHSSSPAGLLSRLMADPHGNGMAATRGMGGYSGGGGDAGAMAHRRLSSQWSFSRQDLPQISEMGGLIPDIGESIVTGGGGNSSSDGAGHGAQSSSFLSSRNFSMSSWDDTNSIMFSPPSSSKKARVAAAAAGDHGDDMVSSFSNIDSQFGLSKQSSLEMAGMDDFLQLQPDSVACRARAKRGCATHPRSIAERERRTRISKRLKKLQDLVPNMDKQTNTSDMLDIAVTYIKELQGQVEKLKHDQANCTCSGKHDC

SEQ ID NO: 16957 - protein, 426 aa, Oryza sativa
  Clone ID: TF_OSC400853j.C1.p7.fg
MDAEMAMGESFAYYWETQRYLESEELDSMYLPTQDDSNYESSSPDGSHSSSAPAPAAVGGDAAAAVAGSGGGMTTMMMGGGGGGGDDAGGANKNILMERDRRRKLNEKLYALRSVVPNITKMDKASIIKDAIEYIQRLQAEEQQMLREVAALESAAAASAAPAAANPFAGLGADEEHEYGHHHPSSSSERTKKVKRALSVSSISDALLAAAAPAPPVEIQELRVSEVGDRVLVVSVTCSKRRDAMARVCRALEELRLRVITANITSVAGCLMHTLFVEVDHMDSVQMKQMVEAALSQLVATGRCGSASHDYLLFVDHGAVVNVRYCEFFLLCSSRTLANLPPRLSLEAVAAHTPMPPLTRVEVGATGTGVRFMWESLPSLMRMVPIGSLKPAANVRACAEVAATSGESNLTCSQQQVHLRLKLSCA

SEQ ID NO: 16958 - protein, 338 aa, Oryza sativa
  Clone ID: TF_OSC418099j.C1.p14.fg
MDDSSFFMQWAMDTLHQLPSDSTAAAAYATDVAGDSGAFPSLQALRNASAAGGGGGFRDLTVQVDQVHRANSWSSSDSPGGGAATAAAGWSPHVTGGGGRGHRPMSWNFSAASAQPTTEDSGGGGGGGVVPAPLQAMETTATARAAVKKGGGGGSSSSAAAPGYVQDHIIAERRRREKINQRFIELSTVIPGLKKMDKATILGDAVKYVKELQEKVKTLEEEDGGGRPAAMVVRKSSCSGRQSAAGDGDGEGRVPEIEVRVWERSVLVRVQCGNSRGLLVRLLSEVEELRLGITHTSVMPFPASTVIITITAKASSLSNHPALLCLYICIKLPCVISS

SEQ ID NO: 16959 - protein, 688 aa, Oryza sativa
  Clone ID: TF_OSC401909j.C1.p20.fg
MEAFMASADLPAFPWGAASTPPPPPPPPHHHHQQQQQQVLPPPAAAPAAAAFNQDTLQQRLQSIIEGSRETWTYAIFWQSSIDVSTGASLLGWGDGYYKGCDDDKRKQRSSTPAAAAEQEHRKRVLRELNSLIAGAGAAPDEAVEEEVTDTEWFFLVSMTQSFPNGLGLPGQALFAAQPTWIATGLSSAPCDRARQAYTFGLRTMVCLPLATGVLELGSTDVIFQTGDSIPRIRALFNLSAAAASSWPPHPDAASADPSVLWLADAPPMDMKDSISAADISVSKPPPPPPHQIQHFENGSTSTLTENPSPSVHAPTPSQPAAPPQRQQQQQQSSQAQQGPFRRELNFSDFASNGGAAAPPFFKPETGEILNFGNDSSSGRRNPSPAPPAATASLTTAPGSLFSQHTPTLTAAANDAKSNNQKRSMEATSRASNTNNHPAATANEGMLSFSSAPTTRPSTGTGAPAKSESDHSDLEASVREVESSRVVAPPPEAEKRPRKRGRKPANGREEPLNHVEAERQRREKLNQRFYALRAVVPNVSKMDKASLLGDAISYINELRGKLTALETDKETLQSQMESLKKERDARPPAPSGGGGDGGARCHAVEIEAKILGLEAMIRVQCHKRNHPAARLMTALRELDLDVYHASVSVVKDLMIQQVAVKMASRVYSQDQLNAALYTRIAEPGTAAR

SEQ ID NO: 16960 - protein, 277 aa, Oryza sativa
  Clone ID: TF_OSC400825j.C1.p44.fg
MLQLSELHRQAGGGEEDGSGAFSPLPLFTDRTNVPPREEMEGGFKSPNAAAGGEHALFNGFGVHGGSGGAGQPPFGQLRRERIAERMKSLQELVPNANKTDKASMLDEIIDYVKFLQLQVKVLSMSRLGGAAGMAPLVASMSSEGNSNGSSNGGGGKASKGGTGGEGGGGGGGGGGGGTGGGMRVTEQQVAKMMEEDMGTAMQYLQGKGLCLMPISLASAISSATSSASLLSRPSIRHAGAPPQTMLDAAGPTSPAAMSNGDDPRHAKADGGAGGTQ

SEQ ID NO: 16961 - protein, 367 aa, Oryza sativa
  Clone ID: TF_OSC412868j.C1.p5.fg
MQPSSRDTVAGGGGEGTQDDFFDQMLSTLPSAWADLGGGGGGAAGKSPWEVDPAAAAAASQVFDESALLASRLRHHQIGGAGGGGGEKPVMLQLSELHRQAGGGEEDGSGAFSPLPLFTDRTNVPPREEMEGGFKSPNAAAGGEHALFNGFGVHGGSGGAGQPPFGQLRRERIAERMKSLQELVPNANKTDKASMLDEIIDYVKFLQLQVKVLSMSRLGGAAGMAPLVASMSSEGNSNGSSNGGGGKASKGGTGGEGGGGGGGGGGGGTGGGMRVTEQQVAKMMEEDMGTAMQYLQGKGLCLMPISLASAISSATSSASLLSRPSIRHAGAPPQTMLDAAGPTSPAAMSNGDDPRHAKADGGAGGTQ

SEQ ID NO: 16962 - protein, 198 aa, Oryza sativa
  unsure (1)..(198): unsure at all Xaa locations
  Clone ID: TF_OSC400803j.C1.p1.np
TKVEQATEVSSQQERISMEEDNQKSCSKMQSKEDSSDGDGTKEDYVHVRAKRGQATNSHSLAERLRRKKISERMKLLQDLVPGCSKITGKAVMLITGKAVMLDEIINYVQSLQRQVEFLSMKLATVNPELSFDIEQILSKQSFSVLSRVYLSRLNLKTSPFMQFFIQQKSXNIVFCXYSSNKXRNGNMHPLEELKLNK

SEQ ID NO: 16963 - protein, 351 aa, Oryza sativa
  Clone ID: TF_OSC900340j.C1.p13.fg
MALEAVLLSRGDLFGRRRCAMEGGGGGWSSPFSGFEGVMDLDGGNWDAAACSSMLLHGFQELEIPAAAAAAAAMAPPPPPVEPANCAENAGGVGGHQEDQAAVAAAATAVQSGRRKRRRARAAKNKEEVESQRMTHIAVERNRRKQMNEYLAVLRSLMPPSYAQRGDQASIVGGAINFVKELEQLLQSLEARKSSRQCAAHDAAAAAAPFASFFTFPQYSMSAAAAAAPVAPVVNELHGRDDGGAGTAEAEASGSKPSAVADVEVTMVESHANLRVLSRRRPRQLLRLVVALQGHRLTVLHLNMTSAGHMVLYSFSLKVEDDCQLTSVDEIATAAHQIIEKIQEEQGCSLD

SEQ ID NO: 16964 - protein, 248 aa, Oryza sativa
  Clone ID: TF_OSC400376j.C1.p32.fg
MEQLFVDDPAFASSMSSLEADIFSGAGQLPSSPWLDLDLDDDVQDLSMAPTTANAVSSGYGSGGSGSHRKLSHNAYERDRRKQLNELYSSLRALLPDADHTKKLSIPTTVSRVLKYIPELQKQVENLERKKKELTTTSTTNCKPGVLGSQLMSEGMAPIVSATCINDMEIMVQVSLLSNVAGSVLPLSKCIKVLENEGLHFISSSTSSGFGNRTFYSIHLQRSEGTINEECPAFCERLEKVVRNKAKL

SEQ ID NO: 16965 - protein, 430 aa, Oryza sativa
  Clone ID: TF_OSC19437j.C1.p1.fg
MELDEESFLDELMSLRRDGSAPWQAPPYPGGGGGGGGGGMMMSDLLFYGGDGGSAEARGGMDASPFQELASMAAPPPQHPHEEFNFDCLSEVCNPYRSCGAQLVPSEAASQTQTQLTPLRDAMVAEEETSGDKALLHGGGGSSSPTFMFGGGAGESSEMMAGIRGVGGGVHPRSKLHGTPSKNLMAERRRRKRLNDRLSMLRSIVPKISKMDRTSILGDTIDYVKELTERIKTLEEEIGVTPEELDLLNTMKDSSSGNNNEMLVRNSTKFDVENRGSGNTRIEICCPANPGVLLSTVSALEVLGLEIEQCVVSCFSDFGMQASCLQEDGKRQVVSTDEIKQTLFRSAGYGGRNYSRSSTIYEFIFISSGSTSFLNTPESKLKICSSIVSFAFVNRYGNRPCDLSNIGFELNAKKWFIWFCPELYIICARI

SEQ ID NO: 16966 - protein, 215 aa, Oryza sativa
  Clone ID: TF_OSC401716j.C1.p98.fg
MHDPRGFPIHPQPYHLHPTAGGLGEGRMRGGGRRRPGAKLSTDPQSVAARERRHRISDRFRVLRSLVPGGSKMDTVSMLEQAIHYVKFLKAQVTLHQAALVQHEEGCQHADVAAAFSAADADLALELNHRHGGAGDDDAGMTTLEMAPMQEAVGYGDGPAHQMMQQALDPAGQLMMGGAHQLPPLPCCVFVQETDPSCYSVCNVHGEESGAQGSY

SEQ ID NO: 16967 - protein, 298 aa, Oryza sativa
  Clone ID: TF_OSC400780j.C1.p2.gm
MARRCGNTHSFVVAFLSCCPCPPVADLDLLESCVTQAAAPPVTAPATRAERRRKRPRPRPRAAPPPEKRKKPEEAENQRMTHIAVERNRRRLMNDHLASLRSLIPSNYIPRGDQATVVGGAIDYVKQLEQQLVALQAAAAERSGVGVVAAAATAASDGVFVSPQYTSYSEARGGSGVDVEATAAVGGHVRVRVAGRRWTGRLVRAVAAMEDLRLTVLHLAVTSVGHDAVVYCFNLKMEEGCEMATADEVATVVHQIFAWAQDHGSSGHSWQSQAHAGLLLEEDLYCSKRESVKVQSSV

SEQ ID NO: 16968 - protein, 66 aa, Oryza sativa
  Clone ID: TF_OSC29119j.C1.p1.fg
IRGYVVVAVPCKDKAPFVTKAEKLKAEYTKKIDAYNNKQAGGPATSGDSDKSKSEVNDEDEGSGDE

SEQ ID NO: 16969 - protein, 75 aa, Oryza sativa
  Clone ID: TF_OSC16612j.C1.p1.fg
VSKAAGEKWRAMSEQEKAPYVDKAGQKKQDYEKTKANFDKKESTSSKKAKTHDDGEGSDKSKSEVDDDQDGGSDE

SEQ ID NO: 16970 - protein, 203 aa, Oryza sativa
  Clone ID: TF_OSC400021j.C1.p5.fg
MAGKSGARTRKRVEATDSAVLKRARDGSAFTRCEACGKSVSVVLIDMHNCSLDDKIRISLEAQVVEQAVEVAASKKKSGKNNNNNGEGAKKGKRPPTAFFLFMSDFRKEYKAEHPDNKSVSAVAKEGGERWKSMSDEDKKPYLDKAAELKAEYHNGERSDENNVGGNAGEQEVDQPPKKGTDEDDQEDEDGAEEEKNELDDDI

SEQ ID NO: 16971 - protein, 145 aa, Oryza sativa
  Clone ID: TF_OSC423122j.C1.p6.fg
MKGKADASKKGEGRLKAAGGAGKRKKAAASGKPKRPPSAFFVFMSEFRQEYQAAHPDNKSVAAVSKAAGEKWRAMSEQEKAPYVDKAGQKKQDYEKTKANFDKKESTSSKKAKTHDDGEGSDKSKSEVDDDQDGGSDEENEDDEE

SEQ ID NO: 16972 - protein, 105 aa, Oryza sativa
  unsure (1)..(105): unsure at all Xaa locations
  Clone ID: TF_OSC408633j.C1.p3.gp
KVGGAAAAADPNRPKKPASSFLLFSKEARRQLAEERPGVASSTLTALVSVKWKELGEAEKQAWNGKAAEAMAAYKRDMEEYTKAAASGGGGGDASPCTSSSASSX

SEQ ID NO: 16973 - protein, 684 aa, Oryza sativa
  Clone ID: TF_OSC400426j.C1.p30.fg
MDLGFLPDAVDAVNGALKLNWKIEWNPLSFEAKMENGLESSVSFEAKLENRLESSNPGQFKVYSGGLAWKRQGGGKTIEIEKSDLTSVTWMKVPRAYQLGVRTKDGLFYKFIGFREQDVSSLTNFMQKNMGLSPDEKQLSVSGQNWGGIDINVTLSIVGNMLTFMVGSKQAFEVSLADVSQTQMQGKTDVLLEFHVDDTTGGNEKDSLMDLSFHVPTSNTQFLGDENRTAAQVLWETIMGVADVDSSEEAVVTFEGIAILTPRGRYSVELHLSFLRLQGQANDFKIQYSSIVRLFLLPKSNNPHTFVVVTLDPPIRKGQTLYPHIVIQFETEAVVERNLALTKEVLAEKYKDRLEESYKGLIHEVFTKVLRGLSGAKVTRPGSFRSCQDGYAVKSSLKAEDGLLYPLEKGFFFLPKPPTLILHEEIEFVEFERHGAGGASISSHYFDLLVKLKNDQEHLFRNIQRSEYHNLFNFINGKHLKIMNLGDGQGATGGVTAVLRDTDDDAVDPHLERIKNQAGDEESDEEDEDFVADKDDSGSPTDDSGGEDSDASESGGEKEKLSKKEASSSKPPVKRKPKGRDEEGSDKRKPKKKKDPNAPKRAMTPFMYFSMAERGNMKNNNPDLPTTEIAKKLGEMWQKMTGEEKQPYIQQSQVDKKRYEKESAVYRGAAAMDVDSGSGGNESD

SEQ ID NO: 16974 - protein, 146 aa, Oryza sativa
  Clone ID: TF_OSC900350j.C1.p14.fg
MATPGEFCWWFCACARGWFRLSVRKTKAEKDPNKPKRPPSAFFVFMEQFRKDYKEKHPNVKQVSVIGKAGGDKWKSMTDAIRGYVVVAVPCKDKAPFVTKAEKLKAEYTKKIDAYNNKQAGGPATSGDSDKSKSEVNDEDEGSGDE

SEQ ID NO: 16975 - protein, 133 aa, Oryza sativa
  Clone ID: TF_OSC400934j.C1.p22.fg
MKTRSQTAPKPLKTVRLPPVKPRPKPPPPQPQPPPSRKKGQPLVDRRRPKKPPTAFFYFMEDFRKTYKEENPSVKSMQEVGKACGEKWNTMTFEERVKYYDIATEKRAEYEKAVAEFDKKKESGELSEESDYD

SEQ ID NO: 16976 - protein, 646 aa, Oryza sativa
  Clone ID: TF_OSC15468j.C1.p2.fg
MTDGHHFNNISLGGRGGNNPGQFKLYSGGLAWKRQGGGKTIEVEKSDITSVTWMAIPRSYQLGVSTKEGLFYRFFGFREQDISSLTNFMEKNMRITPEEKQLSVGGHNWGGIEINGNMLSFNVGSKEAFEVSLADVAQTQMQGKTDVVLEFHVDDTTGGNEKDSLMDLSFHVPTSNTQFPGDENRPSAQVLWQAILNKADVGSSEEAVVTFDGIAILTPRGRYSVELHLSFLRLQGQANDFKIQYSSILRLFVLPKSNNPHTFVVITLDPPIRKGQTLYPHIVIQFETEAVVQRDLTLSDEVLAEKYKDRLENSYQGLIHEVFSKVLRGLSGAKVTRPSTFRSCQDGYAVKSSLKAEDGCSIRWRRASSFYQSPQHSFCMRSCSSLWQIEYVEFERHGAGGASISSHYFDLLVKLKNDQEHLFRNIQRNEYHNLFNFISGKHLKILNLGEAQGRAGGVTAVLQSTDDDAVDPHLERIRNQTGDDESDEEDEDFVADKDDSGSPTDDSGEEGSDASLSGGEKEKSSKKEASSSKAPLKKRKPKGGDAAEGSEKRKPKKKKDPNAPKRAIAPFMYFSKAERANLKNSNPELATTEIAKKLGERWQKMTAEEKQPYVEQSQVDKKRYAEESAAYRGAAAMDVDSGPASD

SEQ ID NO: 16977 - protein, 504 aa, Oryza sativa
  Clone ID: TF_OSC408633j.C1.p1.fg
MATAGSRKGGRGRKALTAVLDNDANISAGKADVAAAAGILSPPQKAKRATSKSSKGKAAAAAAAEEQASVVDAVSELQGMLEELRLEKEKAEEMVRERDEVIRRKEEEQGRLQAELKKVQRAKEFKPTVSIPLVKALIEKDQEGEKKKGKGKAGHERKKPCPAYVLWCKDQWNEIKKESPDADFKEVSNALGAKWKALGAEEKQPYEERYRQEKEAYLQVVGQEKREAEAMKLLEEEQMQRTAKELLEQYLKFRQEADDDGDGGDNKKASKKGKKKKKEKDPSKPKQPMSAYFVYTQQRRAALVAEKKNVPEIGRITGEEWKAMSEAEKAPFEAAARKQREEYQVEMAAYRQRKQEEAACQEKEEEEQKKIMKQEALQLLKKKEKTDNIIKKTKEEQRKKKVGGAAAAADPNRPKKPASSFLLFSKEARRQLAEERPGVASSTLTALVSVKWKELGEAEKQAWNGKAAEAMAAYKRDMEEYTKAAASGGGGGDASPCTSSSASS

SEQ ID NO: 16978 - protein, 603 aa, Oryza sativa
  Clone ID: TF_OSC25282j.C1.p3.fg
MSSAAGGGGGYGGGGGEHQHQQQQHHLLLGQAAGQLYHVPQHSRREKLRFPPDHPAESPPPPPPGSWPLPPAFYSYASSSSSYSPHSPTLAHAQLVAHGMPPGAATSGGAQIPSQNFALSLSSASSNPPPTPRRQFGGPGGGGGAAGPYGPFTGYAAVLGRSRFLGPAQKLLEEICDVGGRPAQLDRGSDEGLLDVDAMDAAGSVDHEMDGSDRAVADAVTVSGAEQQWRKTRLISLMEDFKALLSSLLKLAGGDPQFIYNQKVCKRYRQYYQQLQAVVSSFETVAGLSNAAPFASMALRTMSKHFKYLKGIILNQLRNTGKGATKDGLGKEDTTNFGLMGGGAGLLRGNNVNSFSQPHNIWRPQRGLPERAVSVLRAWLFEHFLHPYPTDSDKQMLAKQTGLTRNQVSNWFINARVRLWKPMVEEIHNLEMRQLQKNPSLDKNQLSMQHTQHSSDSSGKPCDPSNSLQGQSSSMTRNHSISASRHIEDGLSQMPHDISGQVSFAYNGLAAHHSIAMAHHHQPDLIGTGGAANAGGVSLTLGLHQNNNRAYIAEPLPAALPLNLAHRFGLEDVSDAYVMSSFGGQDRHFTKEIGGHLLHDFVG

SEQ ID NO: 16979 - protein, 603 aa, Oryza sativa
  Clone ID: TF_OSC401969j.C1.p5.fg
MSSAAGGGGGYGGGGGEHQHQQQQHHLLLGQAAGQLYHVPQHSRREKLRFPPDHPAESPPPPPPGSWPLPPAFYSYASSSSSYSPHSPTLAHAQLVAHGMPPGAATSGGAQIPSQNFALSLSSASSNPPPTPRRQFGGGGGGGGAAGPYGPFTGYAAVLGRSRFLGPAQKLLEEICDVGGRPAQLDRGSDEGLLDVDAMDAAGSVDHEMDGSDRAVADAVTVSGAEQQWRKTRLISLMEDFKALLSSLLKLAGGDPQFIYNQKVCKRYRQYYQQLQAVVSSFETVAGLSNAAPFASMALRTMSKHFKYLKGIILNQLRNTGKGATKDGLGKEDTTNFGLMGGGAGLLRGNNVNSFSQPHNIWRPQRGLPERAVSVLRAWLFEHFLHPYPTDSDKQMLAKQTGLTRNQVSNWFINARVRLWKPMVEEIHNLEMRQLQKNPSLDKNQLSMQHTQHSSDSSGKPCDPSNSLQGQSSSMTRNHSISASRHIEDGLSQMPHDISGQVSFAYNGLAAHHSIAMAHHHQPDLIGTGGAANAGGVSLTLGLHQNNNRAYIAEPLPAALPLNLAHRFGLEDVSDAYVMSSFGGQDRHFTKEIGGHLLHDFVG

SEQ ID NO: 16980 - protein, 1075 aa, Oryza sativa
  Clone ID: TF_OSC21053j.C1.p5.gm
MPDGHGGHDPLRPRPSRQFSHQPTKPHRDRDSDVSATGQSRKIEGTFPSPSRGGRTVAQEGARGYCCFRSKLQVPVRFCFPTTSRWSRCPLRSAGSSITIIGTPGGLLGSFKIELTGATVPGEPDPPIVLHYNVRLLGDKLTEDPVIVQNTWTIADDWGSEDRCPSPGSDAKDIAKVDELEKCGSMVGNDQKQAWATKLKSNVSSIQPAWKKNTEPKKYFPFRQGYLAIAILRVGAHGIHMTVDGKHVTSFAFREDLEPGFVGEAPPVPMDKPLDLFIGIFSTANNFKRRMAVRRTWMQYDAVRSGKAAVRFFVGLEWPEESYPPWAHGPGYIVSQDIAKEVYRKHKRGELKMFKLEDVAMGIWINEMKKDGLDKYGDNAGIDGVSSPMTLRRYYKEQGNVMPGEDFLELDLRAARGGGGGGRTAAEAAEDERDNGGCARRRLTAAHAHLSRLYLGYNPFLKAFIQDFPKLIKTDLSVPTEEKVFPEAASFLNGSKQIDASDLPSDDSADNDYDPTLAQGHKVDEEKSSGEDGGEGLDSDDSSSEDSESSEKEKSKTSQNGRTVDDLGLPSEDSEDGDFDPAGPDSDKEQNDESNSDQSDESDFTSDSDDFCAEIAKSCGQDEISGPSSSQIRTVDRTDGSGFDASSSSLPTGGGARRRRLRPMRAGREGAAPCDLRRGVVVVVVADPAAVRARRKTEAGTQTEGGRRWSSPACGGRAAASRARRKEEAGARGVPPDPPLAHHHGLSSTTVAPLPRHRAHRRRHDSSAPPPPQLGVAAPTDRRRPAPHQTAAALHLHSGRRRGCTSRRCRRLLSSPPPPPQIVAAAPSDRRRLGPPQSAAAAALHHNEWAPAGQRLMVKHHLIQVTMKSGMEIVHPKKKLKAHFKEDPYPSRATKENLAQELGLTFNQVTKWFSSTRHYARVAATKKENNIENHTAENNNNTNTVDSIQLRGSNDIVSVDRNDMVSEERTGQSNLNEGTPLRSDTSCGQSVAVTPMVHPENQGNDSSSNVRTPNAKSAEKLIPGLENSDEARRKAVQRELRKMKTGRISDKMTLGSTSCSTPVTGMGSVDCNSLA

SEQ ID NO: 16981 - protein, 798 aa, Oryza sativa
  Clone ID: TF_OSC401975j.C1.p17.fg
MPPVIGRNGVAYESPSAQLPLTQADMLDSHHLQQALQQQYFDQIPVTTTAAADSGDNMLHGRADAGGLVDEFESKSCSENVDGAGDGLSGDDQDPNQRPRKKRYHRHTQHQIQEMEAFFKECPHPDDKQRKELSRELGLEPLQNQHERHENAQLRAENDKLRAENMRYKEALSSASCPNCGGPAALGEMSFDEHHLRVENARLRDEIDRISGIAAKHVGKPPIVSFPVLSSPLAVAAARSPLDLAGAYGVVTPGLDMFGGAGDLLRGVHPLDADKPMIVELAVAAMDELVQMAQLDEPLWSSSSEPAAALLDEEEYARMFPRGLGPKQYGLKSEASRHGAVVIMTHSNLVEILMDVNQFATVFSSIVSRASTHEVLSTGVAGNYNGALQVMSMEFQVPSPLVPTRESYFVRYCKNNSDGTWAVVDVSLDSLRPSPVQKCRRRPSGCLIQEMPNGYSKVTWVEHVEVDDSSVHNIYKPLVNSGLAFGAKRWVGTLDRQCERLASAMASNIPNGDLGVITSVEGRKSMLKLAERMVASFCGGVTASVAHQWTTLSGSGAEDVRVMTRKSVDDPGRPPGIVLNAATSFWLPVPPAAVFDFLRDETSRSEVPNLPPIPREFIQFADQILYVIKFIPDEFGFPQWDILSNGGAVQEMAHIANGRDHGNSVSLLRVNSANSNQSNMLILQESCTDASGSYVVYAPVDIVAMNVVLNGGDPDYVALLPSGFAILPDGPSGNAQAAVGENGSGSGGGSLLTVAFQILVDSVPTAKLSLGSVATVNSLIACTVERIKAAVCRDSNPQ

SEQ ID NO: 16982 - protein, 678 aa, Oryza sativa
  Clone ID: TF_OSC900171j.C1.p8.gm
MAAYYHGGAGTDIQSGTDGLQTLYLMNPSYAGYGDAAAAAAAPGAAANMMLLNSAVTSMTPVSFGHQPSPSSSSAAQHFVGIPLQAPPASGYNLWTPAAATGAGDMSPPTPQHQHQQAHGGGAAGVSAVLSLSSREAAPPVTVAAVVAAGDEGKYLQAVAQGAASHGQMVMSSKYLKAAQELLDEVVSVSKGVDDVKAAAAAKSPASVKKKEDSEGVSGGGTEDGGGAKSGGAPPPPEMSTAERQELQMKKGKLINMLDEVEQRYRQYHQQMQVVVASFEAVAGGGSARTYTALALRTISRQFRCLRDAIAGQVRAASRALGEAVDADGGCGRTVGSRLRYIDHQLRQQRALQQLGMMQSSAWRPQRGLPERSVSILRAWLFEHFLHPYPKDSDKIMLAKQTGLTRSQVSNWFINARVRLWKPMVEEMYLEETKDQDGGGGAGAGDEGSKPGGSKGGGAGVNGGVVDSAAKMDSKAAHMESGGGVHPSLLELAGDHQAQAGFYDDDDEDGGAAAALQQKLKKARTEEQQQAAFHVSDVATLHAHAAAAAAARHDEVSHRELLMKFMESGSAGAGAGAAARDHHHEHHGGVGYSLFAPAPYGQFATEQFAFAGHGGGGGGGGVSLTLGLPHGAEQTASFLMTSSNGSDGAGHVAGGGGYDMNMQSTKSFAAQLMRDFVA

SEQ ID NO: 16983 - protein, 647 aa, Oryza sativa
  Clone ID: TF_OSC401411j.C1.p9.fg
MATYYSSPGSERDSQTMYSRDPGSASYPMSSALGNLLYLNNPSSGPYTEFSGILQPQQNCMEMPGPGHASAMSQDPSSRESDMLSSHQGQRSFSHVKDMKNEMLMHMMDGAQGSGSELIHDDAHTGSQLEFGVLNNHNSSSVPSMQSQGLSLSLNTQIMAPSLPYWSIKPDMLTPQSYHDNLRGEDMRMKNLQSEASRAIRNSRYLKAAQELLDEVVSVWKSIKQKAQKEKVESGKADGKETDGGPKSEGVSSNPQESGANAAPELSTAEKQELQNKMAKLMAMLDEVDRKYKHYYHQMQTVVSSFDVVAGPGSAKPYTAVALQTISRHFRCLKDAINDQINVIRKKLGEEENSSGKEGKLTRLRYIDQQLRQQRAFQQYGMIPQNAWRPQRGLPENSVTILRAWLFEHFLHPYPKDSEKLMLARQTGLTRSQISNWFINARVRLWKPMIEDMYKEEIGDLEQDSNSSSDNAPRSKDKMASSEDKEDLKNSRARICETSQLSESRTSIGAMNVGGAPVGFQNEPNPDDSFMNLMLKDQRSNEVDGGLLLHNTVAQHSDENARFMAYHLAELGRYGNGNVSLTLGLQHSSSNLVPNAQPGFPGVNEDDIYNATAPLGVTVASSDYDSMNQMDQRQRFEHSPLLHDFVA

SEQ ID NO: 16984 - protein, 642 aa, Oryza sativa
  Clone ID: TF_OSC401247j.C1.p7.fg
MATYYSSPGNERDSQAMYPADSGNSSYPVPSAIGNMLYPGNGSSGPYTEFSGIIQHQQNFMELPGHPTAISQDSSSREPNMVASYMDQRSFGPAKDMRNEMLMHLMDGAHNAGADLIHNDTHSSAQIEFGLLNNHNSMSVAPAPGQGLSLSLNTHILAPSYPYWSAKTELLTPHSYHGDDNRMKNMQSEASQAIRNSKYLKAAQELLDEVVSVWKSIKQKAQKDQAEAGKSDNKEAEGGSKGEGVSSNPQESTANAAPEISAAEKQELQNKMAKLMAMLDEVDRKYKHYYHQMQIVVSSFDMVAGSGAAKPYTAVALQTISKHFRCLKDAINDQINVIRKKLGEEESSSGKEGKLTRLRYIDQQLRQQRAFQQYGLLQQNAWRPQRGLPENSVSILRAWLFEHFLHPYPKDSEKLMLARQTGLTRSQISNWFINARVRLWKPMIEDMYKEEIGEADLDSNSSSDNVPRSKDKIATSEDKEDLKSSMSQTYQPSQLGESKANIGMMSLGGAPAGFHNEGNQDDSFMNLMLKDQRPGEAEGSLLHDAVAHHSDENARFMAYHLSGLGRYGNSNVSLTLGLQHPDNRLSVQNTHQPGFAGAGEEIYNSTASLGVAAASSSDYESTNQIDQRQRFEPSPLMHDFVA

SEQ ID NO: 16985 - protein, 884 aa, Oryza sativa
  Clone ID: TF_OSC401273j.C1.p3.fg
MWTLHVILSLFFLPLFPFSLSTSAFCKRRWRQRQRRRRWREGRRWRHWSGGGDGRGPEWRRRFGLELAWMEAEAATEEMAGGRGPERRRVGGEPGGRWWLAGRELVAKAAPIFLPPRRAPHAPAPIGGADYAVGSVPRAAKGGRLGLRGGLTDGDAGLAEEGCGRRATITAEESAVANRTAAGTRLAISTSSNFHKAASAKKKRRSQKKTTRETTQLQESLGSSLSPFWVVSVILQELSCSSSLLGLKVDFCTGTAKALGIVLQKAQQSEAYCPSLSLLLLLKTMATFFSSSTNQRDLTGGGGDGGDMSFQHYPPPSNPYSDSSAGGLIPLPASIVSHSHIAHGGGDEPAAFREAATADGGEMGLQTQLLMAHGAAARGHQGGLSLSLGTQVPVSLYQYRPAGMAAASLLSPSQSSPMAGRSAQNSIYVQNSRFLRAARELLDEVVNVRDAIKRKGDKNQGKDSGECKGGDAAGDDKAGSNPQEQESNSAPELSPSERQDLQNKVTALMAMLDQVDRRYRHYHHQMQIVMSSFDAVAGGGAARPYTALALQTISRHFRSLRDAIGAQAQAARRGLGEQDASAQGGGGLSRLRYIDQQLRQQRAMQQFGMMQQPQHAWRPQRGLPESAVSVLRAWLFEHFLHPYPKDSEKLMLARQTGLSRGQVSNWFINARVRLWKPMIEEMYKEEFGAEMDSNSSSENGGGGGGKGKDEAISSEDRDEFQSPSSAAAARHAGVAGQLNNPFKSEAMGGAALDVGVGVVGLSSCLGGAMGTYATGLNLNHHVHHPGAGGTSLLHDALHHHHHGGGGDARFVSYGDMADFGGGGGYDGGSVSLTLGLQHCNNAGPVPAEQQGLLYGSAGDFDYINGSDDRQRFGPASQLLHDFVA

SEQ ID NO: 16986 - protein, 884 aa, Oryza sativa
  Clone ID: TF_OSC410066j.C1.p3.fg
MWTLHVILSLFFLPLFPFSLSTSAFCKRRWRQRQRRRRWREGRRWRHWSGGGDGRGPEWRRRFGLELAWMEAEAATEEMAGGRGPERRRVGGEPGGRWWLAGRELVAKAAPIFLPPRRAPHAPAPIGGADYAVGSVPRAAKGGRLGLRGGLTDGDAGLAEEGCGRRATITAEESAVANRTAAGTRLAISTSSNFHKAASAKKKRRSQKKTTRETTQLQESLGSSLSPFWVVSVILQELSCSSSLLGLKVDFCTGTAKALGIVLQKAQQSEAYCPSLSLLLLLKTMATFFSSSTNQRDLTGGGGDGGDMSFQHYPPPSNPYSDSSAGGLIPLPASIVSHSHIAHGGGDEPAAFREAATADGGEMGLQTQLLMAHGAAARGHQGGLSLSLGTQVPVSLYQYRPAGMAAASLLSPSQSSPMAGRSAQNSIYVQNSRFLRAARELLDEVVNVRDAIKRKGDKNQGKDSGECKGGDAAGDDKAGSNPQEQESNSAPELSPSERQDLQNKVTALMAMLDQVDRRYRHYHHQMQIVMSSFDAVAGGGAARPYTALALQTISRHFRSLRDAIGAQAQAARRGLGEQDASAQGGGGLSRLRYIDQQLRQQRAMQQFGMMQQPQHAWRPQRGLPESAVSVLRAWLFEHFLHPYPKDSEKLMLARQTGLSRGQVSNWFINARVRLWKPMIEEMYKEEFGAEMDSNSSSENGGGGGGKGKDEAISSEDRDEFQSPSSAAAARHAGVAGQLNNPFKSEAMGGAALDVGVGVVGLSSCLGGAMGTYATGLNLNHHVHHPGAGGTSLLHDALHHHHHGGGGDARFVSYGDMADLGGGGGYDGGSVSLTLGLQHCNNAGPVPAEQQGLLYGSAGDFDYINGSDDRQRFGPASQLLHDFVA

SEQ ID NO: 16987 - protein, 1123 aa, Oryza sativa
  Clone ID: TF_OSC400780j.C1.p27.fg
MAHDPNLGFADYFSAADASASSVTTLMPAMDEAAPELFGLQAGMELLGVRGLGMSMMPGAAGKVAALVADAGDDGGGGSTMRFLSEQHQQPSQAPLSLSLCRPDGVLHLGGAARPQHQLAPAAPWMTHHDASSSAPQVHGAWHLRSSRFLLPTQQLLQEFCSLPVDSTKRGNGAKAATQQEDGRGDGSSSSSASWTPSPQIQAMEALELQRLKDKLYIMLEEVDRRYRRYCEQMRAVAGGFEAVAGERAAGAYTAVAARTISRHFRSLRDGIVAQLQAARKALGEKDVSAAGTTRGQTPRLRVIDQCIRHHKSLQGVAAMDSHPWRPQRGLPDRAVTILRAWLFEHFLHPYPSDVDKHILARQTGLSRSQVSNWFINARVRLWKPMVEEMYVEEMKGQDGGDGSGGQGSLNPKPTCSHASEARGGQQLVVGDGDGGEQKPTRAQLRHDAGSLASVVNVDVAAGAGGVARLHQAENFGIMDHLDFDAYDDSHHQQQHGGFGGVSLTLGLQQHGSHGGGGVNIAFGAPGSAHGGAGFLYPGEQMAPDAMHPGHGHHVVGGQFGVAMDGDAASHAQERNIILAKMFTKIYPAAQVESGKALFGMKGGGGDRHHHKDAIVMHAAGKAPKCKASFFLCSLLLYFLLPVLALYVVALAVSPFYSGSSCPEESLASGDVAHLAAAGDAGNRRNDSSPPSDDAAPTGLGHIVFGIAASSELWKSRREYIRTWWRPEQMSGFVWLDKPVYEFYSRNASTGLPGIKISGNTTKFPYTHGRGSRSALRITRIVSESFRLGLPGARWFVMGDDDTVFFPDNLVDVLSRYDHTQPYYIGNPSESHIQNLIFSYGMAFGGGGFAISRALAAQLAHMQDGCIDRYPALYGSDDRIHACVAELGVPLTRHLGFHQCDLWGDVLGLLGAHPVVPLVTLHHLDFLQPVFPTTRSRTAALRRLFEGPARLDSAGVAQQSVCYDGDKQWTVSVSWGFAVVVTRGVLSPREMEMPMRTFLNWYRRADYTAYAFNTRPVARQPCQTPQVYYMRQSRLDRRRNTTVTEYERRRVAPVKCGWRIPDPAALLDRVIVLKKPDPNLWKRSPRRNCCRVLSSPRQGKDRKMTIDVGVCRGGEFARIEVAR

SEQ ID NO: 16988 - protein, 1227 aa, Oryza sativa
  Clone ID: TF_OSC400992j.C1.p51.fg
MELVPFKPEAGALVESGGGAHGDSIPAMVAAQQELLHAQVDQLQLLVVAQCRLTGVNPLAQEMAAGALSIKIGKKPRDLLNPKAVKSMQSLFAMKDTIGKKETREISASFGVTVTQVREFFASQRTRVRKFVRLSREKALRIESSKAPDNVCSISTEQTPVDIEAHAQVIEPLRTLEPLEAQQISLPHLVVPQISLQLPVVLQSCAIPVAPIGVMQPTEAKTNPDPIQKETKQEEVAGVESEDKKFLESIFVLMRKENTFSGQVKLMESILQINNVTVLSWFLTMGGLAIVSTWLGQAVTEEQTTVILVVFKVLLHLPLHKALPAHMSTVLQTINRLRFYRTQDISSKARNLLSRLSKVLVRSQALKKSQKDLICKQRISEILRDESWKSEVDITEDILALTDDASESRMPEPRKTPLLLTASADESNKKSSLQTKSKEKRKVLLVEHPNRKAAGKNVNPVRSTSTNNSRPLSADDIQKAKMRAMFMQEKYGKVDTSKVIEKPHMMEIQKPSGLVDSNVPLVPRTPLTSIIKQPVDPSPSTSKQSTLSPPDKPEIAVSLKLNVTAKENFIEKLDSKRVIWQIPPAWNKHPAIKLLEEQGMAIFCSDMRIEKLPVIPHKQTWGSYYHNFRQFIATVPLFVGRLAKVWIDPAWSLGAGENSKEFEVQTQRNRREKETFYASLKDIPLNPKGPWDVEMDFDDSLTPEIPIEQPPDADAMETDSVSTAPPNIVVPVVDKQIGSTSSVSPAVAAGANGATSEPDLELLAVLLKNPQLVFALTSNQGGTLPSEQTVALLDMLKQTGLGLSELVNSLANNSGVQKEPESGPEAIPASLPSPTPPKDLIARDGWSSEFPSQVRTQNLQHAHLPNRANAPPVASSVQQSFSNVVSSLPSQPYASASALPAQTRTNMTSLPQSMISVNPSTQHVAPMNNLLSRATVHQHTQSYALTSDPVAVAVHHQPAVNKLAHEVQSISHPAVSHSSVAESHASYTSYTWQSSVATIAATGRNATPDRWAAPARTTNSFNAAPSNSNHVTYPNQNAYSNHSTQATTYNSYGSAPVSSHSLHPGQGLDRNGYTHAAEYQTTMARDALWRNSRSPELGAGAVYGSSSQGYVPEPSRQWNYGQQSYNPEPYSRQWSSGQQSYNTVTAEPSRQWSSGQQSYSNPAEPSRQWSSSAHAQPSYNPEPSRPWNSGHQSQNPEASRQWSHHHGKQERYNPTDGRNSYDQHWRR

SEQ ID NO: 16989 - protein, 357 aa, Oryza sativa
  Clone ID: TF_OSC401196j.C1.p32.fg
MDTYGWMMEWKVDRRYRRYREQMRAVEVSFEAVAGGGAAQVYTKLAMRAMSRHFRCLRDALVGQVRALRNAMGESQRDAAGGVAAAAPGATKGDTPRLRVLDQCLRQQRAFQQSGAVDSFPWRPQRGLPERAVAVLRAWLFEHFLHPYPNDVDKHILARQTGLSRSQVSNWFINARVRLWKPMIEDMYKEETKPESSDGNNKLNPSAAGNKQQHRDDPKKNYTATTAEASLVQQSSYHLHLRSSGNRNSSSLMIPAAASTSIDHHHDSSHQLLGGHSYSSAAGLHHGHGGAVSLTLGLQQQQQPFAASMMHQHQQHQHQHQQQQSFMVEAAEEEEDDVLPYRNLMESQLLHDFAGAS

SEQ ID NO: 16990 - protein, 331 aa, Oryza sativa
  Clone ID: TF_OSC22451j.C1.p13.fg
MAFHYQDHALAMDAAAAAAETGGHHHPGFVGAGGVVGGGGGGGWEREKAAIAAHPLYERLLEAHVACLRVATPVDQLPRIDAQIAARPPPLAAATAAAAAAAAGGAPSGGEELDLFMTHYVLLLCSFKEQLQQHVRVHAMEAVMACWELEQTLQSLTVVTLTAGASPREGSGATMSDDEDNQVDSESNMFDGNDGSDGMGFGPLMLTEGERSLVERVRQELKHELKQGYREKLVDIREEILRKRRAGKLPGDTASTLKAWWQAHSKWPYPTEEDKARLVQETGLQLKQINNWFINQRKRNWHSNPASSSSDKSKRKRKRSNAGDGKAEQSW

SEQ ID NO: 16991 - protein, 346 aa, Oryza sativa
  Clone ID: TF_OSC401247j.C1.p8.fg
MVASKQLHSQRCGGHYCQLHHHRPEEIAGAGAESHRRDGSSGCGGAGPMVVLTLGSGAAAAEDDGGGRSRCCCGAGGAAPATMVSALRGSRYLLPAQELLREAVSAAAASARGGDDDDEAVASFPHDGKSTGIGGGGGGVQAKLLSLLSELESRHEHYFGELRRVSASFEPALGAGATAGYTALMAQAMSHHFGSLRRAILRKLRLHAAAAARTRSALLRLARDAMEEDDEGDGEEEEEVVNRVVRRTKQAAAARAEQAWRPLRGLPEDAVGVLRAWLFDHFLHPYPNDNEKLMLAVATGLSRTQISNWFINARVRLWKPMVEEMYNDEFDDDDAGSGGGGASSSS

SEQ ID NO: 16992 - protein, 306 aa, Oryza sativa
  Clone ID: TF_OSC400780j.C1.p16.gm
MEMGVGSFTGGGGGGECSSSSATAAAAAAAAAAAAAAEAEERQLLKGEIAVHPLCEQLVAAHVGCLRVATPIDHLPLIDAQLAQSSGLLHSYAAHHRPFLSPHDKQELDSFLAQYMMLLCSFREQLQQHVRVHAVEAVMACREIEQSLQDLTGATLEEGTGATMSEDEDETAPMLEGPMDMGSDGHDLMGFGPLMPTDSERSLMERVRQELKIELKQGFKSRIEDVREEILRKRRAGKLPGDTTTILKQWWQQHSKWPYPTEDDKAKLVEETGLQLKQINNWFINQRKRNWHNNSQTSTLKSKRKR

SEQ ID NO: 16993 - protein, 203 aa, Oryza sativa
  Clone ID: TF_OSC900358j.C1.p14.hg
PERKARLARDLGLQPRQVAVWFQNRRARWKTKQLERDYAALRHSYDSLRLDHDALRRDKDALLAEIKELKAKLGDEEAAASFTSVKEEPAASDGPPAAGFGSSDSDSSAVLNDVDAAGAAPAATDALAPEACTFLGAPPAAGAGAGAAAAASHEEVFFHGNFLKVEEDETGFLDDDEPCGGFFADDQPPPLSSWWAEPTEHWN

SEQ ID NO: 16994 - protein, 594 aa, Oryza sativa
  Clone ID: TF_OSC400320j.C1.p15.fg
MSGNPSFSQLGAVDAAMNGGYFMAASGNGADVPLFHPAMAPPHDHGGSFGYGDAAAAAMDVGAHFAAANNLVLASLATQLFGAAPAAAAHGHGDYLGATTPPEEEMGGGYDVAVGDSSGGAVSLACLGHGQPGDMAAGWCSTSARKPSCNWSSSNAGVHGGSYYLAGVPEAAGFVSAAAAASELSLSLCSKSSSDSMLNAGGDQCSSAASRSGLTQMSRVVVVEPEPPLVPYYPAANFAVVVARSRYAAVAQQVLNDAVGCVLGGVADAAADSASGVDSGSSRPSSCSVAGGAPSSAVSSNNQLIASSGEHTHGGGDASAQRLRSELLTMLQLVSSPFSTRLPRHQFKQISYYHFESNLKPSFDDDTNSNAQMDQKYNQCLDEIQSTTARFNTLTHATARAAGMSSSSICAPFAHRAVSAMYHGLRRRIAGEIMSAAAAAGRPCRGGESSSAVTGGERERSWESAFIQKHWAVQQLRRGEQQCWRPQRGLPEKSVAVLKAWMFENFLRPYPKDSEKEMLAARSGLSRNQVSNWFINARVRLWKPMIEEMCEELKRSSGGGAGNQALAMEHMNSQDVVQKCGAGLSAFAALNPAT

SEQ ID NO: 16995 - protein, 124 aa, Oryza sativa
  Clone ID: TF_OSC401238j.C1.p6.fg
MSSSLFLLPPLFLSLFSPLRLAAGSTGWGGSGRGQERRRELKRRRRRHTLSSLSGKRGAPSAAAAAVGGSDDEDSDDGSRKKLRLSKDQAAVLEDTFNKHNTLNPKQKAALARQLNLKPRQVEV

SEQ ID NO: 16996 - protein, 201 aa, Oryza sativa
  Clone ID: TF_OSC900153j.C1.p1.fg
MDGEEDSEWMMMDVGGKGGKGGGGGGAADRKKRFSEEQIKSLESMFATQTKLEPRQKLQLARELGLQPRQLEKLAEMLQEPRGKYGDNAGDDARSGGVAGMKKEEFVGAGGAATLYSSAEGGGTTTTTTAKLMPHFGSDDVDAGLFLRPSSQHHPPPPHAGAGFTSSEPAADHQSFNFHSSWPSSTEQTCSSTPWWEFESE

SEQ ID NO: 16997 - protein, 618 aa, Oryza sativa
  Clone ID: TF_OSC400292j.C1.p1.fg
MSTSSNPSYHQLGLDAISCCFVAGGGGAEAAAPFFGFGFGDVDGEFLVASPVAAVGDELACAVPLRRPQGSVSEEEVNAAAVAAAAAGGAESCSTVHSVLGSVEFGCGTSSGVTIAQASRMGRLAGEAPCGDAGGGGWIYGGSGIAPLHGAYYLSGFSSGAGAGFLSPFAASSVAAAAPAASELSLRLGATKCSSPSSMANASSEVSCSGLTHVSSGGGLGYHQAAAAGAGAALFHPTHGDDAAAAAAGELRQAYHSRAPPHFSQVVSRSAVLAHVAQELLNGFVACLLQDVAADAASGVDGGEASQALLVGLFGEDHDGADGGCLTRERRCEVGGGGAASEEATPTGEFLAQFLVEHLRNRFLVRTNGDEMQVDEKCNQCVEEMQSTAARFNSMVRSTGGGGGGLTAAFAGRAVAAAYRRVRRRVMGQLVAAATARSSSSAAAAALEEKERSWESSFIQKHWAMQQLRRGDQQSWRPQRGLPEKSVAVLKAWMFENFLRPYPKDSEKDMLAARSGLSRSQVSNWFINARVRLWKPMIEDMYEELKKTSGGSDGAAEIEHLSSKDVLSLERSKKPSHLAVQCDGKHHDRFAVTQMEGVFEEKGIEEIGKIRKTRVVIL

SEQ ID NO: 16998 - protein, 177 aa, Oryza sativa
  Clone ID: TF_OSC8589j.C1.p1.np
PKACAEGMCGGSGGGSKGGGAATPSTRWCPTPEQLMILEEMYRSGVRTPNAAEIQQITAHLAYYGRIEGKNVFYWFQNHKARERQRSAAASARGTSSNPPPSSTVPPAPTAAAAGAVVRCTPPPPPPPPSPIRCGRRCPKSSPAAAAAAATAAVDYCSTASASASATAADMAIPPCY

SEQ ID NO: 16999 - protein, 289 aa, Oryza sativa
  Clone ID: TF_OSC32301j.C1.p11.fg
MDHMQQQQRQQVGGGGGEEVAGRGGVPVCRPSGTRWTPTTEQIKILRELYYSCGIRSPNSEQIQRIAAMLRQYGRIEGKNVFYWFQNHKARERQKKRLTTLDVTTTTAAAADADASHLAVLSLSPTAAGATAPSFPGFYVGNGGAVQTDQANVVNWDCTAMAAEKTFLQDYMGVSGGGGAAAAAPTPWAMTTTTREPETLPLFPVGGGGGDGAHRHAGHGGFPSNFQRWGSAAATTNTITVQQHLQQHNFYSSSSSQLHSQDGPAAGTSLELTLSSYYCSCSPYPAGSM

SEQ ID NO: 17000 - protein, 289 aa, Oryza sativa
  Clone ID: TF_OSC401125j.C1.p10.fg
MDHMQQQQRQQVGGGGGEEVAGRGGVPVCRPSGTRWTPTTEQIKILRELYYSCGIRSPNSEQIQRIAAMLRQYGRIEGKNVFYWFQNHKARERQKKRLTTLDVTTTTAAAADADASHLAVLSLSPTAAGATAPSFPGFYVGNGGAVQTDQANVVNWDCTAMAAEKTFLQDYMGVTGGGGAAAAAPTPWARTTTTREPETLPLFPVGGGAGDGAHRHAGHAGFPSNFQRWGSAAATTNTITVQQHLQQHNFYSSSSSQLHSQDGPAAGTSLELTLSSYYCSCSPYPAGSM

SEQ ID NO: 17001 - protein, 200 aa, Oryza sativa
  Clone ID: TF_OSC401161j.C1.p1.fg
MEALSGRVGVKCGRWNPTAEQVKVLTELFRAGLRTPSTEQIQRISTHLSAFGKVESKNVFYWFQNHKARERHHHKKRRRGASSPDSGSNDDDGRAAAHEGDADLVLQPPESKREARSYGHHHRLMTCYVRDVVETEAMWERPTREVETLELFPLKSYDLEVDKVRYVRGGGGEQCREISFFDVAAGRDPPLELRLCSFGL

SEQ ID NO: 17002 - protein, 284 aa, Oryza sativa
  Clone ID: TF_OSC401921j.C1.p7.fg
MDRTATASWEVMSRRGEQQQQLMMQAPASHNGGSGGGEPARSRWAPKPEQILILESIFNSGMVNPAKDETARIRRLLERFGAVRDANVFYWFQNRRSRSRRRARQLQQACGAALHQLPSAAAAAGAGGGGDYYHHHHQPSSSPFLMHGGGGGGVVTSTTAAPAVAASGHFLADEVDGGGDDDLFAISRQMGLMARHGGGDHHYSSYADSDATQLSYQPTGTIQVFINGVAYDVPSGGALDMAGTFGRDAMLVHSSGEVLPVDEHGVLINSLQMGECYYLVSKSI

SEQ ID NO: 17003 - protein, 328 aa, Oryza sativa
  unsure (1)..(328): unsure at all Xaa locations
  Clone ID: TF_OSC19014j.C1.p1.np
IVVVSHGSISHAHPPAPSXLTHKHTMPTLLHDKHATPANGYLPLPSPQQQRFCGRLQQNQNNYPARKSNKPNKNKRNTLDDIGGGGEDDDDALEALFKQLEEDLKNDDLSVEDDDDGISEEDMARFEQELAEAIGDIADADSGEGSSLGSEAYGNDEKTDEIKRPLKNWQLKRLARALKIGRRKTSIKNLAGELGLDRTLVIELLRNPPPKLLFMSDSLPDEDPSKPEIKEIEPSPVVDNADVTETKPQTELPVHVMCAEWSSQKRLKKVQLETLERVYSRTKRPTNTMISSIVQVTSLPRKTIVKWFEDRREQDGVPDHRVAFKRSL

SEQ ID NO: 17004 - protein, 514 aa, Oryza sativa
  Clone ID: TF_OSC33862j.C1.p2.fg
MAAMVGAPLAVAAAAAAPGARVFLARPLLRRSPRGVACALRRRPSKYKNKIQNEEVVVEDDIGGGGEDDDDALEALFKQLEEDLKNDDLSVEDDDDGISEEDMARFEQELAEAIGDIADADESGEGSSLGSEAYGNDEKTDEIKRPELKNWQLKRLARALKIGRRKTSIKNLAGELGLDRTLVIELLRNPPPKLLFMSDSLPDEDPSKPEIKEIEPSPVVDNADVTETKPQTELPVHVMCAEWSSQKRLKKVQLETLERVYSRTKRPTNTMISSIVQVTSLPRKTIVKWFEDRREQDGVTFSTLLDQTHALPYFNRNRVAIFNMEKFRSSSEGNYVETGEGGSIWGPARLQHRDSERGVVVLVVQMMAGLQRSATTFRRSGSSGLVWDERFLTEDAEAAKAGDGDGGGGTEEPQPELRHSKSVGSIGMMRRVAADDGDDSEKTTKQQRKKKKKKKKDGQKEDDNRSQQVFRTKDIAPDVDPPSPRVSGCILCSIFSGSGSSSSATSRRAKPRKK

SEQ ID NO: 17005 - protein, 601 aa, Oryza sativa
  Clone ID: TF_OSC401166j.C1.p11.fg
MAHDPSLGYADYFAAEVDGTGATELYGLQQHQQGVGVAEMFGVRGLMPAAHAHEQSKGVGALVVGGGGVDDGGATTLPTVHFGGLGELHHHQHRQSQAPLSLSLHRPEAAATSLLMQQQQQHLHHQPSPPAGAASTWQLQQGAWHLRGSRFLLPTQQLLQEFCSLPVKSTTSPSSASKATKPPQEEAASGGGSSSWTAPTQIQSMDAAELQRLKGKLYTMLEEVDRRYRRYCEQMRALAASFEAVAGERAAASYTRLASRTISRHFRSLRDGVVAQLQAVRKQLGEKDTAVPGMTKGETPRLRVLDQCLRQHKAYQAGMLESHPWRPQRGLPERAVSILRAWLFEHFLHPRMFAGFVTMLKLSPRYPSDVDKHILARQTGLSRSQVANWFINARVRLWKPMVEEMYAEEMKDEEGSGQSTQASNPQNPNPSSYTSEVRGGGGGGEDRGEQKPSRAQLLHDAGSLASVVSIGHGGAGRTMVDHHHHQSLNFGTMDQLDFDAYEAAGGGQGFGAGGGVSLTLGLQQQHADPHDGVNVAFAAAAAPPNSSGVAAEYLFMGGGEHQQQLPQTAQFGAVMEGDAASHYRGLSATAAGFHLLHDLAG

SEQ ID NO: 17006 - protein, 306 aa, Oryza sativa
  Clone ID: TF_OSC9739j.C1.p1.fg
MMALGVPPPPSRAYVSGPLRDDDTFGGDRVRRRRRWLKEQCPAIIVHGGGRRGGVGHRALAAGVSKMRLPALNAATHRIPSTSPLSIPQTLTITRDPPYPMLPRSHGHRTGGGGFSLKSSPFSSVGEERVPDPKPRRNPRPEQIRILEAIFNSGMVNPPRDEIPRIRMQLQEYGQVGDANVFYWFQNRKSRSKNKLRSGGTGRAGLGLGGNRASEPPAAATAHREAVAPSFTPPPILPPQPVQPQQQLVSPVAAPTSLSSSSSDRSSGSSKPARATLTQAMSVTAAMDLLSPLRRSARPRQEQRHV

SEQ ID NO: 17007 - protein, 157 aa, Oryza sativa
  Clone ID: TF_OSC9739j.C1.p2.np
YPSDPHHHPRSSLPNAASKSRPPDRRRRLLPKSSPFSSGMGEERVPDPKPRRNPRPEQIRILEAIFNSGMVNPPRDEIPRIRMQLQEYGQVGDANVFYWFQNRKSRSKNKLLRRDRPRGARARRQPQQLVSPVAAPTSLSSSSSDRSSGSSKPARAN

SEQ ID NO: 17008 - protein, 552 aa, Oryza sativa
  Clone ID: TF_OSC413563j.C1.p7.fg
MASPNRHWPSMFRSNLACNIQQQQQPDMNGNGSSSSSFLLSPPTAATTGNGKPSLLSSGCEEGTRNPEPKPRWNPRPEQIRILEGIFNSGMVNPPRDEIRRIRLQLQEYGQVGDANVFYWFQNRKSRTKNKLRAAGHHHHHGRAAALPRASAPPSTNIVLPSAAAAAPLTPPRRHLLAATSSSSSSSDRSSGSSKSVKPAAAALLTSAAIDLFSPAPAPTTQLPACQLYYHSHPTPLARDDQLITSPESSSLLLQWPASQYMPATELGGVLGSSSHTQTPAAITTHPSTISPSVLLGLCNEALGQHQQETMDDMMITCSNPSKVFDHHSMDDMSCTDAVSAVNRDDEKARLGLLHYGIGVTAAANPAPHHHHHHHHLASPVHDAVSAADASTAAMILPFTTTAAATPSNVVATSSALADQLQGRLFRDWTCAWHPSSQKDAFNIASLSGLDFRMHRYASFLAVINLPEGGAAPPPPSATVVAVSRDDETMCTKTTSYSFPATMHLNVKMFGEAAVLVRYSGEPVLVDDSGVTVEPLQQGATYYVLVSEEAVH

SEQ ID NO: 17009 - protein, 507 aa, Oryza sativa
  Clone ID: TF_OSC400934j.C1.p31.fg
MAGSPPSLLSGSSAGSAGGGGYSLKSSPFSSVGEERVPDPKPRWNPRPEQIRILEAIFNSGMVNPPRDEIPRIRMQLQEYGQVGDANVFYWFQNRKSRSKNKLRSGGTGRAGLGLGGNRASAPAAAHREAVAPSFTPPPPILPAPQPVQPQQQLVSPVAAPTSSSSSSSDRSSGSSKPARATSTQAMSVTTAMDLLSPLAAACHQQMLYQGQPLESPPAPAPKVHGIVPHDEPVFLQWPQSPCLSAVDLGAAILGGQYMHLPVPAPQPPSSPGAAGMFWGLCNDVQAPNNTGHKSCAWSAGLGQHWCGSADQLGLGKSSAASIATVSRPEEAHDVDATKHGLLQYGFGITTPQVHVDVTSSAAGVLPPVPSSPSPPNAAVTVASVAATASLTDFAASAISAGAVANNQFQGLADFGLVAGACSGAGAAAAAAAPEAGSSVAAVVCVSVAGAAPPLFYPAAHFNVRHYGDEAELLRYRGGSRTEPVPVDESGVTVEPLQQGAVYIVVM

SEQ ID NO: 17010 - protein, 278 aa, Oryza sativa
  Clone ID: TF_OSC401231j.C1.p4.fg
MDGGHSPDRHAAAAAGEPVRSRWTPKPEQILILESIFNSGMVNPPKDETVRIRKLLERFGAVGDANVFYWFQNRRSRSRRRQRQLQAQAQAAAAAASSGSPPTASSGGLAPGHAGSPASSLGMFAHGAAGYSSSSSSSWPSSPPSVGMMMGDVDYGGGGDDLFAISRQMGYMDGGGGSSSSAAAGQHQQQQLYYSCQPATMTVFINGVATEVPRGPIDLRSMFGQDVMLVHSTGALLPANEYGILLHSLQMGESYFLVRMHTCCLPNIGLRLQPPRKQ

SEQ ID NO: 17011 - protein, 468 aa, Oryza sativa
  Clone ID: TF_OSC14111j.C1.p1.gm
MTLPSAERCLRPCKSFSCCCILSISRFVEPTDSTARRAPTRLLGLEPAPPVSSVVGRAFAHRGSVATGGARHSRALSWLWRAPARALGRARDMYVRGMTGCARCVPADAAFGYPVFVPSSAAASMRSNSFGSDSRFGGGADDDLRELIRAASQRRAAEQEREARAVARSQSMASGISMARIDEDAPCEEFGDAGVMHYPRSQSCVGGVGGRIAHCHRKRCNPKKYEGILKKQILIQSLLFLCCQPIPNTQHLSAQSSSRPIRHPHPRPIHAASSSRPGARTAPAFTKTTEQGDDNIAALHHASCAALLYHDGLLDLVVASTGGGRRRHPPELPPAGGGGGGGGRADPAPDAGGSAVVPPPFPCGGSGEGGEGGNFGGGGGRSGGWRQRWRCPMRSGSGSDGSGYDKAGMDSGKYVHYTPGQVEALERVYAECPKPRFSRRQQLLCELSILANIEPKQKIKVWFPKQKQ

SEQ ID NO: 17012 - protein, 236 aa, Oryza sativa
  Clone ID: TF_OSC407921j.C1.p3.fg
MRLHHLHVAYLDHKASSSSSSPAPPSISPSSIPGSAAFPAFSFKCLRPLAPKISLPEPRKMIAPPDFVVPRARNASKLLNYTVQVPAAGTTRWNPSAEQIKVLEMLYRGGMRTPNSVQIERITEELGKYGRIEGKNVFYWFQNHKARERQKQKRAALLTLSTLDPSLLPATANETKEAPEKKEKDVEDGLASCKRRCKAWGDGAGDGDAVVATEAAGGCTDEVTLELFPLHPQGKA

SEQ ID NO: 17013 - protein, 262 aa, Oryza sativa
  Clone ID: TF_OSC407922j.C1.p1.fg
MRLHHLHVAYLDHKASSSSSSPAPPSISPSSIPGSAAFPAFSFKCLRPLAPKISLPEPRKMIAPPDFVVPRARNASKLLNYTVRHIKPYLFLIDRSIRFMIVYIFGLQVQVPAAGTTRWNPSAEQIKVLEMLYRGGMRTPNSVQIERITEELGKYGRIEGKNVFYWFQNHKARERQKQKRAALLTLSTLDPSLLPATANETKEAPEKKEKDVEDGLASCKRRCKAWGDGAGDGDAVVATEAAGGCTDEVTLELFPLHPQGKA

SEQ ID NO: 17014 - protein, 375 aa, Oryza sativa
  Clone ID: TF_OSC900018j.C1.p17.fg
MESFASLAGGGSSSTTARLPELISPENPDHISPPPLLYQLLAGPESSARQHGHDGHHHGGGGGEAAAAAVQGQVSPAGAEAAVKAEIMSHPQYSALLAAYLGCKKVGAPPDVLTKLTAVPAAQQLDEADGHPRRRHEPQRDDDPDQLDQFMDAYCSMLTRYREELERPILEAAEFFSRVETQLDSLAESNCEGTGSSEEEQDPSDKQLKHQLLRKYGGSLGDLRQVFSKRTKKGKLPKEARQKLLHWWELHYKWPYPSVRTHHIPFDQFNHIFCTKLTRLKMREIYGVVYEQEMEKMTLAQTTGLDQKQINNWFINQRKRHWKPTPVAGTAFPTMEAAGGGFRHSGHGGGLAAAAALPLYMGRPFVVDGMYRLGS

SEQ ID NO: 17015 - protein, 85 aa, Oryza sativa
  unsure (1)..(85): unsure at all Xaa locations
  Clone ID: TF_OSC900018j.C1.p27.gp
MAAAVAMXMRSGSGSDGSGYDKAGMDSGKYVHYTPGQVEALERVYAECPKPRFSRRQQLLCELSILANIEPKQKIKVWFXQNRRX

SEQ ID NO: 17016 - protein, 219 aa, Oryza sativa
  Clone ID: TF_OSC100557j.C1.p1.fg
MNQNEYPCLKLNDSNCEGTGSSEEEQDTSCPEAEEIDPSDKQLKHQLLMKYGGSLGDLRQAFSKRTKKGKLPKEARLKLLHWWELHYDKWPYPSVRTHIYASHLINSTTFFCTKLDLMKMRELLGCTCVYEQEVEKMTLAQTTGLDQKQISNWFINQRKRHWKPTPVAGMTFPTVEAAGGGFRHSGHDGGLAAAAAAAALPLYMGSWPFVVDGMYRLGS

SEQ ID NO: 17017 - protein, 778 aa, Oryza sativa
  Clone ID: TF_OSC31211j.C1.p5.fg
MVFGLNCPAKQIVYVEKKRRWGPCIHQLRASSFGSESLVRKTAFLIAFAHEKAGHREKGEKLTKKDIRSIGIGMDLGAASAVAVSSSGGRRATGEIGQRQVESAGELGLTDKQLQMWFCHRRLKDRKPPPKRQQLEEEVHVPVMAPPPVLPPPLPHSELTMAPGGMYGEQLLPSSSRRGTGRPSAILDMSDLQCLPLLTSHATLKLIDCIPHQGKAWQIVQLDALDERMEHFPGLEDFYEEKHRAPQIASGERLKTLRVRGHTAHILFDDRYVPYLRRAKLLAFVTMAQRPVPLYNAAALTALVDRWRPETHTFHLPCGELTVTLEDVAMILGLPIRGQAVTGDTASGNWRERVEEYLGLEPPVAPDGQRQTKTSGVPLSWLRANFGQCPAEADEATVQRYCRAYVLYIFGSILFPDSGGDMASWMWLPLLADWDEAGTFSWGSAALAWLYRQLCDACRRQGGDANLAGCVWLLQVWMWMRLPVGRPMWRTHQAWPHQDADRRPTVAHLWESVPSPVVGRRNLAYYHYTNEMDYLQPEHVVWMPYQAQEVLELELNPMCHIEDALKTLRCPLICFYAVEFQMCHRRLRQRCRKLAARLGCRSTDVVEHAHAHQEGDEEGEVGDEEGEQDKEAEEGDEEEEGDEDREEEADELGPSQLEDAPESSQPDISQPGPSRPRSRRAPSQDWRYTPDVPRPRTRAPVHLALRSQPSHPEGLLGWATAETAKSHLSARLAGAEFPNVSAILAGAEVPARKPSRRLAGQGHGRNGQVPPQRQVGWR

SEQ ID NO: 17018 - protein, 349 aa, Oryza sativa
  Clone ID: TF_OSC401214j.C1.p9.fg
MDPGRVVFDSGVARRACPGGAQMLLFGGGGSANSGGFFRGVPAAVLGMDESRSSSSAAGAGAKRPFFTTHEELLEEEYYDEQAPEKKRRLTAEQVQMLERSFEEENKLEPERKTELARRLGMAPRQVAVWFQNRRARWKTKQLEHDFDRLKAAYDALAADHHALLSDNDRLRAQVISLTEKLQDKETSPSSATITTAAQEVDQPDEHTEAASTTGFATVDGALAAPPPGHQQPPHKDDLVSSGGTNDDGDGGAAVVVFDVTEGANDRLSCESAYFADAAEAYERDCAGHYALSSEEEDGGAVSDEGCSFDLPDAAAAAAAMFGAAGVVHHDAADDEEAQLGSWTAWFWS

SEQ ID NO: 17019 - protein, 362 aa, Oryza sativa
  Clone ID: TF_OSC900339j.C1.p7.fg
MELGLSLGEAMADAGRELVLGLGMGRREEAAEAGRRDHEVRRELEFGSMSSRCGGSSPEPTVRLTLLPMVPGLGLPWPPPPPPSSESRHLEASTRGFDVNRPPSSGGGGGGGGAEEEQDDVAGAALSSSPNNSAGSFPMDDFSGHGLGGNDAAPGGGGGDRSCSRASDEDDGGSARKKLRLSKEQSAFLEESFKEHSTLNPKQKLALAKQLNLRPRQVEVWFQNRRARTKLKQTEVDCEYLKRCCETLTEENRRLQKELAELRALKTVHPFYMHLPATTLSMCPSCERVASNSAPATASSAATSSTAAPPAAPSSGGIAATSSSAAAAAAPDHRPSSFAALFSSPRGFPLSVAPQAQPPTSS

SEQ ID NO: 17020 - protein, 290 aa, Oryza sativa
  Clone ID: TF_OSC400630j.C1.p3.fg
MESDCQFLVAPPQPHMYYDTAAAAVDEAQFLRQMVAAADHHAAAAGRGGGDGDGGGGGGGGGERKRRFTEEQVRSLETTFHARRAKLEPREKAELARELGLQPRQVAIWFQNKRARWRSKQIEHDYAALRAQYDALHARVESLRQEKLALADQVRAPLPTNHQLYLLHTCTHGDNARFAFLQVDELRGKLNERQDQSGSCDGGGAEGDDDDKRNSVMNASSSGLVEEDYVSCLAVPVVDVSEDGSAACGGSSYEYDHHLDYLGGGQLPDPFCGMPDLWEIWPMVEWNAVA

SEQ ID NO: 17021 - protein, 871 aa, Oryza sativa
  Clone ID: TF_OSC11879j.C1.p12.fg
MSFGGMFDGAGSGVFSYDAGGGGGGGGVHNSRLLPTPPVPKPGGGFAAPGLSLGLQTMDGSQLGDVNRSLAMMGNGGSGSGGDGDSLGRGREEENDSRSGSDNLDGASGDELDPDNSNPRKKKKRYHRHTPQQIQELEAVFKECPHPDEKQRMELSRRLNLESRQVKFWFQNRRTQMKTQIERHENALLRQENDKLRAENMTIREAMRNPMCASCGGAAVLGEVSLEEQHLRIENARLKDELDRVCALAGKFLGRPISSISSPGPPSLQACSGLELGVGSNGGFGLGALGASAAMQSIPDLMGGSSGLTGGPVGSAAMRLPAGIGGLDGAMHAAAADGGAIDRAVLLELALAAMDELVKVAQMDEPLWLPSLDGGFETLNYDEYHRAFARVVGQCPAGYVSEATRESGIAIISSVDLVDSLMDAPRWSEMFPCVVARASTTDIISSGMGGTRSGSIQLMHAELQVLSPLVPIREVVFLRFCKQHAEGLWAVVDVSVDAVLRPDQNGGGGSSSSSYMGCRLLPTGCIVQDMNNGYSKVTWVVHAEYDETAAHQLYRPLLRSGQALGARRWLASLQRQCQYLAILCSNSLPARDHAAITPVGRRSMLKLAQRMTDNFCAGVCASAAQKWRRLDEWRGEGGGGGGGGGGDGEDKVRMMARHSVGAPGEPPGVVLSATTSVRLPGTLPQRVFDYLRDEQRRGDWDILANGEAMQEMDHIAKGQHHGNAVSLLRPNATSGNQNNMLILQETCTDSSGSLVVYAPVDVQSMHVVMNGGDSAYVSLLPSGFAILPDGHNNGASPSPAEVGSGASPNSAAGGGGGSNNTGSLVTVAFQILVNNLPTAKLTVESVDTVSNLLSCTIQKIKSALQASIISP

SEQ ID NO: 17022 - protein, 351 aa, Oryza sativa
  Clone ID: TF_OSC400138j.C1.p4.fg
MASNGAAAGAMAPFFPPNFLLQMQQPLPLHHQHLQDHAHGGHGGHHLLPPPPPSLSPFLPDLAMDAPPPPMYEASGGDGGGGGAASEDEEDGCGGGGGGGGGEKKRRLSVEQVRTLERSFESGNKLEPERKAQLARALGLQPRQVAIWFQNRRARWKTKQLEKDFDALRRQLDAARAENDALLSLNSKLHAEIVALKGGAAAAGGGGSSCRQEAASELINLNVKETEASCSNRSENSSEINLDISRPAPPPPPPPANESPVNRGIPFYASIGRGGAGGVDIDQLLLRGGHSPSPAAVTTPPPPKMELGITGNGGGADAAAAGAGSFGGLLCGAVDEQPPFWPWADGHHHFH

SEQ ID NO: 17023 - protein, 871 aa, Oryza sativa
  Clone ID: TF_OSC900153j.C1.p15.fg
MSFGGMFDGAGSGVFSYDAGGGGGGGGVHNSRLLPTPPVPKPGGGFAAPGLSLGLQTMDGSQLGDVNRSLAMMGNGGSGSGGDGDSLGRGREEENDSRSGSDNLDGASGDELDPDNSNPRKKKKRYHRHTPQQIQELEAVFKECPHPDEKQRMELSRRLNLESRQVKFWFQNRRTQMKTQIERHENALLRQENDKLRAENMTIREAMRNPMCASCGGAAVLGEVSLEEQHLRIENARLKDELDRVCALAGKFLGRPISSISSPGPPSLQACSGLELGVGSNGGFGLGALGASAAMQSIPDLMGGSSGLTGGPVGSAAMRLPAGIGGLHGAMHAAAADGGAIDRAVLLELALAAMDELVKVAQMDEPLWLPSLDGGFETLNYDEYHRAFARVVGQCPAGYVSEATRESGIAIISSVDLVDSLMDAPRWSEMFPCVVARASTTDIISSGMGGTRSGSIQLMHAELQVLSPLVPIREVVFLRFCKQHAEGLWAVVDVSVDAVLRPDQNGGGGSSSSSYMGCRLLPTGCIVQDMNNGYSKVTWVVHAEYDETAAHQLYRPLLRSGQALGARRWLASLQRQCQYLAILCSNSLPARDHAAITPVGRRSMLKLAQRMTDNFCAGVCASAAQKWRRLDEWRGEGGGGGGGGGGDGEDKVRMMARHSVGAPGEPPGVVLSATTSVRLPGTLPQRVFDYLRDEQRRGDWDILANGEAMQEMDHIAKGQHHGNAVSLLRPNATSGNQNNMLILQETCTDSSGSLVVYAPVDVQSMHVVMNGGDSAYVSLLPSGFAILPDGHNNGASPSPAEVGSGASPNSAAGGGGGSNNTGSLVTVAFQILVNNLPTAKLTVESVDTVSNLLSCTIQKIKSALQASIISP

SEQ ID NO: 17024 - protein, 610 aa, Oryza sativa
  Clone ID: TF_OSC101881j.C1.p2.fg
MAGARSAPSVAAAPLPMPLPRPSSSGSTLQKLVGPAAPSLAPLTLRAAFVSFPALLPRPGTSGSALPRPARAGFPPRCPLSHASTAAPFPTQPPFPSSLPLPSSTRFGQPDPLAGRLGRQIRKPSLMRGGTGRRWREKGRRREEGEGWERGVERREAEGPREEGESRREFGGCWILIASKFILQWRPLPTVSENPIFAGGHLRGVKPMSFGNLGGGGGAGGSGKAAASSFLQLPLSTAAAATAYYGTPLALHQAAAAAGPSQYHGHGHPHHGGGHHHSKHGGAGGGEISAAEAESIKAKIMAHPQYSALLAAYLDCQKVGAPPEVLERLTATAAKLDARPPGRHDARDPELDQFMEAYCNMLAKYREELTRPIDEAMEFLKRVESQLDTIAGGAHGGGAGSARLLLADGKSECVGSSEDDMDPSGRENEPPEIDPRAEDKELKFQLLKKYSGYLSSLRQEFSKKKKKGKLPKEARQKLLHWWELHYKWPYPSETEKIALAESTGLDQKQINNWFINQRKRHWKPSEDMPFVMMEGFHPQNAAALYMDGPFMADGMYRLDGWFELKSKLLVKLLDLDVLLPRAVNFIVSGFGNQACLVKHLEIMYTFPDDN

SEQ ID NO: 17025 - protein, 228 aa, Oryza sativa
  Clone ID: TF_OSC401329j.C1.p51.fg
MGATSPSGLELTMAVPGLSSSGSEGAGCNNNNAGGGCNMRDLDINQPASGGEEEEFPMGSVEEDEEERGVGGPHRPKKLRLSKEQSRLLEESFRLNHTLTPKQKEALAIKLKLRPRQVEVWFQNRRARTKLKQTEMECEYLKRCFGSLTEENRRLQREVEELRAMRVAPPTVLSPHTRQPLPASALTMCPRCERITAATGPPAVRPPPSSAAAAAPSPFHPRRPSAAF

SEQ ID NO: 17026 - protein, 357 aa, Oryza sativa
  Clone ID: TF_OSC21192j.C1.p3.gm
MKRPTSSSRKSKKQGEDLAFSEEGSLPAVTMEQKDEAEMEEVDEEEEEEVDEDMAGGHAAQSPSPSCGLGEKKRRLALEQVRALERSFDTDNKLDPDRKARIARDLGLQPRQVAVWFQNRRARWKTKQLERDFAALRARHDALRADCDALRRDKDALAAEIRELREKLPTKPADTAASVKVEAGNDAAAGAAAATVCKDGSSDDSDSSVVFNDEASPYSGAAFIGFGPSFLVDDASAATVGCSSSLPALESKWHGPYSDDSCKGGVYGFTEEWLAACSGEMAGNDAAGFFSDEHASNLNFGWDRLISFSFGSTMPRIHLGMDGYRYAKSELSHDHGGIREEGDVVVAAAGSAWFGTA

SEQ ID NO: 17027 - protein, 344 aa, Oryza sativa
  Clone ID: TF_OSC412751j.C1.p2.fg
MESGRLIFSTAGSGAGQMLFLDCGAGGGGVGGGAMFHRGARPVLGMEEGGRGVKRPFFTTPDELLEEEYYDEQLPEKKRRLTPEQVHLLERSFEEENKLEPERKTELARKLGLQPRQVAVWFQNRRARWKTKQLERDFDRLKASFDALRADHDALLQDNHRLHSQVMSLTEKLQEKETTTEGSAGAAVDVPGLPAAADVKVAVPDAEEPALEEAAAAFEEQQEQQVKAEDRLSTGSGGSAVCEHGRANWVVGCGRQHLAAVDSSVESYFPGGDEYHDCVMGPMDHAAGGIQSEEDDGAGSDEGCSYYADDAGVLFADHGHHHHHQHADDDEEDGQQISCWWMWN

SEQ ID NO: 17028 - protein, 343 aa, Oryza sativa
  Clone ID: TF_OSC900058j.C1.p14.fg
MESGRLIFSTAGSGAGQMLFLDCGAGGGGVGGGAMFHRGARPVLGMEEGGRGVKRPFFTTPDELLEEEYYDEQLPEKKRRLTPEQVHLLERSFEEENKLEPERKTELARKLGLQPRQVAVWFQNRRARWKTKQLERDFDRLKASFDALRADHDALLQDNHRLHSQVMSLTEKLQEKETTTEGSAGAAVDVPGLPAAADVKVAVPDAEEPALEEAAAAFEEQQEQQVKAEDRLSTGSGGSAVVDTDAQLVVGCGRQHLAAVDSSVESYFPGGDEYHDCVMGPMDHAAGGIQSEEDDGAGSDEGCSYYADDAGVLFADHGHHHHHQHADDDEEDGQQISCWWMWN

SEQ ID NO: 17029 - protein, 250 aa, Oryza sativa
  Clone ID: TF_OSC401108j.C1.p35.fg
MEWDKAKASSGEAVDDRGGGEGGLGYVKVMTDEQMEVLRKQISIYATICEQLVEMHRALTAQQDSIAGMRLGNLYCDPLMVPGGHKITARQRWTPTPMQLQILENIFDQGNGTPSKQKIKDITAELSQHGQISETNVYNWFQNRRARSKRKQAALPNNNAESEAEADEESPTDKKPKSDRPLHQNIAMRDHNSERISEMHHFDTEHEQIRRMMYASNDSSSRSSGSLGQMSFYDNVMSNPSTSYKHPCFI

SEQ ID NO: 17030 - protein, 320 aa, Oryza sativa
  Clone ID: TF_OSC900132j.C1.p22.fg
MAASSEVSIDPDQWFYIYSLERVAYVCERVGSPVMEEAELRRRRRKRPFLTTTHDELELQMEDLVDELYGVDEQGSSSAAARKRRLTAEQVRALERSFEEEKRKLEPERKSELARRLGIAPRQVAVWFQNRRARWKTKQLELDFDRLRAAHDELLAGRTALAADNESLRSQVILLTEKLQANGKSPSPSPAPAEQTAVPAAPESAKSFQLEEGRRLYDAAGSTTTTNGGGGGVAMPAARVAAARAASNDSPESYFAGARSPPSSSEDDCGGAGSDDDYPSSSVLLPVDATLVGDAFEHAVAATVAADEEAPLNSWEWFWN

SEQ ID NO: 17031 - protein, 247 aa, Oryza sativa
  Clone ID: TF_OSC418226j.C1.p10.fg
MMERAEDLRLSLSLSSPLIAPRTHHVAMLFHAPPEKRFLEMPLLPAAKRSEVVAAEEERAGLRGGGGSDEEDGGCGIDGSRKKLRLSKDQSAVLEDSFREHPTLNPRQKATLAQQLGLRPRQVEVWFQNRRARTKLKQTEVDCEFLKRCCETLTEENRRLQKEVQELRALKLVSPHLYMNMSPPTTLTMCPSCERVSNTNNNSSAAAAADRRGIRTTTAAGGGSVVDTAADGGILCHRPIAVRPQQS

SEQ ID NO: 17032 - protein, 311 aa, Oryza sativa
  Clone ID: TF_OSC422332j.C1.p24.fg
MEMMVHGRRDEQYGGLRLGLGLGLSLGVAGGAADDEQPPPRRGAAPPPQQQLCGWNGGGLFSSSSSDHRGRSAMMACHDVIEMPFLRGIDVNRAPAAETTTTTARGPSCSEEDEEPGASSPNSTLSSLSGKRGAPSAATAAAAAASDDEDSGGGSRKKLRLSKDQAAVLEDTFKEHNTLNPKQKAALARQLNLKPRQVEVWFQNRRARTKLKQTEVDCELLKRCCETLTDENRRLHRELQELRALKLATAAAAPHHLYGARVPPPTTLTMCPSCERVASAATTTRNNSGAAPARPVPTRPWPPAAAQRSSA

SEQ ID NO: 17033 - protein, 973 aa, Oryza sativa
  Clone ID: TF_OSC900395j.C1.p10.fg
MGMVRKIGRAGREADASSSPELLPGPAQPASRTSQDGSLPPTVTPLKRLNIRVEQAADAAPTVGSAVGPHIRRSLGRRTHRPRRGQWLRAALTPASITSPLLIPDLRVRGAKDTDRGPFGYRGAQRHGLARLGSSESGCEACGRGGVDPRKRTFSSLRRGVLLRRGGGGMSFGGLFDGGGGGGMQFPFASGFASSPALSLALDNAGGGIGGRMLGGGAGAGSSAGGAMTRDTEAENDSRSGSDHLDAISAAGEDDVEDAEPSNSRKRKKRYHRHTPQQIQELEALFKECPHPDEKQRAELSRRLSLDARQVKFWFQNRRTQMKTQLERHENALLKQENDKLRAENMTIREAMRSPMCGSCGSPAMLGEVSLEEQHLRIENARLKDELNRVCALATKFLGKPISLLSPPPLLQPHLSLPMPNSSLELAIGGIGGLGSLGTLPGCMNEFAGGVSSPMGTVITPARATGAAIPSLVGNIDRSVFLELAISAMDELVKMAQMDDPLWVPALPGSPSKEVLNFEEYLHSFLPCIGMKPAGYVSEASRESGLVIIDNSLALVETLMDERRWSDMFSCMIAKATVLEEVSTGIAGSRNGALLLMKAELQVLSPLVPIREVTFLRFCKQLAEGAWAVVDVSIDGLVRDHNSGTAPTGGNVKCRRVPSGCVMQDTPNGYCKVTWVEHTEYDEASVHQLYRPLLRSGLAFGARRWLATLQRQCECLAILMSSATVTANDSTAISQEGKRSMLKLARRMTENFCAGVSASSAREWSKLDGATGSIGEDVRVMARKSVSEPGEPPGVVLSAATSVWVPVAPEKLFNFLRDEQLRAEWDILSNGGPMQEMTQIAKGQRDGNSVSLLRASAVSANQSSMLILQETCTDASGSIVVYAPVDIPAMQLVMNGGDSTYVALLPSGFAILPDGPRIGATGYETGGSLLTVAFQILVNNQPTAKLTVESVETVNNLISCTIKKIKTALQCDA

SEQ ID NO: 17034 - protein, 855 aa, Oryza sativa
  Clone ID: TF_OSC417639j.C1.p20.fg
MAAAAVGGRGERLSSSSPTAAAPQVDAGKYVRYTPEQVEALERVYTECPKPSSLRRQQLIRECPILSNIEPKQIKVWFQNRRCREKQRKEASRLQTVNRKLNAMNKLLMEENDRLQKQVSRLVYENGYMRTQLHNPSAATTDTSCESVVTSGQHHQQQNPAVLHPQRDANNPAGLLAIAEETLAEFMSKATGTAVEWVQMVGMKPGPDSIGIIAVSHNCSGVAARACGLVSLEPTKVAEILKDRPSWYRDCRCVDIIHVIPTGNGGTIELIYMQTYAPTTLAAPRDFWTLRYTSGLEDGSLVICERSLTQSTGGPSGPNTPNFIRAEVLPSGYLIRPCEGGGSMIYIVDHVDLDAWSVPEVLRPLYESPKILAQKMTIAALRHIRQIAHESSGEIPYGAGRQPAVFRTFSQRLSRGFNDAVSGFPDDGWSLLSSDGSEDITISVNSSPNKLVGSHVSPNPLFSTVGGGILCAKASMLLQNVPPALLVRFLREHRSEWADPGVDAYSAASLRASPYAVPGLRTSGFMGSQVILPLAHTLEHEEFLEVIRLEGHGFSHDEVLLSRDMYLLQLCSGVDENATSASAQLVFAPIDESFADDAPLLPSGFRVIPLDTKMDGPSATRTLDLASALEVGPGGASRASVEASGTCNRSVLTIAFQFSYENHLRESVAAMARSYVRAVMASVQRVAVAIAPSRLGPQIGMKHPPASPEALTLASWIGRSYRAHTGADIRWSDTEDADSPLALLWKHSDAILCCSLKPAPMFTFANNAGLDILETTLVNLQDISLEMILDDEGRKALCSEFPKIMQQGFTYLPGGVCKSSMGRQASYEQAVAWKVLSDDDAPHCLAFMLVNWTFM

SEQ ID NO: 17035 - protein, 256 aa, Oryza sativa
  Clone ID: TF_OSC413762j.C1.p6.fg
MEGEDLGSWLGLGIGGGGYAYGGDDCRRSPSSPSPVQMLFSQHVKEEITRGYDHGRDEEQASGSKIMKGERGARLRVMRSIRNSGGDGSRSRVLSLGDDGGDGGSGGGGGGGTRKKLQLTKEQSTLLEDSFRVHNILSHAQKHELARQLKLKPRQVEVWFQNRRARTKLKQTEVDCEFLKRCCESLTEENKQLKHELMELRRLASPAAAAAGSQLYVQFPRAAAAAMVNVCPSCEKVTVMGGGGGETGKSSSSYSS

SEQ ID NO: 17036 - protein, 749 aa, Oryza sativa
  Clone ID: TF_OSC900292j.C1.p25.fg
MQSLLDGHHHQLPSLLQQHHNGHHLLDQHQQHQHQLPPQATTTSESDGRAPRDELEMSKSGGSDNLESGGGGGGGGSGGDQDPNQRPRKKRYHRHTQHQIQELEAFFKECPHPDDKQRKELSRELGLEPLQVKFWFQNKRTQMKTQHERHENNALRAENEKLRAENMRYKEALANASCPNCGGPAAIGEMSFDEHHLRLENARLRDEIDRISAIAAKYVGKPAAAVSAAYPPLPPSNRSPLDHMGIPGAGADVFGADFDKPLVIELAVAAMEELVRMAQLGEPLWAPALGGEALGEEEYARTFPRGLGPKSPELRSEASRETAVVIMNHVSLVEMLMDVGQWTALFSSIVSRAATLEVLSTGVAGNHNGALQLMSAEFQMPSPLVPTRETQFLRYCKQHPDGTWAVVDVSLDGLRAGAGGGCQPAAARGHRRRPSGCLIQEMPNGYSKVTWVEHVEADDQMVHNLYKPVVNSGMAFGARRWVATLERQCERLASAMASNVASSGDAGVITTSEGRRSMLKLAERMVASFCGGVTASTTHQWTTLSGSGAEDVRVMTRKSVDDPGRPPGIILNAATSFWLPVPPSRVFDFLRDDSTRSEWDILSNGGVVQEMAHIANGRDHGNAVSLLRVNNANSNQSNMLILQECCTDATGSYVIYAPVDVVAMNVVLNGGDPDYVALLPSGFAILPDGPDGGGGSLLTVAFQILVDSVPTAKLSLGSVATVNSLIACTVERIKAAITGDNGVAPPCPR

SEQ ID NO: 17037 - protein, 239 aa, Oryza sativa
  Clone ID: TF_OSC400277j.C1.p16.fg
MSREEDEKLLFPSFAFPAECFPEAATSGGEQKKARQRRRRKVKPEAAAALAGESGGDEQAKKRRLSDEQARFLEMSFKKERKLETPRKVQLAAELGLDAKQVAVWFQNRRARHKSKLMEEEFAKLRSAHDAVVLQNCHLETELLKLKERLADVEEEKAKLAAVAAATTGGGGGGGGGSSSPTSSSFSTVTYHPALAGQFGVEAAAEEADLTYMSEYAYNSYMLELAAAGYCGGVYDQFS

SEQ ID NO: 17038 - protein, 237 aa, Oryza sativa
  Clone ID: TF_OSC401489j.C1.p8.fg
MDSVVDGGLDTRLSLAVGCCPPRRRPVLLFGEVLPSPEKKVAAAAVVAAGKRGREQRGEAEAEATTTRQRRSCKKGRRGRGDDDDDDGDRRSPSGGGGDEEGASRKKLRLTGEQATLLEDSFRAHNILSHAEKQELAGKLGLSARQVEVWFQNRRARTKLKQTEADCDLLRRWCDHLAADNARLRRDLAELRRSSSSPPVSGLAVATPVVCPSCAHDDKRRLAFATAAAAAGDMASN

SEQ ID NO: 17039 - protein, 300 aa, Oryza sativa
  Clone ID: TF_OSC900242j.C1.p3.np
MEDLYSIHPGISRGGGGGGGGPADPADPPPPATTAAAADLTELMKAQIAGHPSYPSLLSAYIECRKVGAPPEVTTLLEEIGREGRGGGGGATAGGEIGLDPELDEFMETYCRVLERYKEELTRPFDEAASFLTGIHTQLASLCGGAPPPTDNSDEMVGSSEDEPCSGDADAADFGQEHSSRLADHELKEMLLKKYSGCLSRLRSEFLKKRKKGKLPKDARSALMDWWNTHYRWPYPTEEDKVRLAAMTGLDPKQINNWFINQRKRHWKPSEDMRFALMEGVTGGSSSGTTLYFDTGTIGP

SEQ ID NO: 17040 - protein, 268 aa, Oryza sativa
  Clone ID: TF_OSC400269j.C1.p52.gm
MAQDDEDVGLALGLSLGSGGHRRQRESRDEAPSSAAASLLTLRLPAESGGQPQVVVKREVVRAEEEEYEYEYERALYSSSAAAADDDEGCNSRKKLRLSKEQSALLEDRFKEHSTLNPKQKVALAKQLNLRPRQVEVWFQNRRARTKLKQTEVDCELLKRCCETLTEENRRLHRELQQLRALTHSTAAGFFMATTLPVPAATLSICPSCERLATAAAAGASPTAAADRTNKPTAPHLFSPFANAHGKDGQWAWAVGKDGDVDGGAHRR

SEQ ID NO: 17041 - protein, 321 aa, Oryza sativa
  Clone ID: TF_OSC416036j.C1.p10.fg
MGDEEDLELVLGVRATRRDEQDDQTTCTQSSEEAMEGEEDETRPHGEAPVESLSFPLFVSSAETGSANSEMCTRGFDVNTRPADGGAEAGRPSSPSSMQEASTRQQVADQEAADDEDNGGGGARKKLRLSKEQSSFLEDSFKEHSTLTPKQKSDLANRLNLRPRQVEVWFQNRRARTKLKQTEVDCEHLKRCCERLTRENRRLQREVAELRGTLRTTTSSYPPLYGLHHLPAAAGTVFRVCPSCEHSKVVAAAASESFSPRVFAGGGAPAAITAAAAVPSPGAGSPPSSSAALFGARRPHFGPFAAAVIPPVLRRQPSATS

SEQ ID NO: 17042 - protein, 397 aa, Oryza sativa
  Clone ID: TF_OSC13680j.C1.p2.fg
MELGLSLGEAMADAGRELVLGLGMGRREEAAEAGRRDHEVRRELEFGSMSSRCGGSSPEPTVRLTLLPMVPGLGLPWPPPPPPSSESRHLEASTRGFDVNRPPSSGGGGGGGGAEEEQDDVAGAALSSSPNNSAGSFPMDDFSGHGLGGNDAAPGGGGGDRSCSRASDEDDGGSARKKLRLSKEQSAFLEESFKEHSTLNPVSFSSSHRSNTMASSSSSSSSRSPNVASRLRCVASRTEAALAKQLNLRPRQVEVWFQNRRARTKLKQTEVDCEYLKRCCETLTEENRRLQKELAELRALKTVHPFYMHLPATTLSMCPSCERVASNSAPATASSAATSSTAAPPAAPSSGGIAATSSSAAAAAAPDHRPSSFAALFSSPRGFPLSVAPQAQPPTSS

SEQ ID NO: 17043 - protein, 125 aa, Oryza sativa
  Clone ID: TF_OSC100841j.C1.p3.fg
MDNGSQQESSDLHVHHLPIASIIGVEDRTEEADDAAVDYHDDSSEGQDEVSNKRMKRHTDDQIKHLESVFERCTYLGGNQRVQLAKKLGMEERQVKFWFQNRRTRKKVATWVDKIQLSVRNGGSP

SEQ ID NO: 17044 - protein, 851 aa, Oryza sativa
  Clone ID: TF_OSC401894j.C1.p34.fg
MQFPFSGAGPGVFTSSPALSLALADAVAGRNSGGGGKMVTAAHGGVGGGGGGGRAKARDALEVENEMSRSGSDHLDVVSCGDAGGGGGDDDDDEDAEHGNPPKRKKRYHRHTPQQIQELEAMFKECPHPDEKQRAELSKRLGLEPRQVKFWFQNRRTQMKMQLERHENSLLKQENDKLRSENLSIREATSNAVCVGCGGPAMLGEVSLEEHHLRVENARLKDELSRVCALAAKFLGKSISVMAPPQMHQPHPVPGSSLELAVGGIGSMPSATMPISTITDFAGAMSSSMGTVITPMKSEAEPSAMAGIDKSLFLELAMSAMDELVKMAQMGDPLWIPGASVPSSPAKESLNFEEYLNTFPPCIGVKPEGYVSEASRESGIVIIDDGAALVETLMDEFEFLRQRRWSDMFSCMIAKASTTEEISTGVAGSRNGALLLMQAELQVLSPLVPIREVKFLRFSKQLADGVWAVVDVSADELMRDQGITSASSTANMNCRRLPSGCVLQDTPNGFVKYLVQISVFSEVYNLSIDQFLDLPPAFMVTWVEHTEYDEASVHPLYRPLLRSGLALGAGRWIATLQRQCECLALLMSSIALPENDSSAIHPEGKRSMLKLARRMTDNFCAGVSTSSTREWSKLVGLTGNIGEDVHVMARKSVDEPGTPPGVVLSAATSVWMPVMPERLFNFLHNKGLRAEWDILSNGGPMQEVTSIAKGQQNGNTVCLLKASSSVPLTKNFTVQPTKDKQNSMLILQETCADASGSMVVYAPVDIPAMHLVMSGGDSSCVALLPSGFAILPAGPSIGADHKMGGSLLTVAFQILANSQPSAKLTVESVETVSNLISCTIKKIKTALHCDV

SEQ ID NO: 17045 - protein, 790 aa, Oryza sativa
  Clone ID: TF_OSC400544j.C1.p1.fg
MNGELKLMASYVSKLKFILQKDQQQEPHTANLLVLLGSSNQDKRNGLSQGENRMDTCTRKKPRRYQLLTMQQKETLNRAFQSCPNPDRNDLKKLAKELNMTETQIKYWFQNCRTKMKKFKNNEERKLLQKENEELKKENAELRNRMKNSTCRACDLPLFHIDCRHWENPMLNKGNHGVTSNLIPQAVSSLLPSSSGFVASGSNLSSNAVLMPVSAMPSSVLQPAPAVSGANFPILHNLSANANDGYTEKNVLLDLANRAMEEFFSLMKENESLLVKKKENGPLWLPHMDILGVESLNYQEYLAKSRTIGQKPVDFKVVVTRDTAIVNGSCVDLVKSLLDANRWRELFPGIVASANTTKIISTGPSNLHDGLLQLKNLQMRAELQVMSPEVPVCDVTFLRQSVQFGSGLWCVVDVSIDTILPGESKTAQSSVQTSSTAARRMEVRLLPSGCVIEEMENGYSKVTWMVHAAYDERAVPVLYHSLLRSAKALGACRWVASLQRHSQFLSGLHKYIFCPDSTMTEVVMRRKVLYLVKQMTSSFTGLFASMSKATLQDGDDTHFAHQIVGGATGEPAGLLLSATTTIWLPGVNPRHVYDHLRDEQCHGEWRCLLGEQLHQGNALPYGAPLNGETVPEFYRMVNGLHEGHAISLISPREMGGNISNTLLLQEARTDLSGSLIVYARTDVNTVHSIMNSGLNPATVFLVSSGCAILPDCLESFPLHPAATADQAGTSSAAIASRSETGGSFVTVTYQMFFSSQGGAAPASSSIHQGRDALKKATDIFKVVLDTLTVA

SEQ ID NO: 17046 - protein, 390 aa, Oryza sativa
  Clone ID: TF_OSC401896j.C1.p7.fg
MASNGMASSPSSFFPPNFLLHMAQQQAAPPHDPQEHHHHHHHGHHGHHHEQQQQQQHHHHLGPPPPPPPHPHNPFLPSSAQCPSLQEFRGMAPMLGKRPMSYGDGGGGGDEVNGGGEDELSDDGSQAGEKKRRLNVEQVRTLEKNFELGNKLEPERKMQLARALGLQPRQVAIWFQNRRARWKTKQLEKDYDALKRQLDAVKAENDALLNHNKKLQAEERRSMWVSVLAERLLESVPFSPPRIVALKGREAASELINLNKETEASCSNRSENSSEINLDISRTPPPDAAALDTAPTAHHHHHGGGGGGGGGGGMIPFYTSIARPASGGGVDIDQLLHSSSGGAGGPKMEHHGGGGNVQAASVDTASFGNLLCGVDEPPPFWPWPDHQHFH

SEQ ID NO: 17047 - protein, 295 aa, Oryza sativa
  Clone ID: TF_OSC401695j.C1.p34.fg
MAIIHDTSDQQEDNMRSYMDGGGAAAYEEEEEEVEDDDGGGGGGGGGGGGGLGEKKRRLAAEQVRALERSFEADNKLDPERKARIARDLRLHPRQVAVWFQNRRARWKTKQIERDFAALRSRHDALRLECDALRRDKDALAAEIADLRDRVDGQMSVKLEAVAADEHQPPPPPPPPPLAYNSKVVDGSTDSDSSAVFNEEASPYSGAAIDHHHHQTPASYDTAGFTSFFAPSTTLTSSLSFPSMFHASSHFDGHQELLVGGGGAGAVADADLGGAGFFAGDEHAGGLSWYGAEGW

SEQ ID NO: 17048 - protein, 866 aa, Oryza sativa
  Clone ID: TF_OSC401909j.C1.p27.fg
MAGAASSADALFASPLIPNPALAGFMSSSAAMPFHHFSNAAATLIPKEEGLMGGLHVAKDEGMDLEMDMELSGGSGSAHLDGLLSFADVDDDHKPQHSGHDQPPDAAQPSGAAGGNAKKKRYHRHTAHQIQQMEALFKECPHPDDKQRLKLSQELGLKPRQVKFWFQNRRTQMKAQQDRADNVILRAENENLKSDNFRLQAAIRNVVCPNCGHAAVLADMSYEEQQLRIENARLKDELDRLACIATRYGGGGGRQPVLSTSALSCISAPPPVLMPPLDLDMNVYSRHFAEQAPVMGCGDLIPPPVVPQHDGAAAYMGAMMAPVQEQDKQLVVDLAATAADQLARMCRAGEPLWVRQRGAEVMAVEEHARMFSWPVDGAKQGDGGAVARAEGTRDNAVVIMNSINLVDAFLDANKWMELFPSIVCKARTIQIINHGAASGHLGSGTLLLMQAEVQFLSPLVAAREVVFFRYCVHNADEGSWAIVDFPAEGFEEGLLQASVVRCRRRPSGCIIQDMPNGYSRVVWVEHMEMVGEEKPLQPVFRDYVASGAAFGATRWLSILQRQCERLASELARNIADLGVIRTPEARTNMMKLSQRMITTFCANISASGTQSWTALSDSTQDTIRVTTRKNTEPGQPSGVILTAVSTSWLPFTHQQVFELLADEQQRCQLEILSNGGSLHEVAHIANGSHPRNCISLLRINAASNSSQNVELLLQESSTHPDGGSLVVFATVDVDAIQVTMSGEDPSYIPLLPLGFAIFPATSPSPAAAPTISSSTTTTTGNGNGETSSTPPRNSSSNNNNADELLPPNGCLLTVGMQVLASAVPSAKLNLSSVTAINSHVCNAIHQITAALKSSAGGAGGEPASDQ

SEQ ID NO: 17049 - protein, 945 aa, Oryza sativa
  Clone ID: TF_OSC401024j.C1.p1.fg
MDSSGDGGDEGAGAAPAGVEEESPAPASAPAPAPASASAPVPAAVGGGAGASGSSGKVKRVMKTPYQLEVLERTYTEDPYPNETMRAELSVKLGLTDRQLQMWFCHRRLKDRKPPPKRQQLEEEVPVPVMAPPPVLPPPLPHSELTMGTGGMYGEPLLSPSSRRGTGRPSAVPRISASEVARRYYEPPQVMLPPLAPMQLTRAEHRVIDSVERLIGEPLREDGPVLGVEFDPLPPGAFGAPIVPEQQRQPFRSYEAKMFSGHDTKHIKASAFLPSIDPFVPSTVSGKRKSMTGSSSHLGSRAVREYQFIPEQSSDIYERTTQSRYYDVLTEASDSRMSTGSRFLHGVEKAPGYTFHGQISGSSHLSLHGRPPVFSSGSTDYEMDPSNINSSSVPNESQYGIPQVAGFENSVAPSDRMVYHDDDAFRMERKRKHSEEVKIAKEVEAHEKRIRKELEKQDMLNRKREEQVRREMERNDRERRKEEERLLREKQKEEERFQREQRREHKRMEKYLLKQSLRAEKIRQKEELRKEKEAARQKAANERATARRIAREYMELMEDERLELMELVSRSKGLPSMLSLDSDTLQQLDSFRGMLRQFPSEIVRLKVPFSIKPWTSSEDNIGNLLMVWKFFITFADVLGIPSFTLDEFVQSLHDYDSRLLGELHVALLKSIIKDIEDVARTPSVASGMTANPGGGHPQIVEGAYDWGFNILAWQRHLNLLTWPEILRQFGLSAGLGPQLRKRNAENVNNHDDNEGRNGEDVISILRSGSAAVNAAAKMKERGYGNRRRSRHRLTPGTVKFAAFHVLSLEGSQGLTILEVAEKIQKSGLRDLTTSKTPEASISAALSRDSKLFERTAPSTYCVKTPYRKDPADSEAVLAAAREKIRVFQNTISECEEVEKDVDDAERDEDSECDDADDDPDGDEVNIEEKDVKTSLVKAQDGGMQA

SEQ ID NO: 17050 - protein, 269 aa, Oryza sativa
  Clone ID: TF_OSC401651j.C1.p19.fg
MRSPAALLPVVADGGGGVGVEEEMDVDEDMAMCGGRGGGGGEKKRRLSVEQVRALERSFETENKLEPERKARLARDLGLQPRQVAVWFQNRRARWKTKQLERDYAALRQSYDALRADHDALRRDKDALLAEIKELKGKLGDEDAAASFSSVKEEEDPAASDADPPATGAPQGSSESDSSAVLNDAEILPHKPAPAAAADAAASEETEAVVTGAALLHHAEVFFHGQLLKVDDDEAAFLGDDGAACGGFFADEHLPSLPWWAEPTEQWTT

SEQ ID NO: 17051 - protein, 886 aa, Oryza sativa
  Clone ID: TF_OSC401367j.C1.p6.fg
MDASKYVRYTPEQVEALERLYYECPKPSSLRRQQLVRECPALANVDPKQIKVWFQNRRCREKQRKESSRLQALNRKLTAMNKLLMEENDRLQKQVSQLVYDHGRHGVAAAGMMRRVPAFPPQAAAAAGHQLATATDTSCESVVTSGHHHQQQQHNVVQPPPRDASPAGLMSIAEETLTEFLSKATGTAVEWLQMPGMKPGPDSIGIIAISHGCAGVAARACGLVGMEPAKVAEILKDRPLWLRDCRSMDVVNVLPAGANGTIELLYMQARTHKPENSEPEPEILKLKFVFDLQLYAPTTLAPARDFWLLRYTSILDDGSLVVCERSLSSKQGGPSMPLVQPFIRGEMLPSGFLIRPSDVGGSVIHIVDHMDLEPWSVPEVVRPLYESSAMVAQKISMAALRYLRQVAHEDTRSVITGWGRQPAALRALSQKLTRGFNEALNGLADDGWSVIESDGVDDVCISVNSSKVIGCNATFSSGLPIVSTGVLCAKASMLLQDVSPPSLLQFLREHRSQWADSNLDAFFASTMKPNFCNLPMSRLGGFSGQVILPLAHTFEPEEFLEVIKLGNASNYQDTLVHRDLFLLQMYNGVEESSAGTCSELIFAPIDASFSDDSPLLPSGFRIIPIDSPLDTSSPNCTLDLASTLEAATPRSRISGVNGGGGGCAAAAASSSSKAVMTIAFQFAFDGHLQDSVAAMARQYMRNIISSVQRIAVALSSSRLVPPGAGAAAAQLSPVTPEAATLPRWICQSYRFHFGDELIKSVDANSSNESILKAVWHHPSAILCCSLKAMPVFTFANQSGLDMLETTLVALQDMTLEKVFDDQGRKNLCTELPNIMEQGMACMEGGVCVSSVGRAASYEKAVAWKVVDGDGGGAHCICFMFINWTFL

SEQ ID NO: 17052 - protein, 218 aa, Oryza sativa
  Clone ID: TF_OSC13680j.C1.p1.np
RPAAAAAAAAEEEQDDVAGAALSSSPNNSAGSFPMDDFSGHGLGQRRGPWRGGGDRSCSRASDEDDGGSARKKLRLSKEQSAFLEESFKEHSTLNPRTEAALAKQLNLRPRQVEVWFQNRRARTKLKQTEVDCEYLKRCCETLTEENRRLQKELAELRALKTVHPFYMHLPATTLSMCPSCERVASNSAPATASSAATSSTAAPPAAPSSGGIAATSS

SEQ ID NO: 17053 - protein, 264 aa, Oryza sativa
  Clone ID: TF_OSC418063j.C1.p13.fg
MTNAGSTPTIDDGYGGVGMEAEGDVEEEMMACGGGGEKKRRLSVEQVRALERSFEVENKLEPERKARLARDLGLQPRQVAVWFQNRRARWKTKQLERDYAALRHSYDSLRLDHDALRRDKDALLAEIKELKAKLGDEEAAASFTSVKEEPAASDGPPAAGFGSSDSDSSAVLNDVDAAGAAPAATDALAPEACTFLGAPPAAGAGAGAAAAASHEEVFFHGNFLKVEEDETGFLDDDEPCGGFFADDQPPPLSSWWAEPTEHWN

SEQ ID NO: 17054 - protein, 196 aa, Oryza sativa
  Clone ID: TF_OSC900340j.C1.p3.fg
MTNAGSTPTIDDGYGGVGMEAEGDVEEEMMACGGGGEKKRRLSVEQVRALERSFEVENKLEPERKARLARDLGLQPRQVAVWFQNRRARWKTKQTLASDSSAVLNDVDAAGAAPAATDALAPEACTFLGAPPAAGAGAGAAAAASHEEVFFHGNFLKVEEDETGFLDDDEPCGGFFADDQPPPLSSWWAEPTEHWN

SEQ ID NO: 17055 - protein, 292 aa, Oryza sativa
  Clone ID: TF_OSC410830j.C1.p4.fg
MAQEDVGHLSDAGLALGLSLGGGGGGTTDAAAAHRGGCRRPSPSSQCPPLEPSLTLSLPDDAAAGAAATATATASGGGGPAHSVSSLSVGAAAAAAVKRERAEEADGERVSSTAAGRDDDDDGSTRKKLRLTKEQSALLEDRFREHSTLNPKQKVALAKQLNLRPRQVEVWFQNRRARTKLKQTEVDCEFLKRCCETLTEENRRLQRELQELRALKFAPPPPSSAAHQPSPAPPAPFYMQLPAATLTICPSCERVGGPASAAKVVAADGTKAGPGRTTTHHFFNPFTHSAAC

SEQ ID NO: 17056 - protein, 713 aa, Oryza sativa
  Clone ID: TF_OSC400884j.C1.p2.fg
MDFGDEPEGSDSQRRRKRYHRHTPRQIQQLEAYAFSLFFFLLLFFYVLLAFVRHGGGAMDGGMKWMFKECPHPDENQRAQLSRELGLEPRQIKFWFQNRRTQMKAQHERADNCFLRAENDKIRCENIAIREALKNVICPTCGGPPVGEDYFDEQKLRMENARLKEELDRVSNLTSKYLGRPFTQLPPATPPMTVSSLDLSVGGMGGPSLDLDLLSGGSSGIPFQLPAPVSDMERPMMAEMATRAMDELIRLAQAGDHIWSKSPGGGVSGGDARETLNVDTYDSIFSKPGGSYRAPSINVEGSRESGLVLMSAVALADVFMDTNKWMEFFPSIVSKAHTIDVLVNGMGGRSESLILMYEELHIMTPAVPTREVNFVRYCRQIEQGLWAIADVSVDLQRDAHFGAPPPRSRRLPSGCLIADMANGYSKVTWVEHMEVEEKSPINVLYRDLVLSGAAFGAHRWLAALQRACERYASLVALGVPHHIAGVTPEGKRSMMKLSQRMVNSFCSSLGASQMHQWTTLSGSNEVSVRVTMHRSTDPGQPNGVVLSAATSIWLPVPCDHVFAFVRDENTRSQGLNASQNSMLILQESCTDASGSLVVYSPIDIPAANVVMSGEDPSSIPLLPSGFTILPDGRPGSAAGASTSSAGPLAAARGGGGGGAGGGSVVTVAFQILVSSLPSSKLNAESVATVNGLITTTVEQIKAALNCSAHGHHP

SEQ ID NO: 17057 - protein, 170 aa, Oryza sativa
  Clone ID: TF_OSC5271j.C1.p1.fg
AFFKECPPPDDKQRKELSREIGLQPLQVKFWFQNKRTQMKTQHERHENNALRAENEKLRAENMRYKEALANASCPNCGGPAAIGEMSFDEHHLRLENARLRDEIDRISAIAAKYVGKPAAAVSAAYPPLPPSNRSPLDHMGIPGAGADVFGADFDKPLVIELAVAAMEEP

SEQ ID NO: 17058 - protein, 342 aa, Oryza sativa
  Clone ID: TF_OSC400615j.C1.p41.gm
MDRYGEKQQQQQMFASYVDASLLAASGEVQGERPRARRRRRRGARCVGGGGGGGEVDGGDPKKRRLSDEQVEMLELSFREERKLETGRKVHLASELGLDPKQVAVWFQNRRARHKSKLLEEEFSKLKHAHDAAILHKCHLENEVLRLKERLVVAEEEVRRLRSAAGSHTASGEGGDIMGLGGSGACVAGSPSSSFSTGTCQPPSFGGGDHLGDDDLVYVPEYGGYADNSVVEWFSLEVIVVNGGTTSRAFGKRTMAAPPLIVVQVWDHDLDVCRQQEKVAREDGYRFCHPIAISVSSVSVSGPNKSGTLDSEADHVNCWLGAKVKPRVHGPGQYHARPQVCL

SEQ ID NO: 17059 - protein, 726 aa, Oryza sativa
  Clone ID: TF_OSC400998j.C1.p6.fg
MGDEWETWIAADMGQNKGALINDGEQRMSIPARELFAAIEADSGLLPVNSSNTNEKRKRRLQRLTGKQSEVLEGFFSICGHPDDGQKRHLSETTGLGLDQVKFWFQNKRTQVKTMCWKEENYKLSVENEILRDENRRVKIAHCTAVCLTCCNSSVQNQLAVEMERLMGQSEWLQQEIARSNGTPPAANLAFQLNSSADYVFSGQHDQQMIAELAKNAMHALIILAESHVALWFPVPGCSYEVLNKMAYDQAYPGDNSANAIGFKTEATRAVSMVMMDYKSVVDFLMDPYNYRTFFPEVISGAVTNRIYTWPTSDGYNGVIQLMTVEMMFPSPLVPARKCTFLRYCNVLNEGLVVVIDVSLDDGSIFSKCRKMPSGFLIQSIRPNSCKVTAIEHVLADDTGVHELYQPCMNGLVFGARRWVATMARQSARMRDVHHNKTAPQVSTKGRKNLMKLADDLLASFAGGIAATGGGTWTVVIGAGTEKDIRVAYRRTTEGSSSYNAILSVTASLRLPLPMRKTFDLLRNLTHRCKWDVLVHGSVVKEEVTIARGVGNDDTVTVLHCKRAGREDRGRTMILQNNGYDASGSFMVYSQIDSELMNTMVLSPSDLPPGRGGPSLYPTGFSLLPDVEAAQDSSGIALGEVGGTLMTMGFQIPVKLASGDRMYSRSAASAIRLMTDTIALVKKTLMNEHSGIYGGEKGGPCADKNQEHAKGIHRLRSPCISQNLLN

SEQ ID NO: 17060 - protein, 307 aa, Oryza sativa
  Clone ID: TF_OSC34011j.C1.p2.fg
MDLGLSLGLGLASQGSLTSSTTTTSSPGAGSSSPWAAALNSIVGDVRRDQAAAHAAAAVGVGVGGEEMYQGRASTSPDSAAALSSASGKRERELERSGSGVDDDDGADGAGGRKKLRLSKDQAAVLEECFKTHSTLNPKQKVALANRLGLRPRQVEVWFQNRRARTKLKQTEVDCEYLKRWCERLADENKRLEKELADLRALKAAPSPASASAMQPSSSAAATLTMCPSCRRVATAGAPHQPNHQQCHPKSNTTISSSSTAAAAVAVAGGNVLPSHCQFFPAAAAAADRTSQSTWNAAAPLVTRELF

SEQ ID NO: 17061 - protein, 166 aa, Oryza sativa
  Clone ID: TF_OSC11877j.C1.p1.fg
MDGEEDSEWMMMDVGGKGGKGGGGGGAADRKKRFSEEQIKSLESMFATQTKLEPRQKLQLARELGLQPRQVAIWFQNKRARWKSKQLEREYSALRDDYDALLCSYESLKKEKLALIKQARTSSSSSILDRFLSCLPFASILTRDRCVLAAGEAGGDAAGATGEVRR

SEQ ID NO: 17062 - protein, 1108 aa, Oryza sativa
  Clone ID: TF_OSC401616j.C1.p2.fg
MAAVRKMAANGLAAKRENTGTKKSPLQIQMLERFYSEVQYPQSEDIAEYATSVGLTYNQVRIWFKERRRKERRETESLGAHMEKQLSARSNGFRCSSSRSSSFSRSTMYRTVNLQPEDDRYVDKGMSFTGEKHTLRSQVLFPKDYILRKVFRKDGPPLGSEFDPLPHSAPGHLRDTTDDHFYQNQRVIKKRKIVEPTTQRSSLPCGDNGPVRKHGAGKGLMTVWHAMYSHSSKIQDGSNFIDETGCLRSLRPLDDCGRIEDCDDGKLIQVPSSRVTDPKKHPPMECHLSVDESQSPVLQANQVTLVDDEELELRELQAGPNPLRCSAHLSSSGRHGCPLCKDLLSRFPPSSVKMKQPFSTRPWGSSPEMVKKLFQVVRFIYNRFGYMDVHPFTLDELAQAFHDKVREQEFDMNFWIKSLNSLTWVEILRQVLVASGFGSKHHMLNRDFFNKEKNQMVKYGLRPRTLKGELFALLSKKGSGGLKVSELAKSPEIVDLSISSTEIEQLIYSTLSSDITLFEKIAPSAYRLRVDPRIKGKEDSGSDTEDSGSVDDHSDASSGADESDGSHEMSFSEHEHRILRRKWKNGHENVNRCSEIDESYSGERWLLGLMEGEYSDLSIDEKLDCLVALMDVVSGADSAPRLEEPSRVVPSIPRAQPHVSGGKIKKSTRNICQSSDECFNASGSMYGLDSSMHEQSRSLRSRDYVAYSGRNDTSTGVAHQPQVVLLGSDRRYNNYWLFLGPCRADDPGHRRVYFESSEDGHWEVIDSPQELLSLLASLDSRGTREAYLLASMKKRQTCLFEAMKKHYENRDAVQPAMPSDTSHSETSSGDGASPKLSSGDGASPTSDIDNASVPTNPAENMINASSAIAIEVGRRGDEKILKWERSQTFDKWIWTSFYSCLTAVKCGKKSFKESLVRCESCHDLYWRDEKHCRICHSTFEVSFDLEERYAIHVATCRDPEDVYDVPNHKVLPSQLQALKAAIHAIEAHMPEAAFAGLWMKSSHKLWVKRLRRTSSLAELLQVLVDFVGAMDEDWLYKSSSSVSFCSYLDDIVIYFQTMPQTTSAVALWVVKLDALITPYLERADSDRALGEESVQTRTRACGEIARNR

SEQ ID NO: 17063 - protein, 214 aa, Oryza sativa
  unsure (1)..(214): unsure at all Xaa locations
  Clone ID: TF_OSC401000j.C1.p17.np
SSSTSSXCHRLRRAAAAVHAGDDADEQYMDLGGRGGGGAGGGGAGERKRRFTEEQIRSLESMFHAHHAKLEPREKAELARELGLQPRQVAIWFQNKRARWRSKQLEHDYAALRSKYDALHSRVESLKQEKLALTQRRELIMLPGGEDGGKHRGATADDRRDRGLAERPMRHRRGCGGAPRAGAVPEGGGSSSPSCSSSPSCTAPHCSWWPCSSP

SEQ ID NO: 17064 - protein, 224 aa, Oryza sativa
  Clone ID: TF_OSC34011j.C1.p4.fg
MAEQEVIRRDDVVAATAAEDERFACSPGSPVSSGSGKRGSGSGSGDEVDDAGCDVGGGGARKKLRLSKDQAAVLEECFKTHHTLTPKQKVALAKSLNLRPRQVEVWFQNRRARTKLKQTEVDCEHLKRWCDQLADDNRRLHKELAELRALKATPTPPAAAPPLTTLTMCLSCKRVANAGVPSPAAAIFPGHPQFLCGFRDHAGAASSSYGGASSGLAKAVRAAR

SEQ ID NO: 17065 - protein, 289 aa, Oryza sativa
  Clone ID: TF_OSC410031j.C1.p13.gm
MAGGHAAQSPSPSCGLGEKKRRLALEHVRALERSFNTDNKLDPDRKARIARDLGLQPRQVAVWFQNRRARWKTKHLERDFAALRARHDALPRRMRPPGPRQGRPFPPRYAPTAKPAMTRRPAPRPATVCKDGSSDDSDSSVVFNDEASPYSGAAFIGFGPSFLVDDASAATVGCSSSLPALESKWHGPYSDDSCKGGVYGFTEEWLAACSGEMAGNDAAGFFSDEHASNLNFGWDRLISFSFGSTMPRIHLGMDGYRYAKSELSHDHGGIREEGDVVVAAAGSAWFGTA

SEQ ID NO: 17066 - protein, 177 aa, Oryza sativa
  Clone ID: TF_OSC6947j.C1.p1.fg
MAQEDVGHLSDAGLALGLSLGGGGGGTTDAAAAHRGGCRRPSPSSQCPPLEPSLTLSLPDDAAAGAAATATATASGGGGPAHNVSSLSVGAAAAAAVKRERAEKADGERVSSTAAGRDDDDDGSTRKKLRLTKEQSALLEDRFREHSTLNPKHKVALAKQLNLRPRQVEVWFQNRRA

SEQ ID NO: 17067 - protein, 301 aa, Oryza sativa
  Clone ID: TF_OSC401481j.C1.p34.np
MEDLYSIHPGISRVGGAASEASGVGVVVGGGGGSSSSDLTELMKAQIAGHPRYPTLLSAYIECRKVGAPPEVASLLKEIGRERRAGGGGGGAGQIGVDPELDEFMEAYCRVLVRYKEELSRPFDEAASFLSSIQTQLSNLCSGATSPPATTATHSDEMVGSSDEDQCSGETDMLDIGQEQSSRLADHELKEMLLKKYSGCLSRLRSEFLKKRKKGKLPKDARSALLEWWNTHYRWPYPTEEDKLRLAARTGLDPKQINNWFINQRKRHWKPSDGMRFALMEGVAGGSSGTTLYFDTGTIGP

SEQ ID NO: 17068 - protein, 781 aa, Oryza sativa
  Clone ID: TF_OSC2844j.C1.p3.fg
MERREIFQVADLAHILRGKPVDHLQQPNLLDNHQFQQAFQHQQQQHHLLDQIPATTAESGDNMIRSRASDPLGGDEFESKSGSENVDGVSVDDQDPNQRPRKKRYHRHTQHQIQEMEAFFKECPHPDDKQRKELSRELGLEPLQVKFWFQNKRTQMKNQHERHENSQLRSDNEKLRAENMRYKEALSSASCPNCGGPAALGEMSFDEHHLRIENARLREEIDRISAIAAKYVGKPMVPFPVLSNPMAAAASRAPLDLPVAPYGVPGDMFGGGGAGELLRGVQSEVDKPMIVELAVAAMEELVRMAQLDEPLWSVAPPLDATAAAMETLSEEEYARMFPRGLGPKQYGLRSEASRDSAVVIMTHANLVEILMDANQYAAVFSNIVSRAITLEVLSTGVAGNYNGALQVMSVEFQVPSPLVPTRESYFVRYCKQNADGTWAVVDVSLDSLRPSPVLKCRRRPSGCLIQEMPNGYSKVTWVEHVEVDDRSVHNIYKLLVNSGLAFGARRWVGTLDRQCERLASVMASNIPTSDIGVITSSEGRKSMLKLAERMVVSFCGGVTASVAHQWTTLSGSGAEDVRVMTRKSVDDPGRPPGIVLNAATSFWLPVPPKRVFDFLRDESSRSEWDILSNGGIVQEMAHIANGRDQGNCVSLLRVNSSNSNQSNMLILQESCTDASGSYVIYAPVDVVAMNVVLNGGDPDYVALLPSGFAILPDGPAHDGGDGDGGVGVGSGGSLLTVAFQILVDSVPTAKLSLGSVATVNSLIACTVERIKAAVSGESNPQ

SEQ ID NO: 17069 - protein, 1226 aa, Oryza sativa
  Clone ID: TF_OSC400964j.C1.p114.fg
MAGNEWINGYLEAILDSGGAAGGGGGGGGGGGGGGGGGGGGGGGGVDPRSPAAGAASPRGPHMNFNPTHYFVEEVVKGVDESDLHRTWIKLELEGILRISARRKEQEQVRRETSEDLAEDLFEGEKADTVGELAQQDTPMKKKFQRNFSELTVSWSDENKEKKLYIVLIRSYTAYFTHWCHSVYATKLQNFTEFLYSLFYFSLHGLVRGDNMELGRDSDTGGQVKYVVELARALAMMPGVYRVDLFTRQVSSPEVDWSYGEPTEMLTSGSTDGEGSGESAGAYIVRIPCGPRDKYLRKEALWPYLQEFVDGALAHILNMSKALGEQVSNGKLVLPYVIHGHYADAGDVAALLSGALNVPMVLTGHSLGRNKLEQIMKQGRMSKEEIDSTYKIMRRIEGEELALDAAELVITSTRQEIDEQWGLYDGFDVKLEKVLRARARRGVSCHGRFMPRMVVIPPGMDFSSVVVPEDTSDGDDGKDFEIASPRSLPPIWAEVMRFLTNPHKPMILALSRPDPKKNITTLVKAFGECRPLRELANLILIMGNRDDIDEMSAGNASVLTTVLKLIDKYDLYGSVAFPKHHKQSDVPEIYRLTGKMKGVFINPALVEPFGLTLIEAAAHGLPIVATKNGGPVDIKNALNNGLLVDPHDQHAIADALLKLVADKNLWQECRKNGLRNIQLYSWPEHCRTYLTRIAGCRIRNPRWLMDTPADAAAEEEEALEDSLMDVQDLSLRLSIDGERGSSMNDAPSSDPQDSVQRIMNKIKRSSPADTDGAKIPAEAAATATSGAMNKYPLLRRRRRLFVIAVDCYGDDGSASKRMLQVIQEVFRAVRSDSQMSRISGFALSTAMPLPETLKLLQLGKIPPTDFDALICGSGSEVYYPSTAQCVDAGGRLRPDQDYLLHINHRWSHDGAKQTIAKLAHDGSGTNVEPDVESCNPHCVSFFIKDPNKVRTIDEMRERVRMRGLRCHLMYCRNATRLQVVPLLASRSQALRYLFVRWGLSVGNMYLIVGEHGDTDHEEMLSGLHKTVIIRGVTEKGSEQLVRSSGSYQREDVVPSESPLIAFTKGDLKADEIMRALKEVTKAASGMDWQRPLCKTAYWFQSRVYTNMEEKEEMTMLSLGVGAASKHSISNRKFRLKEVTDHKFNLGDQDHNSGHVRKKLRLSEEQLTVLENMYEAGSNLDQALKQGLAEKLNIKPRQVEVWFQNRRARTKHKQIEEECKNRGGWRA

SEQ ID NO: 17070 - protein, 1027 aa, Oryza sativa
  Clone ID: TF_OSC401539j.C1.p51.fg
MEVAEAGVDGVAGRRQQEEASGAAPFGRSSSLIGAAGFDGALRVEHLFGFLPSSPIVSPELKDLRSQLHQTADCCEKAFLDTEKKKLILESTKGYICDAIVAVIDHLGTVSSKLEQQLQEKIEITQTEKKLNFLKQRLLTCEQYAITLKLLTVRGDNDAIQYHRRYLSQSTGGTKEENGANSRKDDVKFVEYNSPTIPGAILTFKPYDIQSTIGRERSVATTDSESPTTDAKSSFSFRAEDVPIVLAEHRKKANHGSNILSFIRKVLIGNNVQPNITESPISVKPVSIDHHAGVFGRKNGPAASGGDGVEEGDEEVQAAGEAAVEISSENAGPGCRQSQSGGGSGEDGGHDDDDGEGSNKKRRRKNYHRHTAEQIRIMEALFKESPHPDERQRQQAVQERHENSLLKSELEKLQDEHRAMRELAKKPSRCLNCGVVATSSDAAAAATAADTREQRLRLEKAKLKAEIERLRGTPGKSAADGIASPPCSASAGAMQTNSRSPPLHDHDGGFLRHDDDKPRILELATRALDELVGMCSSGEPVWVRGVETGRDILNYDEYVRLFRRDHGGSGDQMAGWTVEASRECGLVYLDTMHLVHTFMDVDKWKDLFPTMISKAATLEMISNREDDGRDGVLQLMYAELQTLTPMVPTRELYFARYCKKLAAERWAIVDVSFDESETGVHASSAVRCWKNPSGCLIEEQNNGRCKMTWVEHTRCRRCTVAPLYRAVTASGVAFGARRWVAALQLQCERMVFAVATNVPTRDSTGVSTLAGRRSVLKLAHRMTSSLCRTTGGSCDMAWRRAPKGGSGGGGDDDIWLTSRENAGDDPGEPQGLIACAAASTWLPVNPTALLDLLRDESRRPEWDVMLPGKSVQSRVNLAKGKDRTNCVTAYAARPEEEEERGGKWVLQDVCTNPCESTIAYAAIDAAALQPVIAGHDSSGVHLLPCGFISVMPDGLESKPAVITASRRGGEASGAGSLVTVAFQVPASPSAAAATLSPDSVEAVTVLVSSTLRNIRKALGCDSCEEEF

SEQ ID NO: 17071 - protein, 256 aa, Oryza sativa
  Clone ID: TF_OSC410612j.C1.p5.np
NSFVVWDPHVFADLLLPRLFKHNNFSSFVRQLNTYVSTPNPNPNPFPCGDSTKKKRSLPGNPDPEPEAEVIALSPRALVATNRFVCEVCNKGFQRDQNLQLHRRGHNLPWKLRHRAAAVSAVTTAAPAPRKRVYVCPEPTCVHHDPARALGDLTGIKKHFSRKHGEKRWRCERCGKRYAVHSDWKAHVKNCGTREYRCDCGILFSRKDSLLTHRAFCDALAEESARLLAAANNSSSITTTTCNNSNISSNNNNNNI

SEQ ID NO: 17072 - protein, 264 aa, Oryza sativa
  Clone ID: TF_OSC3919j.C1.p1.fg
MCDNKHVLSVFLPKTCPYCLVLIRTETCYDCPSIRSHDLTGANERWRLFMQGFRKVVPDRWEFANGNFRRGEQGLLSGIRRRKATTPQSSKSCGSGVNVAFPPPLPPLPPEPSATTSSGNDRSSSSASSPPRADITSENEQLRKDNQTLTMELARARRHCEELLGFLSRFLDVRQLDLRLLMQEDMRAAAGGVGGEQRVQEHAREEKCVKLFGVLLDDTHGAATRKRARCEEAAASERPIKMIRIGEPWVSVPSSGPARCGGDN

SEQ ID NO: 17073 - protein, 105 aa, Oryza sativa
  Clone ID: TF_OSC415863j.C1.p1.fg
MDYSTVKQEEVEVVVLDGEEEAAAAAAPVPLPGGDGGGGGGGAVPGEDVRDGGGPGDGRGGVVGRRGEEQLRGVGSPLFLRRPPLLHFKHSNLSSFLLQLNTYIR

SEQ ID NO: 17074 - protein, 415 aa, Oryza sativa
  Clone ID: TF_OSC11874j.C1.p4.fg
MAEQGAGEADAGGGEPAAGGGDDGGGGGVGGAEVAADAVPDEDVPAGGGPGGGRRDLVERGQLNTYGFRKIVPDRWEFANDCFRRGEKRLLCDIHRRKVVAAAAAAPPPPSPGMATAAAAVASGAVTVAAAPIPMALPVTRAGSPAHSSEEQVLSSNSGSGEEHRQASGSGSAPGGGGGGSASGGDMGEENERLRRENARLTRELGHMKKLCNNILLLMSKYAATQHVEGSAGISSIANCSGESSEAVPPPPPLPPAILDLMPSCPALATAAAAAGLAIDGEPDPSARLFGVSIGLKRTRDDAAAAADEDGGGEDQAEHGGADVKPEAADPHPAGGGGGSSTEASPESHPWPIYRPTPMYHAVRPTCNGPDRAGSDQDGSSSSVRSIRMPVHSLVSFTSVLGVSAKNGGDIGRKH

SEQ ID NO: 17075 - protein, 93 aa, Oryza sativa
  Clone ID: TF_OSC413071j.C1.p13.gm
MDHNTDPPPTTMVDAAAALLLEPKLEGYDDDGGGEPLQPAPFVSPLDQLMQPPRPLEALLQGPHLPPFLSKTYDLVCEPELDGGHLLGATPAT

SEQ ID NO: 17076 - protein, 539 aa, Oryza sativa
  Clone ID: TF_OSC100925j.C1.p3.gm
MAADGVLAGGGGCRDHVGATTARGDGRRDNSRRRHACVDGWGQDRARTRGDDGQRRYAQCRGGWGDIWRWGGLIRKQPDTTVYPGQICAAAGGGGGMADQTAAAVVVGGGAAATMGEPSPPPPAPAAEAAGVGVGQQQRTVPTPFLTKTYQLVDDPAVDDVISWNDDGSTFVVWRPAEFARDLLPKYFKHNNFSSFVRQLNTYGFRKIVPDRWEFANDCFRRGERRLLCEIHRRKVTPPAPAATTAAVAAAIPMALPVTTTRDGSPVLSGEEQVISSSSSPEPPLVLPQAPSGSGSGGVASGDVGDENERLRRENAQLARELSQMRKLCNNILLLMSKYASTQQLDAANASSAAGNNNNNNCSGESAEAATPLPLPAVLDLMPSCPGAASAAAPVSDNEEGMMSAKLFGVSIGRKRMRHDGGGDDDHAATVKAEPMDGRPHGKDEQSAETQAWPIYRPRPVYQPIRACNGYEYDRAGSDQDGHVQLRTCVNNLLVTGAGTLDAGREYETNSLPRPRRAKNSNDVPGMPNSLGQAPSPVA

SEQ ID NO: 17077 - protein, 458 aa, Oryza sativa
  Clone ID: TF_OSC412573j.C1.p1.gm
MAADGVLAGGGGCRDHVGATTARGDGRRDNSRRRHACVDGWGQDRARTRGDDGQRRYAQCRGQICAAAGGGGGMADQTAAAVVVGGGAAATMGEPSPPPPAPAAEAAGVGVGQQQRTVPTPFLTKTYQLVDDPAVDDVISWNDDGSTFVVWRPAEFARDLLPKYFKHNNFSSFVRQLNTYGFRKIVPDRWEFANDCFRRGERRLLCEIHRRKVTPPAPAATTAAVAAAIPMALPVTTTRDGSPVLSGEEQVISSSSSPEPPLVLPQAPSGSGSGGVASGDVGDENERLRRENAQLARELSQMRKLCNNILLLMSKYASTQQLDAANASSAAGNNNNNNCSGESAEAATPLPLPAVLDLMPSCPGAASAAAPVSDNEEGMMSAKLFGVSIGRKRMRHDGGGDDDHAATVKAEPMDGRPHGKDEQSAETQAWPIYRPRPVYQPIRACNGYEYDRAGSDQD

SEQ ID NO: 17078 - protein, 384 aa, Oryza sativa
  Clone ID: TF_OSC400591j.C1.p27.fg
MASSSSSSSLCRLLIPRPTTRRFSGGGGEGGMAAAAPVKREVKPEAGEGWGGGDLGVVPPPPRPMEGLGEAGPAPFVAKTYEMVADAATDAVVSWGPGGSGASFVVWDPHALAAGVLPRFFKHANFSSFVRQLNTYGFRKVTPDRWEFANEAFLAGQKHLLKNIKRRRVSKPLVDSQLRNKASVVFGQPEAPGEVVSLKRDRAALRAEVIMLKQQYNACKSQLIAMEEMVRNIERRQQQTIGFFAKVLTNPAFVQQVLLNYVNKNGLRGAAKRQRLMENEEQHADSPLNKGMEAASVMEADVSPGSTGCGTVGKVETTPMCNFQNIENMCDDVWEELDALPETGMEQEEKAGIGSFDVEEFVGRPCGWVDDCPYLVEPMQFVEH

SEQ ID NO: 17079 - protein, 372 aa, Oryza sativa
  Clone ID: TF_OSC401020j.C1.p22.fg
MDDPMLNAVKEEESHGDGGGLEVVAGEDGAAAVAAGVAPRPMEGLHDAGPPPFLTKTYDMVDDAGTDAAVSWSATSNSFVVWDPHAFATVLLPRFFKHNNFSSFVRQLNTYGFRKVDPDRWEFANENFLRGQRHLLKNIKRRKPPSHTASNQQSLGPYLEVGHFGYDAEIDRLKRDKQLLMAEVVKLRQEQQNTKANLKAMEDRLQGTEQRQQQMMAFLARVMKNPEFLKQLMSQNEMRKELQDAISKKRRRRIDQGPEVDDVGTSSSIEQESPALFDPQESVEFLIDGIPSDLENSAMDAGGLVEPQDFDVGASEQQQIGPQGELNDNFWEELLNEGLVGEENDNPVVEDDMNVLSEKMGYLNSNGPTAGE

SEQ ID NO: 17080 - protein, 348 aa, Oryza sativa
  Clone ID: TF_OSC401122j.C1.p44.fg
MDGLHTELALGLIGCCGGDGQQQTAPFVAKTYQMVCDPRTDALVRWGRDNNSFVVVDPAAFSQLLLPCFFKHGNFSSFVRQLNTYVSIIQSPAPGFRKVHPDRWEFAHESFLRGQTHLLPRIVRRKKRGEGGGGGGGASCSFGGGAGEHQVAAAAASVGMSGEEEDAAEDVLAKEAALFEEVQRLRHEQTAIGEELARMSQRLQATERRPDQLMSFLAKLADDPNAVTGHLLEQAAERKRRRQHLPSHEPTVCPLPPAPPPQPPQPLLALAGAAAMDGTYWWTTEHHHHHHHQMKPMTVLPSLEPPTASCGVHQVPELGGGGVMGLTTDGEAKVEPPFPFCLLGQAFF

SEQ ID NO: 17081 - protein, 482 aa, Oryza sativa
  Clone ID: TF_OSC401064j.C1.p105.fg
MEGGGGGGSLPPFLSKTYEMVDDPSTDAVVGWTPAGTSFVVANQPEFCRDLLPKYFKHNNFSSFVRQLNTYDFKTVLVNNQGQLLFYQENSSSLLQCYCLLHPVEVVQKCLIMGFRKVDPEQWEFANEDFIKGQRHRLKNIHRRKPIFSHSSHSQGAGPLTDNERKDYEEEIERLKSDNAALSSELQNNTLKKLNMEKRMQALEEKLFVVEDQQRSLISYVREIVKAPGFLSSFVQQQDHHRKKRRLPIPISFHEDANTQENQIMPCDLTNSPAQTFYRESFDKMESSLNSLENFLREASEEFGNDISYDDGVPGPSSTVVLTELHSPGESDPRVSSPPTRMRTSSAGAGDSHSSRDVAESTSCAESPPIPQMHSRVDTRAKVSEIDVNSEPAVTETGPSRDQPAEEPPAVTPGANDGFWQQFLTEQPGSSDAHQEAQSERRDGGNKVDEMKSGDRQHLWWGKRNVEQITEKLGLLTSTEKT

SEQ ID NO: 17082 - protein, 527 aa, Oryza sativa
  Clone ID: TF_OSC400288j.C1.p6.gm
MDHNTDPPPTTMVDAAAALLLEPKLEGYDDDGGGEPLQPAPFVSPLDQLMQPPRPLEALLQGPQLPPFLSKTYDLVCEPELDGVISWGHAGNSFVVWDPSAFARDVLPHHFKHNNFSSFVRQLNTYGFRKVHADRWEFAHEDFLRHSKHLLKKIVRRRSSPTQQSGLQPGSSGESGLDPELNTLRREKSALLQEVTRLKQEHLQTIEQMSTLNQRLESAEDRQKQMVSFLAKLLQNPTFLRQLKMHRQQKEIDSTRVKRKFLKHVPHGNIDSGESSSQHTGESNLDFSPTSLDLPATHSDILDLQNFLLEDGDLNLAMLPENIGLDGIEAPDDIGALVQGFDTQEELELGSGVELLEIPPASGPRGQDPTIGRSKGKNVLSPGLDATSSEADCLGSFSDNMGMLSDSMLQTAGKLMDADDDERIWGVDASSALQSSCSGTSQQAYGSLVSDPYLMEMANKPEKFWELDFQALDDGDLQLDNPEKVLDTGVVAQAQALELGGLTQATELKKACFFLRLITQGTNQTGP

SEQ ID NO: 17083 - protein, 357 aa, Oryza sativa
  Clone ID: TF_OSC101218j.C1.p11.fg
MNYRVVNPVKVESGPSTGVANGQPPRPMDGLADGGPPPFLTKTYDMVDDPTTDAVVSWSATNNSFVVWDPHLFGNVLLPRYFKHNNFSSFVRQLNTYGFRKVDPDKWEFANEGFLRGQKHLLKSIKRRKPPNSSPSQQSLGSFLEVGHFGYEGEIDQLKRDKHLLMAEVVKLRQEQQNTKSDLQAMEQKLQGTEQKQQHMMAFLSRVMHNPEFIRQLFSQSEMRKELEEFVSKKRRRRIDQGPELDSMGTGSSPEQVSQVMFEPHDPVDSLFNGVPSDLESSSVEANGGKAQQDVASSSSEHGKIKPSNGELNEDFWEDLLHEGGLDEDTRNPAIDDMNLLSQKMGYLNSSSTKSPQ

SEQ ID NO: 17084 - protein, 310 aa, Oryza sativa
  Clone ID: TF_OSC13607j.C1.p1.fg
GFRKVVPERWEFANEFFRKGEKQLLTEIHRRKTSSASTASPSPPPFFAPPHFPLFHHPGVAAAQHHHAFVGDDGVVAAHGIGMPFPQPHWREPNLPVATRLLALGGPAPSPSSAEAGGAGRAATAAVLMEENERLRRSNTALLQELAHMRKLYNDIIYFVQNHVRPVAPSPAAAAFLQGLGMQARKKPAAANVLNNSGGSTTSSSSLTIAEEPSPPPQQQHLAGEKSGGEAGNSSAARSSAPTKLFGVHLSAAPCGAGSKRASSPEEHPPTSPATKPRLVLECDDLSLTVAPSSSSQQQLSAASSPTSTS

SEQ ID NO: 17085 - protein, 497 aa, Oryza sativa
  Clone ID: TF_OSC400132j.C1.p6.fg
MEVAAGARGGGAGGGGGGPAPFLLKTYEMVDDPSTDAVVSWSDASDASFVVWNHPEFAARLLPAYFKHSNFSSFIRQLNTYISLLENDSSTMFCLTTKKLVLQGFRKIDPERWEFANEYFIKGQKHLLKNIHRRKPIHSHSHPPGALPDNERAIFEDEIERLSREKSNLQADLWKSKQQQSGTMNQIEDLERRVLGMEQRQTKMIAFLQQASKNPQFVNKLVKMAEASSIFTDAFNKKRRLPGLDYSIENTETTSFYDDHSSTSKQETGNLLNQHFSDKLRLGLCPAMTESNIITLSTQSSNEDNRSPHGKHPECDMMGRECLPLVPQMMELSDTGTSICPSKSSCFAPPISDEGLLTCHLSLTLASCSMDVDKSQGLNANGTTIDNPTEAATATMEKDDTIDRSFDDNQKKSADSRTADATTPRADARVASEAPAAPAAVVNDKFWEQFLTERPGCSETEEASSGLRTDTSREQMENRQAYDHSRNDREDVEQLKL

SEQ ID NO: 17086 - protein, 249 aa, Oryza sativa
  Clone ID: TF_OSC400222j.C1.p63.fg
MGGECKVHQLQAAGDGGPGAVAPFVAKTFHMVSDPSTNAVVRWGGAGNTFLVLDPAAFSDFLLPSYFKHRNFASFVRQLNTYGFRKVDPDRWEFAHESFLRGQAQLLPRIVRKKKKGGAAPGCRELCEEGEEVRGTIEAVQRLREEQRGMEEELQAMDQRLRAAESRPGQMMAFLAKLADEPGVVLRAMLAKKEELAAAGNNGSDPCKRRRIGADTGRGGVATGGDAAEMAQSRGTVPFPFSVLGQVFY

SEQ ID NO: 17087 - protein, 266 aa, Oryza sativa
  unsure (1)..(266): unsure at all Xaa locations
  Clone ID: TF_OSC900200j.C1.p6.np
SLLLXNKCKSILLSLSAQKAVPAPFLTKTYQLVDDPATDHIVSWGDDRVSTFVVWRPPEFARDILPNYFKHNNFSSFVRQLNTYGFRKVGFRKVVPERWEFANEFFRKGEKQLLTEIHRRKTSSHRRRRRLRRRSSRRHHHAFGRRRGCGGAWHRHAVSSRRHHHAFGRRRGCGGAWHRHAVPAAALAGAELAGRDAPARARPRAVAVVGGGRGAGRAATAAVLMEENERLRRSNTALLQELAHMRKLYNDIIYFVQNHVRPVAPS

SEQ ID NO: 17088 - protein, 406 aa, Oryza sativa
  Clone ID: TF_OSC6909j.C1.p1.fg
MGSKKRSPQHPAAAAPPPAVGGGGGGEVSGDGGASTANGPVVPKPSEVAPFLTKVYDMVSDPATDNVISWAEGGGSFVIWDSHAFERDLHRHFKHSNFTSFIRQLNTYGFRKVHPDRWEWANEGFIMGQKHLLKTIKRRKKSSQESPSEIQKAPVKTAPGTENIEIGKYGGLEKEVETLKRDKALLMQQLVDLRHYQQTSNLEVQNLIERLQVMEQNQQQMMALLAIVVQNPSFLNQLVQQQQQQRRSNWWSPDGSKKRRFHALEQGPVTDQETSGRGAHIVEYLPPVPETSGQVNPVEGAICSANSQPVPSPAVATPMDMQTSNVADTLGSSEEPFADNSTLHEWDDNDMQLLFDDNLDPILPPFENDGQMGPPLSVQDYDFPQLEQDCLMEAQYNSNNPQYGND

SEQ ID NO: 17089 - protein, 103 aa, Oryza sativa
  unsure (1)..(103): unsure at all Xaa locations
  Clone ID: TF_OSC410068j.C1.p11.gp
MPGMVKEEWPPSSPEEGEAPRPMEGLHEVGPPPFLTKTFDLVADPATDGVVSWGRAGSSFVVWDPHVFAAVFLPRFFKHNNFSSFVRQLNTYVSPPNFHCHHX

SEQ ID NO: 17090 - protein, 216 aa, Oryza sativa
  Clone ID: TF_OSC401518j.C1.p1.np
SLASSSSRSSLAPPPPAGRGGGGVAPFVAKTYRMVDDPATDGVIAWGRDSNSFVVADPFAFSQTLLPAHFKHSNFSSFVRQLNTYGFRKVDPDRWEFAHVSFLRGQTHLLRRIVRRSSGRGSEEEGGGRRLRRGGEAAAGDVDEESAVVALEVARLRREQREIEGRVAAMWRRVQETERRPKQMLAFLVKVVGDPQLVTIFRVLAYISPSSGFLSI

SEQ ID NO: 17091 - protein, 446 aa, Oryza sativa
  Clone ID: TF_OSC11879j.C1.p9.fg
MAEQGAGEADAGGGEPPPAAVMTAAAEALAGQRSLPTPFLTKTYQLVEDPAVDDVISWNEDGSTFVVWRPAEFARDLLPKYFKHNNFSSFVRQLNTYGFRKIVPDRWEFANDCFRRGEKRLLCDIHRRKVVAAAAAAPPPPSPGMATAAAAVASGAVTVAAAPIPMALPVTRAGSPAHSSEEQVLSSNSGSGEEHRQASGSGSAPGGGGGGSASGGDMGEENERLRRENARLTRELGHMKKLCNNILLLMSKYAATQHVEGSAGISSIANCSGESSEAVPPPPPLPPAILDLMPSCPALATAAAAAGLAIDGEPDPSARLFGVSIGLKRTRDDAAAAADEDGGGEDQAEHGGADVKPEAADPHPAGGGGGSSTEASPESHPWPIYRPTPMYHAVRPTCNGPDRAGSDQDGSSSSVRSIRMPVHSLVSFTSVLGVSAKNGGDIGRKH

SEQ ID NO: 17092 - protein, 459 aa, Oryza sativa
  Clone ID: TF_OSC401582j.C1.p3.fg
MESSNLGGGGGGGGGGGPPPFLIKTYEMVEDAATNHVVSWGPGGASFVVWNPLDFSRDLLPKYFKHNNFSSFIRQLNTYGFRKIDPERWEFANEDFIRGHTHLLKNIHRRKPVHSHSLQNQINGPLAESERRELEEEINRLKYEKSILVADLQRQNQQQYVINWQMQAMEGRLVAMEQRQKNIVASLCEMLQRRGGAVSSSLLESDHFSKKRRVPKMDLFVDDCAAGEEQKVFQFQGIGTDAPAMPPVLPVTNGEAFDRVELSLVSLEKLFQRANDACTAAEEMYSHGHGGTEPSTAICPEEMNTAPMETGIDLQLPASLHPSSPNTGNAHLHLSTELTESPGFVQSPELPMAEIREDIHVTRYPTQADVNSEIASSTDTSQDGTSETEASHGPTNDVFWERFLTETPRSCLDESERQESPKDDVKAELGCNGFHHREKVDQITEQMGHLASAEQTLHT

SEQ ID NO: 17093 - protein, 379 aa, Oryza sativa
  Clone ID: TF_OSC410068j.C1.p13.fg
MEKMMPGMVKEEWPPSSPEEGEAPRPMEGLHEVGPPPFLTKTFDLVADPATDGVVSWGRAGSSFVVWDPHVFAAVFLPRFFKHNNFSSFVRQLNTYFLVRTNYLNKRSHFYSLRFQGFRKIDPDRWEFANDGFLRGQRHLLKMIKRRRPLSYLPGSQQALGTCLEVGQFGLDEEIDRLKRDKNILLAEVVKLRHKQQSTKANMRAMEERLQHAEQKQVQMMGFLARAMQNPDFFHQLIHQQDKMKGLEDTFSKKRTRSIDIVPFLNPGEVSQGDQLESTLLFDPRPFAELNDEPAKSELENLALNIQGLGKGKQDVNRTRNQPRNQASNETELTDDFWEELLNEGARDDAGIPGMERRRPRYVDALAQKLGYLSNSSQK

SEQ ID NO: 17094 - protein, 310 aa, Oryza sativa
  Clone ID: TF_OSC400606j.C1.p13.fg
MAFLVERCGEMVVSMEMGPHGGGGAAAGKPVPAPFLTKTYQLVDDPCTDHIVSWGEDDTTFVVWRPPEFARDLLPNYFKHNNFSSFVRQLNTYGFRKIVADRWEFANEFFRKGAKHLLAEIHRRKSSQPPPPPMPHQPYHHHHHLNPFSLPPPPPAYHHHHLIQEEPATTAHCTVAGDGGEGGDFLAALSEDNRQLRRRNSLLLSELAHMKKLYNDIIYFLQNHVAPVTTTTTTPSSTAMAAAQHHLPAAASCRLMELDSPDHSPPPPPPKTPATDGGDTVKLFGVSLHGRKKRAHRDDDDGVHDQGSEV

SEQ ID NO: 17095 - protein, 289 aa, Oryza sativa
  Clone ID: TF_OSC900153j.C1.p12.fg
MAEQGAGEADAGGGEPPPAAVMTAAAEALAGQRSLPTPFLTKTYQLVEDPAVDDVISWNEDGSTFVVWRPAEFARDLLPKYFKHNNFSSFVRQLNTYGFRKIVPDRWEFANDCFRRGEKRLLCDIHRRKVVAAAAAAPPPPSPGMATAAAAVASGAVTTSDRLVGVSIGLKRARDDPAAAADEDGGGEDQAEHGGADVKPEAADPHPAGGGGGSSTEASPESHPWPIYRPTPMYHAVRPTCNGPDRAGSDQDGSSSSVRSIRMPVHSLVSFTSVLGVSAKNGGDIGRKH

SEQ ID NO: 17096 - protein, 89 aa, Oryza sativa
  Clone ID: TF_OSC3927j.C1.p1.fg
MAAAEAAAAVGKQQQKGGGGRGGGGGGPAPFLTKTNQMVEESATDEVISWGKEGRSFVVWKPVEFARDLLPLHFKHCNFSSFVRQLNTY

SEQ ID NO: 17097 - protein, 321 aa, Oryza sativa
  Clone ID: TF_OSC101002j.C1.p3.fg
MAAAAGGGAAPFVWKTYRMVEDPGTDGVIGWGKGNNSFVVADPFVFSQTLLPAHFKHNNFSSFVRQLNTYVSLVTPSSISSSHHTPPLSALHIMLPWILSGTQLKGFRKVDPDRWEFAHASFLRGQTHLLRNIVRRGSAAAGGGGGGGGGKRRDASADGGGGGGDEDMTMVATEVVRLKQDQRTIDDRVAAMWRRVQETERRPKQMLAFLLRVVGDRDKLHRLVGGGGYRNGSATAAAADNGFADAARAGCGEKRARLLLDGDNTGAFGPDRRRLRRVLHRRRHVPRRCRRCRRRRRRRVSRLLVRFRSGQRLLILSLLTD

SEQ ID NO: 17098 - protein, 380 aa, Oryza sativa
  Clone ID: TF_OSC414105j.C1.p3.fg
MEWEEESEAARQKAAAASASVVPAPFLTKTYQLVDDPATDHVVSWEDDDGGESASSFVVWRPPEFARDILPNYFKHSNFSSFVRQLNTYGFRKVVPERWEFANEFFRKGEKQLLCEIHRRKSAAATWPPFPPPPPPFFAPRHFAAGAFFRHGDGMLHGRLGALVTTTERRHWFESAALPVAPSSRLLSQLGPVIAPARRAAATPEEEALMQENHRLLRGNAALVQELAHMRKLYSDIIYFVQNHVRPVAPSPAAAAALHGLGVLRPPPAGGKAPASEVRGASGRSATSSSSLTVAEDQPTLLALRLPRTTEKIINEVSGGNGGGSTKLFGVHLSSADEQTSSGASRKRSPPQEQPPTSPAPKRTLVVEHSELRLSIVSPP

SEQ ID NO: 17099 - protein, 288 aa, Oryza sativa
  Clone ID: TF_OSC401894j.C1.p38.fg
MVEDPSTDETISWNDSGTAFVVWRPAEFARDLLPKHFKHSNFSSFVRQLNTYGFKKVVADRWEFANDCFRRGEKHLLGGIQRRKGSGTGGAGAAPAGGIPTAIPISSPPTSSGGEPAVSSSPPRGAAGIAAGVSGAVAELEEENARLRRENARLARELARARRVCDGVRRLVSRYDHDHGGGEEEAGEGDVKPMLFGVAIGGKRSREENGEDEEEEEEEGADEDGEDDEVEEDDEERERHAARRVPVREGKVRRTTELSDLDVLALSVRAAAAARPGGASRDRKSSVS

SEQ ID NO: 17100 - protein, 258 aa, Oryza sativa
  Clone ID: TF_OSC2810j.C1.p3.np
EFARDLLPKYFKRNNFSSFVRQLNTYGFGGFGNIVPDRWEFANDFRRGERRLLCEIHRWKVTPPTPATTTTGAVTVAATIPMALPVTTRDGSQVLSGEEQIISSSSSPEPCSCCRRRHPAPAPAPAASRPAGDENERLRRENAQLAREHSQMMNNILLLMSKYTSTQKLNAANSSSTAGNNNCFGESAEAATPLSLPAVLDLMPSCPGGAARIKQRRGNDEREKLFGVSIGRKRTRHEGGAGGEDEHQQANHTDANTH

SEQ ID NO: 17101 - protein, 293 aa, Oryza sativa
  Clone ID: TF_OSC400542j.C1.p23.np
RSPSRRPSCPTSCSGTTSSPSPGTGSGRPSSPASASPSTRSSTVMDLPRPMEGLGEAGPPPFLCKTYEVVDDPGTDTVISWGFAGNSFVVWDANAFAAVLLPRYFKHSNFSSFVRQLNTYGFRKVDPDRWEFANEGFLRGKKELLKTIKRRRPPPSSPPSSSSSSSSSQHQQQPAAACLEVGQFGRDGVVNRLQRDKSVLIAEVVKLRQEQQTTRAQMQAMEERISAAEQKQQQMTVFLARAMKNPGFLQMLVDRRARNRVLEDALSKKRRRPIDAHRRHRRLAAHRSRRGNR

SEQ ID NO: 17102 - protein, 506 aa, Oryza sativa
  Clone ID: TF_OSC418197j.C1.p7.fg
MEAAVAAAAAAAGAVTTAVAPPPGAAVSNGVATAPPPFLMKTYEMVDDPATDAVVSWGPGNNSFVVWNTPEFARDLLPKYFKHSNFSSFVRQLNTYGFRKVDPDRWEFANEGFLRGQKHLLKTINRRKPTHGNNQVQQPQLPAAPVPACVEVGKFGMEEEIEMLKRDKNVLMQELVRLRQQQQTTDHQLQTLGKRLQGMEQRQQQMMSFLAKAMHSPGFLAQFVQQNENSRRRIVASNKKRRLPKQDGSLDSESASLDGQIVKYQPMINEAAKAMLRKILKLDSSHRFESMGNSDNFLLENYMPNGQGLDSSSSTRNSGVTLAEVPANSGLPYVATSSGLSAICSTSTPQIQCPVVLDNGIPKEVPNMSAVPSVPKAVAPGPTDINILEFPDLQDIVAEENVDIPGGGFEMPGPEGVFSLPEEGDDSVPIETDEILYNDDTQKLPAIIDSFWEQFLVASPLSVDNDEVDSGVLDQKETQQGNGWTKAENMANLTEQMGLLSSHHTG

SEQ ID NO: 17103 - protein, 183 aa, Oryza sativa
  Clone ID: TF_OSC900079j.C1.p18.fg
MTVSMDGAPYLRTVDLKTYKNYKDMSLGLEKMFIGFSTGEDLPYWEILDVRHAIDVMHLTKNLCVNLLGFLGVYGKSKDTLEAHNLKHMEQRGDLHPEPKEKGSHYLSPANYTLSKAEKESMFECLESIKIGIFRPVYLHNMFPFERYMGVLKKYVHIRARPEASIAKRFGTEEVIELCVEFI

SEQ ID NO: 17104 - protein, 77 aa, Oryza sativa
  Clone ID: TF_OSC25042j.C1.p4.np
DNFLLGSQLKERVYIQEGVAISGLLDGTGDYEGDRVLVGDVPWGMFVSSVKRLRVLKTSDLSSSVSTSFHLPSITSN

SEQ ID NO: 17105 - protein, 118 aa, Oryza sativa
  Clone ID: TF_OSC25645j.C1.p2.hg
MRQVCSKSAADLPQTLHHTERVCGKSAASLRQTCRRLFIILKEYAASLRQTCRRLFIILKEYAAGLQQVCGRSAASLRQVCRILFIILKEYAASLRQTCRKPYLTLKKNTAWRRPACG

SEQ ID NO: 17106 - protein, 347 aa, Oryza sativa
  Clone ID: TF_OSC403977j.C1.p2.gm
MDAAPYLRKVDLKTYKNYKDMSLGLEKMFIGFSTGEVFGTFIFDIQHQEKATIWPTCQILSPLYLFPPPPLSIPLTPKADEEPHVPTEAEDERRAGGCELSLLAAETEYDARVDGRRPVKLTSWASAPDLCKKMAKVGEQQPALDLREKMASAATGGGGARGGRWRRATGCGGALPSAGSGGRGGERQRRPPLPRIRLAVVTTCRRCPPPPPATLQRYRPLSPPAATVHCYRLVGAPSPSPASSPPQPSSTAAAPSSARPTASQRQRRWARCQEALVRAVELSGAFKGRLLEDFPGCPREMQRGLAAMLINPGECNLETIHGGPCCLELIRAHQLIIQRTDFVWMKL

SEQ ID NO: 17107 - protein, 97 aa, Oryza sativa
  Clone ID: TF_OSC25469j.C1.p1.np
LPHEPMLQTPSLNQLQPVQTDCIPEVSVSTAGTATENEKSGQQAQQSSKDVQSKTQVASTRSCTKVHKQGVALGRSVDLSKFSNYDELKAELDKMFE

SEQ ID NO: 17108 - protein, 70 aa, Oryza sativa
  Clone ID: TF_OSC17697j.C1.p1.fg
YEDNDGDRMLAGDIPWKVFVSTVKRLRVMRRSELPHDMTWVKWIHFLKLRSALNLFSSYVLPQIGADPVK

SEQ ID NO: 17109 - protein, 36 aa, Oryza sativa
  Clone ID: TF_OSC900116j.C1.p14.gp
VSMDAAPYLRKVDLKTYKNYKDMSLGLEKMFIGFST

SEQ ID NO: 17110 - protein, 236 aa, Oryza sativa
  Clone ID: TF_OSC400542j.C1.p13.fg
MAGADVDVGTELRLGLPGGGGGAAEAAAKAAKRGFEETIDLKLKLPTAGMEEAAAGKAEAPAAEKAKRPAEAAAADAEKPPAPKAQAVGWPPVRSFRRNIMTVQSVKSKKEEEADKQQQQPAANASGSNSSAFVKVSMDGAPYLRKVDLKMYNSYKDLSLALQKMFGTFTATGNNMNEVNGSDAVTTYEDKDGDWMLVGDVPWQMFVESCKRLRIMKGSEAIGLAPRAKDKYKNKS

SEQ ID NO: 17111 - protein, 144 aa, Oryza sativa
  Clone ID: TF_OSC420647j.C1.p6.fg
MAMSQPALKGKDDGEAKQAPASGCLYVKVSMDGAPYLRKVDLKMYKNYKELSLALEKMFSCFTVGHGESNGKSGRDGLSDCRLMDLKNGTELVLTYEDKDEDWMLVGDVPWRMFTDSCRRLRIMKGSDAVGLAPRATDKSKNRN

SEQ ID NO: 17112 - protein, 253 aa, Oryza sativa
  Clone ID: TF_OSC421766j.C1.p3.gm
MKDRNASAGPEVKPAGLSPSRFVKVFMHGEPFERKINLAIHNNYDSLSFTLKRLGNNYSMSPFELEGFVNNEEDGAIDNDFDLLYDDMNGVRYLLGEVPWEVFTITVKRIYIVPAEQQNESEYQEEEEDNAAAAATADEDPPAAGAEGWRWQAPAGAEAGGGGAEGRSAAAGSGVVEGRPAAVAEGRPGGGRQRLGPPGMEFFAFFSFFLLNVMWMTVICAILNGAAADDGAAAAVDNGDDHGYTSNDDPSFD

SEQ ID NO: 17113 - protein, 238 aa, Oryza sativa
  Clone ID: TF_OSC400431j.C1.p11.fg
MAWRRGFGREEEDAAAAGESGLELCLGLPAYFSSSSSSKPSEGSTAAPAFALRSNGTNASKPSGAAAAAPVVGWPPVRSFRRNLASSSSSSSKQAPPPPSSSPQNGDKASKDGGAEKGMFVKINMDGVPIGRKVDLAAYGGYAQLSAAVDKLFRGLLAAQSAAADGEADAAAAGEMVGGGEYTLVYEDDEGDRMLVGDVPWQMFIATAKRLRVLKSSDLPPPSLMRAAGSRKRAAADS

SEQ ID NO: 17114 - protein, 197 aa, Oryza sativa
  Clone ID: TF_OSC900383j.C1.p5.fg
MENLKATELRLGLPGTEEEAAPPPSTPRAGSKRALAGEPDQAKIKPAAAAKAQVVGWPPVRSYRKSCLQPTTTTTKSKPPPAAAAAETQQKEDVAGAGGLFVKVSMDGAPYLRKIDLKVYKGYRELREALEAMFLCFSGGAAANAAVNPSDFAVTYEDKDGDLMLVGDVPFEMFISTCKRLRIMKGSEARGLGATRG

SEQ ID NO: 17115 - protein, 195 aa, Oryza sativa
  Clone ID: TF_OSC419674j.C1.p7.fg
MAAESIDAELRLGLPGSGGGDGVAAKKRRSASSTVKSEASGTACCGGAGARDVEDGASPASKVQVVGWPPVGSYRRSTFQSSSSSTAAAAKGKGGGETDQGRKNKGGGLYVKVSMDGAPYLRKVDLRMYGGYRELRDALDALFGCFSADASASAAHFAVAYEDKDGDLMLAGDVPWDMFISSCKKLRIMRGSEAR

SEQ ID NO: 17116 - protein, 266 aa, Oryza sativa
  Clone ID: TF_OSC101867j.C1.p40.fg
MSPPLELDYIGLSPPPPPPSSSSAAAARADDVDLKGTELRLGLPGSESPDRRPAAIAAAAATATTLELLPAKGAKRVFPDEAALTPPTAAAGKGKAAREGEEVGAEEEDKKVAAPPQPAAKAQVVGWPPIRSYRKNTMATNQIKSNKEDVDAKQGQGFLYVKVSMDGAPYLRKVDLKTYKNYKDMSLGLEKMFIGFSTGKEGAENQKDGEYVLTYEDKDGDWMLVGDVPWEMFTDSCRRLRIMKGSDAIGLGCSQLRLVPLFVPKL

SEQ ID NO: 17117 - protein, 307 aa, Oryza sativa
  Clone ID: TF_OSC401037j.C1.p4.fg
MGEASESMKKISRGRLGGSWMGEPSDHHRHGDEQEEEEKTLELSLGLPGGGWRAACRDKGTTTKHSIAAAAAADDDDGDKSSMLSLGYSTLVSHSQGKANKNKGSPEEEEAHPPPATGNNALASNNNGCFQTRSPSTPVVGWPPVRTFRRNLATSSKASLELQNGKKAAKAEEIKRAPFIKINMDGVPIGRKIDLNAFDSYEKLSLAVDKLFRGLLAAQRDPLTAGAKDCQQEDVAISGLLDGTGEYTLVYEDYEGDKVLVGDVPWGMFVSSVKRLRVLKTSDLSSSVSTSFHLSSITSNSVISALF

SEQ ID NO: 17118 - protein, 226 aa, Oryza sativa
  Clone ID: TF_OSC28825j.C1.p4.fg
MEAAVGYAADSLIKATELRLGLPGTADDLPSTPRGKKRAAAAEDNNANAAAADDDEHDAVEAAPPVAKAQVVGWPPVRSYRKSCFQQQSAAASKSKAAVSSCNNKDEPITKNAAPAPAASSAAAANGGSLVKVSMDGAPYLRKIDLRMYKGYRELREALEAMFVCFSGAADGANPSEFAITYQDKDGDLMLVGDVPFDMFTSTCKKLRIMKRSEATGLGSPRQMKI

SEQ ID NO: 17119 - protein, 343 aa, Oryza sativa
  Clone ID: TF_OSC421766j.C1.p4.gm
MTMAIEALSSAFASAPTLVTSASTTSSAALVLIMGLVIILLLRRCVVVEDMTEVRITAATTTTNKAKEAASHLDLSLGISLSPGGGGGDAGTKASSCCYGGGGDGGGCMGSGMLTAGVLGVGHGGSSHDNTTASSGGGGSWTAAFMPSPTGFMHPWSLAARQQKAAAEQERSGVARLPPATTTYMPRAAATVISLPAAVGWPPVHTSRRNLVATINNVLKPDTTAAVKPDRPTQATAMFAADETTAPPPRSAAAATEASRTLNMFAKVHMDGYKVGRKINLRAHRNYDSLRRVLTKMTHNFFCPADYSSTNKGEEDCAKSDEFIFLYEDFEGDRMLVGDVPWE

SEQ ID NO: 17120 - protein, 196 aa, Oryza sativa
  Clone ID: TF_OSC401426j.C1.p14.fg
MPRRTADDDDDGAGAIHGVFRLPTAGDGGEAAESDQHRSSPRAHPLLRRPHRRQQPFYPKARFRSLIILHTYCFNFREILRYLRRSSLTTATVTADRGGGGGGHGRRRSLFVKVYMEGVPIGRKLDLLPLDGYKGLVARLASMFRASITYHHCHRQFAVVGMKTNKVHHVLTYEDQEGDWMMAGDVPWEYGKLAQL

SEQ ID NO: 17121 - protein, 207 aa, Oryza sativa
  Clone ID: TF_OSC400151j.C1.p56.fg
MSVETERSSTESSAASGLDFEDTALTLRLPGSLAAAAAPDPDRKRSSPSSSDAADAADNSSPLAAAADAPPAPKARVVGWPPVRSFRKNALAAKFVKVAVDGAPYLRKVDLEAYSGYDQLLRALQDKFFSHFTIPIDGRKVAGKFADDERKLVDAVNGTEYVPTYEDKDGDWMLVGDVPWKMFVETCQRLRLMKSSEAVNLAPRAAQ

SEQ ID NO: 17122 - protein, 271 aa, Oryza sativa
  Clone ID: TF_OSC401137j.C1.p27.fg
MSPPLEPHDYIGLSAAAASPTPSSSSCSSSPNPGGEARGPRLTLRLGLPGSESPEREVVAAGLTLGPLPPTTTKAASKRAFPDSSPRHGASSGSVAAAAACQDKAAPAAAPPAAKAQVVGWPPVRNYRKNTLAASASKGKGEDKGTAEGGPLYVKVSMDGAPYLRKVDLKMYSSYEDLSMALEKMFSCFITGQSGLRKSSNRDRLTNGSKADALQDQEYVLTYEDKDADWMLVGDLPWDLFTTICRKLKIMRGSDAAGIAPRSIEQSGQSR

SEQ ID NO: 17123 - protein, 61 aa, Oryza sativa
  unsure (1)..(61): unsure at all Xaa locations
  Clone ID: TF_OSC400415j.C1.p18.gp
DGTGEYTLVYEDYEGDRVLVGDVPXWGMFVSLVKRLRVLKTSDLSSSLITSGRKRTAAECX

SEQ ID NO: 17124 - protein, 281 aa, Oryza sativa
  Clone ID: TF_OSC400887j.C1.p27.fg
MRGGVAGPTAGEPPGTEAEAEEVEESSAGDDEELELGLSLGSKKQQQQQHAPCRILTARDLQPAAALSPDSSVSSSSPAAAAAAGGKRAEGPTATTSPGTVASGHPHSSFGVVGWPPIRQFRMNSLFNQAKENTSETDTKKTATNESDVQKDKEEGEKKGRVAGWVKVNMDGEVIGRKVDLNAHRSYKTLALALELMFTKPSIGLCASHNTNSLKLLDNSAEYQLTYEDRDGDWMLVGDVPWESAIPGNSQNHCFNKRQILRACDKEKSYTAGEAWSVLDG

SEQ ID NO: 17125 - protein, 198 aa, Oryza sativa
  Clone ID: TF_OSC11858j.C1.p1.fg
GAKRGFSDEARSLPGSAAAAAGAGKGKKAAAGEEDEDAEEEDKKVAAAPQAPAGKAQVVGWPPIRSYRKNTMATNQLKSSKEDAEAKQGQGFLYVKVSMDGAPYLRKVDLKTYKNYKDLSTALEKMFIGFTTGKDGLSESRKDGEYVLTYEDKDGDWMLVGDVPWEMFANSCRRLRIMKGSDAIGLAPRAVDKSKNRN

SEQ ID NO: 17126 - protein, 219 aa, Oryza sativa
  Clone ID: TF_OSC14459j.C1.p1.fg
MAGLGFDETELRLGLPGAGELAARSSGKRGFAETIDLKLKLQPAAPAAVSGEEGAQEDKEDADAAAAAADEKMSMKRSASQSSVVTAEPDPDKPRAPKAQVVGWPPVRSFRKNVLAEKCKAAALVKVSMDGAPYLRKIDVAMYKSYPELSMAFQNMFTSFTIGKCGSHQQLKESNKLRDDLEYVPTYEDKDGDWMLVGDVPWDTKGSGEMQELKLIKEN

SEQ ID NO: 17127 - protein, 171 aa, Oryza sativa
  Clone ID: TF_OSC421766j.C1.p4.fg
MKDRNASAEPVVKPGLSPSRFVKVFMHGEPFGRKINLALHNNYDSLSFTLKKLGNNYSMSPFELEGLVNKEEDGAIDSDFDLLYDDMDGVRYFLGDVPWEVFTTTVKKIYIVPAEQQNENDYQEEEEDNAAAAATADEDGDGAAADDGVAAAADDVDDVAGYTSNDDPSFD

SEQ ID NO: 17128 - protein, 183 aa, Oryza sativa
  Clone ID: TF_OSC400903j.C1.p25.fg
MELELGLRLALPSPSPSPATATAAGSELDLLNSAPGSCRKRGFEEALGGFKTDDDNDDGNGRGGDGDSDGEMGNKRRKLVGWPPVKCLHRRRDGGCGGGYVKVKMEGLAIGRKLDLSILGSYAELLDTLHLMFPSTNQEDGHDRRRRHPYAVTYEDGEGDWMQVGDVPWEAFAKSVKRLKILV

SEQ ID NO: 17129 - protein, 243 aa, Oryza sativa
  Clone ID: TF_OSC422284j.C1.p12.fg
MAWNGRFGEDGEEERSLELSLALPGYFSSSGLQGNTSTAADGAKGNDGFKASKKMLKFAPKFSAIRSRPAAPVVGWPPVRSFRRNLASSSSSSKPPRGGRDAAAAATGGKVARFVKVNMDGVPIGRKVDLAAHGGYGELSAAVDRLFRGLLAAQRDPTMATAAAAAAAGESCTGEEEAIAGLLDGGSGEYTLVYEDDEGDQMLVGDVPWNMFIAAARRLRVLRSSDLNASTIRAGSRKRAAAE

SEQ ID NO: 17130 - protein, 277 aa, Oryza sativa
  Clone ID: TF_OSC900383j.C1.p4.fg
MAADLAFEATELRLGLPGGGGDGDAAAAAARSSSGKRGFAETIDLKLKLEPAAAAVDDDDDKEEAAADDREKKVDIVGADNDDASPPAAAAAGGMKRSPSQSSVVTAAADPEKPRAPKAQVVGWPPVRSYRKNILAVQADKGKDAADGGGDKSGAGAAAAAFVKVSMDGAPYLRKVDLKMYKSYLELSKALEKMFSSFTIGNCGSHGVNGMNESKIADLLNGSEYVPTYEDKDGDWMLVGDVPWEMFVESCKRLRIMKGSEAIGLAPRAMEKCKNRS

SEQ ID NO: 17131 - protein, 157 aa, Oryza sativa
  Clone ID: TF_OSC5281j.C1.p1.np
ENRAASSAQLVGWPPVRTFRKNLSTPKPADAENKMKPCSDEGHGSRDAAQERRPSSTMFVKVNLEGYAVGRKIDLKAHRSYDSLSQALQSMFHGFLSGQDATRDNELATRDNELQRMEEGSKKRYVLVYEDNEGDRMLVGDVPWELFIASVKRLYIS

SEQ ID NO: 17132 - protein, 521 aa, Oryza sativa
  Clone ID: TF_OSC401064j.C1.p59.gm
MARHGMHAAFARETACAIRSGGAPEPAHSAGGSSQPRSARRPMRAGAGSRATGAGAMNPYDMPGRQVHFEEAAKHSVYGTTGHCKGDMVISSRSSYNRSPAIPLSLAIGGAAEVELHSNPIQGFSEDQEFRRGNVLINSGPLWSGRGRRWNHSLRHNQQQRQWPHGWKPDLNSVFFRVLFRSRLDLSLRFGLTLEDFELVNLMEEGSNKREGLPPQLLDLIPDEKEWKLREALGLGRSRNAGFDGEEDKKLDLKLGLPGFIEDDEAETLRDYRLQQESPSLSLSFFPKHSKTTSSTTTTTGAKRGFIDTVEDKTEGYNDQKQQARAGCGKELAVEEMIAAVSERKKGCCPPPPPPHGAPATPARNRPQTQGRRNLASSSSSKHSPEPQNDNANAKVTLTCKKNPLVKINMDGIPIGRKIDLAAYNSYDGLSSAVKQLFHGFLQAQKDQTNAQIAQQGADDKIFYQLLDGSGEYTLVYEDSEGDRMLVGDVPWKVFVSTAKRLRVLRSSELSHTLIGATARV

SEQ ID NO: 17133 - protein, 203 aa, Oryza sativa
  Clone ID: TF_OSC11845j.C1.p2.fg
MEECKGGGMSPSSSMDSSTHPALSTTSSAATARRDLSTDLRLGLSLSTSSSSSLLQAAAAAAAADDSIPSTPRNSQVHADWPPIKPFLRSALQKASAAGGGGARRRRTLFVKVYMEGVPIGRKLDLLLLDGYDSLLIKLCHMFKTPITYADVMECHQQVPGQKAAHVLTYEDQDGDWMMVGDVPWELFLSSVKKLRIARMDKC

SEQ ID NO: 17134 - protein, 205 aa, Oryza sativa
  Clone ID: TF_OSC900153j.C1.p5.gm
MARPRAGRATGRTAPERAMCDETGRGGRAQRSITAKSASERNKHVATCGNPVPYPPRQNPDLLCPFALHCPQLATISVFFVEVSGGDTVLGHGELRRRRRGAHRADAGASRSQRSQGQARQEERPSAAVVLDAAYFVKVSMDGTPYLRKVDVAAYGDYLELVEALNDMFYCSTIGLMDGYGEWEHAVVYEDGDGDWMLVGDVPWE

SEQ ID NO: 17135 - protein, 266 aa, Oryza sativa
  Clone ID: TF_OSC416231j.C1.p5.gm
MGVVSDGVMIAPAAGDSPVAVAGSIRAATTTHHHTPRLRKLDAPLDSDPAADPSRRRSSSNRHGAPPPPVPMSTSSGADSSPPVSGLDYDDTALTLALPGSSSSSSSTADPERKRAAHADHADAKPPSPKARAVGWPPVRAYRRNALREDSARAKLVKVAVDGAPYLRKVDLAAHAGYAPLLRALHGMFASCLAVRGGGGGDGEGTKLVDLVTGAEYVPTYEDKDGDWMLVGDVPWKMFVESCKRIRLMKSSEAVNLCKNLRSNPL

SEQ ID NO: 17136 - protein, 275 aa, Oryza sativa
  Clone ID: TF_OSC400878j.C1.p5.fg
MASSSSLRSTSCLASAAETDADNLCLRLGPPGSSITTTTTTGGADPAAKRSLGAKRSLESTDSMASGTGTSAAGDEHDDDTAAPAKAQVVGWPPVRAYRRNTFHQAAAAAAATKKGGDEKQKQQQQGGGLYVKVSMDGAPYLRKVDLKMCKGYRELREALDLLFTKCFSATASDGCSDGQFAIAYEDKDGDLMLVGDVPWEMFISSCKKLRIMKGSEASKIYALKTNQVLNLQAIGSNSEEDKALAWLPAHTANQADADARMNQHKLRGRITSKK

SEQ ID NO: 17137 - protein, 516 aa, Oryza sativa
  Clone ID: TF_OSC408625j.C1.p8.fg
MAAGGSSSNPMSREASSSAAAAAAGVAVRDVGDDKPLPSAEVDITYWAAQEEAAALLESMAARARGEDDLPEEQLQANNQLQEDEVIALQAIFGDDMVILENKDNLRFIQIFVHYTLPDSIRVFLNLRRSGAMVGTDDSENHNGGELYHLAAKWLDEPKVSYLCAALDEVWTELPGQEVIYRWVDWLNSSSWSSIALNDEIVLDPDKTLKIGDERAIARRILVESTIPLMQSYSEKRSHKIFLESLLCMESHCKIHVKEGNLMQLACPDTNCRNPLPPSVLKSLLRDDGYAQWESFALQKLLDAMPDLVYCPRCSAACLEVDNDAQCPGCFFTFCTLCKRRRHVGDTCITPEEKIRILKGLTRMSSMRVGPRPQVVSPERQKLYSIPEEQLLKEKREIDELINIQEALRDSKQCPRCKMAISKIEGCNKMTCGNCGRFFCYRCNKAIGGYDHFWNGNCDMFEREQDENPQQQDDENFGGDPDEDAELLEPEWVLLTYPCPNCGRRNEKSYMYRLLL

SEQ ID NO: 17138 - protein, 137 aa, Oryza sativa
  unsure (1)..(137): unsure at all Xaa locations
  Clone ID: TF_OSC401616j.C1.p20.gp
SLRAFVASNAGKYRFCPTPDCPSIYQVAAADAESKPFVCGACFVEICNKCHLEYHPFISCEAYKEYKEDPDATLLEWRKGKENVKVCPSCHFTIEKADGCNHVECKCGSHICWACLENFRSSDDCYSHLRSVHLSYX

SEQ ID NO: 17139 - protein, 583 aa, Oryza sativa
  Clone ID: TF_OSC400944j.C1.p30.fg
MAAASAVASSSSSPALEPHPDLSPVFSSPSAASSSSSSSRDEGARGVSCEGGGGDDVFDLDAPWVAAAEAESRLEEAVTAAAAARVGLCCTEEKGKGKGEKEEDEIRNNRQRQEDEIYIHYDLNDGAEVCAKLSSANEKNPKDGRCCVGIEGHGDEPEDFSYTCNFEYLPPLVLTCLLPLSYPSKEPPYFTVTVKWMDGPNVSQLCKMLDTIWAELPGQEVVYRWVESLRNSSRSYLWFDGKITLGPDTPMQKGDNRAISRSLSLESVIPSMLSYSSKKRYQAFLEDLHMCMICLSQSKGSNFIRLPCQHLFCVKCLGTLCRMHVKEGSVFQLVCPDTKCNASIPPYVLKRLLTEDEFERWDRLTLEKALDSMSDVVYCPRCVIGCLEDEDNNAQCPKCSFFFCSFCKEPCHPRRQCLTPEEKLQRRQASGRMSEREVAQEILNIKALYNDVRLCPKCRMAISKTAGCNKMVCGNCGQFFCFRCGKAIKGYDHFSECKLFAPRDISAWERQMEEQYGNHVRLSLRPVGGTIRCPKCRERNFKDDEKYIFCWACRANYCTMCRREVQDKRGHFGSPECVGLEDF

SEQ ID NO: 17140 - protein, 302 aa, Oryza sativa
  Clone ID: TF_OSC401875j.C1.p15.fg
METSAAAGGAHLIYVSSDDEEDETRVLLAESYSAEEIQIQQAILLSLDPSSDADAAHSSASSSRPSGAASTSDEPSSLPDRKGKRKLSSEEDGPIESTRKKRRKRGRFKCSVCMEKLQVSEQFTVSFCAHAFCNSCIGRYVAAKISENVAVIGCPDPGCEEGFVEMDTCRDIIPPELFDRWSVSLCELALGEKKYYCPFKDCSALLINDNDGAEKKIRETECPHCHRMFCARCRVPWHDGIKCKEFRKLGDDEKGEEDLMFKKLAGKKKWQRCPNYKMQFSEWKIPESPNFGRVRQCKVVMV

SEQ ID NO: 17141 - protein, 512 aa, Oryza sativa
  Clone ID: TF_OSC418099j.C1.p8.fg
MEERLADVEGSFACNSRGEDDFRSCCGDEDEWEDTEESFTAGVAKGELDESSVRLFFKGVSSPEAEGKKLSGIGVVMERSPGVPMLQVQKKLDFYVDELVADHLALMDGLLVALQNGIRKIFAFTNSEKLYFQARIAEAEILEDQLLVALGHRILELVEKLEDFDIILLPSFELERPLQLAKEAIGIMYLSPYEVGTCSICCEEKRGAQMIKVGCAHTFCYSCLTSYTQEKLQTNKVPIRCPQLRCKYHISASECKSFLPVSCYDSLERAFAEAGTSDMERFYCPFPNCSVLLDLSQHFSRASTSSQSDLNCVECPECHRDICINCGVPWHVMMGCDEYQSLPVDERDAGDLSLHRLAQNNRWRRCQRCRRMIELTQGCFHMNCWCGHEFCYSCGAEYTNGIQTCQCVFWDEESIEAASAAHSTQASEIWAWDTFDCMPTAIEGYSEQERAQLALIQRFLSGGFNLGEPPSQSPPRCADSYIIDTMKDLHQLPWLERFVSVISDSYNEDYIQ

SEQ ID NO: 17142 - protein, 631 aa, Oryza sativa
  Clone ID: TF_OSC401875j.C1.p9.fg
MNIDDALAEELQLQEAILFSAFQEMIIQDTDDDDSIGNLILIGQDQGQESKKPFSVADHGESSSPSPLTMTTTTGGGGAGEFYCSICMETVPGALKFSVSPCLHAFCVCCIGQYVAAKIGENTADVRCPDPGCGGGVEPESCRGVVPSEVLDRWGLLLCEAAIVARRLHCPFRDCSEPLLADADGEGGGVAEAECPSCHRLFCARCMVPWHDGVGCEEFQELGEDERGREDVMVRRLAGRERWQRCPQCRMYVEKSEGCMFMKCRAAGEGPPDMSANVDLDAKRLVPLKAWGRCRGCWSSSSSYPRSKMLMSEIGSQDEFVKTNTDYIEKGEYSGGDRPVRSRVGKMAPTGMKFDLVKFDGSGNFGLWQTKVKDLLAQQGVSKALKGEKPAKMEDDDWKEMQLQAAATIRLCLSDQEGADLTAHVNVFNQLVTDFMKMDVEVDDEDKAIVLLCSLPESYEHVVTTLTYGKKTIKTKDITSALLARDQMRKNKEGETSQAEGLLVKEDHVGHKLGDDTSYPAVGVREVNIKLEDGGEHVLQGVRHVPGLKRNLISLETLHEEGLIFRGNRNRKTMEIMKDKTTVMTGEKVESHLYKLRGCTVAGGVQEGAVARIAIVFGGGGSGAYSSGGLR

SEQ ID NO: 17143 - protein, 257 aa, Oryza sativa
  Clone ID: TF_OSC401857j.C1.p21.np
RGTPASTGAMAMAEAAEGQRPRQRQRRQPQPQRQQHPSCGICMEPTSEAHRGGGGGCAHAFCRACLAGHVRAKVESGGGAGAVRCPDPSCGGALDPELCRGALPGDVFERWCAALCEAMFAGARRTYCPYPGCSEMMVADADDEGCAGVTQSECQACRRLFCARCGVPWHAGVSCAEFGRLGEGERGREDLLLVQAARNGGWKRCPRCRFYVEKSHGCLHITCRCGFEFCYGCGRQWQLIHDGCCSLMTQQAGEVPN

SEQ ID NO: 17144 - protein, 887 aa, Oryza sativa
  Clone ID: TF_OSC900349j.C1.p3.fg
MEGGKPHPAATGGGASSSHHAAAAAAADVAVDEAFARDLYVSQLMELGDDDWSSFAPPMDRVGSTSSLAAGAAGSRAQPIVIDDDDDAPAAAAAARTVQLYVPPPLRSGGRRTVATRQQPAPARSATAFLPRPPGGAATADIGTSSTATLPQGLPAAMAPSTELSLRPGGLIAGGAAAPRHGGRRPAARMAARAAPGTGHARGAGNGRWARAENLMAALQANPRPNVAQFGRIWTRIAAADRQLTAAAAAADTPAAVTATTGEGSHAAPAVSAGKCGQHRTPAISAGKGGAAGGMEEEEEVHRNVANENDSVSSKRQALLADRDTPAVFAGMEDGHDNDWYDSVIRDAVIAELQEDPELHGPLPVQYLTKSPVVAQPPPRATAAAIAGEEEEEEGEFSMPNFYKKWGLRPSDLDPDEAGPSTRRPRVLPLADGDLPTFDCGICFDTLPMLDLFRGLPCDHKYCLECMTTYIDGKVREGAVPVACPDPECADGGDGGAGVLHPEGCKKAIDFAAFTDWGLRLAEGAVPHDRRAYCPNRRCGILLETSGEAEPAMAACPACQHLLCATCGGEWSTADDADHRDCSKGPEAAMVKKLADERRWKACPKCRMLVERTAGCRVMSCRCRMVFCYLCGLQIGAVLEGKEKCQCLDNLGVVLIKALCRFSKRRTASYPPIKAIQIKGVVVSHLRSSQRHRRHPVADYQAREEESCRQHLYTKVVNPHLPPIAVSATNTASCRHEGVATATAHTHPRTSTQAVSPLPSVAIAMPCEHSSTTRWSRRSSLEATGSSITSARSTTGTVFNTIGHSCRRFNRVAAITVTIMARSILQIYHLVLATSGSSWEKRPHTTNILVTARFPTDGSDGGEEVGGRKVEWHRGMGHCPSHSSVIE

SEQ ID NO: 17145 - protein, 858 aa, Oryza sativa
  Clone ID: TF_OSC900362j.C1.p1.fg
MEGGKPHPAATGGGASSSHHAAAAAAADVAVDEAFARDLYVSQLMELGDDDWSSFAPPMDRVGSTSSLAAGAAGSRAQPIVIDDDDDAPAAAAAARTVQLYVPPPLRSGGRRTVATRQQPAPARSATAFLPRPPGGAATADIGTSSTATLPQGLPAAMAPSTELSLRPGGLIAGGAAAPRHGGRRPAARMAARAAPGTGHARGAGNGRWARAENLMAALQANPRPNVAQFGRIWTRIAAADRQLTAAAAAADTPAAVTATTGEGSHAAPAVSAGKCGQHRTPAISAGKGGAAGGMEEEEEVHRNVANENDSVSSKRQALLADRDTPAVFAGMEDGHDNDWYDSVIRDAVIAELQEDPELHGPLPVQYLTKSPVVAQPPPRATAAAIAGEEEEEEGEFSMPNFYKKWGLRPSDLDPDEAGPSTRRPRVLPLADGDLPTFDCGICFDTLPMLDLFRGLPCDHKYCLECMTTYIDGKGCKKAIDFAAFTDWGLRLAEGAVPHDRRAYCPNRRCGILLETSGEAEPAMAACPACQHLLCATCGGEWSTADDADHRDCSKGPEAAMVKKLADERRWKACPKCRMLVERTAGCRVMSCRCRMVFCYLCGLQIGAVLEGKEKCQCLDNLGVVLIKALCRFSKRRTASYPPIKAIQIKGVVVSHLRSSQRHRRHPVADYQAREEESCRQHLYTKVVNPHLPPIAVSATNTASCRHEGVATATAHTHPRTSTQAVSPLPSVAIAMPCEHSSTTRWSRRSSLEATGSSITSARSTTGTVFNTIGHSCRRFNRVAAITVTIMARSILQIYHLVLATSGSSWEKRPHTTNILVTARFPTDGSDGGEEVGGRKVEWHRGMGHCPSHSSVIE

SEQ ID NO: 17146 - protein, 328 aa, Oryza sativa
  Clone ID: TF_OSC401875j.C1.p11.fg
MENSAADAAAAAGGADVIYISSDDEDEEIRILSADPYSPEEIQIQEVILLSLDYSRAAAADADTAQSSASSSRPSAAASTFGEPSSLPDRKGKSKLLSEDGPSESTTTRRWRKRGFTCIICMDKVQASEEFLVNVCSHAFCKSCIGGYVAAKVSDNVAAIGCPDPGCEEGSVEIGQCRDIVPPELFGRWSVSLWESSMGETTKCYCPFKDCSAMLINDNGDGGDAEEIAETECPHCHRMFCASCRVPWHDGIDCKEFRKLGNDEKGKEDLMLKKLAGKKKWQRCPQCRMYVEKSAGCTFMRCRCGFFFCYNCAAPMTKLVHYCKKCNR

SEQ ID NO: 17147 - protein, 570 aa, Oryza sativa
  Clone ID: TF_OSC400083j.C1.p24.fg
MDSEDDMLDANDSADDDFYSGGEAGLGGSDDGDADYDFADHDSDDSAELLSHRQQKNNGNSMGVLFGRVGSGDINSWDKDSLQEIGYGITVNELWIYPYPYHTETTAIIRKGSRSHEDEQNYSILSEADIQQRQEDDINRVSTVLSISKSEACVLLRNYNWSVSKVHDEWFADEEHVRKVVGFPEKLIEMPNDRECMLERFDNLTLRYFSLSTPDSVLCGITTYIVHIDRCPDPSCTAAVGQDMINSLADDEDREKYGRYLRRSYIEDNRKTKWCPAPGCEYAVEFVMGSGSYDVNCNCSYGFCWNCTEEAHRPVDCATVSKWILKNSAESENMNWLCLGPWSEHGERTGGFYACNRYEAARQEGAYDESERRREMAKNSLERYTHYYERWAANQSSRQKALGDLLSLQNDKLEKLSDIQSQPESQLKFIIEAWLQIVECRRVLKWTYAYGFYLPEHEHAKRQFFEYLQGEAESGLERLHQCAEKELQVYLEAESPSKDFNDFRTKLAGLTSVTRNYFENLVRALETGLNDVGPSTSHGTCSKSATSKSLGSKNLPETARLVTTSIDSIT

SEQ ID NO: 17148 - protein, 606 aa, Oryza sativa
  Clone ID: TF_OSC401841j.C1.p3.fg
MDSEDDMLDANDSADDDFYSGGEAGLGGSDDGDADYDFADHDSDDSAELLSHRQQKNNGNSMGVLFGRVGSGDINSWDKDSLQEIGYGITVNELWIYPYPYHTETTAIIRKGSRSHEDEQNYSILSEADIQQRQEDDINRVSTVLSISKSEACVLLRNYNWSVSKVHDEWFADEEHVRKVVGFPEKLIEMPNDRECMLERFDNLTLRYFSLSTPDSVLCGITTYIVHIDRCPDPSCTAAVGQDMINSLADDEDREKYGRYLRRSYIEDNRKTKWCPAPGCEYAVEFVMGSGSYDVNCNCSYGFCWNCTEEAHRPVDCATVSKWILKNSAESENMNWILANSKPCPKCKRPIEKNQGCMHITCTPPCKFEFCWLCLGPWSEHGERTGGFYACNRYEAARQEGAYDESERRREMAKNSLERYTHYYERWAANQSSRQKALGDLLSLQNDKLEKLSDIQSQPESQLKFIIEAWLQIVECRRVLKWTYAYGFYLPEHEHAKRQFFEYLQGEAESGLERLHQCAEKELQVYLEAESPSKDFNDFRTKLAGLTSVTRNYFENLVRALETGLNDVGPSTSHGTCSKSATSKSLGSKNLPETARLVTTSIDSIT

SEQ ID NO: 17149 - protein, 1686 aa, Oryza sativa
  Clone ID: TF_OSC401616j.C1.p16.fg
MRRSNDGRPFRPPDWGPPPHRYHHHHQNQYQYQQRYRPAQPGPRQFAVILLRGGSNLSAPPATEVEALVAGLPSPPPDSLSVSSSGRQAARLAFRSPQAAAAAARELWSLRLEGLHLLTPDVSDPALAAHAAPLIASLFAAHAARLVDSDLVSLTAARSSELAASIQAVKRRLAGHNRIRDFEQLQAQKRTLKAEKELVDAKIDEYKAAMRSIRRALLRGTEDDEEAEEEGLEVFGIGGGGEMNFARLHMIMLRECRRLKEGLPIYAYRRNILDHIFANQVMILIGETGSGKSTQLVQYLADSGLAANGSIVCTQPRKIAAISLAHRVVEESNGCYGDNFVLNSTFLDHQDFSSKIIYTTDNCLLHHCMNDMGLDGISYIIVDEAHERSLNTDLLLALIKKKLLDRLDLRLIIMSATADANRLAEYFYGCQTFYVKGRSFPVEIKYVPDISEEASFNTVPNHLRGSCATASYVYDVVKMVSIIHKNEEEGAILAFLTSQLEVEWACENFSDADAVVLPMHGKLSHVEQSLVFKSYPGKRKIIFCTNIAETSLTIKEVKYVVDSGLAKESRFVPSSGLNVLKVNWISQSSANQRAGRAGRTGAGRCYRLYSESDFSMMEVHQEPEIRKVHLGTAVLRILALGIRDAQNFEFVDAPNPEAINMAVKNLEQLGAVKYKCDGFELTDTGRYLVKLGIEPRLGKIMLDCFGFGLRKEGVVLAAVMANSSSIFCRVGTDEEKYKADRLKVPFCHQDGDLFTLLAVYKEWEDEHENRNTWCWQNSINAKTMRRCQETISDLENCLRHELNIIVPSYWCWNPEESTVHDKLLKRIILTSLSGNIAMFSGHERFGYQVISTDQAVKLHPSCSLLIYDSKPEWVVFTEILSVPNQYLVCVTAIDPDALCSIHPMPLIQQLEKLKLQVKVISGLGYNLLRKFCGKSGQNQQKIISLLQEEFRDDRVTVEVDFRNKEVVLFAKEQDIEKVFGIVNDALECEARMLRNECLEKSLFSGKPGDCSLALFGSGAEIKHLELEKRYLTVEVLHQNAHELNDKELICLVDTLISGVANFYKLYGNLQVASDETKWGKFTFLNPEYAEDAVSKLNGMEFHGSPLKVVPVCSSSNRGLPFPAVRAKVSWPLKQSRGLALVTCASGEAEFVVKDCFALGVGGRYINCEVSTRHENCIFVRGIPMHVTEPELYDAFRSTTTRKIVDVHLLRGTPIAAPSASLCAEALNREISSFMPKKIFPAQNFRVEVLTPEENDSVMRATITFDGSLHREAARALEHLQGSVLPCCLPWQTIQCQHVFHSTVSCQVRVYNVISQAVASLLESFRSQKGVSYNLEKNEYGIFRVKLTANATKTIADLRRPLEILMKGKTINHPDLTLSTVQLLMSRDGVADLKSVEQETGTYILYDRQSLNIKVFGLQDQVAAAEEKLIHALLQLRDKKPLDIRLRGRNLPPNLMKEMLKKFGADLEGLKREVPAVELRLNLRQHTLYVRGSKEDKQRVEEMISELVNSTKYNGLLQLPLENACPICLCEVEDPFKLESCGHVFCLTCLVDQCESALKSHDGFPLCCLKNGCKKQLLVVDLRSLLSSEKLEELFRASLRAFVASNAGKYRFCPTPDCPSIYQVAAADAESKPFVCGACFVEICNKCHLEYHPFISCEAYKEYKEDPDATLLEWRKGKENVKPPFVF

SEQ ID NO: 17150 - protein, 624 aa, Oryza sativa
  Clone ID: TF_OSC401665j.C1.p10.fg
MVTDAEEVSPTASSSELEQEDDDDDCYLSDQEDDALEESVLQVLEDERDEDCHWSSTSVCPPTIHRFILVVFVVRVPIASVVDGFLRLQVITKESLLAAQREDLRKVMELLGLREHHARTLLIHYRWDVERIFELLDQKGRDRLFSEAGIPLQPANNPGSPSSTEVTCNVCYDDVPLSDASKMDCGHNYCNECWTGYFIVKINEGQSRRIKCMALKCNTICDEAIVRKLVNAKRPDIAERFERFLLESYIEDNDTVKWCPSTPHCGNAIRVKGDIHCEVECTCGRQFCFNCSSEAHSPCSCVMWELWIKKCRDESETVNWITVNTKPCPKCHKPVEKNGGCNLVACICGQAFCWLCGGATGRDHTWSSISGHSCGRFTEDQSKKTEQARRNLYRYMHYHNRYKAHTDSLKQEAKLKGDIQGKISISENKDSKIKDYSWVINGLNRLFRSRRVLSYSYPFAFYMFGDEIFKDEMTSDERELKQNLFEDQQQQLEFNVERLSGFLERDFQNFSDDEVMDTMKHVINLSNVVDRLCKQMYQCIENDLLYPLRTPHNIAPYKSKGLDRASELNVCWDSSEQGSSIFGKRQLGSSSNNNGRPHKRERNDAHGGAALFDLNVPAEVADKI

SEQ ID NO: 17151 - protein, 525 aa, Oryza sativa
  Clone ID: TF_OSC400502j.C1.p16.fg
MESGYSDVDDDYFGDSDEDYGDDGDYMDDDGDDYGGQVVEETEAPAMEKTYVVLTEDDVRARQEEDIAKVCEVLSLSPGAAAVLLRLYRWRAVLLQEEWFLDERRIRDAAGLLPADGGGGEVPARVNRRRLTCAICFDVFDTGGMRSAGCSHFYCVSCWRGYVRAAVGDGARCLSLRCPDPSCPAAVVRELVDAVADGEDRERFGWFALRSYVEESAGMRWCPGPGCSRAVEFVGGGDGEESSEVFCSCGHGLCWRCGEEAHRPVSCKTVAKWVEKNSSESETATWLLAHTKHCPKCRLPIEKNLGCMHMTCRPPCLHEFCWICLKPWHGHAACSRYQPNGTVVALAGANADDERRRQAKASLDRYLYHYERWDANLKSLRVALRDMESLERSELEAMASAAGVPATEMGFVTEAYEQVGEGRRVLGWAHAYGYYLDPDRDFTKRQLFEYLQEDANASLERLHGCAERERRELFAAGADDKAAVDFDKYRAYREKLAGLTRVTRQYFGNLVKAFETDLAEVSSSS

SEQ ID NO: 17152 - protein, 398 aa, Oryza sativa
  Clone ID: TF_OSC100716j.C1.p1.fg
WTEYFAAAVSDGSKQMRCMEVKCTAICDEAVVRLLLHGKHPGAAARLDRRLLEACVEASDAVRWCPSAPHCGRAIRVDGGGGGEERYAEVSCPCGAVFCFRCGGGAHSPCPCPMWDKWGAMRGGGEVDNLKWIVANTKSCPKCSKPIEKNGGCNHVTCTCGQHLCYACGAATGTLYMHICNRYKEEGGGGGVKVEMTAGGRQRLRFMHYYERFEIHTESYKEEQGKLGPAIDALARRLEADATLPWSGTRDARWPSAAHRRLLRCRQVLPRSYVLAYYMFGGGAATRREREEAAAQNRFEDLQGQLEHHVEVLSRTLAAAARPADAAEVVKAKRDADNLARVVEGLCAGMYRCVQDELLPLLVEPMNIAAYHPDGPAMAKEFPPATSVTGGAPPATRH

SEQ ID NO: 17153 - protein, 573 aa, Oryza sativa
  Clone ID: TF_OSC401963j.C1.p4.fg
MDSDAEMPMSSDEEMLDDEDYYDYSDDMGEDDDGSGGGGGGDSDGEEEEEGDEELVGGDYEGREAEGSDEVVSRREQRYIVLTEKDINERQEEDIGKVSAVLSIRREEACVLLHHYKWNISKLSDEWFADEEKVRDIVGLLLNGIDLPNSRKLTCGICFEGYSSDVMSSADCDHFYCHECWEGYISAAISDGPGCLSLRCPDPSCGAMVLQNMINKLAKDDDKVRYARFILRAYVEDSKKCTEEAHRPVNCETVSRWILKNSAESENMNWILANSKPCPKCKRPIEKNQGCMHMTCTPPCKFEFCWLCLGSWAEHGERTGGFYACNRYESAKKEGVYDETEARRERAKNSLERYMHYYERWASNQTSRQKAQADLQKAEKEQLAKLTDVFGIPETQLKFIIEAWSQIIECRRVLKWTYAYGYYLDDKVKSEFFEYLQGEAESGLERLHQCAEKDLQSFLTVRSDNTEPAPSIAEFGDFRVKLAGLTSVTRNYFENLVQALEAGLEDVHSTAQGTTSSNATNIPSKKAVTKGKTKKQLPRTSSDNSDEGWPCERCTFINPSSVDACSVCDKHRY

SEQ ID NO: 17154 - protein, 623 aa, Oryza sativa
  Clone ID: TF_OSC401022j.C1.p16.fg
MSSDDEECFYDYEEEEEEEEEPGWDDGGGGDTMLVEEEAALPERPVDCWVSKAIPTILTSLKNPIHADVMHKNIHRPLQKSLFRLHSLQLVLQQLVLVTNYIVFLDMLDLPALYVCTQQQDLSMVMNLLYIKQHQARALLIHHRWKMESILDHFDRKGRDRMLRETGVVIQQQAEEKNGGGMAMAASPSPPPRPRSSVTCYVCFEDVSSDAVSTMDCGHCFCNDCWTEHFFACVNGGQKQIRCMAVGCAAVCDEDVAQRLLGGRYPGAARRLRGALLASYVEDNAAARWCPSAPHCGRAVRVDGGGGRWCCEVSCPCGASFCFGCAAPAHSPCPCAMWERWEAKCRGESMNVDWILANTKSCPKCSKPIEKNGGCNHVRCKCGQCLCWLCGAATGLAHNWTSIDGHSCNRYDDAAEKRKVDGARRKVLRYAHYYERYKAHGDSRRAEAEKLGPAIEARARRLREDPDPATAPASGDAAEALAAAHRALLASRDVLSRSYAFAYHMFGGEERTLKAAAPESEVATAQALFEDHQEMAERHVEKLSGLLAADAPPAPATAGDAALRRAKQDAVALTAVVEKHCGEMHKCIQDELLPMLVEPMSIAAYRRDGPIKAKDFPTCGGAS

SEQ ID NO: 17155 - protein, 540 aa, Oryza sativa
  Clone ID: TF_OSC401022j.C1.p14.fg
MASDRRYYYFEEDDGDGEEEVEWLAMEADEDDVGLLEEDDLHLRLPDDRPADCWAITQESLPAAQQQDLSMVMNLLNIKQHLARTLLIHHRWKMHCIYDHLDRKGRDRMLSEACIILPKNSMSAASSTSVTCNVCFEDFSMTDVSTMDCGHCFCNDCWTEHFFASINTGNKQIRCMEVKCKAICDEDIVRRLLSLKYPAASKRFDLLLLESYLEDNDSVKWCPSAPHCGRAIQVGTGERYCEVACPCGVSFCFNCAGQVHSPCPCAIWEKWKAKGHGDSDSVKWILANTKSCPKCSKPIEKNGGCNLVHCKCGQCLCWLCGGPTGREHTWDSISGHSCNRYKEENGDKVDTSRQQMQRYTHYWDRYNIHAGSYKVEQKDLGPAVEEQVKKLESNLTGPKMNWDGSWLAMAYQSLLASRQVLSRSYAFAYYMFGGGEVKTHPSERASLAVAQNLFEDRQEQLERHVEHLSKELATDLLGLPEEEIVLKKVEIANLAKIVQAICGQLYRCIQDELLPLLVQPMNIAAYQPDGPDKAKEFIGA

SEQ ID NO: 17156 - protein, 531 aa, Oryza sativa
  unsure (1)..(531): unsure at all Xaa locations
  Clone ID: TF_OSC400944j.C1.p13.np
ATALLHEMLLRARRDGEEPELSDEQLRSNDQLQEDEMLALEAIYGDNISILSAKDGLRCFQVHVHWEIPDGTSISTELSQGDNHDQNSXFFDTFSVQHLAPISLTCLMPPSYPSHRAPYFTLSSQWLDAVKVSSLCLMLDTIWTQQLGQEVVYAWVQWLQSSALSHLGFDDGILIQQPGSMMGPVDVRAVAEIASVESVAQWLISYNEEQCHESFLSGLHDCMICFTEYGGIDFITLPCQHYFCRRCMETYSRMHVTEGTVLKLLCPNDKCGGIIPPSLLKRLLGDTDFERWERLILQKTLDSMSDLAYCPRCGAACLEDEENNAQCPKCFFSFCARCRDRRHIGEKCMTIEEKLNSLQDRTVVPFLSKDSFASKMNLSNEISSIKEVLRSSVRCPHCGTAISRVSGCNHMLCSNCRQSFCYGCGKAENHGHSRYILLRSQMSPASPADTRRIWQRKNPTVLIEEVKKELEGELSRQHPCPNCRQPNPKMGNNSHMFCWACQVHYCAQCHRMVRKSSEHYGPRGCKQHSVD

SEQ ID NO: 17157 - protein, 208 aa, Oryza sativa
  Clone ID: TF_OSC417464j.C1.p9.fg
MARGKVQLRRIENPVHRQVTFCKRRAGLLKKARELSILCEADIGIIIFSAHGKLYDLATTGTMEELIERYKSASGEQANACGDQRMDPKQEAMVLKQEINLLQKGLRYIYGNRANEHMTVEELNALERYLEIWMYNIRSAKEGMLKAANEILQEKIVEQNGLIDVGMMVADQQNGHFSTVPLLEEITNPLTILSGYSTCRGSEMGYSF

SEQ ID NO: 17158 - protein, 160 aa, Oryza sativa
  Clone ID: TF_OSC401315j.C1.p2.fg
MERILATAAATACSCTRFGLGNRLVVTSEDQSPLTEDRHCHLMGEDLESLNLKELQQLEKQLKNTSKHIRSRKDEEKHMLAVQPIGLDGGRQRTQPIGGERRRHPLTMSLDLALLAPKATGSGVPKLGTARSTAPRARVVQTWSPSRLVVTGVAPPHRSP

SEQ ID NO: 17159 - protein, 160 aa, Oryza sativa
  Clone ID: TF_OSC900305j.C1.p2.fg
MERILATAAATACSCTRFGLGNRLVVTSEDQSPLTEDRHCHLMGEDLESLNLKELQQLEKQLKNTSKHIRSRKDEEKHMLAVQPIGLDGGRQRTQPIGGERRRHPLTMSLDLALLAPEATGSGVPKLGTARSTAPRARVVQTWSPSRLVVTGVAPPHRSP

SEQ ID NO: 17160 - protein, 110 aa, Oryza sativa
  Clone ID: TF_OSC1354j.C1.p1.fg
MELFHRYEITTRNTRLQETNRDDEQMVMEITRLRNEIDQLEASLRRQTGEDLSSVSTVDELSQLQLQLESSLSKVHARKDELMSQQLEDMRRMVHYSLIVVAVVVFADEW

SEQ ID NO: 17161 - protein, 215 aa, Oryza sativa
  Clone ID: TF_OSC409438j.C1.p1.fg
MRKTTKRAIFNPPNTLQDNSYTKLAVLAKGGSKLETTTAQLARKSSKNRTEHPSKADRPNLQRRVNITFSSPVLSAWQLMGQDLSGLGVKELQTLENQLEMSIRCIRTKKDQLMIDEIHELNRKGSLIHQENMELYRKIDDFTGYTLHYMMTANLSPQLYETGAENEANRDSTTPYNFAVIEEANTPARLELNPPSQQNDAEQTTPPKLGLQLHP

SEQ ID NO: 17162 - protein, 160 aa, Oryza sativa
  Clone ID: TF_OSC20932j.C1.p1.fg
MHKCSVKETIERYKKANSDTSNASTVAEINAQHYQQEAAKLKQQITNLQNSNRTLVGDNITTMNHRELKQLEGRLDKGLGKIRARKETELQNDNMYLKSKVAESERGLQTVNMMGSASTSEYVQNMIHYDPRNFLQFNIMHQPQYYPEQEDRKAFMSDER

SEQ ID NO: 17163 - protein, 166 aa, Oryza sativa
  Clone ID: TF_OSC20980j.C1.p1.fg
MSSVKRNNCSSVKETIERYKKANSDTSNASTVAEINAQHYQQEAAKLKQQITNLQNSNRTLVGDNITTMNHRELKQLEGRLDKGLGKIRARKETELQNDNMYLKSKVAESERGLQTVNMMGSASTSEYVQNMIHYDPRNFLQFNIMHQPQYYPEQEDRKAFMSDER

SEQ ID NO: 17164 - protein, 211 aa, Oryza sativa
  Clone ID: TF_OSC900209j.C1.p7.fg
MRGKGCWSKGEEGQEEKIKIKERMEERKRCSVSRESSFCTSDTHAIGIFLAHFRTTQFYEVDGFNLCLEFWQAEAERLKQQLHNLEGSQRQLLAHDLSGLEWNDLKSLENQLETSLHNVRLKKDKIMVEQIQELRKKENIMHRENMELHREFNMIRQDSVNFQRKVYGKQDVNGGQGSSVTQNTNTQDDADEIRLELSQPQVPDEKPEAAA

SEQ ID NO: 17165 - protein, 285 aa, Oryza sativa
  Clone ID: TF_OSC417635j.C1.p14.fg
MGRGRIEIKRIENTTSRQVTFCKRRNGLLKKAYELSVLCDAEVALIVFSSRGRLYEYSNNNNYLKKDYSVLIFLVLCVKATIDRYKKAHACGSTSGAPLIEVNAQQYYQQESAKLRHQIQMLQNTNKHLVGDNVSNLSLKELKQLESRLEKGISKIRARKNELLASEINYMAKREIELQNDNMDLRTKIAEEEQQLQQVTVARSAAMELQAAAAAQQQQQNPFAVAAAQLDMKCFFPLNLFEAAAQVQAVAAQRQQIIPTELNLGYHHHLAIPGAAAADAPPPHF

SEQ ID NO: 17166 - protein, 120 aa, Oryza sativa
  Clone ID: TF_OSC21206j.C1.p1.fg
QMRGEELHRLNVEQLQELEKSLESGLGSVLKTKSKKILDEIDGLERKRMQLIEENLRLKEQVSRMSRMEEMQPGPDSEIVYEEGQSSESVTNASYPRPPPDNDYSSDTSLRLGLSLFSSK

SEQ ID NO: 17167 - protein, 255 aa, Oryza sativa
  Clone ID: TF_OSC401003j.C1.p2.fg
MGRGKIAIKRIDNTMNRQVTFSKRRGGLMKKARELAILCDADVGLIVFSCTGRLYDFSSSSMKSIIERYQEAGEEHCRLLNPMSEAKFWQREVTTLRQQVQNLHHNNSFYLSANYLNENSAYYFIRINQYEGENEIFFKAHVEIHVSNKRQLLGEEISNFTVRDLQLLQNQVEMSLHSIRNKKGSLVQKENSELRKKFNIAHQRNIELHKKLNSGESTSSEQVTRSSKDPGESSTPRDSRVCIDLELSQKEVEDE

SEQ ID NO: 17168 - protein, 225 aa, Oryza sativa
  Clone ID: TF_OSC401545j.C1.p6.fg
MGRGKVELKRIENKISRQVTFAKRRNGLLKKAYELSVLCDAEVALIIFSTRGRLFEFSTSSCMYKTLERYRSCNYNLNSCEASAALETELSNYQEYLKLKTRVEFLQTTQRNLLGEDLVPLSLKELEQLENQIEISLMNIRSSKNQQLLDQVFELKRKEQQLQDANKDLKRKIQETSGENMLHISCQDVGPSGHASEANQEFLHHAICDPSLHIGYQAYMDHLNQ

SEQ ID NO: 17169 - protein, 253 aa, Oryza sativa
  unsure (1)..(253): unsure at all Xaa locations
  Clone ID: TF_OSC410931j.C1.p4.np
MGRGKIVIRRIDNSTSRQVTFSKRRNGIFKKAKELAILCDAEVGLMIFSSTGRLYEYSSTSMKSVIDRYGKSKDEQQAVANPNSELKFWQREAASLRQQLHNLQENHRQLMGEDLSGLNVKELQSLENQLEISLRSVRTKKDHVLIDDHVLIDEIHELNRKGSGSLVHQENMELYKKISLIRQENAELYKKIYETEIYETEGPSEVNRDSPTPYNFAVIEKTNVPVQLGLSTLPQHSDAEQSTAPKLGXHLAL

SEQ ID NO: 17170 - protein, 186 aa, Oryza sativa
  Clone ID: TF_OSC400415j.C1.p2.fg
MGRGKIEIKRIENATNRQVTYSKRRTGIMKKARELTVLCDAQVAIIMFSSTGNIKGIFDRYQQAIGTSLWIEQQRMGEDLDGLEFDELRGLEQNVDAALKEYHVITTQTETYKKKVKHSYEAYETLQQELGLREEPAFGFVDNTGGGWDGGAGAGAAADMFAFRVVPSQPNLHGMAYGGNHDLRLG

SEQ ID NO: 17171 - protein, 285 aa, Oryza sativa
  Clone ID: TF_OSC404997j.C1.p2.fg
MAEKKKKKKKKKPQSLLVLTSWRSIGMGRGRVELKRIENKINRQVTFAKRRNGLLKKAYELSVLCDAEVALIIFSNRGKLYEFCSTQSMTKTLEKYQKCSYAGPETAVQNRESEYYKSKHRLCLVRSKVWNLVKIRDDVTEKLCMYERNLLGEDLDSLGIKELESLEKQLDSSLKHVRTTRTKHLVDQLTELQRKEQMVSEANRCLRRKLEESNHVRGQQVWEQGCNLIGYERQPEVQQPLHGGNGFFHPLDAAGEPTLQIGYPAEHHEAMNSACMNTYMPPWLP

SEQ ID NO: 17172 - protein, 249 aa, Oryza sativa
  Clone ID: TF_OSC416737j.C1.p14.fg
MGRGRVELKRIENKINRQVTFSKRRNGLLKKAYELSVLCDAEVALIIFSSRGKLYEFGSAGINKTLEKYNSCCYNAQGSNSALAGGEHQSWYQEMSRLKTKLECLQRSQRHMLGEDLGPLSIKELQQLEKQLEYSLSQARQRKTQIMMEQVDDLRRKERQLGELNKQLKNKLEAEADSSNCRSAIQDSWVHGTVVSGGRVLNAQPPPDIDCEPTLQIGYYQFVRPEAANPRSNGGGGDQNNNFVMGWPL

SEQ ID NO: 17173 - protein, 254 aa, Oryza sativa
  Clone ID: TF_OSC100382j.C1.p4.fg
MGRGRVELKRIENKINRQVTFSKRRNGLLKKAYELSVLCDAEVALIIFSSRGKLYEFGSAGCFVLAQLGDLFIICLVGGITKTLERYQHCCYNAQDSNNALSETQSWYHEMSKLKAKFEALQRTQRHLLGEDLGPLSVKELQQLEKQLECALSQARQRKTQLMMEQVEELRRKLEVEGSTSNYRAMQQASWAQGAVVENGAAYVQPPPHSAAMDSEPTLQIGYPHQFVPAEANTIQRSTAPAGAENNFMLGWVL

SEQ ID NO: 17174 - protein, 260 aa, Oryza sativa
  Clone ID: TF_OSC401807j.C1.p25.fg
MGRGKIEIKRIENATNRQVTFSKRRGGLLKKANELAVLCDARVGVVIFSSTGKMFEYCSPTCSLRELIEHYQTVTNTHFEEINHDQQIFVEMTRMRNEMEKLDGGIRRFTGDDLSNLTLADINDLEQQLEFSVTKVRARKHQLLNQQLDNLRRKEHILEDQNSFLCRMINENHHQAAVGGGDVKAMVEMAPVLSMLTAAPAYYGEESSSTALQLTPPLHAVDAAAAAGFRLQPTQPNLQDPGCSSSSFHAAAAGHGLQLW

SEQ ID NO: 17175 - protein, 268 aa, Oryza sativa
  Clone ID: TF_OSC403824j.C1.p6.fg
MGRGPVQLRRIENKINRQVTFSKRRNGLLKKAHEISVLCDADVALIVFSTKGKLYEFSSHSSMEGILERYQRYSFDERAVLEPNTEDQENWGDEYGILKSKLDALQKSQRQLLGEQLDTLTIKELQQLEHQLEYSLKHIRSKKNQLLFESISELQKKEKSLKNQNNVLQKITTKAVLEVKPFCLHSSEQLMETEKEKNNAIINTNREEQNGATPSTSSPTPVTAPDPIPTTNNSQSQPRGSGESEAQPSPAQAGNSKLPPWMLRTSHT

SEQ ID NO: 17176 - protein, 320 aa, Oryza sativa
  Clone ID: TF_OSC400495j.C1.p47.fg
MGRGKVQLKRIENKINRQVTFSKRRNGLLKKAHEISVLCDAEVAAIVFSPKGKLYEYATDSSLTILLIIKESVNTYTYGYRIMGRMDKILERYERYSYAEKALISAESESEITLPQLTTCTASRSTHGICFQYCLMSKTLGNWCHEYRKLKAKIETIQKCHKHLMGEDLESLNLKELQQLEQQLESSLKHIISRKSHLMLESISELQKKERSLQEENKALQKELVERQKNVRGQQQVGQWDQTQVQAQAQAQPQAQTSSSSSSMLRDQQALLPPQNICSYPPVMMGERNDAAAAAAVAAQGQVQLRIGGLPPWMLSHLNA

SEQ ID NO: 17177 - protein, 351 aa, Oryza sativa
  Clone ID: TF_OSC400256j.C1.p4.gm
MGWPVRPASARSDRHQFGLTEYGFVGSVSAIPSSTISASRGPSHANQVSSSSSTEPYPYVDRSARTAPALPHRESPPHLHSFHGGLPPPPPLHPPLLLHSNHGVQSSTPPTIPTLKTGRTATPQPSCFFESEVKICFLVCVLGVEEEEELDMGRGKIEIKRIENSTNRQVTFSKRRAGILKKAREIGVLCDAEVGVVIFSSAGKLSDYCTPKTTLSRILEKYQTNSGKILWDEKHKSLSAEIDRVKKENDNMQIELRLPKELIAIEEALNNGQANLRDKMMDHWRMHKRNEKMLEDEHKMLAFRVHQQEVELSGGIRELELGYHHDDRDFAASMPFTFRVQPSHPNLQQEK

SEQ ID NO: 17178 - protein, 173 aa, Oryza sativa
  Clone ID: TF_OSC422442j.C1.p2.fg
MERILEKYDRHELLSEGNNVIEEFPELEGSMSYDHIKLRGRIEALKKSQRNLMGQELDSLTLQDIQQLENQIDTSLNNIRSRKVTYPSTARRHGNFFNLKICRLSLSEEKLLMEKNTILEKLRRFRRAGNRDGATWLDQQQQWLAMVDAPVIIERQELEDVQMKWSLQPLHGC

SEQ ID NO: 17179 - protein, 201 aa, Oryza sativa
  Clone ID: TF_OSC417635j.C1.p12.fg
MVRGKVQMRRIENPVHRQVTFCKRRGGLLKKARELSVLCDADVGVIIFSSQGKLHELATNGNMHNLVERYQSNVAGGQMEPGALQRQVAEQGIFLLREEIDLLQRGLRSTYGGGAGEMTLDKLHALEKGLELWIYQIRTTKMQMMQQEIQFLRNKEGILKEANEMLQEKVKEQQKLYMSLLDLHSQQPTQPMTYGNRFFSI

SEQ ID NO: 17180 - protein, 229 aa, Oryza sativa
  Clone ID: TF_OSC33084j.C1.p12.fg
MGRGRVELKRIENKINRQVTFAKRRNGLLKKAYELSVLCDAEVALIIFSNRGKLYEFCSGQSMTRTLERYQKFSYGGPDTAIQNKENELVQSSRNEYLKLKARVENLQRTQRNLLGEDLGTLGIKELEQLEKQLDSSLRHIRSTRTQHMLDQLTDLQRREQMLCEANKCLRRKEKLEESNQLHGQVWEHGATLLGYERQSPHAVQQVYSRADEQLMRDCLHADMATLNS

SEQ ID NO: 17181 - protein, 265 aa, Oryza sativa
  Clone ID: TF_OSC401826j.C1.p16.fg
MGRGKIEIKRIENKTSRQVTFCKRRNGLLKKAYELAILCDAEIALIVFSSRGRLYEFSNVNSTRSTIERYKKASASTSGSAPVIDVNSHQYFQQEAAKMRHQIQTLQNANRHLIGESIGNMTAKELKSLENRLEKGISRIRSKKHELLFSEIEYMQKREADLQNENMFLRAKVAEAERAEHDDQQAAEDDEMAPAPAVGGGSSSGTELEALPATFDTREYYQPAPPVSMLAAAAAAAAAQYSSDHHQTALHLGYFKVDSGKGGLL

SEQ ID NO: 17182 - protein, 174 aa, Oryza sativa
  unsure (1)..(174): unsure at all Xaa locations
  Clone ID: TF_OSC900218j.C1.p17.np
SVEETIERYKKANSDTSNTSTVAEINAQHYQQEAAKLKQHITYLQNSNRFIISAAXIFFFQLDKVVHLVIGLEKIRARKNEYLCANEYLCAEIEYMQRRETELQNDNMYSKSEVAESERGQTVNMMGSASTSEYVQNMIHYDPRNFLQFNIMQQLAPQYYPEQEDRKASQFIVQ

SEQ ID NO: 17183 - protein, 257 aa, Oryza sativa
  Clone ID: TF_OSC400152j.C1.p9.np
MGRGKVELKRIENKISRQVTFAKRRNGLLKKAYELSLLCDAEVALIIFSGRGRLFEFSSSSCMYKTLERYRSCNYNSQDAAAPENEINYQEYLKLKTRVEFLQTTQRNILGEDLGPLSMKELEQLENQIEVSLKQIRSRKNQALLDQLFDLKSKEQQLQDLNKDLRKKLQETSAENVLHMSWQDGGGHSGSSTVLADQPHHHQGLLHPHPDQGDHSLQIGYHHPHAHHHQAYMDHLSNEAADMVAHHPNEHIPSGWI

SEQ ID NO: 17184 - protein, 244 aa, Oryza sativa
  Clone ID: TF_OSC403905j.C1.p14.fg
MGRGKVVLQRIENKISRQVTFAKRRNGLLKKAYELSILCDAEVALVLFSHAGRLYQFSSSSNMLKTLERYQRYIYASQDAAAPTSDEMQKINHQNNYQEYVNLKAHVEILQQSQRNLLGEDLAPLATNELEQLESQVVRTLKQIRSRKTQVLLDELCDLKRKEQMLQDANRVLKRKLDEIDVEAAPPQPPWNGNCSNGHGGGGGVFSSEPPQPEHFFQALGLHAVDVNQPPAPPPGGYPPEWMA

SEQ ID NO: 17185 - protein, 227 aa, Oryza sativa
  unsure (1)..(227): unsure at all Xaa locations
  Clone ID: TF_OSC419955j.C1.p3.np
MARERREIRRIESAAARQVTFSKRRRGLFKKAEELAVLCDADVALVVFSSTGKLSQFASSNMNEIIDKYTTHSKNLGKTEQPSIDLNLEHSKCSSLNEQLAEASLQLRQMRGEELEGLSVEELQQMEKNLEAGLQRVLCTKDQQFMQEISELQRKGIQLAEENMRLRDQMPQVPTAGLAVPDTENVLTEDGQSSESVMTALNSGSSQDNDDGSDISLKLGXVSAGTL

SEQ ID NO: 17186 - protein, 274 aa, Oryza sativa
  Clone ID: TF_OSC401751j.C1.p5.fg
MGRGKIVIRRIDNSTSRQVTFSKRRNGLLKKAKELSILCDAEVGLVVFSSTGRLYEFSSTNWAWCTAHAEEYIPTPITGELQQTPLKGAEYAHNICAQSDSTESSELEVGKSCKPRMGQRGQIAADANSIWQREAASLRQQLHNLQESHKQLMGEELSGLGVRDLQGLENRLEISLRNIRMRKGSLIHQENIELSRSLNVMSQQKLELYNKVRCKILLETCDYMLTHYPKQLKEQLDFSFRPVNREVPQMQMKVPALHTAFVSYKMLICLLVLN

SEQ ID NO: 17187 - protein, 885 aa, Oryza sativa
  Clone ID: TF_OSC400780j.C1.p8.gm
MEWAPVADHKMRKKVWGTCGQDGVGLRTQKTIERYRTYTKENIGNKTVQQDIEQVKADADGLAKKLEALETYKRKLLGEKLDECSIEELHSLEVKLERSLISIRGRKVAKLREKEMKLRKDNEELREKRSPVERREFDRAHHPAPRGLSNRGRSTGPSTDPVEQSAFDRPAGEEAEEAPAGRKGLATPSSSEVKMKVGQMFHDKGHLQDAVKRWAFVQKREFKARNPGTHMAILDEVNEYGENVLRRAFWSFGCMIEAFKNCIPLLCVDGTFMTGKYRGTILTAIGVDADSHVVPVAFAFVESENTSSWLWFLRHIKMIKNLMDEAKVKDRSRRKKACILCGENHSRTFCNVLKMRGPDQYWRIDPRWVPRLRAAGLLTFARLVEPSRARSERIHIDAALMSALVDRWRPETHTFHLTVGEMVPTLQDVSYLLGLPIAGPAVGPTMVNAGWADDLLASFGGVLPVALEDLTDGHGPTKSWLNQFRQDVFPDDQEEWIVQRHLVAYLLWLFGWVMFTGTHADSVDKHFIHFAEQIAELPIAEIPQYSWGSAVLAATYAGLCDACVRNSKQSSLPGCPLLLMLWAHERFDIGRPQLDSYANYGLREMYRSGVDDIDDRPTMGSLWTHREPQWVSGTTRRVYTQFVADFDQLTPDRVRWTPYTQHDVNDRAPHGLADLCTRDMQLWRTTCHLVLDVHVEPHNVHRVLKQLGMYQDFPPRDGRPLADSLHRYFRKGLGLSYELVIVTTVQPTVQEWEHAADNLALQTPPDDGSYYGAYLRWYRSVTRWRCFPPQRDSTVPHQAAITDTFAPQPRSAYKSMAEFVEHVHVESDTLLQRLEARPPVVRSDDVASVLRNFRARAAALLRRVSCRSAADVVQTSGRRLSRPEI

SEQ ID NO: 17188 - protein, 105 aa, Oryza sativa
  Clone ID: TF_OSC29397j.C1.p1.fg
NQALLDQLFDLKSKEQQLQDLNKDLRKKLQETSAENVLHMSWQDGGGHSGSSTVLADQPHHHQGLLHPHPDQGDHSLQIGYSSFLPVTVNFLPEKIPKMQRSCSF

SEQ ID NO: 17189 - protein, 366 aa, Oryza sativa
  Clone ID: TF_OSC401166j.C1.p21.fg
MVRGRTELKRIENPTSRQVTFSKRRNGLLKKAFELSVLCDAEVALIVFSPRGRLYEFASAPSTRIVYLTPSSLAPTPAGEWREWREDLSRKFLSLQAMICNELSSNVELKPFGWALAQGEVELELCRMGPMYIKNIYNLVIEYLYFNGKKLSSNYSLVYRQHAPILQVLQPKLSILVLPEIPVPLAGCYFFRFIILQKTIDRYKAYTKDHVNNKTIQQDIQQVKDDTLGLAKKLEALDESRRKILGENLEGFSIEELRGLEMKLEKSLHKIRLKKTELLEQQIAKLKEKERTLLKDNENLRGKHRNLEAAALVANHMTTTTAPAAWPRDVPMTSSTAGAADAMDVETDLYIGLPGTERSSNRSETG

SEQ ID NO: 17190 - protein, 483 aa, Oryza sativa
  Clone ID: TF_OSC101782j.C1.p2.fg
MAAAAAGMGGGGGVQHQETTTTVVQVAAEASRKKVEVRSAGRRGRREMRRIEDATSRQVTFSKRRSGLLKKAFELSVLCDAEVALIVFSPRGRLYQFASASSDLQRTIDRYLNHTKNSSAHEEGEESCVQKWRSEATTLGKKIEAIEGYKSKLLGEGLGSCSVQELQELEVQLEKSLCSIRQKKQKMLMDQILELREKEMNLLKENMVLRDQCKALSSPWSTSVGELKNKQADDDVHRHEDYSGGGVRDDDDRRMMEDVETDLAAANQAGKVLKKGKKKQAKDELDRQKQAEKKRRRLEKALANSAAIISELEKKKQKKREEQQRLDEEGAAIAEAVALHVLIGEDSDEPCHLMLNKHRRCNHWDHSAGFDFAVDAQGADIYPPDGLIQCADHVYAPKGRCIDWGIGQPLPSWGEVKDLQLQAPCYQGMFHQSVACPGFIAAQAVSSLQIGGDSSDITSPSQGATVVNRMLGATNRLNLYREI

SEQ ID NO: 17191 - protein, 278 aa, Oryza sativa
  Clone ID: TF_OSC407812j.C1.p10.fg
MGQGKIEMKRIEDATRRQVTFSKRRAGFLKKANELAVLCDAQVGVVVFSDKGKLFDFCSPPVILMELFHRYEITTRNTRLQETNRDDEQMVMEITRLRNEIDQLEASLRRQTGEDLSSVSTVDELSQLQLQLESSLSKVHARKDELMSQQLEDMRRMVHYSLIVVAVVVFADECIRPCMSRTISCAAWGELQLWSSLPVGEQQMSENWHSENWQSPGSGEASAMEALTMLPPAAAATTAAEAFNCFFPEEEKGVAASSTLLQLWPQPHDGDQPDLRLW

SEQ ID NO: 17192 - protein, 235 aa, Oryza sativa
  unsure (1)..(235): unsure at all Xaa locations
  Clone ID: TF_OSC400881j.C1.p2.np
MGRGKIEIKRIDNATSRQVTFSKRRSGLFKKARELSILCDAEVGLLVFSSTSRLYDFASSSMKSIIERYNETKEDPHQTMNASSEAKLWQQEAASLRQQLHNLQEYHRQLLGQQLSGLDVEDLQNLESKLEMSLKNIRLRKDNVMMDQIQELSRKGSLIHQENMELHKKVSLVHQENINLQKKVAVPTAXNKLDYGVSSSWEAYDMKEDNITLHSNIEPPRQGSTKLQWLPSTXH

SEQ ID NO: 17193 - protein, 201 aa, Oryza sativa
  Clone ID: TF_OSC400524j.C1.p33.fg
MSFTGTQDKCTACDKTVHFIDLLTADGVPYHKTCFKCSHCKGILSMCSYSSMDGVLYCKTHFEQLFKETGSFSKKFAPGCRSTDKELARAPSKICSAFSGTQDKCAACQKTVYPLEKLTLEGESYHKSCFKCSHGGCILTTSSYAALNGVLYCKIHFGQLFMEKGSYNHMKKKSESQEVLPEVVPEEQPAPPPPDENREDN

SEQ ID NO: 17194 - protein, 496 aa, Oryza sativa
  Clone ID: TF_OSC27185j.C1.p2.fg
MKWLCAFLKGTKDGEANRRRPRVTAGEETTLWEEPVRPKKEEPPRHNNEEMDHALALALADDAKNTKERNHDKGENDEELARAIQDSLNMNPYQPYNPCAPSQTQARSRGYRVCGGCKHEIGHGHYLSCLGMYWHPQCFRCSSCRHPIREMEVFSGSDSLLYSVSQFTLLGTDPYHKLCYKELHHPKCDVCLQFIPTNRTGLIEYRAHPFWGQKYCPLHEHDRTPRCCSCEKMEPRNTKYMSLGDGRSLCMECLDSAIMDTGECQPLYHSIRDYYEGMNMKLDQQIPMLLVERQALNEAMEGESKGPHHMPETRGLCLSEEQTVTSILRRPRIGANRLLDMKTQPQKLTRRCEVTAILVLFGLPRLLTGSILAHELMHGWLRLKGYRNLKAEIEEGICQVMSYLWLESEILPSTSRYGQASTSYASSSSSSCRPPPSKKGGISHTEKKLGEFFLHQIANDTSSAYGDGFRAAYAAVNKYGLRQSLNHIRLTGGFPV

SEQ ID NO: 17195 - protein, 882 aa, Oryza sativa
  Clone ID: TF_OSC15565j.C1.p3.fg
MGDRPDMGAGVALRFSHNDWTLEEDSKALHFLQPDLVLFTGDYGNENVQLVKSISDLQLPKAAILGNHDCWHTYQFSEKKVDRVQLQLESLGEQHVGYKCLDFPTIKLSVVGGRPFSCGGNRIFRPKLLSKWLLSFLVASPGWFLIAYYFCCVVTCSEIELQWYGVNDMAESAKRIYDAATNAPKEHAVILLAHNGPTGLGSRMEDICGRDWVAGGGDHGDPDLEQAISDLQRETGVSIPLVVFGHMHKSLAYGRGLRKMIAFGANRTIYLNGAVVPRVNHAQSSRQPAISTSEKTGLEGLTGLMVPTSRAFTIVDLFEGAVEKISEVWVTVGDARTELEQELVLYKQPHKSVPSNIAIWSSMGWLTKFFRGSTHKISEGQYHSKPAEETIWNGPSNSAVVTMVYPLESTFGQLDLLLLATDLRQLVIDDVDCCDLDVPSEFDNEDIARAISLSLLEEEQRKAKAIEKDMHLEEDEQLARAIQESLNVESPPRARENGNANGGNMYQPLPFMFSSGFRTCAGCHSEIGHGRFLSCMGAVWHPECFRCHACNQPIYDYEFSMSGNHPYHKTCYKERFHPKCDVCKQFIPTNMNGLIEYRAHPFWLQKYCPSHEVDGTPRCCSCERMEPRESRYVLLDDGRKLCLECLDSAVMDTSECQPLYLEIQEFYEGLNMKVEQQVPLLLVERQALNEAMEGEKTGHHHLPETRGLCLSEEQTVSTILRRPRMAGNKVMEMITEPYRLTRRCEVTAILILYGLPRLLTGSILAHEMMHAWLRLKGYRTLSPDVEEGICQVLAHMWIESEIIAGSGSNGASTSSSSSASTSSKKGGRSQFERKLGDFFKHQIESDTSMAYGDGFRAGNRAVLQYGLKRTLEHIRLTGTFPF

SEQ ID NO: 17196 - protein, 624 aa, Oryza sativa
  Clone ID: TF_OSC900069j.C1.p4.fg
MPLRSGHGPWKCRRCRPNKRKGRLSLAAYLATCHSYHCSANIKHVGNDLLIGVGVHRGVLGWGEIKNRSCPWPVVRLSRARLVTLCLGSWCVVNRDYRELEFLVGVSGSLRGESGLSGRRGDRRRTEFLVCCRLKLWFSEVLETFSIGEKFVRFLSSGYRKFDPQITSSHGLGAYDESDNEDIDRAIALSLSEEQNKGKAVDIDYNLEEDEQLARALQESLNADSPPRQNIPVENVPSEPPRELPPILFASSGSRTCAGCKNPIGHGRFLSCMDSVWHPQCFRCFACNKPISEYEFAMHEDQPYHKSCYKDFFHPKCDVCKNFIPTNRNGLIEYRAHPFWMQKYCPSHEDDGTPRCCSCERMEPMDIKYITLDDGRKLCLECLNSSIMDTPECQQLYMDIQEFFEGLNMKVEQQVPILLVERQALNEALETEKNGHHLPETRGLCLSEEQIVRTILRRPIIGPGNRIIDMITAPYKLERRCEVTAILILYGLPRLQTGSILAHEMMHAYLRLKGFRSLSPQVEEGICQVLSHMWLESEIIFGSSIDISATSVASSSSSSSTPTTSKKGAKTEFEKKLGAFIKHQIETDSSEAYGDGFRAANRAVESYGLRSTLNHMKMTGSFPY

SEQ ID NO: 17197 - protein, 517 aa, Oryza sativa
  Clone ID: TF_OSC100716j.C1.p3.fg
MTFVSVKKYRSSGLKVVARSFPLQTYSVRIQKGTSGSRLGKCRYKDFRLPILENMGWLSKIFKGSVNRVSRGHYNGNTHEGHSAWHTKAYEHDSDHEDIDRAIALSLSEEDQRKGKAVDEVDIDHRLHEDEQLARALQESLNDEPPRQNVPVKDVHSESTPATFMPPYIFPSTGLRVCAGCKTPIGQGRFLSCMDSVWHPQCFRCFACDRPISEYEIPTNKDGHIEYRAHPFWMQKYCPAHETDRTPRCCSCERMEPKDSKYITLDDGRKLCLECLNTSIMDTDECQPLYIDIQEFYEGLNMKVEQQIPLLLVERQALNEAMEAEKTGHHLAETRGLCLSEEQIVRTILRRPVIGPGNKIVDMITGPYKLVRRCEVTAILILYGLPRLLTGSILAHEMMHAYLRLKGYQTLDPKVEEGICQVLAHMWLESEITSGSSSIIASIAASSSSSSSSSAPSSKKGVQTDFEKKLGEFFKHQIETDPSDVYGDGFRDGIKAVERYGLRKTLDHMKLTGVFPC

SEQ ID NO: 17198 - protein, 195 aa, Oryza sativa
  Clone ID: TF_OSC900047j.C1.p2.fg
MATSFQGTTTKCMACDKTVYLVDKLTADNRVYHKACFRCHHCKGTLKLANYNSFEGVLYCRPHFDQLFKRTGSLDKSFEGTPKVVKPEKTVENENAIKVSSAFAGTREKCVGCNKTVYPIERVTVNNTMYHKSCFKCCHGGCTISPSNYIAHEGKLYCKHHHIQLIKEKGNFSQLENDHEKASQSGSVEDEDSEY

SEQ ID NO: 17199 - protein, 224 aa, Oryza sativa
  Clone ID: TF_OSC400879j.C1.p19.fg
MTFSGTQDKCNACDKTVHFIDLLTADSIPYHKSCFRCSHCKGTLSMCSYSSMDGVLYCKTHFEQLFKETGTFKKNFPSGTKANSEQAKIPSKLSSVFCGTQDKCTACKKTVYPLEKMTMEGECYHRTCFKCAHGGCLLTNASYASHNGILYCQNHFWQLFKKSGSYDNLLKPASAAAENTVESEVAVAEPAKEDPETEEAAKEEEEEASPEQVAEAVVEDQEHS

SEQ ID NO: 17200 - protein, 196 aa, Oryza sativa
  Clone ID: TF_OSC27184j.C1.p1.fg
MFSGTQQKCKVCTKTVYPMDQLSTDGVVFHRSCFKCQHCKSTLSLGNYSSIEGVPYCKPHFEQLFKETGSYNKSFQSPAKPASEKLTPELTRSPSKAARMFSGTQEKCATCSKTAYPLEKVTVEGQAYHKSCFKCSHGGCAISPSNYAALEGILYCKHHFSQLFKEKGSYNHLIKCASVKRAEAQPAPPPAAADSS

SEQ ID NO: 17201 - protein, 206 aa, Oryza sativa
  Clone ID: TF_OSC401780j.C1.p2.fg
MSFTGTQDKCKACDKTVHFIDLLTADGVSYHKTCFKCSHCKGTLSMCNYSSMDGVLYCKTHFEQLFKETGSFSKKFSQGGKSSEKSDQGRAPSKLSSAFSGTQDKCAACQKTVYPLEKLTLEGESYHKSCFKCSHGGCILTTSFYAALNGILYCKIHFSQLFKEKGSYNHLIQTAQSKQKESEEAAPVAATEASEKEQEVPPQDAT

SEQ ID NO: 17202 - protein, 1801 aa, Oryza sativa
  Clone ID: TF_OSC423043j.C1.p3.fg
MAAAAWGGTTQKCDSCGRTVYPVEELAADGRVYHRPCFRCTHCKATLQFSNYSSVEGVLYCKPHYDQILKSTGSLEKSFEGTSKSAKAEKSNGNKGQPNRFSSMFVGTQDKCVVCNKTVYPLEKVNLNGSSYHKSCFRCTHGGCTLSPSNNVTHEGKLYCKTHHSQLFMVKGNFSNFEDSTPNAKVDIEKQPEHEDATKNPGGPGQGDGLTEKPLESELTPEKPSQDDIVAEKQSQSSVDVPKQSESSTTVQRSEEGERVTKGESNSHVVSKKPLESSVEKPFQSSAVNLQPSGSSAAVRKPWQRNLPTDKPLLSNTTTEKSTPSSAAIEESLPSNGVDAKQPESSTASTVVKRPWQRRVATENLPQSISPSDKPSSTSADDVKPSENSKLIRKPWQRAVAAEAQIQNSGPTEKSSLTNDTKPSESTTSIKRPWEHKVVNEKPLQNNIDTEKPLQNNTDTEKSSSSAIDVKLAETSTTPTVPQEHSGITEKPSQTSADDVKPSESTAAVVKKQWQRNIGFQKQPQSSVTDAKTPESRGMGKRLWQRNVPTEKQSQSGASVVTPSQVSVASTNPLQSSVVVKKPWQRSVSREKEPEKDISSNKPLQNRVLAEEAEKTNVTADNKSQIIQDKKNNGATTENSSQISESAKKLPLTANKSQADTSTEKLSESDILAVASSQITEPSKKPSENTAENEKPSQTDIATDELPLTQSVEAMSEPSPSDAAHQEISEREILTDKLPESTMAVEKLSQTATLTEKPSKEDAAEKLPQTNEPSEQPHESEETAEKPLQNEANAESTTKQSDLSLEKPPQVDANVGNPTEPESDATSGVNSSDAQIRPTAEQLVGPQGIVSAEKTSDQILEANTDPAADQSSESQDVAPAKVATEQPLENQKAAASEQPLEPQHEAYEENPQEHNSDATAKESSEPERDTASDQLAEQPSESRTAGEKATLRESDVVTEDPAEPQIDAAAERSAEVLSESQTGVETPVLHQSDRTNEVPSEPQTDEASDKSTEQPLEPENDASVEDEKPPEIESDDVHDKPSESTPDTETLPHNTPKSSISISEAADGNVSEEAPPQSSASIETPSESAIAVEEPKHDDEASIKPSEDSSALEEPPQDDSASVEPSENTITLEKASEEDEGSVKPSEGNDALEKTLEEDEASAKLPEDSTTFEKPSEKDDAGTKQTEDPVTLEKEPEEDKGSVEPTQDNAGLEKPLEEDEASAKPSEDSVVLDKPSVEDDDSAKPSEDSMDLEKPEAHKPSEEEDGATKSSPEDAAVEEAPLQVSEEGRRREFSMAPKRKPPARAAAAKLDPDGMFRGVSAFVVPHAVQSRRLEVAAPPSNPSQPPPTLSPVLRVSWLSSSVQVWKQRLAQMGGRVQEKLAAKGGGGAVTHVLAADAKALLRELDAAWLHRFRGSVVSFEWLEECLKSGERLPEHKFAINYEEEFKPKKEGGAAGSGSLFWRILNVCSPDLNRNITEIFGKLINIYRALGDDRRSFSYYKAIPVIEKLPFKIESADQVKDLPAIGKSLKDHINEIVNTGKLSKLEHFENDEKVRTVSLFGEVWGVGPATALKLYDKGHRTLDDLQKDDSLTSAQRIGLKFFDDIKQRIPRHEVSEMEKLLQEVGTDILPGVIIVCGGSYRRGKSSCGDMDIIITHPDGESHVGFLPKFVQRLKGINFLREDLIFSIHSIEGTDCGVDTYFGLCTYPGRELRHRIDLKKVYPRNRHAFGLLAWTGNDVLNRRLRILADSKGYILDDTGLYLATPGSGGKRGGRSDAIINCDTEKDVFDTLGFPWLEPHERNL

SEQ ID NO: 17203 - protein, 1873 aa, Oryza sativa
  Clone ID: TF_OSC423046j.C1.p3.fg
MAAAAWGGTTQKCDSCGRTVYPVEELAADGRVYHRPCFRCTHCKATLQFSNYSSVEGVLYCKPHYDQILKSTGSLEKSFEGTSKSAKAEKSNGNKGQPNRFSSMFVGTQDKCVVCNKTVYPLEKVNLNGSSYHKSCFRCTHGGCTLSPSNNVTHEGKLYCKTHHSQLFMVKGNFSNFEDSTPNAKVDIEKQPEHEDATKNPGGPGQGDGLTEKPLESELTPEKPSQDDIVAEKQSQSSVDVPKQSESSTTVQRSEEGERVTKGESNSHVVSKKPLESSVEKPFQSSAVNLQPSGSSAAVRKPWQRNLPTDKPLLSNTTTEKSTPSSAAIEESLPSNGVDAKQPESSTASTVVKRPWQRRVATENLPQSISPSDKPSSTSADDVKPSENSKLIRKPWQRAVAAEAQIQNSGPTEKSSLTNDTKPSESTTSIKRPWEHKVVNEKPLQNNIDTEKPLQNNTDTEKSSSSAIDVKLAETSTTPTVPQEHSGITEKPSQTSADDVKPSESTAAVVKKQWQRNIGFQKQPQSSVTDAKTPESRGMGKRLWQRNVPTEKQSQSGASVVTPSQVSVASTNPLQSSVVVKKPWQRSVSREKEPEKDISSNKPLQNRVLAEEAEKTNVTADNKSQIIQDKKNNGATTENSSQISESAKKLPLTANKSQADTSTEKLSESDILAVASSQITEPSKKPSENTAENEKPSQTDIATDELPLTQSVEAMSEPSPSDAAHQEISEREILTDKLPESTMAVEKLSQTATLTEKPSKEDAAEKLPQTNEPSEQPHESEETAEKPLQNEANAESTTKQSDLSLEKPPQVDANVGNPTEPESDATSGVNSSDAQIRPTAEQLVGPQGIVSAEKTSDQILEANTDPAADQSSESQDVAPAKVATEQPLENQKAAASEQPLEPQHEAYEENPQEHNSDATAKESSEPERDTASDQLAEQPSESRTAGEKATLRESDVVTEDPAEPQIDAAAERSAEVLSESQTGVETPVLHQSDRTNEVPSEPQTDEASDKSTEQPLEPENDASVEDEKPPEIESDDVHDKPSESTPDTETLPHNTPKSSISISEAADGNVSEEAPPQSSASIETPSESAIAVEEPKHDDEASIKPSEDSSALEEPPQDDSASVEPSENTITLEKASEEDEGSVKPSEGNDALEKTLEEDEASAKLPEDSTTFEKPSEKDDAGTKQTEDPVTLEKEPEEDKGSVEPTQDNAGLEKPLEEDEASAKPSEDSVVLDKPSVEDDDSAKPSEDSMDLEKPEAHKPSEEEDGATKSSPEDAAVEEAPLQVSEEGRRREFSMAPKRKPPARAAAAKLDPDGMFRGVSAFVVPHAVQSRRLEVAAPPSNPSQPPPTLSPVLRVSWLSSSVQVWKQRLAQMGGRVQEKLAAKGGGGAVTHVLAADAKALLRELDAAWLHRFRGSVVSFEWLEECLKSGERLPEHKFAINYEEEFKPKKEGGAAGSGVLQSAKRSKISSDGPENRKETAGGNRESRDAIAHPNEDSDVVKGPSTCTSSQSASGDSKETIASQNAFKAEEASSGESSTYAPPDLNRNITEIFGKLINIYRALGDDRRSFSYYKAIPVIEKLPFKIESADQVKDLPAIGKSLKDHINEIVNTGKLSKLEHFENDEKVRTVSLFGEVWGVGPATALKLYDKGHRTLDDLQKDDSLTSAQRIGLKFFDDIKQRIPRHEVSEMEKLLQEVGTDILPGVIIVCGGSYRRGKSSCGDMDIIITHPDGESHVGFLPKFVQRLKGINFLREDLIFSIHSIEGTDCGVDTYFGLCTYPGRELRHRIDLKKVYPRNRHAFGLLAWTGNDVLNRRLRILADSKGYILDDTGLYLATPGSGGKRGGRSDAIINCDTEKDVFDTLGFPWLEPHERNL

SEQ ID NO: 17204 - protein, 423 aa, Oryza sativa
  Clone ID: TF_OSC34548j.C1.p5.fg
MLRAVRPAPSAAAGPAAPPGDGEARACYGIVVACVSLLLLCALVSAVGVARAFAATGVLVLLLGLAGWLAPTDAFAVALAPELYAGNAGGGGGSARAAPAVRLQVRRCASCGLAAQAIDALPAFAYEPPAADVEDGGEGKPRGGGALCAVCLEDVVAGETVRRLPSCGHLFHVDCIDMWLHAHRTCPLCRRDLSPEKVTAKSSAAAATVSSTDVLPPHFVGIWHEINQFKSSEKSLVGMPEAAAAEEEGGDGCSTRLGCYGFMAVNVLMGLYCSIAYAVSATVAGAVAVAVALLLLALAGRLAQTTGGGSAAAAASGRRRRLLSCPCACGLMAPGAGGIGVLPAFAYEPGGGGGGVLCAVCLEDLRGGEMVRRLPACGHLFHEDCVDVWLRVRRTCPLCRRVLPPRKSVAAAAAASAAVLPPV

SEQ ID NO: 17205 - protein, 206 aa, Oryza sativa
  Clone ID: TF_OSC15905j.C1.p2.fg
MSFTGTQDKCKACDKTVHFIDLLTADGVSYHKTCFKCSHCKGTLSMCNYSSMDGVLYCKTHFEQLFKETGSFSKKFSQGGKSSEKSDQGRAPSKLSSAFSGTQDKCAACQKTVYPLEKLTLEGESYHKSCFKCSHGGCILTTSSYAALNGILYCKIHFSQLFKEKGSYNHLIQTAQSKQKESEEAAPVAATEASEKEQEVPPQDAT

SEQ ID NO: 17206 - protein, 110 aa, Oryza sativa
  Clone ID: TF_OSC17444j.C1.p1.hg
MHLDASYFSLAPDLLDLVQMILRALKELPDPIISSRRAIAKYISDNFSGLPSHTTRSSPFTSAASGHRAFSSCLDTRTFSPPPPPPLEDGDEDDRPRKLPPPRRLKSADP

SEQ ID NO: 17207 - protein, 293 aa, Oryza sativa
  Clone ID: TF_OSC419704j.C1.p6.fg
MATDVAATEPEVAAEEAAAAAPETTATAGDSKPAKEAKAKKAAAPRKARSTATHPPYAEMISEAIATLKERTGSSQYAIGKFLEDKHKDHLPSNFRKQLLVQIKKLVAAGKLTKVKNSYKLPPTRAPAAAKPKAKPAAAAKPKPKPKAAAKPKAAAKPKAKAPAKSKAAAKPKAAAKPAAKPKAAAKPKSPAKPAAKPKAAPKAKAKPAAKPKAKAAPKPKAAAVTKTKATSAPARRPAKAAKTSAKDTPSKKAAPAAKKPAAAAKKAPAKKAAPAKKAAAPARKVPARKAKK

SEQ ID NO: 17208 - protein, 471 aa, Oryza sativa
  Clone ID: TF_OSC400493j.C1.p13.fg
MAAADEASKPPPLPPYPEMILAAIEGLNEKSGSNKSAISKFIEGKYGDLPPAHASLLTAHLARMKESGELIFLKNNYFRADAPDAPPKRGRGRPPKPRDPNAPPPPPKPSSPRPRGRPPKSKDPISDAIPKSRGRPPKKAKTAPAPPPAAGDGSAPVKRGRGRPPKLVWPLMVATGVLVSGGGGSWYLCASWTANRRHGGQIIPEQEPQSKIEFPDLDGLGGGGGGASGSGCRHPARVRVCVGGGDGVCVAPGTSVVVVEVATVSALSSALRRLSSPFAVPELAVALFPSVAPMLAVAPAGVGMCAMIGASSSVGGSGWLVVIYILLQAEAFGSLVIGCLFCSKSYGSMLQVALSLAISGLKARQKSIGSLSKAPLLLVGWSTFWPSLLIPSSRSRTWFVIRVELGPPVQFRLSGLLEFLRFNDESYGDVLLSPVTLTPKIYGSTTNLDLVPFPWRQPKGINGLSSGVHFN

SEQ ID NO: 17209 - protein, 306 aa, Oryza sativa
  Clone ID: TF_OSC400044j.C1.p34.np
MGAPKQKWTSEEEEALRRGVLKHGPGKWRTIQKDPEFSPVLSSRSNIDLKDKWRNLSFSASGLGSRDKLKVPRIKGPSSSTSPSSQTPLLVLPPNKVAEASPSADPEKSSQDVKIPKYSSMVIEALCEIGDPNGSDVDAICHYIEQRHEVQANFRRLLTAKLRRLIAAKKIEKIDRSYRITESYAAKVSQANKSPSPKKDPAKPLKASQNLGSFAGTSPALEAAAAAAMKVADAEAKSHLANEHMTEAERIFKLAEETESLVTLATEIYERCSRGEILTIMQVAQSNFEFQSVSGNGSGTGSTVLA

SEQ ID NO: 17210 - protein, 297 aa, Oryza sativa
  Clone ID: TF_OSC400039j.C1.p45.fg
MGAPKQRWTAEEEAALKAGVAKHGTGKWRTILRDPEFTALLRLRSNVDLKDKWRNLSVTAGGYGSRERARVALKGGKRGPKALAEPMDADEKNPDIDDNAIIDAQPLAVVVEPMQLESTPEKEKSVARLDDLILEAIKKLKEPSGSNRTTISSYIEEQYWPPEDFQRLLSTKLKALVATGKLIKVNQKYRIAPSSNSSGGKSIKVYSTGEMNIENNNVRQLSKPQVDAELDKMKSMSKEEAASFAARAVAEAEAAIAEAEEAARAAEAAEAEADAAKAFLDAVVTTMQNRNHASAVY

SEQ ID NO: 17211 - protein, 947 aa, Oryza sativa
  Clone ID: TF_OSC417639j.C1.p19.gm
MWGRVCGGARLSVAVWVLTVRLGVEASGRGRRKKWTAEEESALKAGIAKHGAGKWRTILKDPDFSNVLRYRSNVDLKDKWRNMNVTVNASGARDRVKAPVVKKPRSAPKHEGHSTSTAIAAVTSDGDDDVAEPVPLATSTSSKRSLSRLDNIIVEAVRSLNEPTGSYKTAIANYIEEQYWPPADFDHVLSSKLNDLTASGKLIKVNRKYRIAPSSSLSEGRSSKVVLLEDIKKEPTKLDREDVAVLTKSQIDAELARMRTMTAEEAAAAAARAVAEAEAIMAEAEAAVREAEAAEADAVAAQAFAEAAMATFKNRSSAKLDGFHEAKLQAGCIHKARASMFPLLSKSAILGRLIEENSDSDECVIILSDIPGGAKSFELVARFCYGLKIELSSENVVYLRCAAEHLEMTEETSGDNLINQTESFFNQVVLRSWKDSLEALRTCDGLLPHAEDLHIVKRCIESLAGKASIDPDLFGWPVSEHSTMQSPGGSVLWNGISTGAKVRNCSSDWWYDDASSLSFPTYKRLISSMESRGIKQEIIAGSLTYYAKKFLPGLNRRQSTGPMPLPAATLSDEEQRRLLEEIDRMLPLQRGLISTNVLLWLLRTAMILKVDRACISNLEKRVGMQLDEATLEDLLLPNFSYTMDTLYNVECVHRILDHFLAMDQTMGGGGASPCLDDVMASPSLAPITAVAKLIDGYLAEIAPDINLKPLKFQSLAAVLPEYARPLDDGLYRAIDVYLKSHPTLPEAEREQLCRLIDCQKLSLEACTHAAQNERLPLRVVVQVLFFEQLQLRTSVAGCLLVSDNLEASSRTLRGGGAVAASGEAGCWATAAVRENQALRVGMDSMRLRLMELERECSDMRQDIRKLGRGRRRLRGGGGIVAGGKDGGGWAARVQRMLTPRMMKLQMCSAQHDAAEQQRMNNEHKKVEKVAKNKKQLSMDDGDDEEEA

SEQ ID NO: 17212 - protein, 188 aa, Oryza sativa
  Clone ID: TF_OSC400798j.C1.p19.fg
MAKPASRAAKPASAPKKQKAKPSAAAGGSSHPPYFEMIKEAITVLKERTGSSAHAIAKYMEEKHGASLPANYKKMLSIQLRGFASKGKLVKVKASYKLSDAAKDSPKAKPAAPAPKAAAPKPAKDAAKPKKDAAAAKPKKAPAAGTKRKAPEKKVVAKPKKSPAAKAKAKPKTVRSPAAKKTRKAPAA

SEQ ID NO: 17213 - protein, 182 aa, Oryza sativa
  Clone ID: TF_OSC900103j.C1.p6.fg
MAAAEADPKPAATPSYPEMILAAIEALDDRNGSNKTAISQHIEGKYEGLLPPAHPSLLTAHLARMKKNGELAFSKNNYFRGDDPSLPPHRGRGQAPQAQGCSPAAPARMGARLPRRGGSLAPPPAGRFATPLGPLPPTAAGKGSSASAPAHMTAPPPRARGDQSTPPFRVPQRAFMFPPAAS

SEQ ID NO: 17214 - protein, 608 aa, Oryza sativa
  Clone ID: TF_OSC26017j.C1.p2.fg
MQHGRRGGWRKGEAAAAGERGGGLVLPDHTLRHGERMAQAADRAGDQRQAVVDAALTRGWAGRAVVVGGGATEDRERRRWLSQGSAGGGVAASSGVAVNITTGPMTETEDDMAVAEEEEVVAASAETEEHVQRILLAIDAFTRQDPQGEERVERWEDEIRELRARDVANEQARSLRRHRSRLPTSHRSSPPMPHRSRPPTPPLRNRARPPPSPLRLLWPPFWCGDGARLKRCPLGRPAPSPPAGLPSRQKIREEPQPQPPFSSQIRVAAAPNPTRAQRSTNAGRRQRPSPPPPQPYEREGASQPASQAWPPPLPLATAPPTSSSPPTPRHALFLNPSCSWPDAQICGGIDRVSWVVFSFSLLQMIVEAIASLAEENGSSQAAIARRIEAARGGGGLLPPSHPALVAAHLSRMSAAGELVAVAGGKYALRPTPPPPPPADPAAAAAVAEEEEEEEEFLADDDSADDLPPPPPPKRGRGRPPKVRPPGYPAVPAAAAPVPVPVGAPVDGSVAAAAPAVPRRRGRPPKPRDPHAPPKIPRPRGRPRKNPLPEGMVPPPPTRPGATAKPRPQFAEWLISSKNCKGLTASLLFAVVPAAKLMMVNAHCLQLDP

SEQ ID NO: 17215 - protein, 511 aa, Oryza sativa
  Clone ID: TF_OSC400747j.C1.p13.gm
MAASGMKLAVAVACALALASACHGLQLGYYKQSCPRVEAIVRDEVKKFVYKDAGIGAGLIRLVFHDCFVEGCDGSVLLDPTPANPKPEKLSPPNMPSLRGFEVIDAAKDAVEKVCPGVVSCADIVAFAARDAAYFLSRFRVKINVPGGRLDGRRSLDSDALNNLPPPNFNVNQLIGAFAAKGLDAEDMVVLSGAHTVGRSHCSSFVSDRVAAPSDINGGFANFLKQRCPANPTSSNDPTVNQDAVTPNAFDNQYYKNVVAHKVLFASDAALLTSPATAKMVSDNANIPGWWEDKFAKAFVKMASVGVKTGYPGEIRRHCRQPATEKKIDVIIVAMALQGMEQEAAGQPPASAAFPSSAEAAAAAASPTSGGKRIVLRIRIPPAWMPEEDACLARLAAENGFRHWRRVAEGMAAARSGRRPRRSPGQCRDRWRDHLARDVYHRPFTADDDAELARLLLKRDGDGERSWKDISRAAYCRTSRGMRRRWGELRDSDAFLRKLWCPPPPPMQPSC

SEQ ID NO: 17216 - protein, 345 aa, Oryza sativa
  Clone ID: TF_OSC403480j.C1.p2.fg
MVSANQPPPDAAAAAAGSAGEDASKKVRKPYTITKSRESWTEQEHDKFLEALQLNHNYYEMLPTYWSPYLHMIANNVFWRTKNTAFVAVEFKYLYKSFDRDWKKIEAFVGSKTVIQIRSHAQKYFLKVQKNGTSEHVPPPRPKRKAAHPYPQKASKNEPGYTIKADSSSMLRELRHECHCFVMDTQFYPTNCSLIHGERFVVRVMPDFAQVYSFLGSVFDPSTSGHLQKLKEMNPIDVETALLLMRNLSINLTSPDFEDQKKLLSSYSTPSDGLELGSTRSSVLADRPLSAPFIMCKGATVYSRLAQLVMAFSFLSSGREGTTAPSDPWHSQKQNAPSVHLMRYV

SEQ ID NO: 17217 - protein, 113 aa, Oryza sativa
  Clone ID: TF_OSC401124j.C1.p47.gm
MEKIMGENEIRTRSPVSRRDMASSSKASSSSSASAASSEWTKQQNKQFERALAVYDTDAPDRWHNVARYMGGAKSAEEVRRHYERLQADVEQIEAGGVPFSLGYGATPQAGRR

SEQ ID NO: 17218 - protein, 421 aa, Oryza sativa
  Clone ID: TF_OSC404834j.C1.p14.fg
MTPADAFLILDFLAGNRLIPHSVFTTLLASLPSVSPHTSPRLRAGLALRALDSALSISESSEMDAPTLLRKARAVLADPDLAPFFPQHLAAPASADDAPAAAVAHLNRLLDVEWASLPPSSLEIAAERIVGSQALHSWANADHAQRSKLRLLAEKYSTSLYQFYSPLAVSAVGESTALEILDTLQRPDASTNHPGTLPQVDNAPETNGASHCAQQNDGAKSGLVKQNAEADRPQQDSTRHQQDSVQGASNSQLKESSVTMESIRGTGPDITGFMEEATPRVAGQFAPDNIKNHQVTGSKRSLMERNPTASTYEGEHLCNIMVVSHRIFEVQWDGSDSEGKRPAAKRRLPIFERTAKPSPTAAHKTRKKWSEKQEKTLLEGVEKYGKGNWKDIKMAYPDVFEDRSTVDLKDKFRNLERHLCA

SEQ ID NO: 17219 - protein, 298 aa, Oryza sativa
  Clone ID: TF_OSC400903j.C1.p89.fg
MEWTAAELAEARSVIARVSDAYNSGVGSSSSACDTKHDRIMRELQARFPSRTMVQVIDLYVNLTVETAAQPQDAGSAGDAAAVVHPTFAGGMPVVNNNDGMVHGGAAMEVGAVAVNGGDGEVVNPDNADDDVLWTDYEHRLFLTGMRVYGRGDWRNISRYFVRSKTPEQISMYADNYFHMMEIAAAMEADGGDDDDGHHEINNNNNNLGGGQLHAVVGAVGHGPGAGHIAPATPSNNNTAAAAVNNNVDTPFWVPLLYNPEIEQRMMEMQAQSQKAWDDQQMKMAEAATPKEEGAADK

SEQ ID NO: 17220 - protein, 218 aa, Oryza sativa
  Clone ID: TF_OSC404185j.C1.p1.fg
MQAKPLGGCLDQTGTFRGNRLSTSQFGDMDDEYNEQDNWDNDRTENHVVENTTKLNYHSYMNRQTRAKWSKSETDKFYEGLQQFGSDFAMIQHLFPDKSRNQVRQKFKAEEKKHPMQVHDAIMHRSRDNLYFKEVIKKLNIEDVQPDINNTHEQEGTSNEEDPGNKNIPGGLINEEEENGLDWSDKELDMHRSEVEEKEHVSTNDDDDDDLGDVFDWY

SEQ ID NO: 17221 - protein, 60 aa, Oryza sativa
  Clone ID: TF_OSC10045j.C1.p14.gm
MQQIAARLPGRSDNEIKNFWNVRLRKGKKLRQTSSSLSMAAAATRHRLSEADRSRLSRRG

SEQ ID NO: 17222 - protein, 128 aa, Oryza sativa
  Clone ID: TF_OSC5376j.C1.p1.fg
MLASYIQEHGAGNWRAVPTNTGVMRCSKSCPLRWTNYLQPGIKRGNFTEQEEKLIVHLQALLGNRRDHMEVISPMKDGTFIDWDIVDNIWNHAFSFYAEEHPMLIVEPSTNTGQQREKYLLTLKIMKA

SEQ ID NO: 17223 - protein, 944 aa, Oryza sativa
  Clone ID: TF_OSC102271j.C1.p7.gm
MAHVPVTQRHTRGVGIQSGVGGWWSPPASPRGLRVVNSPEAEIGRQEAAQKGEHLARTTPPPPPPLRSLPLSPWPPRPRHEVAATATATPLLSSTLPRGAVSSSVPMLPRCLVAVAVLLLVASHAARGEERRRLLLARQDVLALHGLRGSIGVRAEYWPVKRYPCSWTGVVCRAGRVAELRLTGLRRTRAGARSQGFTVDPLRELTALEVFNASGFPLPGRIPAWFGTGLPASLEVLDLRSTSVNSTLPADLGMSGNLTTLDLAGNSISGSIPATLFLIKGLKFLDLSDNNLTGELPNVSISAGDGTGVFNASGNSLYGAIGDVLGPLRKRFRQVDLSRNYFTEVIGTGFGNSSDGAVDINMNCLSGSSQRSQGDCEAFYKRIGVSLPEPPNALPSPSKKGVKWKYVLAGVLAAAAFLVVLFLVALVFCLMKSGGRRPRGRGLEQNEEGIRSGRRSSSVNPVMLSSMAASPAANGAVKGLPTIVDEFTYEQLHNVTGGFGDDNLVKHGHSGAIYLGELESGFNVVVKKVDLKSSNKNLGELGFLAKNSHGRIVPLLGHLATDEEELLVYKYMAKGDLTSALHRKSVDAEEGLRSLDWITRLKIAIGVAEALCFLHDECSPPLVHRSLDKNASDPSLVVDEDHLEEVWAVSIVAKTCLNPKPSRRPLARYILKALENPLRVVREELQSNSSLTSTSSRSSWHFAFHGDSRRSSELRPTLGQSARKQSVKSQGSDEDEDEEEDSFSFKRASREILPDPGLQLTTSAAAAMGHSNVWNSHPKNYGPGSRVCRVCGNPHGLIRKYGLMCCRQCFRSNAKDIGFIKPPRAGLDPEATPPASIASRFESKDQEKLGVQLSSMPQVRPASAEKPTRQWAAWTRQEEQSFFNALRLEGKNFEKITLRVQSKNKDQVRHYYYRLVRRMKKLLGPEFSLDAKNSKDTVAAMLRW

SEQ ID NO: 17224 - protein, 109 aa, Oryza sativa
  Clone ID: TF_OSC412948j.C1.p9.fg
MSSSWTTKQNKLFERALATYDKDTPGRWQNVARAVGGGKTAEEVKRHYDKLLQDLHHIESAGRQGSQYGGSSSSKSKGGSSSGEQRYRNRDWKQQPGLHSGAVKRASQY

SEQ ID NO: 17225 - protein, 38 aa, Oryza sativa
  unsure (1)..(38): unsure at all Xaa locations
  Clone ID: TF_OSC400524j.C1.p37.gp
SCRLRWINYLRPGLKHGMFSREEEETVMNLHATMGNKX

SEQ ID NO: 17226 - protein, 87 aa, Oryza sativa
  Clone ID: TF_OSC400935j.C1.p12.gm
MSSRSSSSSRNSNSVNMDSEWSKKENKLFEEALAYYGEGAPDLFHKVSRAMGGTKTADEVRRHYEILEDDLKLIEARRVPFPKGGSI

SEQ ID NO: 17227 - protein, 360 aa, Oryza sativa
  Clone ID: TF_OSC401559j.C1.p1.fg
MDAKDILGLPKTAFPSVQEKKPRAPKEPQRKPDGVSREVYALTGGVGMAPLMPTIEASHLKRRPAVEKEKIAWQWLPFTSSARTDNLQLYHWVRVVNGAPPTGDYHFAKYNKKADVLKYTDEEYEKYLTDPAWSREETDKLFELCERFDLRFIVIVDRFPTDRSMEDLKSRYYSVTRALLIARARSFDEVAGNPLVKETFNAAHETERKRALSALLSQTKQQERKDAEILAEAKRIMETRAASKHTEEAGALAHFDNVDGVSPLSNTHPLSTATLPAAAVNNSIPASLRMVNLKPKVPTKAVCVEHLELRNEILTLLNLQKQLQNKEAEVSANRENSFTEAPSTPKDSAKQWQLKLTFNT

SEQ ID NO: 17228 - protein, 427 aa, Oryza sativa
  Clone ID: TF_OSC411335j.C1.p19.fg
MDAKDILGLPKTAFPSVQEKKPRAPKEPQRKPDGVSREVYALTGGVGMAPLMPTIEASHLKRRPAVEKEKIAWQWLPFTSSARTDNLQLYHWVRVVNGAPPTGDYHFAKYNKKADVLKYTDEEYEKYLTDPAWSREETDKLFELCERFDLRFIVIVDRFPTDRSMEDLKSRYYSVTRALLIARARSFDEVAGNPLVKETFNAAHETERKRALSALLSQTKQQERKDAEILAEAKRIMETRAASKHTEEAGALAHFDNVDGVSPLSNTHPLSTATLPAAAVNNSIPASLRMVNLKPKVPTKAVCVEHLELRNEILTLLNLQKQLQNKEAEVSANRENSFTEAPSTPKRANRDVDRPFVPDTVGFAGERAGKRDHKRKIVLWINSILAWKLPGVHFHQEFAPVGRSRSWLLSVQCICPEKVFFVLLVGR

SEQ ID NO: 17229 - protein, 1272 aa, Oryza sativa
  Clone ID: TF_OSC900117j.C1.p6.fg
MEAVASYCLDVCGFAQSRMIYLAPPEESFCSRSRVNRPAHPARVYVPRNPQFRALVVCWRSRTHLALRAVRIGLFVNCVCGGNLCATECVLPWKVRNVNKRYAKINEDWQDKDATNVHKSKVRKKKLSDMLGSQWSKDELERFYGSYRKYGKDWRKVASSIRDRTSEMVEALYNMNKAYLSLPEGTATAAGLIAMMTDHYNILDGSNSDHESNGSPKTSRKPRKRGRAKFQSVSKASDTQHPDQLQSQPASSSYGCLSLLKKKRSGGNKPRAVGKRTPRVPVASMYQRDEKIGPTNRQAKPDGNGDDEGAHVAALALAEVFQRGGSPQDSQTPGRSGDRMFLSPVKSTDRKNADSEMGSSKLHGFQVDADFPEGSLGSREAETGDYPKYASYLMNNEGSASGKSQQKVKRTQRRRKKAARKTDDQLEDDREACSGTEEGHSAKKTKDESEVNGLGRKGRWPSKKSNKRNRQLFFGDESSALDALHTLADLSVNILQPSSIVESESSAQIKDENKDNDSDEKPSMPAAVSVLEKKDKSKSTVKKVKRQSELASADMAARKKARIAKVPNRDGIAISETKQLDSKFGVQTEKKKRKPSAAKISKDEKSALKDVEKTEWMEISDLDNVSAEEGKVSSNKAMDTVDTTQGATTQQADLASKGRSRRKIGILKALAPECRPTDGADDLRSDKFSYAVNNVIDLKDSLSHCLSSRLLRRWCTFEWFYSAIDFPWFEKSEFVEYLNHVKLGHVPRLTRVEWGVIRSSLGKPRRLSKQFLQEEREKLAQYRESVRQHYAELRSGVREGLPTDLARPLGVGQRVIACHPRTRELHDGNVLNVDHNRCRVQFDRPELGVEFVMDIDCMPLHPLENFPESLRRQNIVNKYYNSFSEAKFEDRSKELGTGGPTRFTSNVCFDGGDATSNIPSNYPINTLMKQAKGDTVDSIAQAKVAVNEVAVAAQQSMYSQPCTLSQIQEREADIRALAELSRALDKKASLKGLVLMFSVEALLVELRHMNEEVYGRQKDGEAFRDFEHFRKQYAMVLVQLRDSNDHVASALLSLRQRNTYHGHPAQSYPKPMENGALTGTPDLYNLFGYINQESGSQVMEVIETSRSRAKLMVDVAIQAMCSVSEGEDAYAKVGEALDNLNNRSTGSGSSILGIRRIPPDSGQANSSHQDNTTSGHFDPATNNISSPRLPNGCDSEPQFPSELISSCVATILMIQNCTEKQYHPAEVAHILDSALSRLQPCSSQNVTIFREIEMCMGIIKNQMLALIPTPSG

SEQ ID NO: 17230 - protein, 873 aa, Oryza sativa
  Clone ID: TF_OSC400431j.C1.p41.fg
MGPAKGSRTITKITIKGYDDRQHDEDPNSSSKVKLKKRKMSDLGPQWSKDELMRFYEAYRRHGKNWKKVSASVGGKSADTVEALYSVHRTFLSLPEREGTAMGFVALVTGHHNVSDESKSHKGSDQTVRASGKVRKREATGQKEKEAPHAHRSYHERRTSGLSSFKKRYYGELVKNIPRHPSGKRTPRVPVIFPADMNVAHAGIPETENAINCTKKASGATNNELECSSHGSPGISESAKFVQGQTFLEAKGTGSLKKRRIEQSMEQGQTIKDEHKTAMVAKEGNDLTEYQRLTNLFSPDEMLVLDVLESLVTVPSKISEPKINIPSGTLGRDDSALSHRREEGPSVKRSKQGKQVGECSASKTRNKRRKKLIAEEVPTEGVTSNHLDLPEERQVDATECALNSDLERGTVDLPESTANISTKIPDLPSQLKPEINMSRRSKRKSKSPCGSKYVVCNGADNLQARRLQHCLSSESLRRWCTYEWFYSAVDYPWFMDNEFVNYLNFANLSHLSRLTRSEWSTIRSSLGKPRRFSDHFLAAEKDKLENYRKKVRQYYALLSEDSWDSLPPDLARPFSIGQQDRYNVQFDRPDLGVDEVKDTDCMPVNWLDNLPDDLKKRSFLSNNSHNRVEVEQIPKFTSKENWDHISGEAEPSKTMHITSDEQVEVLLSKSIFKKHYDHSLSIHGQVEIAVDIERLSNKSTSGNCGPLQPLQSVDDNVRSRGLSEHRNGHNDELDSYITSFVQMSLAQAKQMVDEAMKEISENGKSSLEETGISNEATDCTGPEPESAANSELPRNLIFNCIATLLAIKHFSEGRHPPPNIAGVLERACLMLRPSCAENLPIYNEIENFIAVIKNQILALVPSASSNARLPMYM

SEQ ID NO: 17231 - protein, 478 aa, Oryza sativa
  Clone ID: TF_OSC421143j.C1.p4.fg
MASRAVEGEGEGEEEGEGKGNLEDESLIQMINIYGHNNWETVARAIPGRNAQQCRVREHASNHFKRLSELKLLKSRTSRTSAAIKEHWRGPMKRKLNSYLASGLLKKSPGLPENLSVSQSSDSNILQQCDVSSDENKLLSDLRPSLKSKEGVSSKCDGSSSDNQLLSDLRASLKSKGASSKCDGSSGDNQLLSDLRASLKSKGASSKCDGSSGDNQLLSDLRASLKSKGASSKCDGSSDENKLLSDLRACLKSKQGASSKCDGSSGENQLLSDLQASLMSKQRTSSKYKQGASSKYKQGASSKSKQGTSSKSKQGFIDLCENTDTSEGESSELICTERPDPDSGEASQRIRDRLNWRKRARKKLVFLSSPVELKVSAVAESERHLQESKEMSPEVNIVSPPAVLQGFSPEVPSVCEKIVEPPLADFNQAKNVCSLETSSDPCTLEQHLANVSDLLDMSYIDGLMIIPPSGCPYDGDFI

SEQ ID NO: 17232 - protein, 87 aa, Oryza sativa
  Clone ID: TF_OSC401872j.C1.p1.fg
MAASWSESENARFEQALATYDSDNPNRWELIATAVGGGKTADDVRRHYDHLQHDVTTIDDDHSHAAGEALPNGNNNNNTNKGNRNQA

SEQ ID NO: 17233 - protein, 341 aa, Oryza sativa
  Clone ID: TF_OSC21837j.C1.p42.fg
MGEGDAGQESYHAMSKSRPPDQYWMDGQDLCRKPAWKSATRAKSPPIDFEAHETEEEDRIIIAAHAIHGNKRACIAKLLDGRTDNAIKNHLEFYSEASILQRWSMQTWLLQGILNPGVQSASVPPEFKIFRIPLTRNGGGGGGDEAEGNGGGGGGWGAAATAVGSSGCGLVRTPDGTTKLLIWSTEMLYGTTTTTLLIVAFTSALRVKEELAGDELHLSVVIVPAIPALGSGCARSSVIHVISTDARERRRFGRMAISSARLPVEWIPSSERSPSLVSSTALSSSAFAFAAALHVLPPPLRPSLAVIAIGRTTIYEDAGRRRTLHLHHAAAPSPHLTPSLL

SEQ ID NO: 17234 - protein, 389 aa, Oryza sativa
  Clone ID: TF_OSC102044j.C1.p1.gm
MVEGRERERLSSFCRRNTGAALSDQLAGSGRSGDGGAWQRSSGWLLAERTAVASAPTGVDSLLLPPPWATGVSRLPVRTRLGWREDLVVDALAVVRRWMRLRSSSVLESGGAATEGERGGRRRSGDGGSGRGRERRSARWQRRERRKGGGRLDGELGGGDVRTRRVLDHSPDLKRGNFTDDDDELTIRLHALLGNKWNTRIKLKLLSQGIDPQKHQPVSARTSVAAASELTTTASTVSFPPLAPAPVRGSSRRKEGRLGGVFLVVVAGGRRVAACSPIAALPPRSPSASLPAVALALHCSARRRSAAALALRCATRILARTPPLHPPPRSPIAAPSPRSPSASLPAAALALHCSARLARARGRSAAALVLRCTTCIRARFSAYRRPPSL

SEQ ID NO: 17235 - protein, 702 aa, Oryza sativa
  Clone ID: TF_OSC101063j.C1.p16.fg
MDAAAAGGGGAAKRKRSFSEDDAYLILHRYQPATILTMLQEMGKQVGAGKGIDWRALVRRTSTGITSAREYQMLWRHLAYGHEFVESVEPASLPLDDGSDLECEIEIVPAPGNEALAEATSFAKTIITGSSREQTSGQRVNSEAAALNTPNEKIVRVPSDKQLVPGHRLTNGTGPVSSSKQPSHTGSSPDPLDPNGHPKKKKKPKPWSREEDMELGAGVQKHGEGNWMEILHKYKFDSSRTHLQLQQRWALICKRQGSTKPATPKIPNVMSEELKAAQKAFSLAIGTTRSSTLRPGGVPHHNPMVTTTNPEVKSVTAPSPLPVPVHVVPVPVPVQPVQVQLPPPQLHQAPAQSAPPPPKVSNASNKSRNNSKKQVAQSIPVNGPLSIQEAALAAGGRIAEPSVATNFLKAAQSTKAVHIRSRGTGSSKSSTGSKTPTVAGEPGTQLGSDQHLELQSTGGPSQVLTAHATEQVHNVSEVAGVNPLGQSAGVHLSETKKALNTTPVSGSSDKMEIDDNSNYFAVTMEDLFPEDVKQEDVQDPKIEEAIDPKDADMLEFDRFVAQGCLNKDNVDKSKAAKIAPEAQSVIGSQKKQLKTLPTVGKSNPVFAGPPATAKKTKAPVPQGGMSSGIVGVLNRSLGGKAPAPATTGTQSTVQKQQSMSSKGNLLVPKNVAPGTVTPANNRANTAVNGASKVNPPASQKPA

SEQ ID NO: 17236 - protein, 270 aa, Oryza sativa
  Clone ID: TF_OSC900320j.C1.p9.np
MHRSPFCTWPAAERGRWQREREREAIDATAAAGEEESLSLPKAMGLLRCRKSCCLHWMNYLSPDLKCSNFTDDNDELTIKLHALLGNKYLLRLALLVFLVLIDWFCRWNTKLHALLGNKYLLRLALLVFLVLIDWFCRWNTHIKRKLMSQGIDPQTHQPVSAGTSVAAASELTTTASTVGFPSRRHRRPRRRYASLISRALAPGGGRGRRRTRRRRRRPRGPARRRRSTGRRRPRAAAARRGGAGRAAARGSSWATPPRDGTRGSWRRTA

SEQ ID NO: 17237 - protein, 101 aa, Oryza sativa
  Clone ID: TF_OSC409191j.C1.p3.fg
MSSSWTTKQNKVFERALAIYDRDTPDRWQNVARAVGGGKSVDDVKRHYEKLIKDVDRIDSTGGHQGSHYNSSNASSSSSSSSSNSRGSANEDQRRRYHNFQ

SEQ ID NO: 17238 - protein, 111 aa, Oryza sativa
  Clone ID: TF_OSC413644j.C1.p7.fg
MASAAGSKQQQAMMSLPSSRGGGGGGWTQRQNKQFECALAVYDKETPDRWHNIARYMGGAKSADEVRRHFDHLVEDVSRIESGRVPFPRYSSSSSSRGADDGNRSRYLKYQ

SEQ ID NO: 17239 - protein, 519 aa, Oryza sativa
  Clone ID: TF_OSC33166j.C1.p2.fg
MADGSDGPDVSPAAAAAAGGGGGGEIWGTLEELLLACAVSRHGTGSWDSVAMEVQTRSPLAARPGLTPTSCRLRFRHLHRRFSVGGAAEEDDDDEEAEEGGPDASAADGWMDELRRLRVAELRREVERCDLSIGTLQTKVKRLREEREQSIHGGGGGEGKPETANGDERLSSEEPGRSCRESNSTDLKPAARAGDHSVKAEEEDEDAAAAKQQASGESVAASKESSDLRSSVRLRRRRSYKPGADEDADGEEASALRPPSQSPSSSSSSQPLAALLDTFAARFGPLLERLHESQESDAYRGAIRRHVDIEMAAAAAKKEESAEKGEAAEEGEGSDDGEKKVSVSASASKDKAWGLRTKKGRGPGKNSASVGGRKMAKLSEATEAATDGSKKPDKKIAADAATPAKKRNAVDFLKRLNQGSSPSKKKKKGSPMGTRKRAAAATSPEQPQKTRKGPGRKDAGRGGSKKGGKSATPKRSVGRPPSKRGAAAATTPPPSKRAKVNRSEKTAATATAAKRGGRR

SEQ ID NO: 17240 - protein, 647 aa, Oryza sativa
  Clone ID: TF_OSC33171j.C1.p5.fg
MADGSDGPDVSPAAAAAAGGGGGGEIWGTLEELLLACAVSRHGTGSWDSVAMEVQTRSPLAARPGLTPTSCRLRFRHLHRRFSVGGAAEEDDDDEEAEEGGPDASAADGWMDELRRLRVAELRREVERCDLSIGTLQTKVKRLREEREQSIHGGGGGEGKPETANGDERLSSEEPGRSCRESNSTDLKPAARAGDHSVKAEEEDEDAAAAKQQASGESVAASKESSDLRSSASLRRRRRYKPGADEDADGEEASALRPPSQSPSSSSSSQPLAALLDTFAARFGPLLERLHESQESDAYRGAIRRHVDIEMVRRRLDASPAGGGGGGAAAAEFYRDLLLLCANALVFFPRAGPERGAAAEARALVSASLRLREPKQEPGTAAAAAVAAAAGSPPAEDTRRAEGVVSVGGGGGGAGIVGSLIEKGGKPLIVCRKRSSIAKAAAAAKKEESAEKGEAAEEGEGSDDGEKKVSVSASASKDKAWGLRTKKGRGPGKNSASVGGRKMAKLSEATEAATDGSKKPDKKIAADAATPAKKRNAVDFLKRLNQGSSPSKKKKKGSPMGTRKRAAAATSPEQPQKTRKGPGRKDAGRGGSKKGGKSATPKRSVGRPPSKRGAAAATTPPPSKRAKVNRSEKTAATATAAKRGGRR

SEQ ID NO: 17241 - protein, 294 aa, Oryza sativa
  Clone ID: TF_OSC900351j.C1.p10.fg
MAPPNRPVVVPLLSLSLSRTPPPRRRLRLRTPTPCHRASTTRRALHTPPHQRTRLPPLSVAPSASPLLNPSIHVAAAPSLGRSLRFPPPHRSRSLSNRRRHSSHLFAAPRHASTAGAPIATLRYSAVLGIEAAVLVGTARDSTSSPIPPSSTGAPSLARCNYINANKCKLQRKQFPVRLSFALTINKAQSQTIPNAGVYLPEPVFSHVVNITFGGILARPIYTITDYDKGNLDAGMSQTDFIIMESAEIPGFGGTSWTDQETLLLLEALVILQAKWGDIAEHVDTKTKAQCMLH

SEQ ID NO: 17242 - protein, 254 aa, Oryza sativa
  Clone ID: TF_OSC3807j.C1.p1.fg
MDVAKLRAHRSWLRVRRWHQQVTTLPRPAIASIQGRGMAATTSPCLPRMTKHKQAPAAEEGDEKYPKLINSCRLPFTHMVIDVSYHLILICRLFLLGLEKYGKGDWRSISRNFVISRTPTQVASHAQKYFIRLNSMNRERRRSSIHDITSVNNGDTSAAQGPITGQPNGPSANPGKSSKQSLQPANAPPGVDAYGTTIGQPVGGPLVSAVGTPVTLPVPAAPHIAYGMHAPVPEAVVPGAPVNMPPMPYPMGIL

SEQ ID NO: 17243 - protein, 90 aa, Oryza sativa
  Clone ID: TF_OSC413644j.C1.p6.fg
MAQQARAQWPQKQNKLFEQALAVYDKETPDRWHNIARAVGGGKSAEDVKRYYEMLEEDIKHIESGKVPFPAYRCPAAAGYQAERLKHLKI

SEQ ID NO: 17244 - protein, 800 aa, Oryza sativa
  unsure (1)..(800): unsure at all Xaa locations
  Clone ID: TF_OSC900286j.C1.p9.gp
LDLRQQQQPANNYLGAVSGKKWNPEANAASLDMLGVATEVAAQGLEYVNEVKKNSAKSILRTVCGVDNSTKGSEKDCVGDVSLHERESVAADVLAGICGTLSPEGMGSCITSSADPGQKXRDHLKXEHLLTPEADKNFDDDGTLSDQECEVDIVDWNDDEKSSFIEAMNRYGKDFARISSYVKSKSFEQCKVFFSKARKSLGLDLIHQGAADAGFPTGDANGGRSGTDGACIAEMDSAICSAQSCPKVEIDACPVSDGEIQGHNPLSDIASRQPEADKSNMPDVVDINVEEGESKAEKDCSILVDHKQLREDINQTSCARIDINCPESTDKLQDIEDVTPVNMHGDDLMATSVEQVAAAHVESRSSLHSEGIGIDVSRIEGCSHESTIGKGGKSTPSVCLPAENGVSKENIIHFSNMDGASSISPAFTSNYQQSKLADPIQSKPKPLTPKDLMPVQFSSSLPDPTSICFEGIAAITTPNFEDHGNRASIASGAKDVNMFPTFKDQSSNRHDALFSNVDGYMQQRRNNHFGTEVCGLSESTGISQSDQFTVSKFQNGRPSSLGLSNGNLGVLSTGRREEAREGLFRPCSVKTSAGNEEQQKRPGDVKLFGQILSHQSSLQSSGSSVHGSKSKPPSPKVDKPASSRLLSNPRERLVYSSRPPIIANLGLEERAMRSFDHMDGRTIQPEPMVMVAKCQRPSAGVPVYSTKNGALSVFAEFQQPSMPPHTSDHKLLENFADLHKRNGIELLSGFQQPGRLGGAGVLVSGVSDPVAALKAQYGSGSKMLSSSNDVDTWKDIGSRX

SEQ ID NO: 17245 - protein, 817 aa, Oryza sativa
  Clone ID: TF_OSC400017j.C1.p12.fg
GGASGRRCSERGGHSGAVAVDLANESGAEMAASHSGPGSPWSSFEDQALVVLVHDMGQNWELVSDALNSIVQLKCIYRRPNECKDRHKLLTEKGSGDGADSADDSGSSQHYQSTLPGIPKGSARHLFQRLQGPFEEETLKAHFEKIIFLGQKLHPNRRKGESQELKQINPLHSSHLHALSQACAPGVILMPLDLCDAMTPNPDALSIGYSGSHASGLMLPNHPSSIGPTLPTGNMNTRLPGSPGMVLGNTLPSPSTPNTPRDSQRYGMPRPTSLQGDEQQRIQYNQMLNSRSLQQPGVPVPGAPAGVDRGVRMMPGAHGMGVMTGLNRGTPVTRPPFPRLGSSGMLNMVSPGNMLPNNGQGMQNTVNVHPGTIPGHGNTMLRPRDPMQMLRPGQNMEEHRQMMQGVSDAIQSSQPHQMPQQSHVLGNTHHPHIQGTTQSSPQQQAYAMRLAKDRHMQQCMMTQQQHPLSGASAVSTVQNGSQMQQQSQGPASSAIPSSQSQHKQQHPAQNSLDSSVPPNQPVNTSHKQKKQQGQQQSRQNQQQRNQGSQQAKLMKSLGRGNMMHQSSPVDATQASGISTTSKNQVSDKSMVQQGPGYFAGNKGLVPSVVQPGNQPKIYGSQMPHSPIQTSDVGSQSSMQGSPNQTMLTSQQAPLHSSSPLAQQQQQRYMNPSHNNIQRLVMQQNRHMNTDGRIESPVDQVQHNQAIPSTSIAKSTDSGSPGGVSSINQRRQESSHDPTTVPSTSQLASSPQDTFVGNEMLLSVSSQGMLQRQMSGGVPIHGHGIGGQRQQLQSRQQQQQKPAVQGSVYAHPSNSGPG

SEQ ID NO: 17246 - protein, 930 aa, Oryza sativa
  Clone ID: TF_OSC900031j.C1.p3.fg
MNPTQPVVIHDRHCVGLLPASHIAAGNTMRICARVSESFGARKYILDAKRWCIIGKNMESLEPEDGDGHQSDATDDDLPPRICTGKAYQAEIPNLATEDERRQYMSNTTDSCMALGYDCPIPIMWTLPSEFNKKEEEIQKQHSSETKAIENSRDGDSQTTSICPTSNNTSGQCSTSQDPHPELPDQIVSDSHQAHDDKLAPCSTQEGLNFTDKAMADQGEIEQFIPVPNSSTSIWSDQEAELLLLGLYIFGKNLHVLSRFVGSKTVGDVLSYYYGKFYKGEAYKRWSACRKAKIRRCILGERIFIGWRRQELISRLKSKIPKEAHDLLDEMFKSFNDSQTSLMDFVFHLKSVVGIEAFVEAVAIGKGKDDLTGFVLDPSKPNQVLSVQPGMPAGKDCSSLASEDIIKFLTGDFRRSKTRSNDLFWEAVWPRLLARGWHSEKPNDVSTTKNCLVFIVPGIQRFSRSELTKGTHYFDSVSDVLKKVVADPVLLEIEVDGMGNGVNAEKNGFDTAMKLNQDVPFDGYHELPKFTIIDTSLVQGEEPSQVRELRNLPADANISFGPLRHTHNMVSDSSSDEHDTDDRSSDYKEGYAGVTADENGTEMVSSKNADNESQVDSFRNMAATSCSVFPVNGHSSNGNGDTIGATSFFPQKTKIEKRKYLSPVTKRRRLTSCSNDQTSRRSFSFSKGPGLEKEKVKLPSTSSKPTAIDVGGSFQSKSLASCSGKEKPCQQIKDASNSHANDRSNEKMNVARPKEKPSGHKVDTLASVHSKTAVEDTKPAKGVAQSSDLVANQVKLETPQDDKTVTIAHAPSSDNHGSILKNKETTSSSNTEIAHDAPEATRGGPANPQPDLQASSQAMNPRRQGTRVRPPTARALEAVAFGLLGSGKRKADPTGSSRPRQRARKSTKEAASVSTSSDTEKSSMHSGARQ

SEQ ID NO: 17247 - protein, 113 aa, Oryza sativa
  Clone ID: TF_OSC4439j.C1.p1.hg
ARRRCASEEVLSMECLSSPSPSPSPAYYAAVAVAASNSSPTVSSSSSLVSVEEAGEKMANGYLSDGLMARARRKKGVPWTEEEHRKFLVGLEKLGKGAWRGISRHLSRQEHRR

SEQ ID NO: 17248 - protein, 224 aa, Oryza sativa
  Clone ID: TF_OSC23942j.C1.p6.gm
MAPGGGVLFAGTSVCSEEGQDEDEETIVESRAFEQRVNFWEQPNQRWGRLGRGTAEPGHGGPAQVLASSGRHVMMRCVGRDGDDGLRRSENVAAEIVEEEKPSPLNALNRLRLSSSFAPPLLSSSRADGGRGEAARPSRRHAPALSMGSSWTLDQNKVFELALATYGKDTPDRWENVARAVGGGKTADDAKRHYKKLENDIGRIDSTGASSSNSNGRSSSEGQR

SEQ ID NO: 17249 - protein, 287 aa, Oryza sativa
  Clone ID: TF_OSC405208j.C1.p4.fg
MDSSNQKFIDLLSQDSPNHAEKTSHNSPPQQFPNNFPQSQFTQSFNPHFLHNFYPFCSPSNYPPYGHSPPSFQGTPPSFQGIPHQGNWAQPNLATLQGFHLQENMVHSPNQGFGTANHQAIFALQYPLVRATVNSSSHGSESSTPCPARQQEAPVNLESSSESSEDEVRRATRTNWTEEENLRLISAWLSNSVDPIDGNDKKGEYYWKDVADEFNNNRPTNGHKRTVKQLKTHWGNVKKDIGKFCGVYAQVRRTCTSGHSDDMIMEKAHLWYKNQSNQKKPFTLEYM

SEQ ID NO: 17250 - protein, 783 aa, Oryza sativa
  Clone ID: TF_OSC402357j.C1.p1.fg
MEINSSGEEAVVKVRKPYTITKQRERWTEAEHNRFLEALKLYGRAWQRIEGLIARSMNGEEHKQGRHNPLEKEAINNGTSPGQAHDIDIPPPRPKRKPNSPYPRKSCLSSETSTREVQNDKATISNMTNNSTAQMAGDAALEKLTYIQKLQRKEISEKGSCSEVLNLFREVPSASFSSVNKSSSNHGASRGLEPTKTEVKDVVILERDSISNGAGKDAKDINDQEMERLNGIHISSKPDHSHENCLDTSSQQFKPKSNSVETTYVDWSAAKASHYQMDRNGVTGFQATGTEGSHPDQTSDQMGGASGTMNQCIHPTLPVDPKFDGNAAAQPFPHNYAAFAPMMQCHCNQDAYRSFANMSSTFSSMLVSTLLSNPAIHAAARLAASYWPTVDGNTPDPNQENLSESAQGSHAGSPPNMASIVTATVAAASAWWATQGLLPLFPPPIAFPFVPAPSAPFSTADVQRAQEKDIDCPMDNAQKELQETRKQDNFEAMKVIVSSETDESGKGEVSLHTELKISPADKADTKPAAGAETSDVFGNKKKQDRSSCGSNTPSSSDIEADNAPENQEKANDKAKQASCSNSSAGDNNHRRFRSSASTSDSWKEVSEEVVVYQHSAYSHLSYSLNIHHCFSNSHFCCQGRLAFDALFSRERLPQSFSPPQVEGSKEISKEEEDEVTTVTVDLNKNAAIIDQELDTADEPRASFPNELSNLKLKSRRTGFKPYKRCSVEAKENRVPASDEGETGCQSGKNVFNVPTCKHGQAGAVYNFFSATQQGKMRDYERLM

SEQ ID NO: 17251 - protein, 167 aa, Oryza sativa
  Clone ID: TF_OSC400025j.C1.p5.gm
MGRSSACCDKAAVKPKRGAWTAEDDERLRSYIQQHGTGGNWMASAAAARAAASAGSTTSAPASATAPSPTTTTASSSPSTPPSAPGRSSSSPPTSCTLLAPVAAACTSESEKKDAATTTSSPPNRSTDDALMMMMNWHNHQNQLQYLQGKLQTGVQQQQLVFGMPYW

SEQ ID NO: 17252 - protein, 295 aa, Oryza sativa
  unsure (1)..(295): unsure at all Xaa locations
  Clone ID: TF_OSC101758j.C1.p2.np
STTVVLGTSAISAVSSQQNVATCSCAAAAADGRACTAAAVGEEARKVRKPYTITKSRESWTEPEHDKFLEALQLFDRDWKKIEAYVGSKTVIQIRSHAQKYFLKVQKNGTGEHLPPPRPKRKAAHPYPQKASKNAEIQMPGCSTLLGQFYCSTFKCKSHARYVYLLCSXTSVQNXWKNPTNAIDELNLAGTGAVATNNCSSSIESPSTTWPTSEAVEQENMLRPLRAMPDFAQVYSFLGSIFDPDTSGHLQTLKAMDPIDVETVLLLMRNLSMNLTSPNFAAHVSCSVFKMLIKX

SEQ ID NO: 17253 - protein, 333 aa, Oryza sativa
  Clone ID: TF_OSC407812j.C1.p29.fg
MSATPNPIDASVVSAAAAVAGGGGGGDGGGGGGGKEKEKQVVAAPLQPPMAVPAPAAAVGEEARKVRKPYTITKSRESWTEPEHDKFLEALQLFDRDWKKIEAYVGSKTVIQIRSHAQKYFLKVQKNGTGEHLPPPRPKRKAAHPYPQKASKNVSPAAISQPPPLGEQGCVMSMDTSPVIRNTNASAVVPSWDNSIAQPLSASRTQGTGAVATNNCSSSIESPSTTWPTSEAVEQENMLRPLRAMPDFAQVYSFLGSIFDPDTSGHLQTLKAMDPIDVETVLLLMRNLSMNLTSPNFAAHLSLLSSCNSGGDPIKSEGMENLGSPQSCHLPFM

SEQ ID NO: 17254 - protein, 191 aa, Oryza sativa
  Clone ID: TF_OSC21363j.C1.p1.fg
MARSGGGNGGGEGGGGGGNGGGGGGLKKGPWTQAEDKLLVDHVRRHGEGNWNAVRRETGLQRCGKSCRLRWANHLRPDLRKGPFSPDEERLILRLHGLLGNKWARISSYLHGRTDNEIKNYWNTRLKRRVRAGLTPYPPEIEREIAHLRAQNLNLSAEGGGGGQIIYLVWCAFGGAVGGCGGVGVLGFFGG

SEQ ID NO: 17255 - protein, 372 aa, Oryza sativa
  Clone ID: TF_OSC401140j.C1.p32.fg
MGRVPCCEKDNVKRGQWTPEEDNKLLSYITQYGTRNWRLIPKNAGLQRCGKSCRLRWTNYLRPDLKHGEFTDAEEQTIIKLHSVVGNRWSVIAAQLPGRTDNDVKNHWNTKLKKKLSGMGIDPVTHKSFSHLMAEIATTLAPPQVAHLAEAALGCFKDEMLHLLTKKRPSDFPSPAVHDGAGAGASASALAAPCFPAAPPHHPQADDTIERIKLGLSRAIMSDPSTASAAAAAAAPSAPAEDKPWPPGDMSEGLAGMYATYNPAAHAHAQAQAEFRYDGASAAQGYVLGGDGDQGTSMWSHQSLYSGSSGTEEARRELPEKGNDSVGSSGGDDDAADDGKDSGKGAASDMSGLFASDCVLWDLPDELTNHMV

SEQ ID NO: 17256 - protein, 908 aa, Oryza sativa
  Clone ID: TF_OSC422196j.C1.p25.fg
MEPNPPPPPAAATATYRRRGKPKPKPKRKAAKPPSPSPPPKRQARDDPPHTGPLTRHSPLNPAPEDAPPQLHAGERDPPPRAWIEPAKLPPVSEEVQAVLSRGAGVHVVPSFAGWFSWKEIHQIEKQALPSFFDGISLRRTPEIYLGIRNFIMKKFHSNPQMHLELKDLSELSDGEMDAQLKVLEFLSHWGLINFHPFPPAVQGVSELVESITNADTEEKISVVDKLFQFETLQSYLIPAPNQAEVTAPIHTPSLLSEPTLTEDSITQAESSVEYHCNSCSVDCSRKRYHCRTQADFDLCCDCYDKGNLDAGMSQTDFIIMESAEIPGFGGTSWTDQETLLLLEALEIFQAKWGDIAEHVATKSKAQCMLHFLKMPIMDPFLHDGDVNEISQETAEQVSAEQGTSRVTEKMEVEDKTKEIKTNDRKTAAKPKLNLTETEVNLDDNVVANNDTKSSGDINVDVCSNTGVSNRSSDTEPTKKETSGENTSNIVNDVLKYAFEAVGHIPKIEGLGSFTEAGNPVMALVAFLSGLVDHDDVTTLCCSSLKAISDMSPALQLATMHCFILQDPPNDLKDPPNRVAIANLTDWEIGTCSFANTDCGQQKDKDATSNPSVTDNDDNLKEESALSVEEPNTTSTSSKNTRKLSNAKESKDESPQVEPKPSSANDCDNPISQVAKRASDNIRGHSSTVLPVSLNNTNEPCSISSQEASAGNTKDTSHTEHIEGDKPIYEDPPLEGKVELNKIEHEVTDLSAVQQHESIQTSLKKGYIQDHNSIKKTVADDVSVQRLQRAAASAISAAAVKSKLLAKHEEYQIQRLAALVIDKQLHKMQAKMSVFTEADNLVLRAREHTERTRKKLLMERSAIIASRMAALPPRPNHQPGMPGSRLPVGTIFFTVVLVRLGKNKYGAN

SEQ ID NO: 17257 - protein, 275 aa, Oryza sativa
  Clone ID: TF_OSC401367j.C1.p92.fg
MEKEVPKNLLRISVASSTQDTERYHTIFYHVSRDTRKVSYDFNHVSRDTHEVSCDTCRVSDDFYHVSRDTRKVSDDFYHVSRDTCEVSDDTYQVAATPSSAMRIILRIRLSPAWTPEEDACLERLARGYGFRHWRRVAEEMQPRERRRSPKQCRDRWRDHLARDVYHRPFTADDDAELAHLRLRGGGGDRWKDISRAAHCRTSRAMRRRWRELRKSDAFLRALYWHPDQPVPPLLDDALSCSDVLDSSVASYRGGCDAVAGGGTIVAPGFACFAA

SEQ ID NO: 17258 - protein, 369 aa, Oryza sativa
  Clone ID: TF_OSC900052j.C1.p4.fg
MPCTSAAWMLHVGGAAAEQASSSSSSKGGGRVVTAGTTTMDTGGYNNGGGGGGGGGNGGGGGDHQESSSSGGGGGQSSRLAARGHWRPAEDAKLRELVALYGPQNWNLIADKLDGRSGKSCRLRWFNQLDPRISKRPFSDEEEERLMAAHRFYGNKWAMIARLFPGRTDNAVKNHWHVIMARKYREQSTAYRRRKLNQAVQRKLDATTASDVVVAHHHPYAAAHDPYAFTFRHYCFPFPAASPAAADEPPFTCLFPGTAATAGRGGGGGMTWPDAMAAGEVIDDGAGGGRYVVAEPPPPFLVPAAPHGWLGGHEMMVMVNDGGDVAAGVASSYDGMIGRDQGGGGSHFEAAAAAAAAPAFIDFLGVGAT

SEQ ID NO: 17259 - protein, 326 aa, Oryza sativa
  Clone ID: TF_OSC406972j.C1.p10.fg
MGRQPCCDKLGVKRGPWTAEEDKKLMSFILTNGHCCWRAVPKLAGLLRCGKSCRLRWTNYLRPDLKRGLLTDAEEQLVIDLHAKLGNRALAPTSLISVAKRTLHVDSEIESILLGPVASLENGRKLFKKWSKIAAKLPGRTDNEIKNHWNTHIKKKLIKMGIDPVTHEPLDRKQESPATTSQSTVTAESSKSGEATRQQSRQLDDAVVRDMSVSAGGDSPPESSTNTASTAGGSSSSSSSHHQDPLVKWLLEEDLLPTGDEPWLNFTASNDVDEFSSIAATGATPALPWDVGMTTDWLLDYQDFGMGDSSLVVDASMVNSSNGSNF

SEQ ID NO: 17260 - protein, 362 aa, Oryza sativa
  Clone ID: TF_OSC400903j.C1.p93.fg
MLLSHCFAVAFALSALLAGLALAMDDATFGMEWTAAELGEARSVIARVSNAYDSGAGSSNSAGDTKHDRIMRELQARFPSRTMVQVIDLYLNLTAETAAQAGAAQPQDAGGAGDAAVVHPTFGLANDNFGMPVANNNDDGVDAGMVFGGAPMEEGAVAVNGGDGEVVNPDNADDDVLWTDYEHRLFLTGMRVYGRGDWRNIARYFVGSKTPEQVSMYADNYFHMMEIAAAMEADGDDDDDHHENNNNNLGGGQLHAVVGAVEHHENYNNNNLGGGQLNAGLGAVGHGPGAGHIAPATSSNNNVAAAAANNNVDAPFWVPLLYNLEIEQRMMEMQAQSQKAWDDQQMKMAEAATDPKEGAADK

SEQ ID NO: 17261 - protein, 338 aa, Oryza sativa
  Clone ID: TF_OSC400397j.C1.p62.fg
MAHEMMGGFFGHPPPPPATAAVGEEEDEVVEETEEGGHGGGVQGKLCARGHWRPAEDAKLKDLVAQYGPQNWNLIAEKLDGRSGKSCRLRWFNQLDPRINRRAFTEEEEERLMAAHRAYGNKWALIARLFPGRTDNAVKNHWHVLMARRHREQSGAFRRRKPSSSSASPAPAPAPPPPPQPVVALHHHHHRYSQQYSGYSGAAESDESASTCTTDLSLSSGSAAAAAAAAAAANIPCCFYQSTPRASSSSTAACRAPRVAAAADTVAFFPGAGYDFAAAPHAMAPAAASTFAPSARSAFSAPAGRGEPPGAVDQRGGAQATTDSHTIPFFDFLGVGAT

SEQ ID NO: 17262 - protein, 302 aa, Oryza sativa
  Clone ID: TF_OSC400045j.C1.p27.fg
MGRHACSAAGVQQKLRKGLWSPEEDEKLYNHIYRYGVGCWSSVPKLAGRLQRCGKSCRLRWINYLRPDLKRGSFSQQEEDAIVGLHEILGNRWSQIASHLPGRTDNEIKNFWNSCLKKKLRQRGIDPSTHQPISTAAAAAAAALDTSTQDQKPPATADGFALKQQQQVFDPFPVIDSFGSGFDATGMPLYGHLGGKDAAGFVDYSSVLDVSENLGYGESSSNSSNWNCGVGAPEVNNALESEPLHWATESKVEPFVGYGEGDAMEHKFGLPCHGQQEQGMTHFDFDVSRSMVVGDFNFEYFR

SEQ ID NO: 17263 - protein, 353 aa, Oryza sativa
  Clone ID: TF_OSC401533j.C1.p20.fg
MGRAPCCEKVGLRRGRWTKEEDEKLARYIRENGEGAWRSMPKNAGLLRCGKSCRLRWINYLRADLKRGNISPQEEDIILNLHATLGNRRMEMHTEMLSATGFNLAQRKFPMLLTDDTDGGLSCLWSLIAGHLPGRTDNEIKNYWNSHLSRKGYEFLRGGGGGAVVDVDLSKLPGGGKRRGGRTGRSSSGKEKTRTKEKDKAPAPEAAHNDDGGGGGGGGIDNVSAASHSHREEQAQASASGLTSDGLEEGPLGLSEEMVSGPVGPVSPKPEVGQDGSSAESGCCGPSGSSGPTEAVGQDMGDKSMDWDLVGLDDGFANDDMWGSLSWDYGELVGPDGVHQGEVLSDLFFLGNL

SEQ ID NO: 17264 - protein, 400 aa, Oryza sativa
  Clone ID: TF_OSC401612j.C1.p9.fg
MGHHCCSKQKVKRGLWSPEEDEKLVRYISEHGHSCWSSVPKHAGLQRCGKSCRLRWINYLRPDLKRGTFSEQEERTIIDVHRILGNRWAQIAKHLPGRTDNEVKNFWNSCIKKKLIAQGLDPKTHNLLPASKTLLHGGGGGGAANPSGNGLAQFQSNNGAAAAGTTPFTISSPAKAAAYDVAPPALYDVVLPANPAGGMLMAHDHHHHHQVAAAAAPVGYPYADHGGNGGGVLMSFRDQNAGVHGAASMDFMNGSSSSSSMEQLGGGGGMSSNGNGSFSASMAAFMDEEAAMWATAVAPPGMGGLAGMDQVAQQQQQQQVLVQDAAVGVAPTTLMMHGGGAATAGAMVVDKSVEMVDVSSAVYGGATATAFDLDLMVESCGMFCGGGGAGNAMEQLQWDC

SEQ ID NO: 17265 - protein, 243 aa, Oryza sativa
  Clone ID: TF_OSC412577j.C1.p19.fg
MGRSPCCEKEHTNKGAWTKEEDERLVAYIRAHGEGCWRSLPKAAGLLRCGKSCRLRWINYLRPDLKRGNFTADEDDLIIKLHSLLGNKWSLIAARLPGRTDNEIKNYWNTHIRRKLLGRGIDPVTHRPVNAAAATISFHPQPPPTTKEEQLILSKPPKCPDLNLDLCISPPSCQEEDDDYEAKPAMIVRAPELQRRRGGLCFGCSLGLQKECKCSGGGAGAGAGNNFLGLRAGMLDFRSLPMK

SEQ ID NO: 17266 - protein, 552 aa, Oryza sativa
  Clone ID: TF_OSC101345j.C1.p12.fg
MEEEEEAARLAGSQGESPAMLHPNGDGDGDGGDDEGDASGGEEEQGGVARAGVRRRGGGGRVRVRGRIPLKKGPWTPDEDKRLREYVEAHGEGNWNRVQRNAGLNRCGKSCRLRWANHLKPDLKKGPFSKEEEEMIIKLHLWLGNKWAKMANSTHLTCCTLVNGLVKRSRQMLCHYSLFAENNKKRYCHQEKLTSRPQDKLPGRTDNEIKNFWNTRCKRIQRTGEPLYPKEFNHFKLTDLEVMNCESPDESRAKKRTNEVLQGNGQSYKEVFFDNLDYSRPENYIRPNCVTPNSLPVDATSPFGSAIATQDQSVPFGSAIVSGHPILDGNFSTSGTIQRPMNVELPSLQYPNYDFNNNNAWSYHDPLGHPIDQVDFGSLRSEYLSPNNNGLLDALVHGGHGQGELANSQGSFDACFPRVQCNQVIQSNAFSLSSSFPIIGDDLLENSCHAFVGINNNASSLFLDSQPPPLVDPTFWRHDVSLEPNLPVYCQFNEELPPSNEQFAKDADDAFGHGGLSDETNLAAAGQGDEHDLEDPWASMPGACDIPDFPSE

SEQ ID NO: 17267 - protein, 345 aa, Oryza sativa
  Clone ID: TF_OSC401316j.C1.p15.fg
MGRSPCCEKEGLKKGPWTPEEDQKLLAYIEQHGHGCWRSLPSKAGLQRCGKSCRLRWTNYLRPDIKRGKFSLQEEQTIIQLHALLGNRWSAIATHLPKRTDNEIKNYWNTHLKKRLAKMGIDPVTHKPRSDVAGAGGGGGGAAGGAAGAQHAKAAAHLSHTAQWESARLEAEARLAREAKLRALAASATPGAPHLPAPPASAAAAAAAHGLDSPTSTLSFSESAVLATVLEAHGAAAAAAARAAMQPMQAYDEACKDQHWGDVDAADVGFPGAGAGFTGLLLEGSLNQIPRPAGRDAEADGEFQETEEEKNYWNSILNLVNSSSAPMSTAVVVPASHAYSPAPDF

SEQ ID NO: 17268 - protein, 321 aa, Oryza sativa
  Clone ID: TF_OSC400903j.C1.p83.fg
MGSIVIEGWTASEIEEARSLITSPNNGGEGGDGEGNKQKHCGHIVMELHEWFPWKTIGQVIGLYMKLNAGKPMVMHSLNKSDANNSIGEVDHVSALANGNPVRLEEHRPMLNNVGLVFDYPLEEMEMENQTDQEPKMVVEEEVQPKEGLVIKEKEAGVSKIHTNSQHVTPSIKRRVIWTEEEHRLFMVGLRVFGRGDWKNISKHLVTTRTAAQVSSHAQKFFLKMEARGEAVPPPAKRRRRRITGDQQAAAAEHAAALRRRMPVPPPPFNPFLLPSLVAPVMHRLLPPGSQAAGAAASGSGGQGASLPQMPWINGANGMGR

SEQ ID NO: 17269 - protein, 287 aa, Oryza sativa
  Clone ID: TF_OSC900188j.C1.p10.fg
MARKCSSCGNNGHNSRTCSGQRVLDHSISSSNSGSTTAAAATACGGLRLFGVQLQVGGGSSPLKKCLSMECLASPAYYGASASPSVSSSSSSLVSIEENTERVSNGYLSDGLMGRVQERKKGVPWTEEEHQMFLAGLDKLGKGDWRGISRHFVTTRTPTQVASHAQKYFLRQNSMTQKKRRSSLFDVVEGIKRAAAMPISGSASELQIPGMSIGVGVVKEEVVLPPCLNLMSNSSSASQHSPSLTLLANPQVQLQMPDLELKMSTSRLSDQSGPSPSTPFFGTIRVT

SEQ ID NO: 17270 - protein, 447 aa, Oryza sativa
  Clone ID: TF_OSC100940j.C1.p9.fg
MSASASAVCLLPPRGGSLARPDTALPPASQPATVAVNQNIPRLASPRLAVTSITLLPRRGRRCAVDLLLLHLHRLLLFLSLFSEETPNLFLPRKPAAFLKRIKSPSLIRRCNPSPQNLAAPRAVLGFELMAVEEASSSSGGGRGGGGGGGGEEGLSGCGGGWTREREKAFENALATVGDDEEEGDGLWEKLAEAVEGKTADEVRRHYELLVEDVDGIEAGRVPLLVYAGDGGVEEGSAGGGKKGGGGGGGGGGGGHGEKGSAKSSEQERRKGIAWTEDEHRLFLLGLEKYGKGDWRSISRNFVISRTPTQVASHAQKYFIRLNSMNRERRRSSIHDITSVNNGDTSAAQGPITGQPNGPSANPGKSSKQSLQPANAPPGVDAYGTTIGQPVGGPLVSAVGTPVTLPVPAAPHIAYGMHAPVPGAVVPGAPVNMPPMPYPMPPPTSHG

SEQ ID NO: 17271 - protein, 318 aa, Oryza sativa
  Clone ID: TF_OSC401134j.C1.p17.fg
MGRAPCCDKASVKRGPWSPEEDELLRSYVRSHGTGGNWIALPQKAGLNRCGKSCRLRWLNYLRPDIKHGGYTDQEDRIICSLYNSIGSRWSIIASKLPGRTDNDVKNYWNTKLKKKAMAMHHHHQPPPPQQQHYHHHHHHRVAGGGARVTLVSPPPAPQSQCASMQPSPASASSSGGDACSFGAAAMYSPSPSTQQAPQAATLAVAGYTSVATAAAAAAVAAQRSPLDELICQVPPPPTTTAADCWASGVTLDDVFLPELVGAGEFPNGDLFGGFGPLLQDRSSMELSACYFPNAAAAEMWPAATDIVKPAGLCHSLT

SEQ ID NO: 17272 - protein, 943 aa, Oryza sativa
  Clone ID: TF_OSC400764j.C1.p2.fg
MTSDNGKAPEKGGEASGPSSAPQEGEISNEPQRRRPLSGRTTGPTRRSTKGNWTPEEEDDIIVQMVNKLGPKKWSTIAQALPGRIGKQCRERWHNHLNPGINKEAWTQEEEITLIHAHRMYGNKWAELTKFLPGRTDNAIKNHWNSSVKKKVDSYMSSGLLTQVSCLPLNEYSAHCNSSPALTQQNSEDSGSYAVREVENSSVCSQSSLAKVSCSQVHNANVALGCDLQVNANVDNNEAHDSQSSVGHEACYTSVGAVATAIPEVHYHVSSSNFDPDQHLQEEFAQGLNLHMSMDEVPSNSSFADNPTICSIENHERSLEPYDVAMEMPLSMLPSDSGAEQKLHFMSEADFNSPNCLKSELWQDISLQSLLSGPDAVETDSFSRSNHQSDVYSSQADNEFLAPPYLLQTSNSSSVMEATYGQSPQMSVPPSLICSNVMTDVPSDNRSEPKEMTVSQAEMVTQSSSSSGDAEMSANPGSSNGSDIPSMMERIPECADQHVTNAEEPEASIEKEPSVTPSATADEKQDEGALFYEPPRFPSMDVPFVSCDLVTSGDLQEYSPLGIRQLMRSTMNVCTPMRLWGSPTHDESPDILLKSAAKSFICTPSILKKRHRDLVSPIPDKRIEKKSGTEKDCGVSDTSSIGIQTCFINATKDDAVITKSVLRIERSASSKPLEKKLEFSDENKENLDNTIEQAKDGQSAGNYKHIDEQARGERRTATNITTTYDDLPGNLQPAGILIEHNGDDLVSPDYGKNTMKQKQNTNMESLSVCKEGVSAKKPAELIVEKSSACINVDYEYVNILADTPGIKRGLESPSAWKSPWFVDMQFQGSYFVSPANGSYDALGLVKQINVQTAAALAEAREVLASGGQSENINSDKENLENPDAKKEPGATTKLQAKIKTEGKILDFNECATPIRSSDKKAGSSLGRSLSSPIPSSHLLKSFR

SEQ ID NO: 17273 - protein, 276 aa, Oryza sativa
  Clone ID: TF_OSC401721j.C1.p17.fg
MVVAGKKQGRHSFSASSSSSSSSSCSVVQLGHHQRPQGEDPLIGIKAAAAGGGGIMRKGPWTEQEDVQLVWFVRLLGERRWDFLAKVSGLQRSGKSCRLRWVNYLHPGLKRGRMSPEEERMVVQLHAKLGNRWSRIAKSIPGRTDNEIKNYWRTHLRKLKLKQQKQQQSDDHHNDNDDDDDRNSSSSSSSSNSNSNLQQQPQPEDESSASGSLQAQHHEDQHQLFLHPLWNDDIIVDVDCWSSSTNVVAPPPMPASPLWDIDDAFFCSDYSLPLWG

SEQ ID NO: 17274 - protein, 317 aa, Oryza sativa
  Clone ID: TF_OSC401780j.C1.p5.fg
MGCKSCEKPRPNYRKGLWSPEEDQKLRDYILRHGHGCWSALPANAGLQRNGKSCRLRWINYLRPGLKHGVFSPEEEETVMSLHAALGNKWSRIARHLPGRTDNEVKNYWNSYLKKRVESGGGKTSQGPPTTPASAASSPADSDDSHSLQQKPHEPANSDSSEPAHESSSASADSSCLTVTTDHPPVSRPHAAVTPKVMFADWLDMEYICGQVAAAPGLDAAGFAVVGGAAGDQQQQQQQVMSQDGSVHQADGPSCGVDDSSLQQQQQEGFGGNGGCWDFQEQFDSIDQMQASGGGGGFCDLLSMSDFDLWAELERTA

SEQ ID NO: 17275 - protein, 318 aa, Oryza sativa
  Clone ID: TF_OSC422332j.C1.p21.fg
MTRRCSHCSHNGHNSRTCPNRGVKIFGVRLTDGSIRKSASMGNLSLLSSAAGSTSGGASPADGPDAAPTAADGYASDDFVQGSSSATRDRKKGVPWTEEEHRRFLLGLQKLGKGDWRGISRNFVVSRTPTQVASHAQKYFIRQSNMTRRKRRSSLFDMVPDESMDLPPLPGGQEPETQVLNQPALPPPREEEEVDSMESDTSAVAESSSASAIMPDNLQSTYPVIVPAYFSPFLQFSVPFWQNQKDEDGPVQETHEIVKPVPVHSKSPINVDELVGMSKLSIGESNQETVSTSLSLNLVGGQNRQSAFHANPPTRAQA

SEQ ID NO: 17276 - protein, 173 aa, Oryza sativa
  Clone ID: TF_OSC400259j.C1.p82.fg
MDLYGAAAGGGPVARRPWSKVEDKVFESALVLCPEDVPDRWALVAAQLPGRTPQEALEHYQVLVADIDLIMRGAVDAPGSWDDNDGNDRRGGGGKPRGEERRRGVPWSEDEHRLFLEGLDRYGRGDWRNISRFSVRTRTPTQVASHAQKYFIRQANAGARDSKRKSIHDITTP

SEQ ID NO: 17277 - protein, 358 aa, Oryza sativa
  Clone ID: TF_OSC7723j.C1.p1.fg
MGRAPCCEKVGLKRGRWTTEEDEKLAGYIAKHGEGSWRSLPKNAGLLRCGKSCRLRWINYLRAGVKRGNISNQEEDVIIKLHATLGNRKSYVVKRMDYVCLGARDYCFQQNTHVRWSLIASHLPGRTDNEIKNYWNSHLSRQIHTYRRTYTAPSEAAVTIDVTKLQAAGKRRGGRTAGQSRKGDKKRAEDDPPKETAAADTPLPESSPRRAQSDEARSGSVVVDPEEPSSQPNNGSSGGGGGTPDGPCSEETATGPTSLDPMEMGLWEVESEFAEMEALLCGGVAPDGPGIPGLEPLDVAAQADDLLDMDWDGFAADLWGDPAQRGGLVQDAGEPNGSMGCSSDELESFASWLLSDSC

SEQ ID NO: 17278 - protein, 273 aa, Oryza sativa
  Clone ID: TF_OSC400524j.C1.p32.fg
MGCKACQKPKVHYRKGLWSPEEDQKLRDFILRYGHGCWSAVPVKAGLQRNGKSCRLRWINYLRPGLKHGMFSREEEETVMNLHATMGNKWSQIARHLPGRTDNEVKNYWNSYLKKRVEGAEAAARKSAEPADVVTGSPNRSETGQERVAADRPASSESSGPVESSSADDSSSLTEPAAGLAAVRPHAPVIPKVMFADWFDMDYGTSLAGTAPGLSYQGSSSVQVDVPCGGAVDSLHGLGDGGFCWDFDDAADHMQGGGGLCDLLSMSEFLGIN

SEQ ID NO: 17279 - protein, 630 aa, Oryza sativa
  Clone ID: TF_OSC401196j.C1.p59.fg
MSSAPQQLLDSSSPGPGPGPEVEDDGGRRVRKPYTITKSRESWTDPEHDKFLEALQLFDRDWKKIEAYVGSKTVIQLVAFVTEYFRVLQFLNLPGGDLIINLGVLAAPQVVLPQQASHLMEQGCLIPMDISPVARNFNANDVFSSWDSALAQSFSPRHTHGAANNCSSSVESQSGTCPTSEAIEQEIMLPTLRAMPDFAQVYNFLGSIFDPETSGHLQRLREMDPIDVETWWIPVTTCGLDNLDIVLLLMKNLSINLTNPNFEAHRKHMACKKLSKIKSSRNSVVCTLSFCLEASTSVYISSKKKKKKKKKRLGAMVQGASGGGWSSKVEEGVIVGGLLVVQCILAGYVVFVDHVLSLGANPLSLIVLGAVASSLFFLPFAVVLERKKWPSKISRTLMAQFVFIALGGTTVFQELMLLGIKKTTPAIASAMPNLSPGLIFIIAACFRLEKFDKGCKYTRAKILGTLVCLVGAMAMSFLQSPVSSSPQLTTTSYYDWILGCFYLFLAVVVLSIYTVLQAATLVSFPAPLTMCSVTSMMGAVFTAILQFIVDGKIDMGSPRIDETIISTIVLMTVCSALLSALLFSQLLCLGSLAGMVLMFCGLYIVLWAKSKEGHSIIHLEGGDVEKALLS

SEQ ID NO: 17280 - protein, 192 aa, Oryza sativa
  Clone ID: TF_OSC401693j.C1.p18.fg
MATPPLPPPPRARCVVRLKLPPAWTPEEDARLQRLAKENGFRRWSRVARSMPRRSARSCRDRWRHHLARDVYHRPFTARDDDELLRLHYRLGDRWKEIGRAVYGRTSRIMKHRWRELRRSGFPLAATARKVQALDMVESEVEESDQSLPPPELQRSLADALASSFGYCSLANEHAMDPLAGSLSLGFACMAV

SEQ ID NO: 17281 - protein, 267 aa, Oryza sativa
  Clone ID: TF_OSC27606j.C1.p1.fg
MASSSTTNTSDGAGKPASSSSSACPRGHWRPGEDEKLRQLVEKYGPQNWNSIAEKLEGRSGKSCRLRWFNQLDPRINKRPFTEEEEERLLAAHRHHGNKWALIARHFPGRTDNAVKNHWHVVRARRSRERSRLLARAAAAAAHPPPFSSYASQLDFSGGGASSGARNSSLCFGFGMINRSSSSSSSPAAAPFLIKSFNGTSYGTLLPATTSMAAAAQPVSTITFSSTPMRETLELMDAGGHENHGDVDGGGDKRKGVPYFDFLGVGV

SEQ ID NO: 17282 - protein, 322 aa, Oryza sativa
  Clone ID: TF_OSC402119j.C1.p10.np
MGRKPCCSKEGLNRGAWTAMEDDILVSYIAKHGEGKWGALPKRAGLLKRCGKSCRLRWLNYLRPGIKRGNISGDEEELILRLHTLLGNRWSLIAGRLPGRTDNEIKNYWNSTLSKRVAMQRTAAATSMPAAATTSSNADAAGAAARRRRSPEPRTVVVSPIRTKALRCNNNSSSGIVVVQQAGACSHGGRPPESGAPGDAAADKVATPQAVQQQQQQELAGAEDDDDLPVPAVCIDLDLDDIELGGLDGFLISPWRGGGHDDGNAAAGAVPNLPMPIGYELGGAGGGGEAGAVDLEALLGQLEAEEDDDGDHHHHHHHHHHQ

SEQ ID NO: 17283 - protein, 371 aa, Oryza sativa
  Clone ID: TF_OSC400944j.C1.p31.fg
MGKGRAPCCAKVGLNKGSWTPEEDMRLVAYIQKYGHANWRALPKQAGLLRCGKSCRLRWINYLRPDLKRGNFTAEEEETIIKLHGLLGNKWSKIASCLPGRTDNEIKNVWNTHLKKRVSPEQKKGGGKSKKKTTCTDVLVPSPSPSSSTTTTTNCSSGDSAGEQSNTSKEEEEETDKIEIPMLELDPCCFDFDMLVDPVVPDTYCPAVSASASASAPTSPCSSTSPSCARAGVDPLLDLPEIVDLGPELWSIMDGGAGDGCTEAPPPAWSNAAAAAAANATVATTTSLEEEEGKEWWLEDLEKELGLWGPTDDYHCHPGPQGQPGRAGPPPSAVVEDPVSCYFQAGPTAAATWQGHEPSAVITSNPMDYYV

SEQ ID NO: 17284 - protein, 315 aa, Oryza sativa
  Clone ID: TF_OSC900238j.C1.p10.fg
MMKESYMEVLPPAPAHYFVGQAAAAGGWFLPDRRGGGGAWSQEENKVFEQALAALDRNDPERWERVALLLPGKTVADVMTHYDDLENDVCFIEAGLVPFPHYGAAGGGGGSGFTLDWDGGDDPAGLGFKRSCYMVGGKRARGPDQERKKGVPWTEEEHKLFLMGLKKYGRGDWRNISRNFVTSRTPTQVASHAQKYFIRLNSGGKDKRRSSIHDITTVNLPDDDHGNPSPSPPPSVLTAHSSSSAAAVSEQFGVLVDGKPPPPPLGRGAGHHHFMPHPYAQVKIEAGNSHVAGGGRLDDSVLVQMQCGQLMQPLG

SEQ ID NO: 17285 - protein, 316 aa, Oryza sativa
  Clone ID: TF_OSC419638j.C1.p9.fg
MGRAPCCDKATVKKGPWSPEEDAMLKNYIEEHGTGGNWIALPHKIGLKRCGKSCRLRWLNYLRPNIKHGDFTPEEDSIICSLYISIGSRWSIIAAQLPGRTDNDVKNYWNTKLKKRLLGRRKDRGGGHHHRSQSTADDLPAGGDGGMNDGGGGGGERSLSASAMERIQLCMQLQELQNPLSIHHNPLLSHQWPSKATIDDQNHNNVTVAEHGMSSSVSDHHRLDGQQLESGAGAAAMQQASPSSGGENSNVVVAIEAELQELLYAGGGAIVDGGAPPQGDVDWWSYDQGKQSPVTCWDFTPETSSIFQDYATVYDI

SEQ ID NO: 17286 - protein, 522 aa, Oryza sativa
  Clone ID: TF_OSC101223j.C1.p1.fg
MEEMIKPAPAPASSEEEKEVVATAATGERRHEEATAGREEQEEEEEEEEAPVVLKKGPWTTAEDAVLVQHVRQHGEGNWNAVQRMTGLLRCGKSCRLRWTNHLRPNLKKGSFSPDEELLIAQLHAQLGNKWARMASHLPGRTDNEIKNYWNTRTKRRQRAGLPVYPPDVQLHLAFAKRCRYDDFSSPLSSPQQSAGSNVLSMDAADAAGAASSGYTSARPPPLDLAGQLAMGSRPVQLLAATPFSAPSSPWGKPFARNAQFFQFPHSSPVSPTTPTGPVQVHPVTPELSLGYGLHAGDRARLPPVSPSPGARAELPSSQLRPSMAPTTAAAAATGGLVGGALQDHPNAASLEAMLQELHDAIKIEPPAPPENRGTEEEGGGGGGNLRGFLHEQIFDKLMPIKSEDFCIVGLHSVLISLQFPGDGKPEVELKDDIETLFDLIIPATFPAAAPEPAAAATAASAAPNHSSSVSQHSSDDQDHSNGADVLDLPILTGGGGGSSEQDDWSLDGAACQWDNISGGIC

SEQ ID NO: 17287 - protein, 301 aa, Oryza sativa
  Clone ID: TF_OSC102011j.C1.p25.fg
MGMEAECDRIKGPWSPEEDEALRRLVERHGARNWTAIGRGIPGRSGKSCRLRWCNQLSPQVERRPFTAEEDAAILRAHARLGNRWAAIARLLPGRTDNAVKNHWNSSLKRKLATATDGGEIDRPCKRVSPGPGSPTGSERSELSHGGCGSGSGGGQVFRPVPRPGGFDAISAADVVRPPRRRDDNDDDGDDDPLTSLSLSLSLPGFHHDSARSHFQELPSPSRSPSPPPSPPAASPSAYPFNADLVSAMQEMIRTEVRNYMAGVGLRAGCGPGAVAESFMPQLVDGVMRAAAERVGVVTRQ

SEQ ID NO: 17288 - protein, 276 aa, Oryza sativa
  Clone ID: TF_OSC421872j.C1.p2.fg
MPTDDATATGNGDGAAPRPAAAEPAAPLSSVWTRRDEKLLEMLLWRWQLDPHWDRLAAELGGKTATQVFDRYVCLADELRLVMAAPAVDTPPAWDVQDEREAAVAPLPGLEADAAAGAGESAEVTAIGIAAAASPNAAATSAPTIGGGVVLKSRELKNPRKTRMAGGGPRKKAEMWTREEHSQFLHGISTYGKGNWKALASEFVKTKSSTQIASHYQKFCIREEKRRLSKCKRASIHDIVSPTTTTSAPESAGAGPSAPPCALIESGALIAGDDDA

SEQ ID NO: 17289 - protein, 171 aa, Oryza sativa
  unsure (1)..(171): unsure at all Xaa locations
  Clone ID: TF_OSC411350j.C1.p2.np
CCVVLRIKLPAAWTPEEDAALERLAVENGSRHWRRVAAQMRKRSPVQCRDRWRDHLARDVFHRPYTAADDDELTRLVLRPGGGGDRWKDISRAVHGRSSRSVKRRWMEIGTSDELLRKWHPRSSMPTVVDAVVXCGQIKLLDGAVASXGQFTDAMSSSGSCGTPGHRCCLR

SEQ ID NO: 17290 - protein, 342 aa, Oryza sativa
  Clone ID: TF_OSC401516j.C1.p2.fg
MQPPPMRERQRWRPEEDAILLAYVRQYGPREWSLVSQRMNRPLHRDAKSCLERWKNYLRPGIKKGSLTDDEQRLVIRLQAKHGNKWKKIAAEVPGRTAKRLGKWWEVFKEKQQRELRDRDRRRLPPPLDGDERGCAGGRYDWLLEDFADKLVNDHHRRMMAAPILPPWMSSSPSSSSSPSVTLSLASAAVAPAPAAPPPTWGGGGGGEVVVAELMECCREMEEGQRAWAAHRKEAAWRMKRVEMQLETERACRRREATEEFEAKMRALREEQAAAVERVEAEYREKMAGLRRDAEAKEQKMAEQWAAKHARLAKFLDQVAACRRWPPVEINGGGGGGPGGGR

SEQ ID NO: 17291 - protein, 196 aa, Oryza sativa
  Clone ID: TF_OSC400608j.C1.p20.fg
MGRSPCCDESGLKKGPWTPEEDEKLLHYIQKNGHGSWRTLPRLAGLNRCGKSCRLRWTNYLRPDIKRGKFSQEEEQTILHLHSILGNKWSAIATHLPGRTDNEIKNFWNTHLKKRLIQMGFDPMTHRPRTDFFAALPQLIALATLRDQLAATACGGGGGGDTAAAAAAQIMQGAGGGGGADVAIQAAKMQYLQCLL

SEQ ID NO: 17292 - protein, 127 aa, Oryza sativa
  Clone ID: TF_OSC8036j.C1.p1.fg
VPWTEEEHRKFLVGLEKLGKGDWRGISRHFVTTRTPTQVASHAQKYFLRQSSLTQKKRRSSLFDVIEDAEKAPSVNERLKLRHETASVPAEMGFPALSLGISSMAQPEAMLLPPPSLTLTPAVHHQQ

SEQ ID NO: 17293 - protein, 463 aa, Oryza sativa
  Clone ID: TF_OSC400860j.C1.p23.fg
MARFQETKARNDQGPVADHVGHQNLMENLTDPLDSSGMDMMDEARIPKARKPYTITKQREKWTEDEHKLFLEALQLHGRAWRRIQEHIGTKTAVQIRSHAQKFFSKVIKESSGDNCNSLGAASSIQIPPPRPKRKPVHPYPRNLGSTASKNVPALKQLEKPQLQVQSLYDQDNGSPTSVLTVPQIRADTLGSESGGSPTSTIDIEERCPTPSIATAELAMELPPTNDEEVKGNGDHEEVTCDRSGVPVLRLFGKRVMVNDLHQMSAPDAGNLQTVADMEVDASAETPTSGTGKFSSHGAAEANTWNPWLTNTQQFLYYLPNGQIFSVHSALPCFTYHNEGVTCTQFSNPQVVASDQQHQHQTSEAVDYKGIQREGSWTESNTSSSSVPETATHNSETTESYRNGNRNEDEMVPSPDSRKCVSPGSNCRRGFVPYKRCVADSEALLKSQAPQEEADGEMTRLCL

SEQ ID NO: 17294 - protein, 266 aa, Oryza sativa
  Clone ID: TF_OSC25059j.C1.p3.np
MGRPPCCVKAEVKKGPWTPEEDLLVAYVQEHGPGNWRAVPTNTGLMRCSKSLMRCSKSCRLRWTNYLRPGIKRGNFTDQEEKLIVHLQALLGNRWAAIASYLPERTDNDIKNYWNTHLKKKLKKMSATGGGGDYGEGGGAGEVKTRAAAPKGQWERRLQTDIHTARQALRDALSLDPSPPAKPLDSSSGATAPPSSQAATSYASSAENIARLLEGWMRPGGGGGKTTTTPSSGSSLKTELSFSSLLLKTTTPPKKKENQFFFSHKN

SEQ ID NO: 17295 - protein, 413 aa, Oryza sativa
  Clone ID: TF_OSC401161j.C1.p35.fg
MSSETAASPPPPPPNPPAADSTHSSPASMTDETHGAGAHPDESQPHRSSSSSSSPPVAVDGETRVPLPVRSLPQPSHPSPPPSGEDEDDVVITGQIAVGDAAGAAMEERVKGPWSSDEDTLLSNLVEKLGPRNWTLIARGIPGRSGKSCRLRWCNQLDPQVKRKPFTEEEDRIIMAAHAIHGNKWAAIAKLLVGRTDNAIKNHWNSTLRRRHCTGGRCTQGGVMKRAIPERPRSVSEEPWPLGNLSSLNVREAMEAPAQTVSESYVGAWQIGDQSCKTEVVDPPYLARPVAKVGAFKPYNVGPAQSSQKEMLSFATKFDSNLHPFKPENGVCKFVDPTSFAAEVPNKCGHGCCSSHGQLRKNSLLGPEFNEFEDHPPISDSSFASLVSEISSIAWMKSGLQSSDTLARSVPPA

SEQ ID NO: 17296 - protein, 262 aa, Oryza sativa
  Clone ID: TF_OSC412573j.C1.p11.fg
MGRQPCCDKKKVKRGPWTAEEDKKLISFILTHGRCCWRAVPKLAGLLRCGKSCRLRWTNYLRPDLKRGLLTADEEQLVVDLHAKLGNRWSKIAAKLPGRTDNEIKNHWNTHIKKKLIKMGIDPATHQPLPNTKVVSQTRTSTLSTATTESAKSNGMAYPFDPEGGCSRDMSVPTDSMEQSSRNTSSHGLDPLVNWLLEAELPADEPWLNFTSSNEDDFSGIVKQSAWDGSTTDWLLDYQDFSMDDSSLIDGARVQNSDGLNF

SEQ ID NO: 17297 - protein, 341 aa, Oryza sativa
  Clone ID: TF_OSC407994j.C1.p11.fg
MVRPPCCDKDGVKKGPWTPEEDLVLVSYVQEHGPGNWRAVPTRTGLMRCSKSCRLRWTNYLRPGIKRGNFTDQEEKLIVHLQALLGNRWAAIASYLPERTDNDIKNYWNTHLKRKLQGGGAGGDGDGGAAGDAVSPKPAAQRPASSSKGQWERRLQTDIDMARRALREALTSLDDVKPPHQPDAANAAAGGGGATTGAAASAGADSPAASSTSGASQCSPSSAGYVLTTENISRMLDGWARKKGGGGGRRAAGSGPATPGATESASGSSEASEVSYGGTALSAAAAPASAFEYETKPTVTAAAAADAGDETQLSAIESWLFADADGIESGSLLDAAMDYTF

SEQ ID NO: 17298 - protein, 342 aa, Oryza sativa
  Clone ID: TF_OSC410931j.C1.p2.fg
MGRSPCCEKEAGLKKGPWTPEEDQKLLAYIEQHGHGCWRSLPTKAGLRRCGKSCRLRWTNYLRPDIKRGKFTLQEEQTIIQLHALLGNRWSAIATHLPKRTDNEIKNYWNTHLKKRLARMGIDPVTHKPRVDADADVAAGGGAAGGGARSRAAAHLSHTAQWESARLEAEARLAREAKLRALASPPPATAALSGVDSPTSTLSFSESALFGAGSAAPDIHGAARAAAVQAVQSSYGEACQEHHFGGATAETSFAGAGTLAGVLLDCSVTGADQRFAERTEACSGELQGEDDDDKGYWNSILNMVNSSMSSSSSSLTSEVVTDTEMFLPATAAAAASATPVEF

SEQ ID NO: 17299 - protein, 921 aa, Oryza sativa
  Clone ID: TF_OSC1541j.C1.p2.fg
QKPKKWEEIRTAVSTPFLTRFARASLAGNTPSSPTAAAVAVAASSATGAGDDASSQGHLLRRYVPPLLASHFPLAGTSSRADAGGQNPTSPVDARAKWRKRKRNANTSAADHSDDSDSAVAAAANDDNDDDDAALHAGTAAVNGGGGTLGGGDDDPVVDLREAEVHPTAIERVSAFPPAFRRVVNRLHPSVLAVMAAERAAAAAGAGAGGGGAAVPALENISHGQLQVLSSVLPDHPSLSNDPDKPSSYVCTPPLLMECRGVAKQFDGKLLMVPKHSDWFLPMTVHRLERQVLPQFFSGKSPGHTPEKYIMLRNRVITTYLERPARRLAFSECQGLVTSTPELYDLSRIVRFLDAWGIINYLAAGSVQRGLRMAATLIREEPTGELHLMSAPLKSIDGLILFDRPKCSVRAEDIASGASLSSSPGMENGDAGFDEKTLLERLSESFCSFCAQPLPSLHYESQKEADIALCSDCFHDARFVTGHSSLDFQRVDGKKDGLDNDGDSWTDQETFLLLEGIDKYKENWNAVAEHVGTKSKIQCLHHFLRLPVEDGLLENIKVPEASFSSKFWLMQNASGSVFKLPQLFALGSLPQSGEAGDLPFINTANPVMSLISIMSLALLFRDDLQIAFLASSLGPRVAASCASEALIVLTGGDSRISSIGNDVMGHAARPNCGDYLIPKINSSLAVSSENVRHAARCGLSAAATKCKLFADQEEREIQRLSATIINHQLKRLELKLKQFADIETYLLRDSEQSERMRQGLQAQRIRMMSGLRLASPRGNTMASNPLSQANIRPPGIPGSMPQAGTPAFYSNNMQVHPQMAFLQQQMQQQQQKQQQQQQMQLQQQQQQMQLQQQQQRQAFLQQQQQQMQQQQQQLQQQQQRQLQMLSFGGRLPLSAMNAPSTSAAPNVMFDNPDMPGPSNQG

SEQ ID NO: 17300 - protein, 641 aa, Oryza sativa
  Clone ID: TF_OSC21652j.C1.p1.fg
MALHLTRPFLRPSPPPPRPTRRSSRAHCLAPSASARGPSFRRPYTSVLVVPTGVGAAVGGFAGDALPVARALGAVADCVISHPNVLNAAMLYWPMPNTLYVEGYALDRFAEGSWALQPVHQNKVGLVLDSGIEEELRLRHLQVADAARASLGLPVVEYIVTDTPLEIKTWFDPKCGKSTGSVGNSDSLLRAVEALVNRSDVNAVAVVARFPDDDPEDSDCYREGKGVDLLAGVEAIISHLIVKKFKIPAAHAPAVLPPVLSLSVSPRSAAEEIGHTFLPCVLAGLSNAPQYVMRRNGNMDNGCIVASDVDSVILPKDACGGDGTIAFARTATKNKPLIITVQENETVLDDTPDKFNIEALNVQNYWEAIGVIAAHKAANARAYASTVLVQLAPDLLLIYCSFLSGAPLEISISRMLTYQLVWVKNSGKIVFGYLKFQKFEAGIWNPHRIALCSIRILVFSASLQVSSQPPPRLISEHLPAGDPPSPLSRSRKRRSFSEEEDELLLKLHALLGNRWSLIAGRLPGRTDKEVMNHWNSKLMDSTIEHPPSLHDDEHRRRRRRLRSEAHDERGAKHPGHNSSSSSKDVNGDECTVADDASSCNHQDDNRAVAELNLELTLSTPCIYLLLGQDREDGSKSNQGLI

SEQ ID NO: 17301 - protein, 547 aa, Oryza sativa
  Clone ID: TF_OSC400850j.C1.p64.fg
MPNTLYVEGYALDRFAEGSWALQPVHQNKVGLVLDSGIEEELRLRHLQVADAARASLGLPVVEYIVTDTPLEIKTWFDPKCGKSTGSVGNSDSLLRAVEALVNRSDVNAVAVVARFPDDDPEDSDCYREGKGVDLLAGVEAIISHLIVKKFKIPAAHAPAVLPPVLSLSVSPRSAAEEIGHTFLPCVLAGLSNAPQYVMRRNGNMDNGCIVASDVDSVILPKDACGGDGTIAFARTATKNKPLIITVQENETVLDDTPDKFNIEALNVQNYWEAIGVIAAHKAANARAYASTVLVQLAPDLLLIYCSFLSGAPLEISISRMLTYQLVWVKNSGKIVFGYLKFQKFEAGIWNPHRIALCSIRILVFSASLQVSSQPPPRLISEHLPAGDPPSPLSRSRKRRSFSEEEDELLLKLHALLGNRWSLIAGRLPGRTDKEVMNHWNSKLMDSTIEHPPSLHDDEHRRRRRRLRSEAHDERGAKHPGHNSSSSSKDVNGDECTVADDASSCNHQDDNRAVAELNLELTLSTPCIYLLLGQDREDGSKSNQGLI

SEQ ID NO: 17302 - protein, 385 aa, Oryza sativa
  Clone ID: TF_OSC25059j.C1.p1.fg
MAGGGGSLAVGGGLNGWRGVSGSVGAAGLEEGSGPAWWRGHLTANGSRMKKGGGSRRHAIPTGEAVGGGGAVVGIDGEAAVLREGGGEEGAVDAGGGPMLVAYVQEHGPGNWRAVPTNTGLMRCSKSCRLRWTNYLRPGIKRGNFTDQEEKLIVHLQALLGNRWAAIASYLPERTDNDIKNYWNTHLKKKLKKMSATGGGGDYGEGGGAGEVKTRAAAPKGQWERRLQTDIHTARQALRDALSLDPSPPAKPLDSSSGATAPPSSQAATSYASSAENIARLLEGWMRPGGGGGKTTTTPSSGSRSSAASVLYGEASHSGGATAPTPDGSTVTSKTKDEETAGAPSSSPPPAFSMLESWLLDDGMGHGEVGLMDVVVPLGDPSEFF

SEQ ID NO: 17303 - protein, 200 aa, Oryza sativa
  Clone ID: TF_OSC401857j.C1.p12.fg
MAADGGDGSGGGRKTPWTQEEDEALRRAVREHRRQNWAEIALALPRRGPKSCRLRWCQHLSPELDSRVFTAEEDAIILAQQRVHGNKWATIARCLPGRYDNAVKNRWNSALRKLLQVQHASGAGSPPAAAAAAAGDDRDDAPVCLQLFPARAGGVKEAGLFAGEKDVEEEDVATSLTLGLPVLCEAELELRLGPAWPATA

SEQ ID NO: 17304 - protein, 237 aa, Oryza sativa
  Clone ID: TF_OSC900016j.C1.p36.fg
MVTVREEMRKGPWTEQEDLQLVCTVRLFGDRRWDFVAKVSGLNRTGKSCRLRWVNYLHPGLKHGRMSPKEEHLIIELHARWGNRWSRIARRLPGRTDNEIKNYWRTHMRKKAQERRGDMSPSSSSSSLVYQSCLLDTVPIISMDGGDIHDDRSCMARVLKSTQSVMDGYTMDQIWKEIEAPGAPSLLGIDEGKDKACSNLPCPLLTSTMSDYSCPEVFWKIDNEETRMLATQSGYGK

SEQ ID NO: 17305 - protein, 394 aa, Oryza sativa
  Clone ID: TF_OSC21498j.C1.p1.fg
MHESDSDPDSDRTHWYMSNSDDESFVDKDKDCRRSTVALLLKKGPWTSWEDSILEKYIKKHGERNWKLVQKNTGLLRCGKSCRLRWMNHLRPNLKKGAFSKEEENKIINLHRKMGNKWSRMAADLPGRTDNEIKNYWNTRIKKCKNNRSPLYPANVCNDALNEDQHESADPNVREKLTNNHLEDTTSMYSAPQFSDASISNILDRRLASKDYDSIEDQRNQIEVVAKYEIPLPVLKTTNNDIFPSASIFANHGISNGNLSALSTTDALQMELPLIQFDPNNQFVYSRAYAMHLTNFALLNDQSEELLNDTDVLNYVVMKEELSGGSLSPTINMPCEAHNSMAASNELVVPQYEGDAPPLQDDFTSYFYLNDTNLSIFEDTNELFLENKLDTKGN

SEQ ID NO: 17306 - protein, 1089 aa, Oryza sativa
  Clone ID: TF_OSC900288j.C1.p6.fg
MDRASNFIPGPYQELVDAKPIRSLAPMFPAPLGINVNQSSTPPLVCVTPVGQFPVGFGSGILPTFGSTTAFTTTANGVSYTSYTNNGAIDATPISAYKTRPGIVSLDGDEPYSGSASGRKSKRSSGSAADGSNGVKFKRPKPVYKNFVAGKELAFLPPSSSDPREVVEAVHMTFEALRRRHLQLDEIQETSKRADLKAGAIMMASNIRANVGKRVGLVPGVEIGDIFYFRMELCIIGLHAPSMGGIDYMSAKFGSDEDSVAICIVAAGGYENVDDDTDTLVYSGSGGNSRNSEERHDQKLERGNLALERSLHRKNEIRVVRGFRDPFCLTGKIYIYDGLYKIQESWKERTKSGINCFKYKLLREPGQPDGAALWKMTQGWIDNPASRGRVILPDLSSAAEALPVCLVNEVDHEKGPGHFTYASQVKYLRPLSSMKPLQGCGCQSVCLPGDPNCACGQHNGGDLPYSSSGLLACRKPIIYECGDACHCTTNCRNRVTQKGVRFHFEVFRTANRGWGLRCWDPIRAGAFICEYTGEVIDELKVNLDDSEDDYIFQTVCPGEKTLKFNFGPELIGEESTYVSADEFEPLPIKISAKKMGNVSRFMNHSCSPNVFWQPVQHDHGDDSHPHIMFFALKHIPPMTELTFDYGVAGSESSELPACTPRFELWYYSLRMTMGFNMNCEETVTFLSKCTCRSLMMHESDSDPDSDRTHWYMSNSDDESFVDKDKDCRRSTVALLLKKGPWTSWEDSILEKYIKKHGERNWKLVQKNTGLLRCGKSCRLRWMNHLRPNLKKGAFSKEEENKIINLHRKMGNKWSRMAADLPGRTDNEIKNYWNTRIKKCKNNRSPLYPANVCNDALNEDQHESADPNVREKLTNNHLEDTTSMYSAPQFSDASISNILDRRLASKDYDSIEDQRNQIEVVAKYEIPLPVLKTTNNDIFPSASIFANHGISNGNLSALSTTDALQMELPLIQFDPNNQFVYSRAYAMHLTNFALLNDQSEELLNDTDVLNYVVMKEELSGGSLSPTINMPCEAHNSMAASNELVVPQYEGDAPPLQDDFTSYFYLNDTNLSIFEDTNELFLENKLDTKGN

SEQ ID NO: 17307 - protein, 329 aa, Oryza sativa
  Clone ID: TF_OSC900032j.C1.p1.fg
MDMAHERDASSEEEVMGGDLRRGPWTVEEDLLLVNYIAAHGEGRWNSLARSAGLKRTGKSCRLRWLNYLRPDLRRGNITPQEQLLILELHSRWGNRWSKIAQHLPGRTDNEIKNYWRTRVQKHAKQLKCDVNSQQFKDVMRYLWMPRLVERIQAAAAGQQQQQEGGTDTPPLSWQHGGSDGLYESPELPAPDASCWPAEYCAAAGGAQSGGTPAPELSSTTAGSSSLSTDSGAGAQPSWPTQADGAEWFTTACDASSATGGVAMRDTELELAQPPCQGGQTWTTSESSLPGLTFPDLAVADFEIGGFDVDSFWTSMEDDQLWCPTQAAV

SEQ ID NO: 17308 - protein, 359 aa, Oryza sativa
  Clone ID: TF_OSC400549j.C1.p10.fg
MGHHSCCNQQKVKRGLWSPEEDEKLIRYITTHGYGCWSEVPEKAGLQRCGKSCRLRWINYLRPDIRRGRFTAEEEKLIISLHAIVGNRWAHIASHLPGRTDNEIKNYWNSWIKKKIRKPAAAAAAATTTSPNNPPPCSTATSDHHHLPPPAFGGADHHLQLDAIINQNLISSLPPKLATGDDSPPAVPGLPHHCPLFMFDTTTTGAGGAISPPPPSSLIPTHLHHHHHPFIASFTAAMAADTPSYLPPLVDGMAAMGAAMDCSLEDGQTAAAMAATNGYYQHHQKHQQLEIELEEEEQRQLGHHHHQHHHEHEHENHQWDEEEAQHLLMWDQEVLTSSNLEAMQSGAHSLLFMGPNDHD

SEQ ID NO: 17309 - protein, 342 aa, Oryza sativa
  Clone ID: TF_OSC401661j.C1.p13.fg
MAKRAGGARKKLRRGLWSPEEDEKLMNHIAKYGHGCWSSVPKLAGLERCGKSCRLRWINYLRPDLKRGAFSQEEEDLIIHLHSMLGNKWSQIAAQLPGRTDNEVKNFWNSYIKKKLRQRGIDPATHKPLAEVVAAAACARTPAVFSDAELILSSIGAQPPPESYDGSRYSTECGAASVGGDGSLSSLSGYSQATAEFAVDGASASALLHCGGGGPTSSGGGAPPAPTAAVIPSVSSSSTLNSMVGLSPAATTTTTTTDEQYGNTNHLPWLELGPSTTTPSSSAAAATFDHYGAALDELKWSDYVFDGYNHQLPPYNHGGIYGGGDSKDTAVHFDAHALGNWC

SEQ ID NO: 17310 - protein, 358 aa, Oryza sativa
  Clone ID: TF_OSC401363j.C1.p3.fg
MQRECIVSGPIDGSISATGDGARRGVGGMRGHRSRVRGDGGLRMHRSGSDPDSDKAHWYMSNSDDESFVDKDKDCRRGTVAPLLKKGPWTSWENSILEKYIKKHGERNWKLVQKNTGLLSFCITRRTDNEIKNYWNTRIKKCKNNRWLLYPANVCNDALNEDQYGSVDPSVREKLTNNQLEDTTSMYSAPQFSYASISNILDRRLASKDYDSIEDQRNRIEVAAEYEISLPVLKTTNNDIFPSASIFANHGISNGNLSALSTTDALQMELPLIQFDPNNQFIYSRDYATHLTNLALLNDQAEELLNHIDVLNYVVMKKELSGGSLSPTINMPCKATAYSSELPLCKGYREQDLDFYTQ

SEQ ID NO: 17311 - protein, 323 aa, Oryza sativa
  Clone ID: TF_OSC401373j.C1.p1.fg
MSYNLKQRMHRSGSDPDSDKAHWYMSNSDDESFVDKDKDCRRGTVAPLLKKGPWTSWENSILEKYIKKHGERNWKLVQKNTGLLSFCITRRTDNEIKNYWNTRIKKCKNNRWLLYPANVCNDALNEDQYGSVDPSVREKLTNNQLEDTTSMYSAPQFSYASISNILDRRLASKDYDSIEDQRNRIEVAAEYEISLPVLKTTNNDIFPSASIFANHGISNGNLSALSTTDALQMELPLIQFDPNNQFIYSRDYATHLTNLALLNDQAEELLNHIDVLNYVVMKKELSGGSLSPTINMPCKATAYSSELPLCKGYREQDLDFYTQ

SEQ ID NO: 17312 - protein, 207 aa, Oryza sativa
  Clone ID: TF_OSC101345j.C1.p9.np
LAGSQGESPAMLHPNGDGDGDGGDDEGDASGGEEEQGGGIPLKKGPWTPDIPLKKGPWTPDEDKRLREYVEAHGEGNWNRVQRNAGLNRCGKSCRLRWANHLKPDLKKGPFSKEEEEMIIKLHLWLGNKWAKMANSLPGRTDNEIKNFWNTRCKRIQRTGEPLYPKELVDRSGSDCESPDESRAKKRTNEVLQGNGQSYKEVFFDNF

SEQ ID NO: 17313 - protein, 358 aa, Oryza sativa
  Clone ID: TF_OSC400850j.C1.p69.fg
MSQRRVAGPMGVMSKQQQEAMAEEMMELRRGPWTLEEDNLLMNYIACHGEGRWNLLARCSGLKRTGKSCRLRWLNYLKPDIKRGNLTPEEQLLILELHSRWGNRWSRIAQHLPGRTDNEIKNYWRTRVQKQARQLKVDANSTVFRDAVRCYWMPRLLEKMAGAATDPTPPPPPPLHHHAAMATASSSPFDFDTHLQQAEAATACVVPNNVYHHHIDPSPSTSTSAGSTAAAAAFQPLPCFSELRWDQQMQSSGELDDGAAGVFVDSASALGSLSLDGLDLGPAEYYSDSTLLDYLNSSCTGSAMMTMMTASGNAGSYNYCGGAMDGGDTWRSDELMDELFHHIDQDRSTSDRSSKNQK

SEQ ID NO: 17314 - protein, 300 aa, Oryza sativa
  Clone ID: TF_OSC900070j.C1.p1.fg
MAASQRSRSTAAQLDVDDQAAADQLMTMMRRPAAVLQDEAAAEEEASAAAADLQLELRRGPWTVDEDLTLVNYIADHGEGRWNSLARAAGLKRTGKSCRLRWLNYLRPDVKRGNFTADEQLLILDLHSRWGNRWSKIAQHLPGRTDNEIKNYWRTRVQKHAKQLNCDANSARFKDAMRYLWMPRLADASQLGDHHGYNSTTAMGDAHGMPVMTSSSSDSFATSESYDGGLYANVQDNEMVNGGDYWMQGANKGFCSNYESEQLHPHEHSQFQDPDLVGWVQGFSEGISENFWSLEDIWKM

SEQ ID NO: 17315 - protein, 162 aa, Oryza sativa
  Clone ID: TF_OSC401693j.C1.p25.gm
MDQEVIMATPPLTPPPRARSCRDRWRHHLARDVYHRPFTAREDDELLRLHYRLGDRWKEIGRAVYGRTSRVMKHRWRELRRGGFPAAATRKEQAPAMDADDMVESEMEESDQSLPPLTKKAELQLVYRSFIGEISLNLRLGKFDITAKPLAYPTPYRFDGAV

SEQ ID NO: 17316 - protein, 285 aa, Oryza sativa
  Clone ID: TF_OSC102044j.C1.p20.fg
MGMEAECDRIKGPWSPEEDEALRRLVERHGARNWTAIGRGIPGRWSAARSRRRRTPRYSGRTPASATAGAAIARLLPGRTDNAVKNHWNSSLKRKLATATDGGEIDRPCKRVSPGPGSPTGSERSELSHGGCGSGSGGGQVFRPVPRPGGFDAISAADVVRPPRRRDDNDDDGDDDPLTSLSLSLSLPGFHHDSARSHFQELPSPSRSPSPPPSPPAASPSAYPFNADLVSAMQEMIRTEVRNYMAGVGLRAGCGPGAVAESFMPQLVDGVMRAAAERVGVVTRQ

SEQ ID NO: 17317 - protein, 256 aa, Oryza sativa
  Clone ID: TF_OSC20253j.C1.p1.fg
MENKDTTEKARLLSGALSKEGSSGTSNEGKKIQANGVDGSKAKSTSSGEKVTQGNTLSNYEKKEEKPWGREEIELLRKAIQKYPKGTSRRWEVVSEFIGTGRSVEEILKATKTVLLQKPDSTKAFDSFLEKRKPAPSIASPLSVRTETVGLPTEKAAGNASSKAPAQHASSKTSDEKAAAPAPAPVSNGTPSGTADPEAWSEAQVLALVQALKAFPKDASQRWERVAAAVPGKTMVQCKKKVAEMQKNFRSKKSAE

SEQ ID NO: 17318 - protein, 449 aa, Oryza sativa
  Clone ID: TF_OSC900266j.C1.p3.fg
MSASASAACLLPPRGGSLARPDTALPPASQPATVAVKQNIPRLASPRLAVTSITLLPRRGRRCAVDLLLLHLHRLLLFLSLFSEETPNLFLPRKPAAFLKRIKSPSLIRRRNPSPQNLAAPRAVLGFELMAVEEASSSSGGGRGGGGGGGGEEGLSGCGGGWTREQEKAFENALATVGDDEEEGDGLWEKLAEAVEGKTADEVRRHYELLVEDVDGIEAGRVPLLVYAGDGGVEEGSAGGGKKGSAGGGGGGGGGGGHGEKGSAKSAEQERRKGIAWTEDEHRLFLLGLEKYGKGDWRSISRNFVISRTPTQVASHAQKYFIRLNSMNRERRRSSIHDITSVNNGDTSAAQGPITGQPNGPSANPGKSSKQSPQPANAPPGVDAYGTTIGQPVGGPLVSAVGTPVTLPVPAAPHIAYGMHAPVPGAVVPGAPVNMPPMPYPMPPPTSHG

SEQ ID NO: 17319 - protein, 383 aa, Oryza sativa
  Clone ID: TF_OSC403211j.C1.p2.fg
MTRDGALPASGGGGAAEGPRRCSQCGHHGHNARTCTARGPVKLFGVRIGDKPPTAAAGGGGGMRKSASMGSLAQLAEGGGGGGGREEGYGSDGNDDKRRKRGEAWSEEEHKKFLLGLSKLGKGDWRGISRNYVGSRTPTQVASHAQKYFIRQTNVHRRKRRSSLFDMVIDDSDDQPLSRTSSQEVEVEENLEDGHPVTAPVIPPAPVPMLSSSLVPPPVPAMAPVAPGPVLTSASATLPVSAVAPQTDEKEQVASGSNTTETGAAIPEVMPPYGYPMMLPPYYPPAFVPMPYYGYVPVFYAPPGAVQAQHEVVKPVAVHSKPPVHIDELYSMSELSLKGEAGVKNGTPNSLLPPRPIGRPDRQSAFHGKGPSDGSSNGLIPAK

SEQ ID NO: 17320 - protein, 439 aa, Oryza sativa
  unsure (1)..(439): unsure at all Xaa locations
  Clone ID: TF_OSC401545j.C1.p8.np
HSQIQXEFGFVRTYMHVYTSSQEQQSNVDHAQWTMGSNFQILVGPLLHHVERCHATKAHHHKWTKSPHKLISVMCMMATAAQCPHLHAHRNEFHVSSFSACPGRIHDNSVNKKAYFNRQQNGHQELHLVDHHSTMSLTAMNTILHLLVDLFFPLQPTMMAMSTTLKEEKRMLSSSIGLRRIRKASPHLPLFTPKSEVSASGKSLKKANVVKASGKSLKKANVVKGQWTLEEDRKLVKLVEQFGLRKWSHIAQILPGRVGKQCRERWHNHLRPNIKKDTWSEEEDIVLIQTHKEVGNKWAEIAKHLPGRTENSIKNHWNATKRRQFARRRSRASSKNPKSGTLLQNYIKSLGIGPIKSSVRQAPPESTAVSSSSPASTQKLAEVNGKIRPDSNPSNQMVTQGILTMDENSYIQTNSCEELLVSTYDDLCLDMCDHLFETK

SEQ ID NO: 17321 - protein, 321 aa, Oryza sativa
  Clone ID: TF_OSC19368j.C1.p1.fg
MGRPPCCDKVGVKKGPWTPEEDLMLVSYIQEHGAGNWRAVPTNTGLMRCSKSCRLRWTNYLRPGIKRGNFTEQEEKLIVHLQALLGNRWAAIASYLPERTDNDIKNYWNTHLKKKLKKMQAAEGGEDSGAASEGGGGRGDGDGGGKSVKAAAPKGQWERRLQTDIHTARQALRDALSLDHPDPSPATAAAAATPAGSSAAYASSADNIARLLQGWMRPGGGGGGNGKGPEASGSTSTTATTQQQPQCSGEGAASASASASQSGAAAAATAQTPECSTETSKMATGGGAGGPAPAFSMLESWLLDDGGMGLMDVVPLGDPSF

SEQ ID NO: 17322 - protein, 321 aa, Oryza sativa
  Clone ID: TF_OSC900251j.C1.p1.fg
MGRPPCCDKVGVKKGPWTPEEDLMLVSYIQEHGAGNWRAVPTNTGLMRCSKSCRLRWTNYLRPGIKRGNFTEQEEKLIVHLQALLGNRWAAIASYLPERTDNDIKNYWNTHLKKKLKKMQAAGGGEDSGAASEGGGGRGDGDGGGKSVKAAAPKGQWERRLQTDIHTARQALRDALSLDHPDPSPATAAAAATPAGSSAAYASSADNIARLLQGWMRPGGGGGGNGKGPEASGSTSTTATTQQQPQCSGEGAASASASASQSGAAAAATAQTPECSTETSKMATGGGAGGPAPAFSMLESWLLDDGGMGLMDVVPLGDPSF

SEQ ID NO: 17323 - protein, 260 aa, Oryza sativa
  Clone ID: TF_OSC900240j.C1.p12.fg
MGRSPCCEKAHTNKGAWTKEEDQRLIAYIRAHGEGCWRSLPKAAGLLRCGKSCRLRWMNYLRPDLKRGNFTDDEDELIIRLHSLLGNKWSLIAGQLPGRTDNEIKNYWNTHIKRKLLARGIDPQTHRPLLSGGDGIAASNKAAPPPPHPISVPAKAAAAAIFAVAKPPPPPRPVDSSDDGCRSSSGTTSTGEPRCPDLNLELSVGPTPSSPPAETPTSARPVCLCYHLGFRGGEACSCQADSKGPHEFRYFRPLEQGQYI

SEQ ID NO: 17324 - protein, 78 aa, Oryza sativa
  Clone ID: TF_OSC401122j.C1.p79.fg
MDSSSGSQGKNSKTSDGCETKEVNNTAQNFVHFTEEEEDLVFRMHRLVGNRWELIAGRIPGRTAKEVEMFWAVKHQNT

SEQ ID NO: 17325 - protein, 310 aa, Oryza sativa
  Clone ID: TF_OSC900203j.C1.p13.gm
MGRRACCAKEGMKRGAWTSKEDDVLASYIKSHGEGKWREVPQRAGLRRCGKSCRLRWLNYLRPNIKRGNIDDDEELIVRLHTLLGNRLPGRTDNEIKNYWNSTLSRKIGTAATAAAGSRGGSTPDTARATDAASSSSVVPPGQQQQPASRADTDTATAAAAAAATTTTVWAPKAVRCTRGFFFHDRETAPLAAAAPAPAGELGDGDDVDCDYYCSGSSSAATTTSSSSLPAVVEPCFSAGDDWMDDVRALASFLDTDDAWNLSRGVAAAAVAPPDPRVGWPPLDLPQPSRATSSSTPLSCPTTFSSPLSP

SEQ ID NO: 17326 - protein, 227 aa, Oryza sativa
  Clone ID: TF_OSC100886j.C1.p2.fg
MPDQRRGTTALLPTARHGPAASDRHHSASAARRDAAATRPATSVAAANTLVSSSLIEIESTHTPPTTGRPPRTGEQDGEAAVLRQGWVKKGPWTPEEDLMLASYIQEHGSGNWRAVPTNTGVMRCSKSCRLRWTNYLRPGIKRGNFTEQEEKLIVHLQALLGNRRDHMEVISPMKDGTFIDWDIVDNIWNHAFSFYPEEHPMLIVEPSTNTGQQREKYLLTLKIMKA

SEQ ID NO: 17327 - protein, 377 aa, Oryza sativa
  Clone ID: TF_OSC900148j.C1.p12.fg
MGRAPCCDKATVKKGPWAPEEDAALKAYVDAHGTGGNWIALPHKIGLNRCGKSCRLRWLNYLRPNIRHGGFTEDEDRLICSLYIAIGSRWATIAAQLPGRTDNDIKNYWNSKLKRRLLGGGRRPRGAPPRLVLAGPGPAVTAAATSRNAMAASAIERMQLSVRLRRLEAAAPPPPQPFTFYGSNNLAAPPWQQPISPAAGGSSEMPRRLHHHHPSGAAATSSYSGLISSWPSSRSHIIHDAWLDASSTPPLSTTSMGDAATTTTTAGGESSSSTPTVSTATTPFIGGSIDMDDEIDMLLQQIRCFDENGDDGDDDADQRLIVGDEAAAGAENYLRALIDEAAANGGDVGVGSWSSCSTPGVDSVFHEYAQLDYGQYN

SEQ ID NO: 17328 - protein, 2359 aa, Oryza sativa
  Clone ID: TF_OSC24631j.C1.p2.fg
MGRSPCCEKAHTNKGAWTKEEDQRLIAYIKANGEGCWRSLPKAAGLLRCGKSCRLRWINYLRPDLKRGNFTEEEDEFIIKLHELLGNKWSLIAGRLPGRTDNEIKNYWNTHIKRKLLARGVDPQTHRPLNAAADHHQQQQLQAPRRFAAAPAGHHHHHPDHFAVLSNSPEACSHSSDDEPSSATPPPPPRHLGIDLNLSISLAPYQPQDQTSEPMKQEEDDEASATANGAGNAAMTTTATTAAVCLCLNRLGLHGGEVEMDRQWMYADRRSKEFIDGVHYFLRVAEANRQRGFICCPCNKCKNQKEYSASRTIHFHLFESGFMPSYNCWTSHGEQGVEMEEDEVEDDNIPDFAQYVGFEGNQTGEEEIAADGNDVADDLGQMLQDAREDCESEKEAHKLDKMLEDHRNSLYPGCEQGHKKLDTTLELLQWKAKNGVSDKAFGDLLKLVKNILPGGNKLPETTYEAKKIVCPLGLEVHKIHACPNDCILYRGEEYENLEACPVCKALRYKIRRDDPGEVNGQLTKKRIPAKVMWYFPIIPRLRRLFRNKGNARMLRWHAEERQQDGMLRHPADGSQWRNIDRKFKEFGKDARNIRFGPKQPGNDIDVYLRPLVEDLKQLWKKEGVPVWDEDKQEEFNLRALLFVTINNWPALSNLSGQSNKGYKACTHCMDETESTYLKHCRKVVYMGHRRFLAANHPVRKKGKHFEHKADHRTKPKHRSGKTVFAMVKDLKVVFGKGPGSQHIESEDGHAAMWKKNSIFWELPYWEFLDVRHAIDVMHLTKNLCVNLLGFLGVYGKSKDTLEARNDLKHMEQRGDLHPEPKEKGSHYLSPASYTLSKAEKESMFECLESIKVPSGYSTNIKRIISTKEKKFTNLKSHDCHVLMTQLLPVVIRGILPDNVRATITKLCAFMNAISQKVIDPDRLEALQNEVVQCLVSFELIFPPSFFNIMTHLLCHLVKEIRILGPMYLHNMFPFERYMGVLKKYVRNRARPEASIAKGYGTEEVIEFCVEFIEDLRPIGVPESRHEGRLRGKGTLGRKAIMTVDNNLFRKAHFTVLQHSSLVAPYIEEHLALVRARNIGKSDAWITRHHIDTFPAWLRQHLMGNESINQQLAFLARGPSGSIATFQGYEINGYTFYTRAQDMKSTNQNSAVRVDAMGHDGTTATYYGAIEDIWELDYGPLKVPLFRCQWVRLTGGGVMIDDSGMTTVDLNKVGYSDEPFVLANDVTQVFFVKDMSSKGKKGRGPDEPKRQVVLPGKRKIVGVEDKTDEDYDQLDGQPPFTVTIDPSILLSNEDTPYSRSDHKEGTIMADRDEEQILYDTIAEGSSQYWNEEEGNEDPNQYLNEEGNVERDAEGNQQGHVERDVEGNQEEEASGSQPSVGQKRARGQRGAAKKLEGRHIITEVEEDGRPSAPAEAAKNYVRHSGWVVRDNVPVSTVYWRRTRARGDHESFVQDSEKEMLWTTMLETFTLPAGTEDKVKRWTLKKMAEQFQSFKGDLYQKYILKGQTPNFDTFPKLRDHWDEFVAYKTGEQGKAMMERNKENAAKKKYHHHLGSGGYSVAMPKWEQMEASLIERGIEPATANWPERSKFWYYAHGGTLNPADGSLVFGYQIQEAVRRLTDAVEASSQGTFRPDRDRDELTLALQTPEHPGRTRGKGVIPWKIGFKEDIHTYRSRIRSKRDTEAKIADLEFRVSSYELNMQEEVARKVDERMAAHRSHDPQPTIPPAMVSPSGNRSSCASTGQVGSQSMDAMQTQDESTCPVDDITQRTPCELHIPFKNLSIKVASGMAIPTDPSGTYHCRPIPAGYSKVEVELVEGAYEDLELDYPGGDGETHLRDTCHAIILWRRRYIILPGRQAASRAPSPPAPPSPPQDPAPSPPHAPPAPSPPQAPASTPQDPAPTPPRAPTPTPPQAPVPAPSKSRAPPAPPLAHTRATKKAKVDAAKNKDPGYDCTQEELDAYVASEVKRQFKPRSPEKKIPIDPSVRNFFRGMSASVKEAIKLSDYEQTLKKASSGKSKPVPQLGEQPNQEIEPLVTGKEMTIEQFITDTGLTTDQLLGVAPIEKAEVKYMYELGKPLVKPELLQSLPTQMYKFHQLYMEMSATGREMIGARIRDTDFLQGDDILWINFRGIYELYQLDALDVSIMSCWILMEIQRARRRRVFDTGFIDPRKVNVAMLDQYPQETEDNLVHLLKAQHYKTFILLPYNTEFHWVLLLIDLEACTVNVYDSMDKKESTFDKVFELIDRAWYRFRHLVRGKWRERLRRKFKFPCAKQKQGTNLCGYYVCEYCHCLADQIITTRELDFIRMRDNLTTHKEFIAAVQEQLMGFINEEILDPKGEFYYDGNTIHRSLASELAASTTTSKS

SEQ ID NO: 17329 - protein, 261 aa, Oryza sativa
  Clone ID: TF_OSC26269j.C1.p1.fg
MGRSPCCEKAHTNKGAWTKEEDQRLIAYIKANGEGCWRSLPKAAGLLRCGKSCRLRWINYLRPDLKRGNFTEEEDEFIIKLHELLGNKWSLIAGRLPGRTDNEIKNYWNTHIKRKLLARGVDPQTHRPLNAAADHHQQQQLQAPRRFAAAPAGHHHHHPDHFAVLSNSPEACSHSSDDEPSSATPPPPPRHLGIDLNLSISLAPYQPQDQTSEPMKQEEDDEASATANGAGNAAMTTTATTAAVCLCLNRLGLHGGEPRPE

SEQ ID NO: 17330 - protein, 2406 aa, Oryza sativa
  Clone ID: TF_OSC900391j.C1.p27.fg
MGRSPCCEKAHTNKGAWTKEEDQRLIAYIKANGEGCWRSLPKAAGLLRCGKSCRLRWINYLRPDLKRGNFTEEEDEFIIKLHELLGNKWSLIAGRLPGRTDNEIKNYWNTHIKRKLLARGVDPQTHRPLNAAADHHQQQQLQAPRRFAAAPAGHHHHHPDHFAVLSNSPEACSHSSDDEPSSATPPPPPRHLGIDLNLSISLAPYQPQDQTSEPMKQEEDDEASATANGAGNAAMTTTATTAAVCLCLNRLGLHGGEVEMDRQWMYADRRSKEFIDGVHYFLRVAEANRQRGFICCPCNKCKNQKEYSASRTIHFHLFESGFMPSYNCWTSHGEQGVEMEEDEVEDDNIPDFAQYVGFEGNQTGEEEIAADGNDVADDLGQMLQDAREDCESEKEAHKLDKMLEDHRNSLYPGCEQGHKKLDTTLELLQWKAKNGVSDKAFGDLLKLVKNILPGGNKLPETTYEAKKIVCPLGLEVHKIHACPNDCILYRGEEYENLEACPVCKALRYKIRRDDPGEVNGQLTKKRIPAKVMWYFPIIPRLRRLFRNKGNARMLRWHAEERQQDGMLRHPADGSQWRNIDRKFKEFGKDARNIRFGLSTDGMNPFGEMSSGHSTWPVTMCIYNLPPWLCMKRKYIMMPIIIQGPKQPGNDIDVYLRPLVEDLKQLWKKEGVPVWDEDKQEEFNLRALLFVTINNWPALSNLSGQSNKGYKACTHCMDETESTYLKHCRKVVYMGHRRFLAANHPVRKKGKHFEHKADHRTKPKHRSGKTVFAMVKDLKVVFGKGPGSQHIESEDGHAAMWKKNSIFWELPYWEFLDVRHAIDVMHLTKNLCVNLLGFLGVYGKSKDTLEARNDLKHMEQRGDLHPEPKEKGSHYLSPASYTLSKAEKESMFECLESIKVPSGYSTNIKRIISTKEKKFTNLKSHDCHVLMTQLLPVVIRGILPDNVRATITKLCAFMNAISQKVIDPDRLEALQNEVVQCLVSFELIFPPSFFNIMTHLLCHLVKEIRILGPMYLHNMFPFERYMGVLKKYVRNRARPEASIAKGYGTEEVIEFCVEFIEDLRPIGVPESRHEGRLRGKGTLGRKAIMTVDNNLFRKAHFTVLQHSSLVAPYIEEHLALVRARNIGKSDAWITRHHIDTFPAWLRQHLMGNESINQQLAFLARGPSGSIATFQGYEINGYTFYTRAQDMKSTNQNSAVRVDAMGHDGTTATYYGAIEDIWELDYGPLKVPLFRCQWVRLTGGGVMIDDSGMTTVDLNKVGYSDEPFVLANDVTQVFFVKDMSSKGKKGRGPDEPKRQVVLPGKRKIVGVEDKTDEDYDQLDGQPPFTVTIDPSILLSNEDTPYSRSDHKEGTIMADRDEEQILYDTIAEGSSQYWNEEEGNEDPNQYLNEEGNVERDAEGNQQGHVERDVEGNQEEEASGSQPSVGQKRARGQRGAAKKLEGRHIITEVEEDGRPSAPAEAAKNYVRHSGWVVRDNVPVSTVYWRRTRARGDHESFVQDSEKEMLWTTMLETFTLPAGTEDKVKRWTLKKMAEQFQSFKGDLYQKYILKGQTPNFDTFPKLRDHWDEFVAYKTGEQGKAMMERNKENAAKKKYHHHLGSGGYSVAMPKWEQMEASLIERGIEPATANWPERSKFWYYAHGGTLNPADGSLVFGYQIQEAVRRLTDAVEASSQGTFRPDRDRDELTLALQTPEHPGRTRGKGVIPWKIGFKEDIHTYRSRIRSKRDTEAKIADLEFRVSSYELNMQEEVARKVDERMAAHRSHDPQPTIPPAMVSPSGNRSSCASTGQVGSQSMDAMQTQDESTCPVDDITQRTPCELHIPFKNLSIKVASGMAIPTDPSGTYHCRPIPAGYSKVEVELVEGAYEDLELDYPGGDGETHLRDTCHAIILWRRRYIILPGRQAASRAPSPPAPPSPPQDPAPSPPHAPPAPSPPQAPASTPQDPAPTPPRAPTPTPPQAPVPAPSKSRAPPAPPLAHTRATKKAKVDAAKNKDPGYDCTQEELDAYVASEVKRQFKPRSPEKKIPIDPSVRNFFRGMSASVKEAIKLSDYEQTLKKASSGKSKPVPQLGEQPNQEIEPLVTGKEMTIEQFITDTGLTTDQLLGVAPIEKAEVKYMYELGKPLVKPELLQSLPTQMYKFHQLYMEMSATGREMIGARIRDTDFLQGDDILWINFRGIYELYQLDALDVSIMSCWILMEIQRARRRRVFDTGFIDPRKVNVAMLDQYPQETEDNLVHLLKAQHYKTFILLPYNTEFHWVLLLIDLEACTVNVYDSMDKKESTFDKVFELIDRAWYRFRHLVRGKWRERLRRKFKFPCAKQKQGTNLCGYYVCEYCHCLADQIITTRELDFIRMRDNLTTHKEFIAAVQEQLMGFINEEILDPKGEFYYDGNTIHRSLASELAASTTTSKS

SEQ ID NO: 17331 - protein, 228 aa, Oryza sativa
  Clone ID: TF_OSC414037j.C1.p7.fg
MATRMCGRAGEPAVRKGPWTLEEDLILVSYISQNGEGSWDNLARSAGLNRNGKSCRLRWLNYLRPGVRRGSITPEEDMVIRELHSRWGNRWSKIAKHLPGRTDNEIKNYWRTKIHRKPRGRSQLLQEPCEDAMGMGMSTTTSEAASTSASSGQSQASPGVWDEYMQASSFPHPELVSFAADHHLEMAGVGEVAAAAAAQFVPTEFGFNDGFWNFVDNFWETMPVSDVV

SEQ ID NO: 17332 - protein, 301 aa, Oryza sativa
  Clone ID: TF_OSC400231j.C1.p4.fg
MARKCSYCGNYGHNSRTCSSSASAGHRDTTMLCDGGDGGGGSGLRLFGVQVHVAAGGGGGGGGGGLPMKKSYSMDCLQLAAAGAAPGSLVSPSSSSSSSMLLSIDEGGLERASNGYLSDGPHGRIVQERKKGVPWSEEEHRLFLVGLEKLGKGDWRGISRSYVTTRTPTQVASHAQKFFLRQSSIGKKKRRSSLFDMVPICENGARVSEQLSGEGAAAAAAASTSLSLMNTHETSSDRVAAIDLNSTEEDDTVGASGRPFFPVVLMEQQQQASHGHGHHHHCTPLDLELGMSVSSTPSIGT

SEQ ID NO: 17333 - protein, 1666 aa, Oryza sativa
  Clone ID: TF_OSC900286j.C1.p9.fg
MSSSAARPYQGASASAHAAADASPTWGALGAAACTSDCLPDSTPRISSAACSTGGGEGKAWTSTSLSDLRRPTSAAAAATDSAGDGSPGIGGGRRRCRVGFFAAHGYYRQGGGSYDRSYPDESLGYTPSRSDRYWLDDDGGGGGYKGFSRYGGGGGGGSRRDGRDMRGSYRRSPFRGYGSDFSRNHQEHPPPPLRRSPLRSVAVPMSYDPPGDRADRGDRDHHHRVTPWRPLRRRESRSDAADAAGAGPVPVGQAAAAAASEKDVSARSSAVAAPQVSEEEAPRKKPRLGWGQGLAKYEKQKVQGPAESAEAVAEGSPTATEQKGITHTPAPAPCVSPVAAPSPTPCASPVAAPSPAPCVSPVAAPSPAPPCKSPVPEDKSCELTANTVTESNKNIPGPDVQACNNEVPTKLDQLEGDPIDSLAKVLSELVQHEDSCSGDSKRLSNVSKLLLLKESISKELEKTELEIDSLEGELKSVNVEARNRTLKDPPTAVTYAQNPSPSPVKEQGELTPSPKISMEQDADVKGSELMEIETAQAHNAKAVSSEESVACPGVALGQVPAAADVIPSDPCGKTGSGIDVDIEQREENPCQETFNAMKADGSSDLATRPCSYREVKYNLMDQIIAANRSEAKKNSQLLFKPVPADRSNLDLLASSYLSSQMKNDVIIKKKHAILKNRQRFKEQILTFKFRVLRHLWKEDVRLLSVRKQRSKSHKRTDQSNRSSQSGSQRQRSSNRSRLAVPAGNLSTFPITEMSGVARKLFSEFQLKRCRNYLKMPALIVDEKEKAGAKFVSKNGLVEDPVSVEKERALINPWIQEEKEIFMEKLATFGKDFSKISSFLQHKTTADCIEFYYKHHKSDSFREVKKLLDLRQQQQPANNYLGAVSGKKWNPEANAASLDMLGVATEVAAQGLEYVNEVKKNSAKSILRTVCGVDNSTKGSEKDCVGDVSLHERESVAADVLAGICGTLSPEGMGSCITSSADPGQKIGIISRMEHLLTPEADKNFDDDGTLSDQECEVDIVDWNDDEKSSFIEAMNRYGKDFARISSYVKSKSFEQCKVFFSKARKSLGLDLIHQGAADAGFPTGDANGGRSGTDGACIAEMDSAICSAQSCPKVEIDACPVSDGEIQGHNPLSDIASRQPEADKSNMPDVVDINVEEGESKAEKDCSILVDHKQLREDINQTSCARIDINCPESTDKLQDIEDVTPVNMHGDDLMATSVEQVAAAHVESRSSLHSEGIGIDVSRIEGCSHESTIGKGGKSTPSVCLPAENGVSKENIIHFSNMDGASSISPAFTSNYQQSKLADPIQSKPKPLTPKDLMPVQFSSSLPDPTSICFEGIAAITTPNFEDHGNRASIASGAKDVNMFPTFKDQSSNRHDALFSNVDGYMQQRRNNHFGTEVCGLSESTGISQSDQFTVSKFQNGRPSSLGLSNGNLGVLSTGRREEAREGLFRPCSVKTSAGNEEQQKRPGDVKLFGQILSHQSSLQSSGSSVHGSKSKPPSPKVDKPASSRLLSNPRERLVYSSRPPIIANLGLEERAMRSFDHMDGRTIQPEPMVMVAKCQRPSAGVPVYSTKNGALSVFAEFQQPSMPPHTSDHKLLENFADLHKRNGIELLSGFQQPGRLGGAGVLVSGVSDPVAALKAQYGSGSKMLSSSNDVDTWKDIGSR

SEQ ID NO: 17334 - protein, 357 aa, Oryza sativa
  Clone ID: TF_OSC421430j.C1.p7.fg
MGRSPCCEKIGLKKGPWTPEEDQKLLAYIEEHGHGSWRALPSKAGLQRCGKSCRLRWTNYLRPDIKRGKFSLQEEQTIIQLHALLGNRWSAIATHLPKRTDNEIKNYWNTHLKKRLAKMGIDPVTHKAINGTLNNTAGDKSAKVTASLSHMAQWESARLEAEARLARESKMRIAASTPSKLHAQSTNPPASTPSPCFDVLNAWQSAKIDLESPTSTLTFAGSNASMLPFSTTTALELSESNSNVWQQRSDELEGEESEWKFVSKQQLQGMHGKETEEHFIGCEESWFPGTANIGAGFTGMLLDGSNMHDTSECWDESSNGQDEQRSQVSEDAENKNYWNGIFSMVNSEQPPLQPPLL

SEQ ID NO: 17335 - protein, 310 aa, Oryza sativa
  Clone ID: TF_OSC400431j.C1.p29.fg
MARKCSSCGNNGHNSRTCTGQRSLQESGGGYGGGGAGGVRLFGVQLHVGGAPLKKCFSMECLSSPSPSPSPAYYAAVAAAASNSSPTVSSSSSLVSVEEAGEKMANGYLSDGLMARAQERKKGVPWTEEEHRKFLVGLEKLGKGDWRGISRHFVTTRTPTQVASHAQKYFLRQSSLTQKKRRSSLFDVIEDAEKAPSVNERLKLRHETASVPAEMGFPALSLGISSMAQPEAMLLPPPSLTLTPSCSSPAVSSSSSEQPRTIHPSLMVAKPQVQLQLQPPDLELKISTVRQNDQPSSSPRTPFLGTIRVT

SEQ ID NO: 17336 - protein, 350 aa, Oryza sativa
  Clone ID: TF_OSC401426j.C1.p6.gm
MGTETDVWDDTLALAATNHDPEEERRPWLAAAAAAAAAKCRCSRRRRLPEREWTAEEDERLRRLAKENLFRQWWKVAREMPGRSGDSCRARWRHHLARDVYHRPFTARDDEELVRLHRHTGGSWRKISRSVYGRTSAIMRDRWIQLRRSGLVPDAAKTAENAGCPPPAADDSEYMGSEAELKSPPPPPQQQHPLADVLASSLDSCTLASDATDPRDGILALDFAFIGDDLLLHPPLAVVEQRRRRRPLQAAVAVPSPTVSSGGGGALLRLPTGGSGGDVGFPRRSSRPPAPPRPPLLIEAAPFPGSGYDLLLVGRRSRRRLEQVLRWRTRQRRAGGGGGHARAPLFVMNF

SEQ ID NO: 17337 - protein, 281 aa, Oryza sativa
  Clone ID: TF_OSC400282j.C1.p12.fg
MDHYASRGNWFMARKWSPEENKQFERALAGLDLRCPDWDRVARAIPGRSALEVMNHFRDLELDVQQIENGMVPFPVYGAAAAGGAFTLQWDGAHGVGDFRNAYRFGGGGGGKRHFGRTPEQERKKGVPWTEEEHKLFLLGLKKYGKGDWRNISRNFVQTRTPTQVASHAQKYFIRLNSGGKDKRRSSIHDITTVNLTDDRPPSPSQSSLISNQSNTSTLTAAVAPFSSTADVKPQNAANASFNSPSRTLGMAGYGMGLQDQGLQCGGPLHDQLAASRSILF

SEQ ID NO: 17338 - protein, 278 aa, Oryza sativa
  Clone ID: TF_OSC411316j.C1.p6.fg
MMPVSYTPSVSQWLQRCGKSCRLRWINYLRPDLKRGSFSQQEEDLIVALHEILGNRWSQIASHLPGRTDNEIKNFWNSCLKKKLRQRGLDPATHKPIAAAAAAATSSESAVTQVDEDHKPHGAAAAAAAADGLAANAKQSVFDPFPVTDFGAGFDLGAANMAAALYGSHPDDGAGFVADYSSVLDVSENLGYGESSSNSSNWTCAEVSNVLDSEVLNWAASAGADAAAKAEPFADMEQQHSGYGGEYQVEDDATLEHKFSLPCHEQSLAQFDFNLEYF

SEQ ID NO: 17339 - protein, 321 aa, Oryza sativa
  Clone ID: TF_OSC900018j.C1.p15.fg
MGRAPCCDKASVKKGPWSPEEDAKLKSYIEQNGTGGNWIALPQKIGLKRCGKSCRLRWLNYLRPNIKHGGFSEEEDRIILSLYISIGSRWSIIAAQLPGRTDNDIKNYWNTRLKKKLFGKQSRKDQRQQQHLARQAAAAASDLQIKQEASRGANEADGLAAGANYTWHHHHAMAVPVHPMSAPMVVEGGRVGDDVDESIRKLLFKLGGNPFAASPAPPCIPPPPMYEEAPSFVPPLAHGVPLNEGGMQCSSVLPALELDENFHFNHVKLDGLECLFGMGDHQNMRWNEVSPLVCPNNAVASSSQGMQQYCLVEEPADLGMQ

SEQ ID NO: 17340 - protein, 435 aa, Oryza sativa
  Clone ID: TF_OSC400332j.C1.p18.gm
MGRPPCCEKEGVKKGPWTPEEDMVLASYVQEHGPGNWRAVPPRTGLLRCSKSCRLRWTNYLRPGIRRGGFSHHEERLILHLQALLGNRWAAIASYLPHRTDNDVKNFWNTHLKKKLALTSSSSSPPTPTTPLVARGQWERKLQTDIDLARRALRDALSVDDAASPAMISSGPPAPAAAAAYALSERNISVMLSGWAAPPPARKGLSACNPAAATTTPGGAAAESASTAGTSLELTADCCSGGGDSSASNCLPSSMLLACDDGDATATAAGVAPLSAIESWLLLDDSGEPQLALDEQLLDKQVKEIDWADTFQPLVPKPHGTIYANIEQGLAATRRYPSITQDQNSTESRIDKILRKKKKKKHKAVGRCVDSRRAARRCADSRRAARHEAPRSAAAPQRRPPPRGRRPGLCPSACRREAAGRRPPDGMMEGEGEEL

SEQ ID NO: 17341 - protein, 399 aa, Oryza sativa
  Clone ID: TF_OSC402160j.C1.p5.gm
MGRPPCCEKEGVKKGPWTPEEDMVLASYVQEHGPGNWRAVPPRTGLLRCSKSCRLRWTNYLRPGIRRGGFSHHEERLILHLQALLGNRWAAIASYLPHRTDNDVKNFWNTHLKKKLALTSSSSSPPTPTTPLVARGQWERKLQTDIDLARRALRDALSVDDAASPAMISSGPPAPAAAAAYALSERNISVMLSGWAAPPPARKGLSACNPAAATTTPGGAAAESASTAGTSLELTADCCSGGGDSSASNCLPSSMLLACDDGDATATAAGVAPLSAIESWLLLDDSGEPQLALDEQLLDKQVKEIDWADTFQPLVPKPHGTIYANIEQGLAATRSRRAARRCADSRRAARHEAPRSAAAPQRRPPPRGRRPGLCPSACRREAAGRRPPDGMMEGEGEEL

SEQ ID NO: 17342 - protein, 968 aa, Oryza sativa
  Clone ID: TF_OSC26691j.C1.p3.fg
MDFYSDDSDPDIDEDLQRDLDALRQSCILSGNDPDAAVAQVSACLAAPPAAAAGAEVNGLSDDDDEEEDEDLALVRSIRENLLLNKASPSSPLPRPICAWPPSDSEDDEDDLETLRAIQRRFSHYHSGTSSGSEMNTKTEASKEGSGNIFGNELDEEFDAEKHNKEATTRTGFPKAALLLVDALKKNRACQKFIRRKMITIEAKIEENKDLRDRVKCLLDYQLSCRKAFGKILCQKEDPRVRLISSRKPCAQSTKNKDKKTPALFLGPADNPHVSKYKMVLKQLPMSLQKQPWSDVEKEKLAKGIKQQYQEALILNSINKGSSTGDFSAVDMAYALTNTAGNFEVTPESLRSVLPLINWDKIAAMYLPGRSGAECESRWLNFDDPLISHNAWTAREEKRLILTVQQQGMNNWINIAVTLGTHRTPFQCLVRYQRSLNHCILNKDWAEEEDLQLQAAVNTFGTNWQLVSASMDGRTGNQCSNRWRKTLNPERSRVGRWSLDEDKRLMVAVKLFGSGSWNKIAQFIPGRTQSQCNERWRNVLDPDIDLGEWRPEEDSILLASVDEFGPCWSKIAGAKIPHRTDNMCLRRWRKLCQDKLPSVKAAQQIKKSILQCNFVDRETERPAIGPSDLMPLVRSKVDGSDENTVSAKVRKPRKRSRIPCEDNVLPGDTSNSSPSMNLPLSESIDAEAAVNTTTANSKKKPSRSRSKKQTDENLAVCDVNNSSNCSSGARKRKRSITDKNQVVQKKMKGSISGDNEAVVETVGTISADNEVATKRKTGSTSVGEEGTTKKTTRGSLSGKGEVNKRMRGSISGVQKGATKQRMRGSVSTDNHGAVMKSKRAPSRKSAEENSKADSMANAAFGSDLPTVASEDRDANNGNVKNGRLKSMPRPKQINMTEGSADKFSTSTRLADCMSFGRINGSSRVARHLCVSVKPLSNMIQSNGPSDVSAKDPTSAETDPTSVENSNTA

SEQ ID NO: 17343 - protein, 713 aa, Oryza sativa
  Clone ID: TF_OSC418457j.C1.p24.fg
NKDKKTPALFLGPADNPHVSKYKMVLKQLPMSLQKQPWSDVEKEKLAKGIKQQYQEALILNSINKGSSTGDFSAVDMAYALTNTAGNFEVTPESLRSVLPLINWDKIAAMYLPGRSGAECESRWLNFDDPLISHNAWTAREEKRLILTVQQQGMNNWINIAVTLGTHRTPFQCLVRYQRSLNHCILNKDWAEEEDLQLQAAVNTFGTNWQLVSASMDGRTGNQCSNRWRKTLNPERSRVGRWSLDEDKRLMVAVKLFGSGSWNKIAQFIPGRTQSQCNERWRNVLDPDIDLGEWRPEEDSILLASVDEFGPCWSKIAGAKIPHRTDNMCLRRWRKLCQDKLPSVKAAQQIKKSILQCNFVDRETERPAIGPSDLMPLVRSKVDGSDENTVSAKVRKPRKRSRIPCEDNVLPGDTSNSSPSMNLPLSESIDAEAAVNTTTANSKKKPSRSRSKKQTDENLAVCDVNNSSNCSSGARKRKRSITDKNQVVQKKMKGSISGDNEAVVETVGTISADNEVATKRKTGSTSVGEEGTTKKTTRGSLSGKGEVNKRMRGSISGVQKGATKQRMRGSVSTDNHGAVMKSKRAPSRKSAEENSKADSMANAAFGSDLPTVASEDRDANNGNVKNGRLKSMPRPKQINMTEGSADKFSTSTRLADCMSFGRINGSSRVARHLCVSVKPLSNMIQSNGPSDVSAKDPTSAETDPTSVENSNTA

SEQ ID NO: 17344 - protein, 107 aa, Oryza sativa
  Clone ID: TF_OSC401122j.C1.p84.fg
MESSGGSQLGKNSKTSDGRETKATSSLLLLITAIHFVALCPKGENEDARKEVNSTAQNFVHFTEEEEDIVFRMHRLVGNRWELIAGRIPGRTAEEVEKFWAIKHQAT

SEQ ID NO: 17345 - protein, 221 aa, Oryza sativa
  Clone ID: TF_OSC411863j.C1.p1.fg
MGRSPCCEKAHTNKGAWTKEEDTAPSFAHIQHSTARAAGGRSPRAAGLLRCGKSCRLRWINYLRPDLKRGNFTDEEDELIIKLHELLGNKWSLIAGRLPGRTDNEIKNYWNTHIKRKLLARGLDPLTHRPLNAAAAVAGHHHLAAGGSSCSPDATSGHSSCSDGDEYRGGIDLNLSISPPSSSSQPSSPPPPPHEAEARRAGATASYTYHHHYSETREKIC

SEQ ID NO: 17346 - protein, 428 aa, Oryza sativa
  Clone ID: TF_OSC401892j.C1.p28.fg
MGRHSCCYKQKLRKGLWSPEEDEKLMNHITKHGHGCWSTVPKLAGLQRCGKSCRLRWINYLRPDLKRGAFSQEEEDLIVELHAVLGNRWSQIATRLPGRTDNEIKNLWNSCIKKKLRQKGIDPNTHKPLAEVDRSKATPTISNDRTSESSDVDPSSGVALHNLSHLLSETAQSSELLPVKVTKPRTQAPGLARLKVPPKELFLDQLTSGHENLPSCRSSGPIPNFPFQQLLCYNNDFNSMDVGNRNSLWYNQNESSSSTISTVMPPVSPSTLSTSTGLNPSPDNANSRGTGIHNSQFYWDTNNPSSSSSTGSSGNNGLGFELQSTSSLLETNIFPWSDLAPEKDSQAQLEEELKWPDLLHGTFSEMPAPMQNLSQSLYEDVVKAESQFNMEGLCAAWSQNLLPQQHLPVVSDMYDKDLQRMSLSFENI

SEQ ID NO: 17347 - protein, 809 aa, Oryza sativa
  Clone ID: TF_OSC32697j.C1.p3.fg
MPRKASSTSDSRLKWRKWKRNPTASPSPSNRSSAAAAAADHSDDSDSAAVNEDDDSAVPEDADDETLAGAEDPVLDLREAEVLPSAEPVSAFPVATRRVVNRPHPSVLAVIAAERSACAGEGSAAVAAAPVLENISYGQQQVLSGVLPDHASLATDTDKPSTYVCTPPNLMEGHGVTKQFQGRLHVVPKHSGPPALCNQKPECLSYNAALTCLRFVDWFSPGIVHRLERQVVPQFFSGKSPGNTPEKYMLLRNKVIAKYLENPSKRLAFAECQGLVANTAELYDLSRIVRFLDTWGIINYLASGSVHRGLRMATSLLREEPTGELQLLTAPLKSIDGLILFDRPKCNLQAEDISSLASNSEVVDFDAGLAELDGKIRERLSESSCSYCLQPLTSLHYQSLKEADIALCSDCFHDARYITGHSSLDFQRIDGDNDRSENDGDSWTDQETLLLLEGIEKYNDNWNNIAEHVGTKSKAQCIYHFIRLPVEDGLLENIEVPDASVPFRAETNGYPHLDCNGSTSGNLPQKIPPDNQLPFINSSNPVMSLVGFLASAMGPRVAASCASAALSVLTVDDDSRVNSEGICSDSRGQGPHPNFRDHNGGVSSSISPEKVKHAAMCGLSAAATKAKLFADQEEREIQRLTATVINHQLKRLELKLKQFAEVETLLLKECEQVERIRQRIASDRVRIVSTRLASPGNSLPGGSTSTMSSNPMSMSPRPMGVPGSMPQSSMPAPFANNMQGHGHPQMAFLQQQQRQQMLSFGPRLPLSAIQTQPSPQTSNIMFNPGMPNSVTPNHHQLLRSSSGNNSSVG

SEQ ID NO: 17348 - protein, 394 aa, Oryza sativa
  Clone ID: TF_OSC400903j.C1.p84.fg
MEWTAAEMDEARSIIARLTNAYDSGTLVAGAGNGDTRHDRIVRELQAWLPWRTMDQLIGLYIELMAEEPAAAQPQYFDAGAVVDPTFDFFNDHNNFLGMPPPPVQQADDHNMNNVVADAGMNYYYGGGGAGGAMVFGGAPMGETVEQAAPPVPVVPVVMNRDDDEVNNQGGGRHRAAPTNTTRRFWTTEEHRQFLRGLRVYGRGEWKSISMNFVRSKTPVQVSSHAQKYFRRVESAAADKQRYSINDVGLNDDTAAMDGTNSYSNNNFGGWQSLAFAGGHLEPVSGGGAARQVIAPASSSAAAMNSAAQFWAPMLFNPQIQQQFMQMQAQTQQAWNDQHMMMAAAPMEGATDTNFEPAGAVNYYYYQQQQEEEEGGAYGVPADQWMMNQNNNMC

SEQ ID NO: 17349 - protein, 563 aa, Oryza sativa
  Clone ID: TF_OSC100909j.C1.p10.fg
MAAAAARDDDLGNDDLDDDRSNPRRQSGGRTAGPIRQGLHGDIGLQMTAAMAGDDANDGGHGWRRWLSTAAVAAVLLSLGDGGDDDKATEGIRGSSAGMYTDKRSVSEDTHLYPSTKPTIKPARPQPQMHPLTAAAKHAITIPPPPPPAAAASYTSSPSSGTSDPSVLDLSSAEIDDDGDGDDDRAEQQEIKNSKELVMGRAPCCDKASVKKGPWSPEEDAKLKAYIEENGTGGNWIALPQKIGLKRCGKSCRLRWLNYLRPNIKHGDFTEEEEHIICSLYISIGSRWSIIAAQLPGRTDNDIKNYWNTKLKKKLLGKRAPSRRARANQDHCGLAGSAAAAMCGGVGTAAAAAPPHQALSSSALERIQLHMRLQGLYNSAFGCTTTSSNGGGVGVAPPQWPKLEALLPSRPLPAVQPTDAVVATVQHPHHLVVGGHTLATAAAAAATTSEAFQAAEHLDPAAATGSNYMPGVAGVEMTSSSSMAGGGGFVAGYGLHDELYDFLFKCESIGGAQGGIIPSSLPELQCPDGSAIIGADEKFSTWTSSSCDYGSGGAGDYVLGYDQ

SEQ ID NO: 17350 - protein, 259 aa, Oryza sativa
  Clone ID: TF_OSC4185j.C1.p1.fg
TPWTEEEHRMFLMGLQKLGKGDWRGISRNFVVSRTPTQVASHAQKYFIRQTNSSRRKRRSSLFDMVPEMPMDESPVVVEQLMLHSTQDEATSSNQLPISHLVKQKEPEFGTHLSDLQLRNHEESDFTEPSLASLHLEMNHAAPFKTKFVLTMPTFYPALIPVPLTLWPPNVANVGESGTNHEILKPTPVNGKEVINKADEVVGMSKLTIGDGSSNSIEPSALSLQLTGPTNTRQSAFHVNPPMAGPDLNKRNNSPIHAV

SEQ ID NO: 17351 - protein, 264 aa, Oryza sativa
  Clone ID: TF_OSC400431j.C1.p25.fg
MGRTPCCDREAVKRGPWSPEEDDALRDYINRHGTAGNWISLPNKAGLRRCGKSCRLRWLNYLRPDIRHGAFTDEEDAIITSLYSKLGSKWSTIAAQLERRTDNDVKNHWNTKLKRRLAAAAACTPLLPLPAPPPLAATHTSPSSSLLLLPPLAVPTVKTEAYTCDDFLQQLLPTATAATALRDPFADGAATDGGSTSASAASSGSNWSADTGVVVVGGGGGGGLFPEFCMSSDDLAGAATAEDDHFIGGGYYYPLDPSLSSSLV

SEQ ID NO: 17352 - protein, 428 aa, Oryza sativa
  Clone ID: TF_OSC400143j.C1.p23.fg
MGRSPCCDENGLKKGPWTTEEDEKLMEYIQKNGHGSWRALPKLAGLNRCGKSCRLRWTNYLRPDIKRGKFTSAEKDTILQLHAVLGNKWSAIAKHLPGRTDNEIKNYWNTHLKKDLIQKGIDPTTHRPRTDFFAALPQLIALANLRQLVGQLPWDDPAAAAAGLQQAEAAQAAKFGQYLHLQALLQPPPPSAATSPRSGCIGGAAAAMPGGDMEQMGAGLLSPPAMSSAALSPMSTSSLSPLPSPMSSTALSPLPPSSFFGNGGQGSFLAGQLPNIQMHGSSLFDQSAAIINDANHNQDYAASTGEREIINGATKTTTTTLLPEGSLPPLADYPTISNLGDVYSTPSCDGNITEFPLLPDALFDELMRDYISNCFLEDWKNTDSKNLDVSDILQIQVAVKILPLASLSGIGPEPHLSVRESAAQCQKA

SEQ ID NO: 17353 - protein, 258 aa, Oryza sativa
  Clone ID: TF_OSC407956j.C1.p2.fg
MGRAPCCEKMGLKRGPWTAEEDRILVAHIERHGHSNWRALPRQAGLLRCGKSCRLRWINYLRPDIKRGNFTREEEDAIIHLHDLLGNRWSAIAARLPGRTDNEIKNVWHTHLKKRLEPKPSSGREAAAPKRKATKKAAAVAVAIDVPTTVPVSPEQSLSTTTTSAATTEEYSYSMASSADHNTTDSFTSEEEFQIDDSFWSETLAMTVDSTDSGMEMSGGDPLGAGGASPSSSNDDDMDDFWLKLFIQAGGMQNLPQI

SEQ ID NO: 17354 - protein, 725 aa, Oryza sativa
  Clone ID: TF_OSC414758j.C1.p1.fg
EDDIIVQMVNKLGPKKWSTIAQALPGRIGKQCRERWHNHLNPGINKEAWTQEEEITLIHAHRMYGNKWAELTKFLPGRTDNAIKNHWNSSVKKKVDSYMSSGLLTQVSCLPLNEYSAHCNSSPALTQQNSEDSGSYAVREVENSSVCSQSSLAKVSCSQVHNANVALGCDLQVNANVDNNEAHDSQSSVGHEACYTSVGAVATAIPEVHYHVSSSNFDPDQHLQEEFAQGLNLHMSMDEVPSNSSFADNPTICSIENHERSLEPYDVAMEMPLSMLPSDSGAEQKLHFMSEADFNSPNCLKSELWQDISLQSLLSGPDAVETDSFSRSNHQSDVYSSQADNEFLAPPYLLQTSNSSSVMEATYGQSPQMSVPPSLICSNVMTDVPSDNRSEPKEMTVSQAEMVTQSSSSSGDAEMSANPGSSNGSDIPSMMERIPECADQHVTNAEEPEASIEKEPSVTPSATADEKQDEGALFYEPPRFPSMDVPFVSCDLVTSGDLQEYSPLGIRQLMRSTMNVCTPMRLWGSPTHDESPDILLKSAAKSFICTPSILKKRHRDLVSPIPDKRIEKKSGTEKDCGVSDTSSIGIQTCFINATKDDAVITKSVLRIERSASSKPLEKKLEFSDENKENLDNTIEQAKDGQSAGNYKHIDEQARGERRTATNITTTYDDLPGNLQPAGILIEPNGDDLVSPDYVCKEGVSAKKLAELIVEKSSACINVDYEYVNM

SEQ ID NO: 17355 - protein, 279 aa, Oryza sativa
  Clone ID: TF_OSC400020j.C1.p1.fg
MGRQPCCDKVGLKKGPWTAEEDQKLVSFLLGNGQCCWRAVPKLAGLLRCGKSCRLRWTNYLRPDLKRGLLSETEEKTVIDLHEQLGNRWSKIASHLPGRTDNEIKNHWNTHIKKKLRKMGIDPVTHKPLYPAPPLADGGSPEQKVPEEEEEVEEKSSAAVESSTSTCAGHDVFCTDEVPMLHLDDIVLPPPCDVVGDTAGSPAESSSTSTSSSGGGGIDEEWLLPIMEWPESMYLMGLDDVDMVTTAAPAMATSWEFEDPFNAYQRIALFDHHHELTWA

SEQ ID NO: 17356 - protein, 366 aa, Oryza sativa
  Clone ID: TF_OSC400426j.C1.p60.fg
MTRRCSHCSNNGHNARTCPARGGGGGGGGVRLFGVRLTSPPEVAMKKSASMSCIASSLGSGGGSGGSSPAGTGRGGGGGGEGAAGYASDDPTHASCSTNGRGERKKGTPWTEEEHRMFLMGLQKLGKGDWRGISRNFVVSRTPTQVASHAQKYFIRQTNSSRRKRRSSLFDMVPEMPMDESPVVVEQLMLHSTQDEATSSNQLPISHLVKQKEPEFARHLSDLQLRKHEESEFTEPSLAALDLEMNHAAPFKTKFVLTMPTFYPALIPVPLTLWPPNVANVGESGTNHEILKPTPVNGKEVINKADEVVGMSKLTIGDGSSNSIEPSALSLQLTGPTNTRQSAFHVNPPMAGPDLNKRNNSPIHAV

SEQ ID NO: 17357 - protein, 378 aa, Oryza sativa
  Clone ID: TF_OSC411834j.C1.p4.fg
MDFSCFNPQPAISHGIPFDSFLLQDELHHHADLDHPFEAEGITVHGSELEGGSVLPFATLHDLDHEFFRRGSRKDFIDNASSIFLLNPKTEVSHLVRDVQVGAFGAYEMNGRLISRNKASRKGIKKADAVKGHWTVEEDRKLVKLVEQFGLKKWSLIGGMLPGRVGKQCRERWFNHLRPNIKKDTWSEEEDMVLIQIHKEVGNRWAEIAKCLPGRTENSIKNHWNATKRRQFARRRNRSTSKSGSTVLQNYIKSLAISPQESQMNNERSESNPSDMMITQGTPCCFDGNNCSQSHTSEENIVPSCGDFAAEMWSGLFDTKEDEEDEAQYLLYDMDTHVDMNCIFSNMDYGSNIEPGLASVVKAECSAESWAVNLKETD

SEQ ID NO: 17358 - protein, 306 aa, Oryza sativa
  Clone ID: TF_OSC400323j.C1.p24.fg
MTSQAATTTTTAAAAAAWTREDDKAFENALAACAAPPPADGGAPDDDWFAALAASVPGARSAEEVRRHYEALVEDVAAIDAGRVPLPRYAGEESAAPPDGAGAAAAASKDGGHRRDERKGGGGGYDGGKSCSKAEQERRKGIPWTEEEHRLFLLGLDKFGKGDWRSISRNFVISRTPTQVASHAQKYFIRLNSMNRDRRRSSIHDITSVTAGDQVAAQQGAPITGHQATGNPAAAALGPPGMKHHHHHHPGGAPPPMPMYSAAPMGHPVAGHMVPAAVGTPVVFPPGHAPYVVPVGYPAPPAKMHQ

SEQ ID NO: 17359 - protein, 398 aa, Oryza sativa
  Clone ID: TF_OSC102162j.C1.p14.fg
MAKQSCCHKKKLRRGLWSPEEDEKLMNHIAKYGHGCWSSVPKLAGLERCGKSCRLRWINYLRPDLKRGTFSQEEEDLIIQLHSMLGNKYVLYSSSTHICQSLSRSVPSLTMAAATATALARWSQIAAQLPGRTDNEVKNFWNSYIKKKLRDRGIDPATHKPLAADSSATPTNTTAAAASRSTATCRAVFSDAELQIPTAAAVQQQQQAPLVGAMQLVDGIKMPLDDYWPAAAAAAAPSSSTTTFSAYHHALSMQQQAAAGCGAAAAFDMDALSHCGVVVAPSASSSSTLTSMAGLSPAAADAAEQSANVAAAAAATTTNLPWLDLGHANPIATMDHYAGVLDELRWSDYFDGAYQAATTATQGGALQGQCLYDGGGGGGKDVDDAVQFVDVHSLSNWC

SEQ ID NO: 17360 - protein, 303 aa, Oryza sativa
  Clone ID: TF_OSC423363j.C1.p16.fg
MLIHGEGSSSSAAAAGGKIKGSWSPEEDEQLRGAVARHGPRNWTAISEEVPGRSGKSCRLRWCNQLSPGVHRRPFTPDEDALIVAAHAKYGNKWATIARLLDGRTDNSVKNHWNSSLRRNRRAAAAAAAAAASVSYQSMDLTEEADNDDEGTSDDSVAIPAQSSPAAVVAGVPVLPPPPPPAKRLCVAPPTGVEHRAPPPDPPTSLSLSPPGAAAAAISASTVVGGSSAARAEEEAVAREKARMEQDPWLMAMMRQMITEEVQRQVSVVYSLVASSAAMAAQTGNAGGVGRKGPDGRPSNGQD

SEQ ID NO: 17361 - protein, 297 aa, Oryza sativa
  Clone ID: TF_OSC411283j.C1.p2.fg
MGCRSCDKPKMNYRKGLWSPEEDQRLRDYIVKHGLGCWSAVPAKAGLQRNGKSCRLRWINYLRPGLKRGMFSQEEEDIVINLQAKLGNKWSQIAMHLPGRTDNEVKNYWNSYLKKRVMQAQGSIPNNLAAAAAEVTSMSTTEPPSLHHHHHHPHHHQIKNSSGSTTTSHDQDANLSSGGSHGGISAPAPVAEPFDQQPKSFVFTGDWMPMSAAAAGQESYSISAQHWPASTASSGNVTPSHGGAFGDQMSGSYGALQQQHQSSAAAAPMAGGGGYFDLLNMGDIYGGFAATSDDLLF

SEQ ID NO: 17362 - protein, 276 aa, Oryza sativa
  Clone ID: TF_OSC400500j.C1.p30.fg
MGRAPCCEKEGLRRGAWSPEEDDRLVAYIRRHGHPNWRALPKQAGLLRCGKSCRLRWINYLRPDIKRGNFTADEEDLIVRLHNSLGNRWSAIAAQMPGRTDNEIKNVWHTHLKKRLDDERKLAAAGGGGGRRPHTRKQPKAAKSAAAVKREATPSVSVDTSSGVTCSTVTESSPSSADGDHRRQQQQTQHAAVKEESFSSGGELPAAAAAPTAAADMDESFWSSTEVTGMMAGLGDMDEELAIAGTSSAAAARSDDMEFWLKMLLESGDMRDLAVL

SEQ ID NO: 17363 - protein, 169 aa, Oryza sativa
  Clone ID: TF_OSC418633j.C1.p10.fg
MDMELSSSSSSTTVASSPASSPPLGRCVLRFRLPPAWTPEEDAVLERLAMEHGSRHWRRVAAQMPRRRSPAQCRDRWGDHLARDVFHRPFTAADDAELARLCLRLDDDAGFAAGRRWKDVSRAVYGRSSCAVKRRWRELRRSDAFLGALWRPRTTTTAPPANAAITTTC

SEQ ID NO: 17364 - protein, 275 aa, Oryza sativa
  Clone ID: TF_OSC401948j.C1.p3.fg
MKRKRPAALRGGEEAAAAALKRGPWTPEEDEVLARFVAREGCDRWRTLPRRAGLLRCGKSCRLRWMNYLRPDIKRCPIADDEEDLILRLHRLLGNRWSLIAGRLPGRTDNEIKNYWNSHLSKKLIAQGIDPRTHKPLTAAADHSNAAAAVAATSYKKAVPAKPPRTASSPAAGIECSDDRARPADGGGDFAAMVSAADAEGFEGGFGDQFCAEDAVHGGFDMGSASAMVGDDDFSSFLDSLINDEQLGDLFVVEGNDHEHGNGEIGHGDVMESKQ

SEQ ID NO: 17365 - protein, 205 aa, Oryza sativa
  Clone ID: TF_OSC401434j.C1.p23.np
SFISLKTYINRSIPSSSPCSQCKETKQDRLVKGGWTREEDEVLRQMVRHHGDRKWAEIAKSLPGRVGKQCRERWTNHLHPDIKKDIWTEEEDRMLIEAHQTYGNSWSAIAKQLPGRSENTIKNHWNATKRSLNSKRRLRKKASKLCQGSLPSLKVTSVAASTCFPRQEPLEPNQAKPKLKAATKEEKREKAAPGQPSHLEECICN

SEQ ID NO: 17366 - protein, 367 aa, Oryza sativa
  Clone ID: TF_OSC401196j.C1.p2.fg
MGRSPCCEQDADVKKGPWTPEEDKLLVEYIGKNGHGSWRRLPKLAGLNRCGKSCRLRWTNYLRPDIKRGGFSDDEERLIIHLHATLGNKWSSIATKLKGRTDNEIKNYWNTHLRKKLLSQGIDPVTHRPRTDLLAGLPNLLAAANLGGAAHQLPLDLNAIKLQADAAKFQILQGLLRVLASTTAPPPTAAVLPGTDLMTSILGATLAANSAGILGQQQQLAGVDLSRLGQYNGNYDNLPPLTNDSCTQQTQPAMSSMSPDSLLNRISSGISGDMLGSPELCHGGDGLSSPELGQGGPSASNMTTSPMAPPPPMVAADDHQCNTNTPSGGGDGMSCEQTPASSTFDGLNLDDIDMEGCWAMTDILLAE

SEQ ID NO: 17367 - protein, 992 aa, Oryza sativa
  Clone ID: TF_OSC414606j.C1.p3.fg
MESLLDLRRLLKKEKSAMNQKGDDLSMGKRLKALLTIVMRTTGPTRRSTKGNWTPEEDAILSRAVQTYNGKNWKKIAECFPDRTDVQCLHRWQKVLNPELVKGPWSKEEDEIIVQMVNKLGPKKWSTIAQALPGRIGKQCRERWYNHLNPGINKEAWTQEEEITLIHAHRMYGNKWAELTKFLPGRTDNSIKNHWNSSVKKKVNSYMSSGLLTQVSCLPLNEYSANCNSSPAMTQQNSEDSGCFAVREVENSSGCSQSSLAKVSCSQVHDTTVPLGCDLQVNANFDKNEAHDSQSSMGPQACYTSAEAVASALPAVHCHVSSSNLDPDQHLQEDFAQGLNLDMTIDEMPTVPSFADNQTVCSIENHERSLEPYDVAMEVPLSMLSSDSGAEQKLHFMSEADFNSPNCLKSELWQDISLQGLLSGPDAVEADSISRSNHQSDVYSSEADTHFLAPPYMPQTSNSSSVMGLADDQSPQMSVPPSLICSNAMTDDAPFDNRPGRKEMPLSQAEVVTQSSSSSGDAEMFANPGCSNDRHVPSSTMESIPECGDQQVTNAEEPEASLEKEPSLTQSVTAPDEQDKGALFYEPPRFPSLDVPFVSCDLVTSGDLQEFSPLGIRQLMHSTMNVCTPMRLWGSPTHDESTGVLLKSAAKSFICTPSILKKRHRDLLSPIPDKRIEKKYGTEKDRGVSDTSSTGIQTSCINATKDDALITTVLRIERSASSKSLEKKLVFSDENKENLGYTTEQTKDGQSAGNDEHMDEQTTGERSSATNVATNDDLSGNLQPAGILIEHSGDDPISPDYGKNTMNQKLNTNVKSLSVCKEGVCAKSKPTELIVEKSSPCINVDYEYVNILADTPGIKRGLESPSAWKSPWFVDMHFQGSYFTSPADSYDALGLMKQINVQTAAALVEAREVLASGGQCDNISSDKENTGNPDAKKEPGTTKLQTKIMAEGRVLDFECTTPERSSDKNAGSNLGRYLSSPIPSSHLLKSFR

SEQ ID NO: 17368 - protein, 116 aa, Oryza sativa
  Clone ID: TF_OSC413697j.C1.p1.np
RAGKSCRLRWFNQLDPRISKRPFSDEEEERLMAAHRFYGNKWAMIARLFPGRTDNAVKNHWHVIMARKYREQSTAYRRRKPRPSSASSTPPPPPTPPKDQVLALDFRRAQCVLFFS

SEQ ID NO: 17369 - protein, 329 aa, Oryza sativa
  Clone ID: TF_OSC401503j.C1.p8.fg
MATDRMPDSHFMASSNGGACYQNTHGTPITMGVPNLGCLVASIGIAPSSSLMPERGLATANYNLVANFPEDAAVVPQQQQLQAASSNSNSGLIKGGWTREEDEVLRQMVRHHGDRKWAEIAKSLPGRIGKQCRERWTNHLHPDIKKGIWTEEEDRKLIKAHQTYGNRWSAIARSLPGRSENTVKNRWNATKRSLNSKRRLRKKNNEQAVPRQPSLLEEYIRSCQHPLPNETAPPASFDIGGYGTGGTIGASPTPPTVHALGGSTPLGLVMFLDLLNQATPHPPQPDLNLLNITPVVPHLNTSEYCLQLDARGNCSMASCRCNPTGSAPR

SEQ ID NO: 17370 - protein, 293 aa, Oryza sativa
  Clone ID: TF_OSC401478j.C1.p97.fg
MDAPCGWTTSAAAAVAEEEDVRRGPWTVEEDAVLAGYVAANGEGRWNELARAAGLRRTGKSCRLRWLNYLRPDVRRGDFTPQEQLLILELHFRWGNRWSRIAQHMPGRTDNEIKNYWRTRVQKHAKQLGCDVNSRQFKDVMRHLWMPRLVERIHAAAASSERAAPPPCAAAPASHSGMCHSPDPSTTTSSMAGSSVTHGEQFPSSTNHHLMTMASVTTAAADWSSEQCGSGSATSTSVGISYDMFEGSWSELLARAYDDDGADSSLLPDFQMADTGDNCWWSNLEDIWSQQPY

SEQ ID NO: 17371 - protein, 310 aa, Oryza sativa
  Clone ID: TF_OSC400554j.C1.p1.fg
MEMMRMAMSPAMSSATAAAASEDEGDLRRGPWTVEEDMLLVDYIANHGEGRWNSLARCAGLRRTGKSCRLRWLNYLRPDVRRGNITADEQLLILDLHSRWGNRWSKIAQYLPGRTDNEIKNYWRTRVQKHAKQLRCDVNSKEFRDVVRHVWMPRLIERIQADAAAAGEVAAPAPVSAAATRSMSSPAGAMYLHHQQIPLAAGAMVVAPAVSSEAYHHHGCGGGGDTSCSEPSQAAVTMSPDDASSTLRSSSAAAENDTIHGDVLSGSWSELLATTTTTIAATAGLPDFDELGDFEDNLWSLEDIWLHQQC

SEQ ID NO: 17372 - protein, 266 aa, Oryza sativa
  Clone ID: TF_OSC401138j.C1.p13.fg
MEFIDDDWDYQPRARVIHSRSNANSNGATTASSSQPTRSLPHTAACAAAAVALLAAAYYLLPDYQSSSSNPTPPPPKPSDPIAPPPPRHAAAAAAAAATAVSDGGEAVEDAGEWTDQEMDILRRQMVKHPAGEPQRWEKIAAAFGGRRTPESVIRAAKSGGGAAAAGASFDQFLRKRKPLDPRSEATDAGSGNAGGGGGESGDGSWSAGDDRALLNALKEFPKDTAMRWEKVAVAVPGKTKAACMKRVTELKRDFRSSKAASEAAP

SEQ ID NO: 17373 - protein, 278 aa, Oryza sativa
  Clone ID: TF_OSC416144j.C1.p8.fg
MAEAEAEEEMMMRMMCGSGGNEMMKTKMKKKNREGEEEEEVSGGGRMRKGPWTEQEDVQLVWFVRLFGERRWDFLAKVSGLKRTGKSCRLRWVNYLHPGLKRGRITADEERLILHLHSQWGSRWSRIARSLPGRTDNEIKNFWRTHMRKIAHHAKKKTNSPSPAPTTSSGSLSSSLTTATTTMATAAALQESSSCGGDDEAVDQLVAAATTPASQLLTMDYTMDQLWNDIAAAEADTSCYDAAAMASPPSPVWEFCTDYSLWRIDDEEYYKKMLDASQ

SEQ ID NO: 17374 - protein, 309 aa, Oryza sativa
  Clone ID: TF_OSC900101j.C1.p12.fg
MGRQPCCDKVGLKKGPWTAEEDQKLITFLLTNGQCCWRAVPKLAGLLRCGKSCRLRWTNYLRPDLKRGLLSDAEEKIVVDLHAQLGNRWSKIASHLPGRTDNEIKNHWNTHIKKKLKKMGIDPLTHRPLQPPPSPSPEKKHAERKNTAAAAAVAEQHQHDELWEEESPGFCTDEVPMIHPDEIMVPLRDHPPPVCTAAGASTPTTSSSSSSSSVASSTTSCDEVDAAALLPVLEWPDDAMCLMELDELIAAAAPPSLLWDDDYRLPLPPPPLSPPAMYEELDAFQCYDQQRSAFEQEAAASAWNKLELF

SEQ ID NO: 17375 - protein, 561 aa, Oryza sativa
  Clone ID: TF_OSC30916j.C1.p2.fg
MRVGKAKRRLDLSTRRGTDEGGRTNCWKTATSAPSLARATAVRVLATDPDPSGVACVRCDVNGERVRAWSCGAKTCGMGAGRKLKTHRRNQRWADKAYKKSHFGNEWKKPFAGSSHAKGIVLEKIGIEAKQPNSAICKCARVQLVKNGKKIAAFVPNDGCLNFIKENEVAYVDGIYGIKVLVDALSSSRLRGRDGSGGDHGDATAAAAASREVAPPPRPRDVYHRPFTARDDDELLRLHYRLGDRWKEIGRAVYGRTSRVMKHRWRELRRGGFLAAAARKELAALDMADDMVETSEVEEPADQSLPSLELQRSTLADTLASSFGSCSLATDHVMDPLAGSLALGKYQFFTIIKIEDVFTGTLVRHPWLPRLVKENGFRHWSRVARIMPRRSARLCRDRWCHHLARDVYHRPFTARDDDELLRLHYRLGDCWKKIGHAVYGRTSRVMNHRWRELRRSGFLAAAARTEQKLDMADDMVESEVEESDQSLPTTRKSIIATGRKGSLQAGQPSACKPTTVKIADLRRRGGRPPAKIIFAGGRWLVRSACEKKNRPPTKKNFRLRR

SEQ ID NO: 17376 - protein, 287 aa, Oryza sativa
  Clone ID: TF_OSC400258j.C1.p35.fg
MGRSPCCEKAHTNKGAWTKEEDQRLIAYIKAHGEGCWRSLPKAAGLLRCGKSCRLRWMNYLRPDLKRGNFTDDDDELIIKLHALLGNKWSLIAGQLPGRTDNEIKNYWNTHIKRKLLSRGIDPQTHRPVSAGSSAAAASGLTTTASTAAFPSLAPAPPPQQHRLHNPVHAAAPSNASFARSAASPPSEDGHSSSGGSSDAPRCPDLNLDLDLDLSMSLPSSPPKTPAAASSTTASRHHHHQQQKTICLCYHLGVRNGDVCSCKAAAPSPAGPRAFRFLRPLEEGQYI

SEQ ID NO: 17377 - protein, 857 aa, Oryza sativa
  Clone ID: TF_OSC401213j.C1.p25.fg
MSPPVAGAASSGDGPPGRPPRELYTIPASSGWFQWDEIHETERRALPEFFGGAGGSGFGTASRNPRIYREYRDYIISRYREDTSRRLTFTEVRKALVGDVTLLRKLFAFLDSSGLINFSASPSRPEAQQQQRQTEAEAVVEAPVGLQVTPRPPPSYFAEEKGGGGNENGFRLPPLTSYSDVFGEWAPGMAPICGLCGMECRDGNAQILKDGFKVCSKCYANNDNKGEANIHPGDKKERIDNHSSSAWTDAETLLLLEGVLKHGDDWDLIAQHVRTKNKSECIARLIQLPFGEHMLGTVNGKLDNRLHKIQTTDGKVNKSTVKESSSQPTETVDDMQIDGNEDGADKSVEEHPTKHRRLFSSIDITVSLMEQLAHLTTSTSPDVVAAAADAAIKALGNENPQARRAFQLSEKEYQTRAFSSNHARQRDYCSDDVGGGDRDVEMHGHPDQEEREMELLMASIIETQLKKIQYKIKHFEELELIMDQEYATLQQMKSSLVDEWQKQSQQFGVWRIGAILNRLGFDRTAGMESHRRAPPFFPNAERRRRQPKTPPSSPPGLSVSPNLARHLSSPRPPPPDAQFTGALMAKKGKAAAAEAAAPDAGVSSPQGGGGEKEGSFLLGSPTWEDAGGGRWRCKETGHELPEREKEAYGRSRACRLALIDQAVARKKPPLNAFKPHPEHKSKLICNITGDIINKSEEHIWKHINGKRFLNKLEKLEEKMASGEMAEGEAEQSNEGENKTKSRKKKDKKKAAVVNPSLPREPKPEIDDSDNSDDPDFWVPPVGSRWDDDDGKDRWTSSPVKDKDDAAEDEDGDDDGDDMADKDDKETREIASRTKRLSVEAVGPSSFASRKKKTKKEQ

SEQ ID NO: 17378 - protein, 328 aa, Oryza sativa
  Clone ID: TF_OSC7723j.C1.p2.np
MGRAPCCEKVGLKRGRWTTEEDEKLAGYIAKHGEGSWRSLPKNAGLLRCGKSCRLRWINYLRAGVKRGNISNQEEDVIIKLHATLGNRWSLIASHLPGRTDNEIKNYWNSHLSRQIHTYRRTYTAPSEAAVTIDVTKLQAAGKRRGGRTAGHPPKETAAADTPLPPKETAAADTPLPESSPRRAQSDEARSGSVVVDPEEPSSQPNNGSSGGGGGTPDGPCSEETATGPTSLDPMEMGLWEVESDAEMEALLCGGVAPDGPGIPGLEPLDVAAQADDLLDMDWDGFAADLWGDPAQAALSKTRASQTARWAAARELESFASWLLSDSC

SEQ ID NO: 17379 - protein, 403 aa, Oryza sativa
  Clone ID: TF_OSC401780j.C1.p7.fg
MGRAPCCDKKGLKKGPWTPEEDKLLVDYIQANGHGSWRLLPKLAGLNRCGKSCRLRWTNYLRPDIKRGPFTAEEQKSIVQLHGIVGNKWSMIAAQLPGRTDNEIKNYWNTHLKKQLRRMGLDDPPPGPAAGCPAARHMAQWETARLEAEARLSLLSSSGAAATTTITAATTTTSASSSSTTAGPVAAAATSPADVFLRLWNSSIGDSFRKLAVVAAGSSSPSRADVTKDAVKQEEEAAPAGDDSSAASNEVEAATMAVDEYQMFLDFAGEELGLFHGRLLLLSYEHVVTIPTYGGVIEDGYVGVAVHVLEDREAGKEKGVNAPDSRWGQPDEKTNLLPRSDKRPNQSSERFATTPAAQEQPVACGGFIARKEQKWAGQARRPYANDSLLGDTIKCRAIVVLWI

SEQ ID NO: 17380 - protein, 409 aa, Oryza sativa
  Clone ID: TF_OSC401601j.C1.p8.fg
MAGGGGSLAVGGGLNGWRGVSGSVGAAGLEEGSGPAWWRGHLTANGSRMKKGGGSRRHAIPTGEAGSGAVSRVAVAVAVYVDSSIEQEQLEEVVPWWGLMGRPPCCVKAEVKKGPWTPEEDLMLVAYVQEHGPGNWRAVPTNTGLMRCSKSCRLRWTNYLRPGIKRGNFTDQEEKLIVHLQALLGNRWAAIASYLPERTDNDIKNYWNTHLKKKLKKMSATGGGGDDGEGGGAGEVKTRAAAPKGQWERRLQTDIHTARQALRDALSLDPSPPAKPLDSSSGATAPPSSQAATSYASSAENIARLLEGWMRPGGGGGKTTTTPSSGSRSSAASVLSGEASHSGGATAPTPDGSTVTSKTKDEETAGAPPPPPPPAFSMLESWLLDDGMGHGEVGLMDVVVPLGDPSEFF

SEQ ID NO: 17381 - protein, 599 aa, Oryza sativa
  Clone ID: TF_OSC401616j.C1.p67.fg
MATGPDLTPPAAAASAEAPSASAAKKDRHIVSWSTEEDDVLRTQIALHGTDKYEFFPLPISIDFFFLDLITIFYTVFPFPFGSWTIIAAQFKDKTARQCRRRWYNYLNSECKKGGWSREEDLLLCEISELANMRSVTSSVRQQARHIAMPMELSMYAQKVLGNKWTEIAKVVSGRTDNAVKNRFSTLCKRRAKDDELFKENGSLCSSTSSKRALVQTGCLTSGASGSAPPIKQMRPCNSDFKENMTPNMRLVGQDKSTQDSRQPLAIVYQNNQDNMNTMDTQNLVAKTAAKQLFAGEQNCVKHEGNFLNKDDPKIATLLQRADLLCSLATKINTENTSQSMDEAWQQLQHHLDKKDDNDMSESSMSGMASLLEDLDDLIVDPYENEEEEDQDLREQTEQIDVENKQNSSQTSMEVTSQMVPDNKMEDCPNDKSTEDNNMEPCPGEDIPTSENLTEAAIEDSLLQCVEYSSPVHTVIQAKTDAEIAASENLSEVLEHNRLQCIQLASPAQTTTPVEANAETPASEKLREVVKCNNPSCIEFTSPAHTVPTFLPYADDMPTPKFTASERNFLLSVLELTSPGSRPDTSQQPSCKRALLNSL

SEQ ID NO: 17382 - protein, 576 aa, Oryza sativa
  Clone ID: TF_OSC401093j.C1.p58.gm
MKKGKWSKEEDDLIKNHMEKYGIGRSWQALSDALGLQRCGRSCRSRWLNYLRPGLKHGDFSPAEERIICKMYSKKGSSWSAIAAQLPGRTDLAVKNYWNSTLKKRFPAAAAARSTAAARRRHRPAASATTSSDDDDDVDVDDATPPGLALVVYSEGSTAAAAAAGELAPYSISSPAATADAAEEEEPIAAVPISTCILALPPPPPPPPPPPSDATGGEVSIPCFPFSPLPFIEPDLPELTWTTDLDDITATFDAAACRYPKRPHPITPDSPRLPKLPAIAGFDDVQSFLSCICLRYNTSPFLLARATAAPPAAAADRCLAGRRCLYSTPPPPPLSPLHWRCSRRDPELGADVSALLLRGRLGARQLFDELPHRVRWRRGYLRAAFAASVSNLNARDGHRGASSIISHDHVEQLKSFLASVLITQPPEKNIVGEDIEALEKRINGDGFHSKSLLDDIAQGRETEVQAARTAAAADEDAIGVHGGRSYLAGAGSGHAVEAGHSGRGDVARDVGESERRSSCTSRRRCLAGAIRRTRGVRPRRHRHRLHPPSEGSRPRSEGRRRSALGSSGYAACHGAA

SEQ ID NO: 17383 - protein, 307 aa, Oryza sativa
  Clone ID: TF_OSC400044j.C1.p38.fg
MGHHSCCNKQKVRRGLWSPEEDEKLVKYISTHGHGCWSSVPRLAGLQRCGKSCRLRWINYLRPDLKRGSFSQQEESLIIELHRVLGNRWAQIAKHLPGRTDNEVKNFWNSTIKKKLISQAVGSLHPSSADLYYNILDGAGQSIAAASLNAVENAAHGVTQSPPSSVYNSAAWASFSSHQPIFLPGHGVHGCGGGDLQYAAAVDGEFIRLCRAAEAYQLENGAAGIVGGQCKPSDHLLAPEGVVARSCLPAFVEQKGGGGGAFLADPAMGPVMDFMDAILGSSTTSAASASSVDSFSANTAMQPHWIP

SEQ ID NO: 17384 - protein, 1894 aa, Oryza sativa
  Clone ID: TF_OSC401228j.C1.p4.fg
MDGAHGQRQPMSPAISASAVLPQQRQMQLHHHHHHPARSSIADLFTLYLGMNSKQRVEDPTRETSNKLQKRVTAMNRDLPPRDEQFISDFEQLHMQFPDQEQLQAVTESVLISFVLQCSSHAPQSEFLLFATRCLCARGHLRWDSLLPSLLNVVSSVEVPMGQGVSVTTGGPATSSSSAIAVPNAPSFHPSNPTSPLSAMNTIGSPTQSGIDQPIGANVSPIKGAEFSSPGQLGLTARGDQSRRGAEISYLHHLSCRIILAGLESDLKPATHAVIFQHMVNWLVNWDQRPHGVDQADALQLQTLRLERPLHEWMHLCLDVIWILVNEDKCRVPFYELVRSNLQFLENIPDDEALVSIIMEIHRRRDMDLANSIPKGGLDWERALRCLRHALRTTPSPDWWRRVLLVAPCYRQHPQQSSTPGAVFSPDMIGEAVADRTIELLRLTNSETQCWQDWLLFADIFFFLMKSGCIDFLDFVDKLASRVTNSDQQILRSNHVTWLLAQIIRIEIVMNTLSSDPRREHLNSDQLQKGKQIDEWWRQMTKASGERMIDFTSLDERAMGMFWVLSFTMAQPACEAVMNWFTSVGVADLIQGPNLQPNERMTMMRETYPLSMSLLSGLSINLCLKLAFQLEETIFLGQNVPSIAIVETYVRLLLITPHSLFRPHFTTLTQRSPSILSKSGVSLLLLEILNYRLLPLYRYHGKSKALMYDVTKIISMIKVKRGEHRLFRLAENLCMNLILSLRDFFLVKKELKGPTEFTETLNRITIISLAITMKTRGIAEVEHIIHLQPLLEQIMATSQHTWSEKTLRYFPPLIRDFLMGRMDKRGQAIQAWQQAETTVINQCNQLLSPSAEPTYVMTYLSHSFPQHRQYLCAGAWMLMNGHLEINSANLARVLREFSPEEVTANIYTMVDVLLHHIQLELQRGHQIQDLLSKAITNLAFFIWTHELLPLDILLLALIDRDDDPYALRLVINLLERPELQQRIKAFCTSRSPEHWLKNQPPKRVELQKALGNHLSGKERYPPFFDDIAARLLLVIPLIIYRLIENDATDIADRVLAVYSTFLAFHPLRFTFVRDILAYFYGHLPSKLIVRILNVLGVSTKTPFSESFAQYLASSNSSICPPPEYFANLLFGLVNNVIPPLSCKSKSNPSDAAGSTARTTYNKPYTSSAGGISNSDGQRAFYQNQDPGSYTQLVLETAAIEILSLCVPASQIVSSLVQIIAHVQAMLIQSNSGHGMSGGLGQNSGVPTSSGGGVEPVGANRPNTTASGINASNFVSRSGYSCQQLSVLMIQACGLLLAQLPPEFHTLLYAEAARIIKDCWWLADSSRPVKELDSAVGYALLDPTWASQDNTSTAIGNIVALLHSFFSNLPHEWLESTHTVIKHLRPVNSVAMLRIAFRILGPLLPRLAFARPLFMKTLALLFNVLGDVFGKNSQASPPVEASEIADIIDFLHHAVMYEGQGGPVQSTSKPKLEILTLCGKECAAISGVMLLDKQLVDGQSQASPSMLLPPHSCTADYCRQYYIEGERAVTQLLKDVDPLQTAVVLTLRRQRPRRELSPDYTCTRNSILEAWRARRLAADVSDGLTPSRLRLASAFPLLAASINPRAAPEPLQIKTRVSSSGSVHPSREIQIASQIRDQRVMGRQPCCEKVGLKKGPWTADEDQKLVTFLLSNGHCCWRLVPKLAGLLRCGKSCRLRWTNYLRPDLKRGLLSEEEEKLVIDLHEQLGNRWSKIAARLPGRTDNEIKNHWNTHIKKKLKKMGLDPVTHRPVMSLAQPDPLKQQQQQHEPSVSGGTGADDKEEEEEETPTSAQPQGVACAASSASAVSSSCSSSASASAATPGADVDWPGLFEVDAILDIDWAGLLSACGDDGGCSAIGVDMLFDQCSDVGFDQDVWM

SEQ ID NO: 17385 - protein, 212 aa, Oryza sativa
  Clone ID: TF_OSC404183j.C1.p3.fg
MGDLVGDGAAPAAAEPAPAAAACRWTRQKDKLLETLVARCAMNRQCVGGWDAIAAAFGDDRTAAQVEQRYGEIAAEVRRVMEEPWDAEDPAIAAAAAAVPAAPVKHAAAGPGSDGGGEEGKVVVEKKSGIWSEEEHRQCLRGIEEIGHGRWTQISIEYVPSRTPIQIASHTQKYFLRMAKPKEDRKRKSIHDTPYHLHLPNAADAHAHQQQQ

SEQ ID NO: 17386 - protein, 319 aa, Oryza sativa
  unsure (1)..(319): unsure at all Xaa locations
  Clone ID: TF_OSC100215j.C1.p3.np
MMKESYMEVLPPAPAHYFVGQAAAAGGWFLPDRRGGGGAWSQEENKVFEQALAALDRNDPERWERVALLLPGKTVADVMTHYDDLENDVCFIEAGLVPFPHYGAAGGGGGSGFTLDWDGAAGLGFKRSCYMVGGKRARGPDQERKKGVPWTEEEHKLFLMLFLMGLKKYGRGDWRNISRNFVTSRTPTQVASHAQKYFIRLNSGGKDKRRSSIHDITTVNLPDDDPPSPPPSVLTAHSSSSAAAVSSSSACSSTASLRRRRSAVAPGTTTSLMGRCGCHTGNSSRELRVGGQNQASHAINLSVSSSCXLFSPLCFTITA

SEQ ID NO: 17387 - protein, 148 aa, Oryza sativa
  Clone ID: TF_OSC414560j.C1.p1.fg
MGRLRPPCCDESSVKKGPWTREEDEKLVAYVDQHGGHGSWRSLPKRAGLNRCCKSCRLRWINYLRPDIKRGNFTPEEEQAIITLHSVLGNKWSTIATRLPGRTDNEIKNYWNTRLKKRLIGAGIDPATHRARPRPPAPGDLATALPQL

SEQ ID NO: 17388 - protein, 298 aa, Oryza sativa
  Clone ID: TF_OSC400524j.C1.p28.fg
MGRTPCCDSKVLKKGPWTPDEDKLLVDYVQANGSGNWRLLPKLAGLNRCGKSCRLRWTNYLRPDIKRGPFTPEEHKSILQLHAIVGNKWSMIAAQLPGRTDNEIKNYWNTNVKKQLRQGQAAAVGEQAALASLGGGAASCPAARHMAQWETARLEAEARLSLLSGTTSVATASVAASSSSSSTAAAGGAEAPPDIYLRLWNSEVGDSFRKSARSAAREDQEPANASDEAAPVSATFARPGDDSSAASNVTAAAAADEYQVFLDLAAEDFELFHGRHGGFPLFPAVDMLGETSLYTAFD

SEQ ID NO: 17389 - protein, 270 aa, Oryza sativa
  Clone ID: TF_OSC414118j.C1.p7.gm
MGRPPCCDENGLKKGPWTPEEDEKLMSYIQKHGHASWRVLPELAGLNRCGKSCRLRWTNYLKPDIKRGNFSREEEQTILQLHSILGNKWSAIAKHLPGRTDNEIKNFWNTHLRKKLIKMGIDPMTHCPRTDFFQSLPQLIALANLRQIIERQPWDGHIEGLQTVAVQAAKLEYMQSLLHSAVCHCDQPHHHHHHQQLKHLHHRTGADQPPMPSTGAFFNNIALVSGWITLKLEDGVIPTGNSPVLDHLAGEALEGALGIRDFGSTTASSA

SEQ ID NO: 17390 - protein, 368 aa, Oryza sativa
  Clone ID: TF_OSC414185j.C1.p2.fg
MGRAPCCEKSGLKKGPWTPEEDEKLIAYIKEHGQGNWRTLPKNAGLSRCGKSCRLRWTNYLRPDIKRGRFSFEEEEAIIQLHSILGNKWSAIAARLPGRTDNEIKNYWNTHIRKRLLRMGIDPVTHAPRLDLLDLTSLLKPAAAAAYYPTQADLDTLRALEPLAGYPDLLRLASAILPAATTTGAAAAAAAEQAQLLLPWLLQAQMAQQQQQVTPPPPPPPQAAATEQFLQATSTACHQMPGLVHASPTQQLAQQPQDHMAAATCHRRGAVQHPSYDNQLDYVPALMQMASDASNLQQWSSTVSSSNNHNVNSGVSTPSSSPAAAGQINSSSTTTTTTYGLNASGDVDDAGLLINMHLSELLDVSDYM

SEQ ID NO: 17391 - protein, 75 aa, Oryza sativa
  Clone ID: TF_OSC421637j.C1.p1.fg
MASEWSKEENKLFEQAIAYYGEGAPDLWHKVSRAMGGTKTADEVRLHFEILVDDIKLIEARRVPFPKYNTQGAWN

SEQ ID NO: 17392 - protein, 222 aa, Oryza sativa
  Clone ID: TF_OSC3910j.C1.p1.np
LAGSQGESPAMLHPNGDGDGDGGDDEGDASGGEEEQGGGIPLKKGPWTPDIPLKKGPWTPDEDKRLREYVEAHGEGNWNRVQRNAGLNRCGKSCRLRWANHLKPDLKKGPFSKEEEEMIIKLHLWLGTKWAKMANSLPGRTDNEIKNFWNTRCKRIQRTGEPLYPKELVDRSGSDCESPDESRAKKRTNEVLQGNGQSYKEVFFDNFAADGRARSPSLTGGA

SEQ ID NO: 17393 - protein, 187 aa, Oryza sativa
  unsure (1)..(187): unsure at all Xaa locations
  Clone ID: TF_OSC400259j.C1.p20.np
VGARNEGARXKPWRKALPTKVREAEWAPHSPSWTSARSSTLFKGAWTRQEDEVLKQMVILHGDRKWATIAKSLPGRIGKQCRERWTNHLRPDIKKDVWTEEDDRMLIEAHKTYGNRWSVIARCLPGRSENAVKNHWNATKRSLKSKRRMKKKSTRPIMCDAQLGHMLRGGIGHRCAPAEMTKRRAGN

SEQ ID NO: 17394 - protein, 704 aa, Oryza sativa
  Clone ID: TF_OSC418226j.C1.p7.fg
MARAPGGVRRRSGRRGAGGGGAGGGGEALRKGPWMAEEDEVLLEHVRTHGPMDWSSIRSKGLLPRTGKSCRLRWVNKLRPNLKSGCKFTAEEERVVIELQAQFGNKWARIATYLQGRTDNDVKNFWSTRQKRLARLLRGPLPAARPNKHNSGKGKAPSSSSLDSQTATFHQSSASLDQASLEGNSLGWQCREAAPFMGYDQACSGFFAFEGPLPLQLLPPADGEASSSNAAQSAPPPLLFDQPPYPLINFPGWPERYVDVGHGFVDAGAMDGLAYQELLPMVQSVPMIMPFFGMESNNTKYYEVLGVPKTASKDELKKAYRKAAIKNHPDKGGDPEKFKELSQAYEVLTDPEKRDIYDQYGEDALKDGMGGGSDFHNPFDIFEQFFGGGAFGGSSSRVRRQRRGEDVAHTLKVSLEDVYNGSMKKLSLSRNILCPKCKGKGTKSEAPATCYGCHGVGMRNIMRQIGLGMIQHMQTVCPECRGSGEIISDRDKCTNCRASKVIQEKKVLEVHIEKGMQHGQKIVFQGEADEAPDTVTGDIVFILQVKVHPRFKRKYDDLFIERTISLTEALCGFQFILTHLDSRQLLIKANPGEIIKPGQHKAINDEGMPHHGRPFMKGRLFVEFNVEFPESGVLSRDQCRALEMILPPKPGHQLSDMDLDQCEETTMHDVNIEEEMRRKQYQRKQEAYDEDEEEDAPRVQCAQQ

SEQ ID NO: 17395 - protein, 249 aa, Oryza sativa
  Clone ID: TF_OSC413566j.C1.p15.fg
MQYTVEGSGGGGVQTVEAAVRKGPWTMEEDLSLVNYIAANGEGAWNTLARAAGLNRTGKSCRLRWLNYLRPDVRRGNITPEEHTLIVELQARWGNRWSKIARYLPGRTDNEVKNFWRTKIQKKHRKSTDGIYATTTSESIMPAATVHQNTVAEDQGSSSVSGRTTTATVAVTQEYATEAPPPSGMSSGSYLDQLQPGYASSIHGGQDGGAAAAAAGDVVVSDEFLAASSDNFWALEDLWPTVQSLHGNC

SEQ ID NO: 17396 - protein, 357 aa, Oryza sativa
  Clone ID: TF_OSC401058j.C1.p76.fg
MGRESAAACSPKPKLRRGLWSPEEDEKLFNHISRYGVGCWSSVPKLAGLERCGKSCRLRWINYLRPDLKRGSFSQQEEELIISLHKILGNRWSQIAAQLPGRTDNEIKNFWNSCLKKKLRQRGIDPATHKPLNDGGAGAGEEHHDDGDKQQLMDDVDDCFAIGGGGSSDSLAPPHSPAVSFDPLSVTNVPTTMMQSSSSPYGAAGGEHSSFRSDTLCDYGGSGGGVDVVSDAGTYSAYTGDSSSNSNSTAWTCGSVVVGGAGELPPPPLLPHMDMFGRVDAEPPPYPPFDVQARFSPWHHHHHHHHEPTLPTPPQRLDGGGGAAASFPIRSLSRDMPESCFDLGRGALDDEFGVDFL

SEQ ID NO: 17397 - protein, 340 aa, Oryza sativa
  Clone ID: TF_OSC408625j.C1.p2.fg
MGRGRAPCCAKVGLNRGSWTPQEDMRLIAYIQKHGHANWRALPKQAGLLRCGKSCRLRWINYLRPDLKRGNFTADEEDTIIKLHGLLGNKWSKIASCLPGRTDNEIKNVWNTHLKKRVSQREKPGDTKKKGKAADASDDADAHSPSSSASSSTTTAANNNNSGDTAGEQCGTSKEPENVDVSFFEQDIDISDMLVDAPTEAPLVAAPMPPSPCSSSSLTTTTCVGAVSDELLDLPEIDIEPDIWSIIDGYGGDEPGDGDATVPCTASPGEEGAEWWVENLEKELGLWGPMDESLAHPDPPGQVCYPGPLTETEGDPVSTYFQSGPTASPLQEIASPAVLS

SEQ ID NO: 17398 - protein, 409 aa, Oryza sativa
  Clone ID: TF_OSC401044j.C1.p2.fg
MRKPDCGGGGGAAKGGGVLGVAGGNNAAVVGGKVRKGLWSPEEDEKLVAYMLRSGQGSWSDVARNAGLQRCGKSCRLRWINYLRPDLKRGAFSPQEEDLIVNLHAILGNRWSQIAARLPGRTDNEIKNFWNSTIKKRLKISSSSASPATTTDCASPPEHKLGAVVDLAGGGGATDDVVVGTANAAMKSMWVDSSSSSSSSSSSMQSRPSIMAAAAAGRSYGGLLPLPDQVCGVDTSPPPPFFHDHSISIKQAYYGSTGAHHHHHAIATMDGSSLIGDHHHHSSSILFGGASVPPLLDHQTILDDDDDHPNKTGSNTTAATLSSNITDNSNSNKNNSDNNNNISSSCCISLMNSSSNMIYWEGHHQQQQQQHQMLQQQQQHMSRNVMGEWDLEELMKDVSSLPFLDFQVE

SEQ ID NO: 17399 - protein, 109 aa, Oryza sativa
  Clone ID: TF_OSC21831j.C1.p2.np
KTRKKGSWRAEEDALLTRLVAQHGPHRWSIISGAIPGRSGKSCRLRWCNQLSPAVQHRPFTPQEDALLAAAHARHGNKWATIARLLPGRTDNSVKNHWNSNLRRSCSNF

SEQ ID NO: 17400 - protein, 242 aa, Oryza sativa
  Clone ID: TF_OSC7037j.C1.p6.fg
MALEGAAGGGGVGGGGGPPGQEAGKKVGWSKEEDKLLRELVRKQGGKDWGVIATAFPGRTDKSCRLRWRQHLDPSVDVALPFSAGEDRKIVELHRVHGNRWATIAAFLPGRSDNAIKNRWNTHLRKRHAQDVQQRPSGGLALGLGGGGGAGQAAGGKLTPVCLQLFPPTQAPPIGENLPGPARSAVPELLKLFPLAPGDLKDNASAAAAMDVGNEAVRALPELRLSPAAVVFDAMPLQAIRM

SEQ ID NO: 17401 - protein, 246 aa, Oryza sativa
  Clone ID: TF_OSC421348j.C1.p3.fg
MAAMAAAAAGTKKKARKPYTITRPRERWSAEEHERFLDALILFGRDWKRIEAFVATKTAIQIRSHAQKHFLKARKFGLAGGLPPPLHPRRATLLRANAAAADMMPPPWLPSAGGGSIGCSAPPSGVQQSMAGRSPACYSTDEASFRPLIHSNDNDCSFIETPSCIGSGGESWIGDDAFFMQDETIRLPISPDDLGFAQVYKFVGDMFGSGERRPVEAHLRRLQGMDPAISETILLVLKNLEANLSA

SEQ ID NO: 17402 - protein, 311 aa, Oryza sativa
  Clone ID: TF_OSC1073j.C1.p10.gm
MGRPPCCDKEGIKKGPWTPEEDIILVSYIQEHGPGNWRSVPINTGLMRCSKSCRLRWTNYLRPGIKRGNFTAHEEGIIVHLQSLLGNRWAAIASYLPQRTDNDIKNYWNTHLKKKLAAAANSTSSSNRHPIFADATFPSAAGGSYTVSSNSDVTQMAAIARRSPFADCPSSSYASSMDNISKLLDGFMKTNSPSPPPPPLQHYDSGYYDDVKPAVDVGGNPLLSSFDCMSGADLDCCFDVHQQHQQQQPASFMEYGGYGGGYGDESKQQLMNQAAPPLSSIEKWLFDEAAAEQVADLMDLSDGCCSVPMMF

SEQ ID NO: 17403 - protein, 298 aa, Oryza sativa
  Clone ID: TF_OSC400505j.C1.p28.fg
MAREVSSEEEAGGGDELRRGPWTVEEDLLLVNYIAAHGEGRWNALARCAGLKRTGKSCRLRWLNYLRPDVRRGNMTAEEQLLILELHGRWGNRWSKIAQHLPGRTDNEIKNYWRTRVQKHAKHLNCDVNSQQFKDLMRYLWMPRLLERIHRSSQSQSHDADDADLSVSAATSCITSDLVVDAHHPPLAMADSNDSAAMWQQHQAPQMSVAGAPPPTTTMAQHVVLPTAAASCHQMQDQFVCARAAETTTCCWSESESLPGLAGLYYDDAAAALPEFDVETMAMWGPEDDPWYTQMLGL

SEQ ID NO: 17404 - protein, 308 aa, Oryza sativa
  Clone ID: TF_OSC400651j.C1.p15.fg
MGRPPCCDKEGIKKGPWTPEEDIILVSYIQEHGPGNWRSVPINTGLMRCSKSCRLRWTNYLRPGIKRGNFTAHEEGIIVHLQSLLGNRWAAIASYLPQRTDNDIKNYWNTHLKKKLAAAANSTSAASNRHPIFADATFPSAAGSHTVSSNSDVNQMAAIARRSPFADCPSSSYASSMDNISKLLDGFMKTNSPSPPPPPLQHYDGGYYDDVKPAVDVVGNPLLSSFDCMSGADLDCCFDVHQQQPASSFMEYGGYGGGYGDESKQQLMNQAAAPLSSIEKWLFDEAAAEQVADLMDLSDGCCSVPMMF

SEQ ID NO: 17405 - protein, 266 aa, Oryza sativa
  Clone ID: TF_OSC414191j.C1.p1.fg
MGRSPCCEKAHTNKGAWTKEEDQRLIAHINQHGEGCWRSLPKAAGLLRCGKSCRLRWINYLRPDLKRGNFTDEEDELIIKLHELLGNKWSLIAGRLPGRTDNEIKNYWNTHIKRKLLARGLDPLTHRPLNAAAAVAGHHHLAAGGSSCSPDATSGHSSCSDGDEYRGGIDLNLSISPPSSSSQPSSPPPPPHEAEARRAGATASYTYHHHYSETREKICLCLNHLGLHGGDECSCGGSSASSSSSPPPATASSRAFTFANASSSTV

SEQ ID NO: 17406 - protein, 481 aa, Oryza sativa
  Clone ID: TF_OSC100839j.C1.p7.fg
MATDENGADDRAGGESTVDHLRSHMNYGDMDLSGEEHVPKARKPYTITKQREKWTDEEHRLFLEALQLHGRAWRRIQEHIGTKTAVQIRSHAQKFFSKVVRESSGSNTGSGGASAAAAAAAIQIPPPRPKRKPAHPYPRKVDGAAKKHVPALRQLEKPPLWMQSLSEQEEGSPTSVLTAAQIGTEALGGGFSNNSSGSGSLAPSAAGTDEHVDGGGSPASSVDREDGCLSPSIPTAELAMQAPNTKMSIATTDAKEASSEASVFRLFGKSVVVKDSDQLHLLNGSNIATSGSVERATRNILVPSFAAAPEGSSSNPWPSSMQQFLYFLPRSDGFAAQPVMPWLSYNGSLPCALFYPAAAAAANQQCHRDSEGVEFRVSQREGSLTGSNTASSVVLGSSAAVPAAAAAAQNSDVAESRGQGNSREAAASPRLTKCESSASVTLLQRGFMPYKRCAAESELLRSEAAGGEEAVADGELTRLCL

SEQ ID NO: 17407 - protein, 219 aa, Oryza sativa
  Clone ID: TF_OSC400726j.C1.p24.fg
MGLLRCRKSCCLHWMNYLSPDLKCSNFTDDDDELTINLHALLGNKWNTHIKRKLMSQGIDPQTHQPVTNTFGNVVFAGLAYLTSYLKAKKHNSCIFSKNILLEALLASLFCLTASKMPKGVGALTIALKEGAVFAACAGQILQAFPFWWKWNSMCHRKAEIVRSILAIIVVIYQPIQSSNRALADLPSLLQKSPSPSVAFVNFFLAKKVVKHTSQHDIN

SEQ ID NO: 17408 - protein, 593 aa, Oryza sativa
  Clone ID: TF_OSC401760j.C1.p2.fg
MPAVKVEEEEEERNPVASSPSVSEGSAHAAALASPTAADSIFGRRRKSGPVRRAKGGWTPEEDEKLRKAVDIYNGKNWKKIAESFSDRTEVQCLHRWQKVLDPELIKGPWTQEEDDVIINMVKKHGPKKWSVIARSLNGRIGKQCRERWHNHLDPQIRKEAWTVEEERVLARAHCMYGNKWAEIAKLLPGRTDNSIKNHWNSSLRKKIDDYNTRDILPVHPPVVGDGLKQLPKRPPADNHFDLNKEPIICSRDRLGVVHSDPTSHQRASNLKDFKGCADYLSLGQPVTSCEASAADDSAFDLATQGMRMDSVHDKGTGNNFVCGKVQGINFLGDKGLKINQISDKMGCSRQAKREGEAAINGGGSSLQSEAHSVGSLCYQIPKMEDIAPAQSPVFTANYVPEHSRNVMHSPNGYTTPPTHGKGSDQLSVESILRSAAEKFHGTPSILRRRKRDKPTPAEDNDLKIGRLSSDDFHTPIGKCTTDSPQSFKTAALLSLGPMDEQGSLDVSPPYRLRSKRLAVLKTVQNHLDFSSDEMSICDTTMKSACGNSDCANASSGVSSIQGKKLDEHMIGLETLTMNFAHTTKLDATQPNL

SEQ ID NO: 17409 - protein, 267 aa, Oryza sativa
  Clone ID: TF_OSC900293j.C1.p1.fg
MGRQPCCDKVGLKKGPWTAEEDQKLVAFLLTHGHCCWRVVPKLAGLLRCGKSCRLRWTNYLRPDLKRGLLSDDEERLVIDLHAQLGNRWSKIAARLPGRTDNEIKNHWNTHIKKKLRKMGIDPVTHQPLEPPRPPPREQDATPPPPPPPPQEIEESEEEEQEPSPLIEPHEITAPPPAAAAEAATSNCSVSPASVLSPSCSSSASAASAVDVAEWPEPMYMFGMDGIMDVGWNGLISGAGVDVDVDVDPFDHYYHDASFDDQDVWII

SEQ ID NO: 17410 - protein, 289 aa, Oryza sativa
  Clone ID: TF_OSC401237j.C1.p40.fg
MEGQQFAWGREEGGWRKGPWTAQEDKLLVEYVRQHGEGRWNSVAKITGLKRSGKSCRLRWVNYLRPDLKRGKITPQEESVILELHALWGNRWSTIARSLPGRTDNEIKNYWRTHFKKGKPSKNIERARARFLKQRREMQQQSQLMQTGQQQQLGQDDDATSAVVDDNLAEVAPPAATSLTHDGELQIMQEMAPDMDDLLYYHPGDMSPYSYDDLLGSGGGECGAVAASAGAAASTSEGSSEELDGGAATWGSLWNLDDVVHDMMIDCAAGAGCCWGSFPPLQDKGLAFY

SEQ ID NO: 17411 - protein, 68 aa, Oryza sativa
  Clone ID: TF_OSC33250j.C1.p1.gm
CRLRWFNQLDPRINRSPFTEEEEELLLASHRAHGNRWAVIARLFPGRTDNAVKNHWHVIMARRCRERM

SEQ ID NO: 17412 - protein, 396 aa, Oryza sativa
  Clone ID: TF_OSC400225j.C1.p51.gm
MGRSPCCDKASVKRGPWSEEEDAILRSFVERFGNAGNWIALPHKAGLKRCGKSCRLRWLNYLRPAIRHGGFTDEEDNLILSLYGEMGSKWSVIASKLPGRTDNDVKNYWNTKLKKRYLAAAATEATTPPPPAAGDDDNNPTTQASSQPAPPTPPAPLVNLDAAGLDGAVGDNDELLLHKSEQLYAELMGLIEQQQYSTITAAAVDAATTTTSWSSPSTGTTSPTASSSTDGSSSSSNLPWPAVDVHDSTMMPPLSESSGSSSGLFFGSHAFGSGSFQDLLGSAASFDDVMLSQEMLDNFKNGATPGGDGDLSPTDACLTVMELVNMISVLMALTAAIRLDVPAKLWARGANAPFPTGHPNPFVLERLLRLLTSCSVFCEHKGSPRHFALTTGDDES

SEQ ID NO: 17413 - protein, 169 aa, Oryza sativa
  Clone ID: TF_OSC3478j.C1.p1.fg
EKDSSDLAINKGPSLDLVKSPLMMNDASATVTAMQPNEGMEEFPVKVRKPYTITKQREKWTEEEHDKFLEALKLYGRSWRQIQEHIGTKTAVQIRSHAQKFFSKVVREPGSNNAIEIPPPRPKRKPLHPYPRKCANSGSDANPATAQLKLACLQVDSRGSPGTELEFAL

SEQ ID NO: 17414 - protein, 438 aa, Oryza sativa
  Clone ID: TF_OSC900059j.C1.p19.fg
MASMPQLEEKDSSDLAINKGPSLDLVKSPLMMNDASATVTAMQPNEGMEEFPVKVRKPYTITKQREKWTEEEHDKFLEALKLYGRSWRQIQEHIGTKTAVQIRSHAQKFFSKVVREPGSNNAIEIPPPRPKRKPLHPYPRKCANSGSDANPATAQLKLAPGSSSSGSDQENGSPISVLSAMQSDAFGSSVSNPSTRCTSPASSDDGNNIPTFTSGEDNNVPCEPTVIDPSQSHKEIDQDRKDVNNMSEEDSSEEEVQETSLKLFGRTVVIPDPRKRSSSDPKHESEEQISQPSNEEMLQASSSVGEIPAAYCAPNGWFMSYNSFPFQFGESAADARIPPLHVWWPYYGFAPISHPRGLSTVMQQTEGSDESDGVKSHSSESSSDSGENVQMTAPQSSRIVESLGAIYVRDSGSSFELKPSANSAFVRVKPSNSGDEEI

SEQ ID NO: 17415 - protein, 1004 aa, Oryza sativa
  Clone ID: TF_OSC405568j.C1.p6.fg
MRIMIKGGVWKNTEDEILKAAVMKYGKNQWARISSLLVRKSAKQCKARWYEWLDPSIKKLCSPHAILLQAYTAFEGLMTEWTREEDEKLLHLAKLMPTQWRTIAPIVGRTPSQCLERYEKLLDAACAKDENYEPNDDPRKLRPGEIDPNPESKPARPDPVDMDEDEKEMLSEARARLANTRGKKAKRKAREKQLEEARRLASLQKRRELKAAGIDTRQRKRKRKGIDYNAEIPFEKRPPPGFYDTVGEDRPLEHVQFPTTIEELEGKRRVDIEAQLRKQDIARNKILQRQDAPAAIMQANRLNDPEAVTKRSKLMLPPPQISDHELEEIAKMGNAGDPSLVEELGEGSTATRALLSSYSQTPRLGMTPLRTPQRTPAGKGDAIMMEAENLARLRESQTPLLGGDNPELHPSDFSGVTPRKKEMQTPNPMATPLASPGPGATPRIGMTPSRDGSSFGLTPKSTPFRDELRINEEVDMQDTAKLELRRQAELRKSLRSGFASIPQPKNEYQIVMPPITEEEKEEAEEKIEDMSDRLARERAEEQARQEALLRKRSKVLQRSLPRPPAASIEILRQTLIKGGESRSRSTFVPPTSLEQADELINEELLRLLEHDNAKYPLDEKTQKDKKKGSKRQANGTPSVPEIEDFDEDELKEANSMLEEEVQYLRVAMGHESESLEDFVKAHDACQEDLMFFPNNNSYGLASVAGNSDKIAALQYEFEIVKKRMDDEAKKASRLEQKIKLLTPRIPGRLGMMHHKHCNMYRAGKLWSQVQDTFKQMDTSATELECFQELQKQEQMAASYRIRNLTEEVNKQKALERTLQSRYGDLLTSYKRIQEQLEEHKRQLMIQEEMEAQKRAQEEEEMEAQKRTQAEEEKEAAKAEEEARKMDRAADEEAAGSKQVNEDQMDVDNSNADGDEFVGPIPPGPGTQGDDNVVAVEENSSSQSGDTATTEDGSCGMIDASKSGGQDHIDSKDELPTVGASLDDGSAAASSDQDVSTEVNATVPE

SEQ ID NO: 17416 - protein, 289 aa, Oryza sativa
  Clone ID: TF_OSC900289j.C1.p24.fg
MGRAPCCDKASVKRGPWSPEEDEQLRSYVQSHGIGGNWIALPQKAGLNRCGKSCRLRWLNYLRPDIKHGGYTEQEDHIICSLYNSIGSRWSIIASKLPGRTDNDVKNYWNTKLKKKAMGAVQPRAAASAPSQCTSSAMAPALSPASSSVTSSSGDACFAAAATTTTTMYPPPTTPPQQQFIRFDAPPAAAAAASPTDLAPVPPPATVTADGDGGWASDALSLDDVFLGELTAGEPLFPYAELFSGFAGAAPDSKATLELSACYFPNMAEMWAASDHAYAKPQGLCNTLT

SEQ ID NO: 17417 - protein, 247 aa, Oryza sativa
  Clone ID: TF_OSC400014j.C1.p33.fg
MDEIRSLMLQQGWRKGPWTALEDRLLTEYVQQHGEGSWNSVAKLTGLRRSGKSCRLRWVNYLRPDLKRGKITPDEETVILQLHAMLGNRWSAIARCLPGRTDNEIKNYWRTHFKKARPSRRARAQLLHQYQLQQQQQHRQYLHSLNLLQQQQQQLQQQQQQQQQQMMLLQEQEQQSPQEEAADDSMVMMMMNDLQSKERCCTAVSVVPDDCVLPADDDAIWDSLWRLVDGDGSCGEGSSGGEYWATS

SEQ ID NO: 17418 - protein, 82 aa, Oryza sativa
  unsure (1)..(82): unsure at all Xaa locations
  Clone ID: TF_OSC26666j.C1.p1.hg
LSSAELRRGPWTVDEDLTLINYISDHGEGRWNALARAAGLKRTGKSCRLRWLNYLRPDVKRGNFTAEEQLLILDLHSRWGXP

SEQ ID NO: 17419 - protein, 260 aa, Oryza sativa
  Clone ID: TF_OSC401685j.C1.p176.fg
MGRAVEQQQGGCCSEKKKKLRKGLWSPEEDERLATHIARFGVSCWSSVPDLAGLQRCGKSCRLRWMNYLRPDLKRGRFSHHEEELILALHDKLGNSWSQIAARLPGRSDNEIKNFWNARLRKKLRQTESSSSATTAAGAAATGHRRGEADRSRPPPPASFNTFSHDDRTTPAPAAHIAAAAAVEAPAAMTTTGGAVGGGVLVDNSGGHRDAVAEAARGHVGSGDDDGFLAVLLGEYYLDAGGHGDGFSFLGGGGGGHVFS

SEQ ID NO: 17420 - protein, 239 aa, Oryza sativa
  Clone ID: TF_OSC400792j.C1.p8.fg
MAAAEVQSAAGWGRQLQQDGGGWRKGPWTSQEDALLVEHVRQHGEGRWNSVSKLTGLKRSGKSCRLRWVNYLRPDLKRGKITPQEESIIVQLHALWGNRWSTIARSLPGRTDNEIKNYWRTHFKKGKPSKNIERARARFLKQRREMQQSQQLQQPTLMPTPTPQSKDIIVAETGDARTDDDAGGAAAAVAPSSSSASLSMAGREAEDLIMHQDAMDDLMMCPAMSTTSSSTAPPSPAIS

SEQ ID NO: 17421 - protein, 511 aa, Oryza sativa
  Clone ID: TF_OSC101298j.C1.p8.fg
MATPSMPAPAAEAAAAATTATANSMPLAPPQPPSSGAPFSQPPSTAGTVKTEAPPPPSTSASSAASAAAPAPAAAAAAAAAEESPCTITIPSYSAWFSYDSIHETERRLMPEFFEGEAAAASGSRGPEAYKYYRDTLVRRFRARPGRRLTLTEARRGLVGDVGSVRRVFDFLEEWGLINYGASPSGAKQGRDKKEEAALSQSSLPIGATMPSKLCTGCRTVCGLAYFSCEKADISLCARCYVRANYRPGLTSADFKRIEITEDAKSDWTDKETLHLLEAVLHYGEDWKKVSHHVGSRSEKDCIARFTRLPFGEQFMGPKEDKIQFGNDCDLNEESGSHISKRLRLTPLADASNPIMAQVAFLSAIVGSDVAVAAGQAAISAQSQVDISASETDSSINISKEEESSCTNGLSANDLLKEASANAQVQLEKERKAIEQSLSDIVGVQMKEIQDKIRRFEQKELLMEKERKQLHCLKELLFSDQLAVVQHQRRPPAVTTESKDDEKPKPVISIS

SEQ ID NO: 17422 - protein, 296 aa, Oryza sativa
  Clone ID: TF_OSC401685j.C1.p194.gm
MAAFSSNSGDLLFFSGIGDTLDSNRGPYGFLGSATRDYSLFVNIYFTFTNMSNTGDNGNTGYKKKEAPVNTNGGNTTSNSSGGPFLGLRWMNYLRPDLKKEPISDREAETILSLQKLLGNRWSVIAAKMPGRTDNEIKNYWNSRIRKRQSAAAGAKGEPAPATVMEKEPTANAATVAAAPEAASPPPPPIPARLPMFSCQLLDGGGSGGATATTQSPPNAGSSDISEVSACGGNGGGEDSSRDYCFSGGDVDGDGDMVHLLALDDLDLLVDVPGLLDVDAWDCELYRADYSTSRAR

SEQ ID NO: 17423 - protein, 313 aa, Oryza sativa
  Clone ID: TF_OSC29542j.C1.p5.gm
MRERERETVDVIAAAGEEERWRPARRRARWWRCSNAPGARPRAPPPPADKRRALPIDPLSLPKAVGLLRCRKSCCLHWMNYLSPDLKRGNFTDDDDELTIKLHALLGNKWNTHIKRKLLSQGIDPQTHQPVSAGTSVAAASELTTTAITVGFPSLAVAPARGSSRRKEGRLGGVFLVVVASGGGVSGGGRVSDGGELELRVEERREVVVAGRWRRGGQRLGGEAYGRGQRACFGWLGWGGCASVLAHHRSAAPPVAALAHRLFAAALALCFSARGRSRPSPRSRSHPPLRYRARPLLRHPHLRAAPPAAGLPH

SEQ ID NO: 17424 - protein, 306 aa, Oryza sativa
  Clone ID: TF_OSC404645j.C1.p7.gm
MVGAVTEGERGGRQRERERETVDVIAAAGEEERWRPARRRARWWRCSNAPGARPRAPPPPADKRRALPIDPLSLPKAVGLLRCRKSCCLHWMNYLSPDLKRGNFTDDDDELTIKLHALLGNKWNTHIKRKLLSQGIDPQTHQPVSAGTSVAAASELTTTAITVGFPSLASSLVAEGSLAEAESATEVSSSSVSRSAAKSSLPVDGDGEDSDLAVRLTAEGKGRALVGWGGVDAPPCSPTTALLLHPSPRSPIASSLPHSPSASLPAAALARRRARAHTRRSATALALCCATRICALLRLPPASLTE

SEQ ID NO: 17425 - protein, 1367 aa, Oryza sativa
  Clone ID: TF_OSC401001j.C1.p59.gm
MYRVKSESDCDMIHQEQMDSPVADDGSSGGSPHRGGGPPLKKGPWTSAEDAILVDYVKKHGEGNWNAVQKNTGLFRCGKSCRLRWANHLRPNLKKGAFTAEEERLIIQLHSKMGNKWARMAAHLPGRTDNEIKNYWNTRIKRCQRAGLPIYPTSVCNQSSNEDQQCSSDFDCGENLSNDLLNANGLYLPDFTCDNFIANSEALPYAPHLSAVSISNLLGQSFASKSCSFMDQVNQTGMLKQSDGVLPGLSDTINGVISSVDQFSNDSEKLKQAVGFDYLHEANSTSKIIAPFGGALNGSHAFLNGNFSASRPTSGPLKMELPSLQDTESDPNSWLKYTVAPALQPTELVDPYLQSPAATPSVKSECASPRNSGLLEELIHEAQTLRSGKNQQTSVISSSSSVGTPCNTTVLSPEFDMCQEYWEEQHPGPFLNDCAPFSGNSFTESTPPVSAASPDIFQLSKVSPAQSTSMGSGEQVMGPKYEPGDTSPHPENFRPDALFSGNTADPSVFNNAIAMLLGNDLSIDCRPVLGDGIMFNSSSWSNMPHACEILQTCVTSGSDDARIGQVSGHTEIGVVILQQAESSSPDASMTDIAPILDEIDPLLGASSTHPDTIPKDDSDTDSHVSSQDHQTDDDSNDETDNNDAKENGEEKNKEQGKEAAFIWTADDEKNLMDLGYSEMERNRRLELLMARRRSRKNIRRSGNSGSAPSVLHTRKNPFDLPLDQSNDGDVSADNNEDHKDLDEKDLPNEHGSPALQRQDSDLADVGSECSDGINSVDVELDNSDIDDREIALQHFVFERSQEREAYLSSTKGKGPEDDYLLSSVGNSKTLHPVADLFSWEDGNGESSLGVNSSHNMSVEFSDWVSSPKPIAEHDSGPENLQEFLNTEVASSSKTIVLGARNPAENNGNVDSISYSNNEMPSDNLGHGSMEFPSEFCNESLPVISRDLHPIPEERVVENFNVQEKHEAEETAAGYPLDSDDDADKIYPEPMEDNVIDESFLSELDAVGDFRVEATRSDQQMPDVDSHIDNNTSNGVAESSLISPQISSNIFSNMKYASMLEHEENSPLVDDLNGTGPEFGWSLGASYDDPEQTVYNPRRRILGASRFEETNTEMKPLFDETEASFVNAPIEANLVVGPSKVDVANESELTKTDTNMIVLDANSLEDIETAFKQASNGVVESTVDNETPQEHTTAAMNSSFEENEDKHGCGDTVKFTMHDELPEGTHIEGNTVGDGKEPEPMGITSSMDVIDAKSIDDIYAALKKQSSAAANSSFEQNEGKNGCGDTVTFTTHDELPEGTHIEDRDNTVEDGKEPEPIGTTSSMDTIEVKTIDDIDAVFKKLSDGGTKSAAQAVDCENTCEASDESEQH

SEQ ID NO: 17426 - protein, 519 aa, Oryza sativa
  Clone ID: TF_OSC401161j.C1.p11.np
MMAEALREVLPLPYFPGQPCWYLQERRGAEAWSAEENKVFERALAQVDLDSPNRWEMVAAMLPRKTVIDVMNHYRDLENDVGSIEAGLVPFPHYSSSLSPASSGFTLQDWDGSDGGFRRGCYLKRGRAPDQERKKGVPWTEEEHKSFLMGLKKYGRGDWRNISRYFVTSRTPTQVASHAQKYFIRLNSGGKDKRRSSIHDITTVNLPEEDTSNPSPSPPSVLTTASDQLGSLVDTKPVPPPPSLGAQRHFMSPLPGALGVSHHPYGNVKLEPNASFLAGGDAMRTLVTAVLSAMRTLVTAVLSGGEPHKEEHRAPPPIISTGTTRLRPSRSPVSVCDWLASWLQSCFMRLRIAKYWTEGPLTGYCFDQEHQGFPRKRKRKALLDRCDYTIHCMNLSLDCLFGKPHRPASAGGQCISTPTPSAIPIPDRMHGEIGDHRPEIKWHRCYCRFVLCSSDFCSCEVEESASTGGGALLSSICSAIGHGRESESIIDAIALLGRHVRPRLRANIQILQMDDIIEE

SEQ ID NO: 17427 - protein, 340 aa, Oryza sativa
  Clone ID: TF_OSC400944j.C1.p23.fg
MGRSPCCCHDAGVKKGPWTEEEDRALVEHIKKQGGHVGSWRGLPRAAGLNRCGKSCRLRWTNYLRPDIRRGNFSDDEERLIIRLHAALGNKWSTIATHLDGRTDNEIKNYWNTHIKKKLLRMGIDPVTHQRLPPDLLADGGGLGAASPLLSPPGPAAAAALQPLLSAVASLGSLDTALRQFQLLQHLLNSITSSSSDVAATAGLMATNLAATNTMVNSSSNVASFQEQMNALAHANYQPGYLRDVVPSFPGQDMAPQLNSTSSTPSTAPVLRSSAEPADQCCNDAALVPETYPREVAASVDHWKVQDFPSLEPLELPNLSTLESDLDPFWKEILESSFRS

SEQ ID NO: 17428 - protein, 263 aa, Oryza sativa
  Clone ID: TF_OSC19785j.C1.p1.fg
MATAAESQGLSPGFKFNPSVEQLLCFFLLPYLQHRRLLVDGVVFLDDPASAPPWALLHRHGRGGEDEAYFIGPVPAGDGHGGRRQQQVSRTVTGGGGGKWIKQRTERPRGEEEPVVVFGGETFRWEEFSLNFHADERCRSGSTGWVMHEFAVVPPAGSRVAATHTACRIAFTGHGQKRKRVPDGYVFVDVHVQTAAAGAAVVPPLPMLSSYGEPPHEHFSDDHPPPHSYTYYTQGYQQFLPAAEQNDQEQEYCAPDHRFPRIL

SEQ ID NO: 17429 - protein, 92 aa, Oryza sativa
  Clone ID: TF_OSC400170j.C1.p5.gm
MEAEEELICFYLRNKLDGLHDDIECVIPVLDIYSVDPLQLSEIHHEMLGSSGEEGEPWFYFCPRQEREVRGGRPSWTTPSGSWKAVGTPGVV

SEQ ID NO: 17430 - protein, 282 aa, Oryza sativa
  Clone ID: TF_OSC101065j.C1.p12.fg
MASSAHMAAVLNLPWGYRFRPSDRQIIANYLGPMAIHGADSLPQRGDVVEGVDVFATRPAAIPFEPRRHVFGRDEVRAYFFGDQPTDSRGREVPGGAWLPCGGGDKAYSGGADGGEAVAYRRKYEFRAANEEADRAGEEAATPARPRWRMKEYRLNKSAAEFRRAYAQPNPKANMDCVVREIYTKAVPPPTPPSGRSGDEEMQEGSDYSVMDEDELVDYLLQGFEDGNFDEDQDQPAAAEDGDYSDEDEDQPAAAEDGDYSDEDQDQPAAAEDGDYSDEDEP

SEQ ID NO: 17431 - protein, 531 aa, Oryza sativa
  Clone ID: TF_OSC400934j.C1.p28.fg
MAGEMPDADGKPRSASSGFQPSAPPQPQAQQYQYGTFGAPSSAPGEVPQPAVGFPQPAPPPGLRHYPQPPPPSYAVYPPLPPQTYPAAAPYYALGYQAVQGYIPVVEGRPVRMRRLPFCGLGMGWFLFIIGFFLAAIPWYIGAFVLICVRVHDYREKPGYVACTIAASLAAIAILLGVTRGEEIWSSSRRSSAHGSSPGDKPPPSSSSCGFIIHEADVYSADPADLTRGFAPAVARSSGDEAWYFFSAVRGLKGGRKARTVDDGAGCWHSEAGAKPVLAASSGRRLGHRQSFSFITKDDDGQRVRSGWLMVELSLDVDEEEQLVLSKVYFSPRAPGARKPTTAAAMSRHKRKLSTTDIASPPRRQRRHRVVPSSPPEEPNTSPSPAAAPPDQQEGGDDDPDRGSISWWLRRVFGLTATFTEEESIELNPWLKDILRPFPPPLPPTPPPPCPSPRRKLIDMPEIREFIMRGSYLGGGPAPPRYECDHPAMVMTGGDDQQQLDEQRRDDVGDDRAHYDRVDGQLQFERHYLQL

SEQ ID NO: 17432 - protein, 948 aa, Oryza sativa
  Clone ID: TF_OSC900006j.C1.p17.fg
MSATLSSFLLLLFSFLSSLPLQSERKAKQVEGSGRAATGKHDSGVEVDVIASTYYMRARERDAGAEADALREELWSVKAELELAKTKAVAAAAAAGALAEKAQEVYKRGREDVRNTIASYRSALLKMELFSRVLPPLGIAMGDSWSDTEIIMFLAERKTWDPLPQNILVGVDLTMIDPRDSPGTLWFLNWPDNQLCYDDENNVFRKAKNGYWKCVDACRIQTGTSILGVKLCLEFHEGQTPCGTRSGLMMYEYLIEQNDELNLPQAYKSLCRMFLQKDRKIVEDEHISLNLGVHHNFLGSYSQYLAEIQRQNMVMNSQAVSSDKKSIFIRELDERKSKKCSTKITRSSTRLYRQKIPHIWCLRHSVSRKWFRESMFRVIDKLAKLLESVLLDLATVRQKINKGKKRIWKMEGKLEKAQIQHLTDFNNKYGPSIRQSVETAEHNNCALRCLNNYLELMIEEPRFSSIAYVRLDSQVKKLDKENTSAMDLSSSLHQMLQKLNLRVQDEEVWVSQLGSNLQASFRKIMDTSSEIGKLEDEVLQLKVDIAEFAPGEVTSCAVYEMIKTLQIVELFMNNSTRHLKLIDGINSEMREFGSIFNGKVRCLVRFARYQQTIMEKSTQINLFQIINFLGDIRAKVDKMTQMYGLSEVVPIVSNQFIEGSFNADAYAFESLKEHSTDLCFSWRTRKFHNRLILPPVRQQTSGTCSYYATLSSVESLYKREYASYPTILKDKIGQPDEFLVNLSRAQLEDIVEDFYTRHKVKGSKRLNVCLDKMKNEGVISEESYMNPQAQSTERYKIKQYEELNLEIAMRERDKEEVSIVDKKCIGKKKKRRFRKKMRMKEHIFLTKIKKVIESHIMDGKVLIASFRVTTGYFRLLPHQIYKIPEEDPQYELNKKGNPCSHCVVVVGFGIRDGECYLIYLNSYGTSWGHDGFGRIYLDSVRKLFLAQV

SEQ ID NO: 17433 - protein, 364 aa, Oryza sativa
  Clone ID: TF_OSC900089j.C1.p24.fg
MAEIGKGLVFSPSDDQLTDGYLRSYLVRTSLDDLPSAATSYFHVADVYSAPPDQLVAGLAPAPGTGDGDGRVWYVFTPVRVLGSRGARKARTVGGGCGECWHAEGGPKDVKGSAAGGKLQKFSYKIKTALGAVVKPGWLMVEFSFPGSDHLALCKVYRSPRTSRYGAPSPPSSAASSPSRAAPPPVSSTSGRKRKAEEESDHPEAPASSAPRRTLPASEQHVDVDAAAASEPDQGGYLSTDQLDSVAAFVQEHEAFVQEHEGDEEFCKSLGFDERSDPQCWTNFFLSALEEFGPAPETDAAAVAVAAVEPGPCPEYEEHDDTATTAASSHAYDSATAELVNLSDKEFYDIIFSGDQQGGAAVAG

SEQ ID NO: 17434 - protein, 528 aa, Oryza sativa
  Clone ID: TF_OSC400849j.C1.p10.fg
MHHYLNRWIAGKTIPEMEAGFVAGADVYGDGPDALRRRHRPGYWCNCVYKWFFLCHRKRQSSRRTTGNKRAERVVAAGGRWKVEQGKKVLGGGGGGGERDSLGFYSSNSTKKTSWIMEEYTSSAADGAAAARGEEDRMEPVLCKIYLSPRAPAGEKRALFGEDGVAVGPDGRKRNARVTVLATLFDDVAALLGQPVAAPPLPAPGEQLGHGHGHFDDVAARFGQVAVAALPASGDLGHGDFDDDAAALLGQVAMAPAPAPGHHQQGYVVAEAPLPESGYLGHYHHDGHLAQAAAAPEQDHYLGYHSHDAHVVDAEATPEQGYHDDAHVAVAPAPEQGDLGHDQGHLAAALTPEECGEIVGAYEFHPEMVQMLSIGFAAPDEQLLPQLLDPTGGGYDMASSAIAAVGDVNAYAAAAPTPRIRPNAAEAMAATATAETMPPPLDAVAAELSAPPRGLPPELAFSALPSVQQEPSCDDGDNFGELVAEAMPPLIGENAGVDAGSDEPLPDLAGIMTELDFGHDFFSNQHRE

SEQ ID NO: 17435 - protein, 902 aa, Oryza sativa
  Clone ID: TF_OSC401141j.C1.p34.fg
MARLVTVAAAKVKGSASRFRYVCSTPRTLDQPWIIAGGKVIATKIRNATQLLSCKLGELVPEAWRECPNCKCHIDNSDVTLQWPEFPDGVKFDPSDLEVLEHLERKINLGNPGPQGLIDHFIPTLEKIYHNGVLKGWKKILVLYKGSKKNKIVQANWVMHQYNLGVEEGGEDGELVVSKVFYQLSSKQTGTPEMDSVTEEASDALTIRSDPITPITNPPLPRCLMNSPCDTEQNGTISHDQEGECSTSTLRPMVEAGNRAGCSAGASTAGDFNEDLLQRCEFPEDPVPTLDDTLPFLYTDETDLFSWEDFQFGSQESFGWVDGDHTLVQFLYLCMWDRLLVDDLLREKSIPLPNSVENSRKTLLRSPQFHMAPPTSAAAAVAAAARASPTSAAALALFKSVLSADKALSPLAVLPHLDGAPSSLPNLLLTASAAVRPHATSLRLYSRMKSLSLPISTASLHPLLSALPSAPAFALFADMFRLRLPLCTTTFNIMLRHLCSAGKPARALELLRQMPRPNAVTYNTVIAGFCSRGRVQAALDIMREMRERGGIAPNQYTYGTVISGWCKVGRVDEAVKVFDEMLTKGEVKPEAVMYNALIGGYCDQGKLDTALLYRDRMVERGVAMTVATYNLLVHALFMDGRGTEAYELVEEMGGKGLAPDVFTYNILINGHCKEGNVKKALEIFENMSRRGVRATVVTYTALIYALSKKGQVQETDKLFDEAVRRGIRPDLVLYNALINSHSTSGNIDRAFEIMGEMEKKRIAPDDVTYNTLMRGLCLLGRVDEARKLIDEMTERGIQPDLVTYNTLISGYSMKGDVKDALRIRNEMMNKGFNPTLLTYNALIQGLCKNGQGDDAENMVKEMVENGITPDDSTYISLIEGLTTEDERAIDDERLAAADAAKV

SEQ ID NO: 17436 - protein, 107 aa, Oryza sativa
  Clone ID: TF_OSC401019j.C1.p11.gm
MENGGNDGDGSAVLVVSWKHELVSRLQLSPSFHFVPTDKELVDFHLRGKIKRRKPPLYLINEKYKGYGEGMWYFFMVRGPSKTKKKDLPQLHMKLDYLCCPKHSPAF

SEQ ID NO: 17437 - protein, 464 aa, Oryza sativa
  Clone ID: TF_OSC400621j.C1.p9.fg
MANPSPMGCAVGVADGGAHHGGLWNIKEPFKLQNGWLLWAGVGLFGAIISIALVGVAMTYLNGEPPERETDSLVLLLPLIGSSSASTAFLVGITGVLAPILEETVFRGFLMVSLTKWFPTPVCILVSAALFAFAHLTPGQFPQLFILGVALGFSYAQTHNLLTPITIHAFWNSGVILLLTFLQRPIYSSEGTKCISLKKSLVFYKGRAAKGFKTDWMMHEFRLPSLTEPSLSKIPIDKKPAKDIWAICKIFKKPNSMAQRALSHPWGPQSTATTSSQFASESSSCSEEVAIPITQLNSQQCLQGRQQKPNNRQDGSSSKVINFKCSPSLTHQSDKDNHNCPVTLPFKTQTLQHMSGATSLLLSITPGIINSIYEASPNIRFGQTEPCNGYEVDWVIGTNGGIENSDEDPYTRTGTEYSTGSECGIRQKIKFPFDLLGDPSDNWTSNINMPCEFPLTPNSYSHVQ

SEQ ID NO: 17438 - protein, 143 aa, Oryza sativa
  Clone ID: TF_OSC5422j.C1.p2.gm
MATAAESQGLSPGFKFNPSVEQLLCFFLLPYLQHRRLLVDGVVFLDDPASAPPWALLHRHGRGGEDEAYFIGPVPAGDGHGGRRQQQVSRTVTGGGGGKWIKQRTERPRGEEEPVVVFGGETFRWEEFSLNFHADERCRSGST

SEQ ID NO: 17439 - protein, 311 aa, Oryza sativa
  Clone ID: TF_OSC401612j.C1.p17.gm
MGIGCGRRGCGRACVGSQGEDGDELSSDAIVGDVVMYRVERVDGEKKVPTPAPVGPNPNPNPSPPAGPIRLALALASRRPIPQRARARAETTAAAATATGMAPLADPAAEGFRIPFLPSDSDLLDCLLRPKIASGRVDPRFAPLVHDVADAFALPPAQLAAAHAPAPGAGGAEAWYLFSVRPRARARARAGSKRAASRAVGGGGGKRWCSMGAKKAVEGGGYCQRFRYKERTAAGVVAPRWMMVEYGVAQEHDGEGVAQEHGGEGVAELVLCKIFRSPEPSRRSESGSPSSSSSASASPSCSGGRKRKAAE

SEQ ID NO: 17440 - protein, 427 aa, Oryza sativa
  Clone ID: TF_OSC403595j.C1.p7.fg
MATLPQMAATKERQEAANPTTTTRTLVESVTNWIRVYSDGSVDRLGPPEAAAFMVLVPPYDDPRDGVTVHDVATDHGVDVRLYLTTTAPARRRPVLVHFHGGGFCLSHAAWSLCHRFYARLTVDLDVAGIVSVVLPLAPEHRLPAAIDAGHAALLWLRDVASGGSDTIAHPAVERLCGAADFSRVFLIGDSAGGVLVHNVAARAGEAGAEALDPIRLAGGVQLHPGFILPEKSPSELENPPTPFMTQETVDKFVVLALPPTKDTEKFICRADVYGSEPSDLAGKFAPVPRCEKGGRLFFTSCKRHKGSSTRKERTAGDGTWVRQNSKGVKNKAGVKVGETQNFRFKKDGSYTDWLMEEHHCCRQQAVAGDEEPVICRMYVSPRAPPDSAARQESAAFVQQQPAPQVSEPPCDKKKRDDVAEEAPAAA

SEQ ID NO: 17441 - protein, 265 aa, Oryza sativa
  Clone ID: TF_OSC401567j.C1.p17.fg
MAICAAAADHSRASPSSAATQPTTICWRPSKVKEEVEEDGMVVDPPDDASEASDNLRATGFQDTPTVGELVLRHLRPRLRGFHCADGDVPVIGVRDDPAAAAPLDLVARHGGAADRRRGEAFYFVRRRRCRRPNVRRTVAEGGGGGGGAGGLWKKSWTGSGKSVTDLGVVVPWSKTCYCFYRRDEGGRLSTFGGGWVLAEYEITEPGTYRRADEEEDDDDYWVLCHVRKTASKKRKRNRCDEAVAARAVAGTESKSYLLCGLTAN

SEQ ID NO: 17442 - protein, 344 aa, Oryza sativa
  Clone ID: TF_OSC400792j.C1.p9.fg
MARAVASGSSGGGGGQPFDPTAEDIVNRYLPLRRALRCDALPRQVHDADVYGAHPALLASVYPAANERFEWFFFVCRRQCPGGRRRAGPGDYRLSQEAKHRGNAFCHSFRYYEYEDAGGGFRETEWRMVEYGDRGRDAGAGGSEGFELVVCKVYPARGGALHERLGADRAVLATRHRADEDAKPQVLVQLYLASLRLGNPLACRVHRADDVFDAHPAVITAALPAANDRCEWFFAAVRPRGHAQGHGDGAPPRPRKAGPGAYVPVRECRVVDGRRGDMGCRLVFWYREDDEEARRASRRTEWWMDEYRFGPDFPYGELPAPMARGEDEELVVYKVYPRLVGNRR

SEQ ID NO: 17443 - protein, 374 aa, Oryza sativa
  Clone ID: TF_OSC400978j.C1.p35.fg
MAAAGADGLPPGLRFDPSDDELVGRYLLRRLQGQPLPLDGVVLDADPLSAQPWRLLADHGRGGDEAFFLAEAHAKNAKGKRQKRTVEGGGFWQGQRMCVDGKKLLVPGGDDGGGGGEVLEIAWRKYVLSFFAEGERGSSGWVMHEYSVTAPADLASSPLRLYRIRFSGYGKKRKREPEDDGRAHGAPRRAEAETALFDLEVGPPPPPLLVPPPAAAAADHGTDQSSSGVTDMVFRDLPDLIADAGAALPDQNQQDWSEVADQSSFCVMGDDSSLLLPDLPGMIDDNEHQQFVRECDMPHLFVPQAEEAIAGGGAASAPSADNQNCEFNDGEDMALSDFEFPESIDEVLSYIDFSTSDTSCRDFTMDELFDLPVD

SEQ ID NO: 17444 - protein, 517 aa, Oryza sativa
  Clone ID: TF_OSC401327j.C1.p19.fg
MESLRDMVLPPGFGFHPKDTELISHYLKKKIHGQKIEYEIIPEVDIYKHEPWDLPAKCDVPTQDNKWHFFAARDRKYPNGSRSNRATVAGYWKSTGKDRAIKMGKQTIGTKKTLVFHEGRPPTGRRTEWIMHEYYIDERECQACPDMKDAYVLCRITKRNDWIPGNGNELDNSDPHPEPYDAPPSVISTEQLNPAAEPVVGVEAAPVTVAEPDGVTTSAITANIPSPSDDINLDDWLNELFDPFFDPEQSLASADLSPDEQNVESSVSFFTVTVFAVLSLCILAHRAIFLLNLQNVGALAPKVEQDYSSPNENVVDDTEYLLPEDVYNILHPGTDDFNMLQNPLDQYPIQYATDVWSGIQKEELWSPQANAEPSQSNEAADNGIIRRYRSMKTPETSVPQFKGKTQAKMRVGINKMATSSSESINQTIKFENSGRLVEHQKNQAHDVASTKRSDAGKPSTELSSNRGFLRGIRNAFAGCSDARWNMILVAGFAIGVAVVALHIGQRLGLSQRDQQHT

SEQ ID NO: 17445 - protein, 276 aa, Oryza sativa
  Clone ID: TF_OSC401434j.C1.p2.fg
MAAAKRRVRDAEADLNLPPGFRFHPTDEELVAHYLCPRAAGRAAPVPIIAELDLYRHDPWDLPHRALFGRREWYFFTPRDRKYPNGSRPNRAAASGYWKATGADKPVLHNGRTAGIKKALVFYHGKPPRGVKTEWIMHEYRLAKKGGAAAAAGAGALRLDDWVLCRLYNKKNEWEKMQSRKEEEEAMAAAQSWGETRTPESEVVDSDAFPEMDYSLPAASFDDALLPKEEARDDDWLMGMSLDDLQGLGSLLQADDLSMLAPPPAAKTEPLGAPFF

SEQ ID NO: 17446 - protein, 224 aa, Oryza sativa
  Clone ID: TF_OSC400708j.C1.p1.fg
MERCSVLGLGGGGGGGGRLDGELPPGFRFHPTDEELITYYLLRKVVDGSFNGRAIAEIDLNKCEPWELPEKAKMGEKEWYFYSLRDRKYPTGLRTNRATGAGYWKATGKDREIRSARTGALVGMKKTLVFYRGRAPKGQKTQWVMHEYRLDGTYAYHFLSSSTRDEWVIARIFTKPGVFPVVRKGRLGISGGGGDTSCFSDSTSASVGGGGGTSASSALRAPLD

SEQ ID NO: 17447 - protein, 373 aa, Oryza sativa
  Clone ID: TF_OSC401682j.C1.p1.fg
MERCSVLGLGGGGGGGGRLDGELPPGFRFHPTDEELITYYLLRKVVDGSFNGRAIAEIDLNKCEPWELPEKAKMGEKEWYFYSLRDRKYPTGLRTNRATGAGYWKATGKDREIRSARTGALVGMKKTLVFYRGRAPKGQKTQWVMHEYRLDGTYAYHLLSSSTRDEWVIARIFTKPGVFPVVRKGRLGISGGGGDTSCFSDSTSASVGGGGGTSASSALRAPLAEASLFAAAAAPAVDGADSSNYGGGGGAGSATATANLVTGLELVPCFSTTAHMDASFGTGQYNPAPLAVEPPPPPPAFFPSLRSLQENLQLPLFLSGGMQAGVSSQPLSGGGAFHWQSGMDVKVEGAVGRAPPQMAVGPGQLDGAFAWGF

SEQ ID NO: 17448 - protein, 358 aa, Oryza sativa
  Clone ID: TF_OSC100569j.C1.p6.fg
MWSWLITGRGVAKKIRNAPHCSSRPISELGAEAQMECPNCKHVIDNSDLQKGRLLLMRKEVAIQWPGLPAGVKFDPSDLELLEHLEQKIGLGGSKPHTFIDEFIPTIDNDEGICYSHPENLPGKSKAIVEKGVTKGWKKIMVLYKSSQRGAKPDKANWVMHQYHLGAEEDEKDGELVVSKISYQLHGKQIDKSETGNADEESDAFAARVGPKTPKSNTPQPCRLKNSPCETENYDPILEDQDEEESNIPIVSLKDDAGNPAWCAGETQAAREAVQACPNLDESLRCHEVLDSFYHETLLPSDRPILSQGGNEILDRNLNAVYGLPDLYNVDLGTPPDFQLADLQFGSQESIGNWLDSI

SEQ ID NO: 17449 - protein, 532 aa, Oryza sativa
  Clone ID: TF_OSC401435j.C1.p7.fg
MAELPPEGRGGGGNNNGKWKGKEKVVPEYGKNRHGMSVGWYFVPKDLELFAILKCKLVRGQLPGALNNVFEHIRILEFHPALLHEMYIKNEEDGYIYFFSKRQFTTKAGNKRRPTRVTKGGTWKASGGSKTVRSKKVGGIDVGQKLTMVFYERRFEGDRNPIKTNWGMHEFTKIIDGTKNQLEDLAVYRLYKIKRKEDEEPSNTAAAASSTDEPSTSSALPPPTPPRPLPDMAGPSSATPLLPLQLPGLAGSSSAMSLPALQLPGMAGSSSAMPLPPLSLPGLAGGMMSMADQANMASTSQASTPSSELLQDWYDEFEITYGAVAPPSPSTISWVAPQSSPTGWWPSPNGGPVQHDGYLGMAADPTSYMLENLLPTAAIPPEPMMPPTSSPAPPPAVDHHHRLSPPHDAAGSNYNHPELADYNGGVQAQHEHQYHPQEPQASLVDAEDGYSAMAGGDDAQLGGAELDTERIAEMVNHIMDGEFEFKFEDNTVLKYNEVFPDNDEVVAAPMMIDGGRDGDGADGGDGDDPFDN

SEQ ID NO: 17450 - protein, 448 aa, Oryza sativa
  Clone ID: TF_OSC900188j.C1.p4.fg
MTPRASNLTGVEIYSPVEMKWKERSGTAKTAKMAKRRGGWENDATRMAAGEQERQASQVLGSIQARMSSDGASGSIGMKHDDGDHRPSTGASSRRCPSCGHDPDCNKPFDMVGMPAGVRFDPTDQELIEHLEAKVKDGGSTSHPLIDEFIHTIQGEDGICYTHPENLPGVTRDGLSKHFFHRSAKAYPTGTRKRRKVLADQQPDDHPQASKGRNVAAAETRWHKTGKTREITVRGQPKGCKKILVLYTSFGKKRKAEKTSWVMHQYHLGELDDEKEGELILSKVFYQTQTRSAAAAEAPVSSGAAMEVQGQQQQVLKLQADDGHFSSAPTKKRLHQDVVAQVKVDRGHHCMPAQRQVNFNLKVTPVPTTSSFPVVVDKQLYSPVALFRSEHLHVVQHYDTSILQIKPFDLFTFYREELQFISPKKQIGLTSAGLLTTKINMDNFLDSQ

SEQ ID NO: 17451 - protein, 556 aa, Oryza sativa
  Clone ID: TF_OSC900220j.C1.p29.gm
MAKRRGGWENDATRMAAGEQERQASQVLGEGARRHPGLDPDLRLRGSEDVVQEDCRRRRRHRRDARSSGLPRLAATAKPTSSPPPRASAGCACGSSSAAAVARRSSSSASTERRLTPPPCSSLASTERRLTPPPCSPRRPPPPPCSSSSASTKRRLTPPPPSSPPVSRRRRPARCPREKKREREKRKGEKRGKKEEADLDRLTWSIQARMSSDGASGSIGMKHDDGDHRPSTGASSRRCPSCGHDPDCNKPFDMVGMPAGVRFDPTDQELIEHLEAKVKDGGSTSHPLIDEFIHTIQGEDGICYTHPENLPGVTRDGLSKHFFHRSAKAYPTGTRKRRKVLADQQPDDHPQASKGRNVAAAETRWHKTGKTREITVRGQPKGCKKILVLYTSFGKKRKAEKTSWVMHQYHLGELDDEKEGELILSKVFYQTQTRSAAAAEAPVSSGAAMEVQGQQQQVLKLQADDGHFSSAPTKKRLHQDVVAQVKVDRGHHCMPAQRQVNFNLKVTPVPTTSSFPVVVDKQLEELQFISPKKQIGLTSAGLLTTKINMDNFLDSQ

SEQ ID NO: 17452 - protein, 293 aa, Oryza sativa
  Clone ID: TF_OSC401940j.C1.p3.fg
MDRHEEEAGESPCVPPGFRFHPTEEELVGYYLARKVASQKIDLDIIQELDLYRIEPWDLQERCKYGGHGGDEQTEWYFFSYKDRKYPSGTRTNRATAAGFWKATGRDKPVLSSPSTRVIGMRKTLEEGWVVCRAFQKPMPNQQQHRLSYGCIPGSYGAGAYAAVPDNYSLLLHHDNPSFAGRPLMSAAASALFANNNNNSVVDHSNILSSESKLHFSDMMPPLESPTIVDGEGYVSQASSCVDVDQQAGIVDWNLLTSLLPPPAHQLFHHLPSASSSKNSNNISSSGFIDDRD

SEQ ID NO: 17453 - protein, 351 aa, Oryza sativa
  Clone ID: TF_OSC400651j.C1.p3.fg
MVEPVKSELGSLFLPPGFRFHPTDAEVILNYLLEKFINPSFTSLPIHEVDLNKCEPWDLPTARMGNNEWYFSRKDMKYPTGMRTNRATKEGYWKATGKDREIFKPAIYEGSSKNNKQLVGMKKTLVFYMGRAPKGTRTNWVMHEFRPHANLHNHYPNLRLNPNEWVVCKVFHKKQGDEAINNQQQQPAVDQADDDDIFQLDDIFADPSIYDFSNSSANILSAPPNNNAVHSSVSAGTTMTSTTTASSFQHQPNCYSAPLQQHVSSWNNTPGAGGAHGIGSSYYNLQQQQQQAAMVKDLEDIIAVPDYGTLLPSSNKGSSIRSATAGVSQQNPLGVPQYKIENYGDHYISRE

SEQ ID NO: 17454 - protein, 50 aa, Oryza sativa
  Clone ID: TF_OSC100708j.C1.p4.hg
MHPNGAPLAVPPGFRFHPTDEELLYYYLRKKVAYEAIDLDVIREIDLNKL

SEQ ID NO: 17455 - protein, 331 aa, Oryza sativa
  Clone ID: TF_OSC400302j.C1.p15.fg
MGREGEELERRKRKGLWGREGEELEERRRRKMKRWDEEISDDSMMMGGEVRAIESRLPPGFRFHPSDEELVGYYLRNKQQQQQQQTAATSMLVEVDLHACEPWDLPEVAKVGSDEWYFFSWRERKYATGWRRNRASKQGYWKATGKDKPILHPTVAGARKTLVFYSGRAPNGRKTAWVMHEFRLLHHHHHPNPNIQNMQQQEGDDWVLCRVFRKGNNSNGQPLATSSPPAHHLVESLISSPAPTIMSDHDRLFTIQLPHHQHCDEQYFFLDDDEQHQQQLLDLSVLQAPTSFESEQAPGHGGMEINIAEMESFDTTCAALQDASDYCMQLY

SEQ ID NO: 17456 - protein, 292 aa, Oryza sativa
  Clone ID: TF_OSC400311j.C1.p13.fg
MEQQRSRSTAAGGEVEVEQLPGFRFHPTEEELLEFYLKQVVQGKKLKFDIIPTVHLYRHDPRELPGLARIGEREWYFFVPRDRKQATGGGGGGRPSRTTERGFWKATGSDRAIRCAADPKRLIGLKKTLVYYEGRAPRGTKTDWVMNEYRLPDAAAIPDTMQLQMQHDDMVLCKVYRKAVSLKELEQRVAMEELARSTTSSGTHNTGSPLQQDSSSISISSSSDAMKKEVVGVDEASAAAHELVRPATLSLPQLEVARPQSGLEWMQEPFLTQLRSPWMETWSPYYASVLNF

SEQ ID NO: 17457 - protein, 493 aa, Oryza sativa
  Clone ID: TF_OSC400785j.C1.p19.gm
MSISVNGQSVVPPGFRFHPTEEELLTYYLKKKVASERIDLDVIRDVDLNKLEPWDIQERCRIGSGPQNDWYFFSHKDKKYPTGTRTNRATAAGFWKATGRDKAIYSSSNRIGMRKTLVFYKGRAPHGQKSDWIMHEYRLDDPSSASASVSVNLPSYYSSSSSSSSPMHGVAGDQGAQEEGWVICRVFKKKNLVHHGGGAAAASHHAAAKLAAAAMEGSPSNCSTVTVSDHVKAQMLHSSASDDALDHILQYMGRSGCKQETKPAAMSASSAAAAAALEQHLSTPQYGKFMKLPPLEHVAGGVGLLAAAGGGGEYCSAADASGIADWDTLDRLAASYELNGALSDVASGKNMAGFFDVVDQPAGAAAFSSGDGDLWSLARLHIREVAIKIGVHGDGGERRVQGKGCDDPRGRFVACGNAEKRLRVRRRKRTSHKTGYNAASIRRDDRGVRMLYTSWRCSHDGRNTFTGTSSSGTSDDGGGSFTSGSNNRGGSRA

SEQ ID NO: 17458 - protein, 316 aa, Oryza sativa
  Clone ID: TF_OSC408811j.C1.p12.fg
MADDDEIALEPGYVFHPSDDGLITLFLRPSIAKIPFEDRLINHADVYSANPAELVGEHRPAPGTHGSSSVWYFFCSPRFTSKRKTSGRRQRAVGGGGGGESVWKSEGGKKAVIGADGRRVGYLQKFSYGVYESSSSGSARTFTRLGWCMTEYGLDDDAIDGADKQVLCKVYRSPRAVCAEARTAAAAKSADSPCSGSKRKADDGADHPEAPPSARPRQEEAGSEQPAILPELDLDALLSAPMDDSLGVEFDTATTEQYMRYLMNDEPLPWAPTMEVAGGGDEFIETTNGPCMGEEEIIQRLASGETLDDILGSNPN

SEQ ID NO: 17459 - protein, 256 aa, Oryza sativa
  Clone ID: TF_OSC400259j.C1.p78.fg
MADGGGRRAPGFRFYPTEEELICFYLRNKLDGLRDDIERVIPVFDVYSVDPLQLSEIHHEMLGGGGEEGEPWFYFCPRQEREARGGRPSRTTPSGYWKAAGTPGVVYSADRRPIGMKKTMVFYRGRAPSGTKTAWKMNEYRAFHYPDASSASASSAGAAAPPNHLPPQLRSEFSLCRLYTRSGGIRQFDRRPLAGGGDENPGPSMAAAAASPEENDGSGSSMQQLELMDQGGAVDPDWDQWDDLATLTALLYWPRD

SEQ ID NO: 17460 - protein, 204 aa, Oryza sativa
  Clone ID: TF_OSC418721j.C1.p3.fg
MGKEMNLIREDEYGGGGVGFEPTEDELMLHFLRPQLRGFAPRVAGAVVEADPCGAAPWELLARHGRREEGFFFSARARRKPSVRRTVAGCGGGGGGGGAWMHSSTKNGQSVTDLGVVVRWCRINYCFYVRGEMGQQRSTGWMMAEYEITDPRCYRRADDGEEDDFWVLCHVRKSSRPQAAKISPAKPARRRKPAAAAAADVRAA

SEQ ID NO: 17461 - protein, 285 aa, Oryza sativa
  Clone ID: TF_OSC407962j.C1.p2.fg
MEEEWCCVAPGFRFHPTEEELVGYYLARKVVGQQDDGIIQEVDLNSIEPWDLLQAQQHDQEYYCYFFSYKDRKYPSARGTGTRTNRATAAGFWKATGRDKPVLSSSRSSSSPAVIGMRKTLVFYRGRAPNGCKTDWIIHEYRLVAHHQQPDGSCWVVCRAFHKPTTTTLQHQLHLHRPPPLLHHPGYYAEQNLYPPLAAAAGGGGLLCSLALDMELEDEEDESKMMILSNDNIPLVVSPTAVHTQGTGGDIINDATTAPAAAAAADHRRHLAPPPPLHLLANSVD

SEQ ID NO: 17462 - protein, 290 aa, Oryza sativa
  Clone ID: TF_OSC900274j.C1.p4.fg
MEEWCCVAPGFRFHPTEEELVGYYLARKVVGQQDDGIIQEVDLNSIEPWDLLQAQQHDQEYYCYFFSYKDRKYPSARGTGTRTNRATAAGFWKATGRDKPVLSSSRSSSSPAVIGMRKTLVFYRGRAPNGCKTDWIIHEYRLVAHHQQPDGSCWVVCRAFHKPTTTTTLQHQLHLHRPPPLLHHPGYYDDQYLCPPPAAAGGGGLLCSPALDMELEDEEDESKMMILSNDNIPLVVSPTAVHTQGTGGDIINDATTAPAAAAAAADHRRHPELLAAGPIDTLLHHHHFTC

SEQ ID NO: 17463 - protein, 329 aa, Oryza sativa
  Clone ID: TF_OSC900019j.C1.p16.fg
MECGGALQLPPGFRFHPTDDELVMYYLCRKCGGLPLAAPVIAEVDLYKFNPWDLPERAMGGEKEWYFFSPRDRKYPNGQRPNRAAGTGYWKATGADKPVGSPRAVAIKKALVFYAGKPPKGVKTNWIMHEYRLADVDRSAAARKLSKSSHNALRLDDWVLCRIYNKKGVIERYDTVDAGEDVKPAAAAAAAKGGRIGGGGGAAAMKVELSDYGFYDQEPESEMLCFDRSGSADRDSMPRLHTDSSGSEHVLSPSPSPDDFPGGGDHDYAESQPSGGCGGWPGVDWAAVGDDGFVIDSSLFELPSPAAFSRAAGDGAAFGDMFTYLQKPF

SEQ ID NO: 17464 - protein, 323 aa, Oryza sativa
  Clone ID: TF_OSC401022j.C1.p2.fg
MEEGLPPGFRFHPTDEELVTYYLARKVSDFGFATRAIADVDLNKCEPWDLPSKASMGEKEWYFFSMRDRKYPTGIRTNRATDSGYWKTTGKDKEIFHGGALAGMKKTLVFYRGRAPKGAKTSWVMHEYRLQSKFPYKPAKDEWVVCRVFKKLQCHLAKPRPPHDDVDGDGASPPEMVDASSLGELGELDVSSILLGGFAPPSGELCHGGGGGDGFGAHRLHVGAYMSWLQAAAAANQGMFQWPAATQAGLVGGTVFAAAHKAAGTMPFGGGCSQQQARDVGVSLANVGGGDALFGGAPLAKVDMECGEQAPQLDMDDSTWRAF

SEQ ID NO: 17465 - protein, 567 aa, Oryza sativa
  Clone ID: TF_OSC22429j.C1.p1.fg
MAAADGLLPGLKFDPSDHDLVGRYLLRRLQGQPLPLDGVILEADPLSAPPWKLLADHGRGDEAFFFAEAHAKNGKGKRQKRTVEGGGFWQGQPTCVDGERLCVPDDGVGSGGGGGGLQIAWRKYVLSFFANGERGKFGWVMHEYPVTAPDGLASSQLRLYRVRFSGYGKKRKRKPQCPGAHGDDDGELQCAPPPRPMAKTALLEERGPLPHPVLGPASVVDQCTDQGSSGVIDDSSLVFRDLPDLIDLPVAEEADASHGAETALLNEHLPLPPPQLFVPPTAVPLDLADDSNGADQNSYGMMGDDQLLLPDLPGTINDDMPDLFVSQAEEASAVPAISYHSSGFMGNEVAALSDFELPESYSSSDAMDGEALALSNYEFPESFEEDLSCIDFATANASSLGFPMDGYPMDELFDDMPDQGSSGAMDDSSVVFRDLPGLINLPAAEEADAIGDAETALLRDLADDSNGTDRNSYGVMGDDQDRLLLPEIPRRIDMPDLFVSQAEEAGLGGGAALDSSSGAMDGEALALSDFEFPESVEEVLSCMDFSTVDMSFLDVPIDELLDDLPAD

SEQ ID NO: 17466 - protein, 334 aa, Oryza sativa
  Clone ID: TF_OSC421430j.C1.p8.fg
MEEEQRLPAGFRFFPTDEELVTYYLARKAMDATFTSAAIRDVDLYTSDPWHLPCDSSAASTGGGGGGECYFFCRRSSKYPSGARVRRATAGGYWKSTGKDKGVYAAGGGGGLVGTKKTLVFYEGRAPRGEKTSWVMHEYSRAPSTNFIRGAQARTHNLLDIIYSEWVICRVFKKQPPIEHWLEMEEVETTTTTTTVQEHTPNRRRLPPAEAAAAPPPPSGQPWQHTSRRSGDGRAAIDGGNREEEEDEHGLAREESSSPVVISSPSRCTSSPSSRLLNHEHLGASSSDDLPELMEFGDIYGGIAAGGPTDQQASSSNSNSICNFLDEPYYCWNF

SEQ ID NO: 17467 - protein, 244 aa, Oryza sativa
  Clone ID: TF_OSC406649j.C1.p1.fg
MSISVNGQSCVPPGFRFHPTEEELLNYYLRKKVASEQIDLDVIRDVDLNKLEPWDIQERCKIGSGPQNDWYFFSHKDKKYPTGTRTNRATAAGFWKATGRDKAIYNAVHRIGMRKTLVFYKGRAPHGQKSDWIMHEYRLDDPATDTAAATPTVTSAAAAAAAMAAAADGGQEDGWVVCRVFKKKHHHKEAGGGGGKHGGDGSAGAKAAHAYSSSDDALDQILQYMGRSCKQEHELPSPQASGGA

SEQ ID NO: 17468 - protein, 309 aa, Oryza sativa
  Clone ID: TF_OSC900198j.C1.p5.gm
MSISVNGQSCVPPGFRFHPTEEELLNYYLRKKVASEQIDLDVIRDVDLNKLEPWDIQERCKIGSGPQNDWYFFSHKDKKYPTGTRTNRATAAGFWKATGRDKAIYNAVHRIGMRKTLVFYKGRAPHGQKSDWIMHEYRLDDPATDTAAATPTVTSAAAAAAAMAAAADGGQEDGWVVCRVFKKKHHHKEAGGGGGKHGGDGSAGAKAAHAYSSSDDALDQILQYMGRSCKQEHELPSPQASGGGGAGAGSRPASRYLPPMYPSLRASGFGNRSLFRRPRGGSAAIGYSSVLPDNNIVYILYVVSGSSAD

SEQ ID NO: 17469 - protein, 494 aa, Oryza sativa
  Clone ID: TF_OSC900189j.C1.p17.fg
MAGLGKGESSGGGGGGGGEMGFRFKPREAEAVEYYLLPRLQGRPPVPNPAIVVENVYEFEPERLINEKCNGGVAGEGEEGWYFLSPRDRKYRNGKRPSRSTEDKAGRWKASTGKTEGKDPITECYGWVKFCVTSLVYFKGPVKTEKKTKWLMREFTIPHFENKLDKTAAAGGSSNQRQLDQYVLCRIYTSPKKGADDGEQAEVVRGGGGGGEDIDEWAEACAVFDLGPETAEGSDNADAAAAEGDMRSAKQAGKRPVAAAAVAEQPSKRPWLPPSPSTPCDGGPSQAMGNRQVPMQGLSLMHNFPPPPTTFCGHAPFQQGFPVHNNRAQMRWPTMQHNCMPSPAHSFQPRPVQRRPVLVGQAPPQRRPVHHVGGHAPMHMHQAQWTPVHIAQAPMQQLPFDDWVFDPFDDPPPPMQQLPVMMNNYQPQAPMQLPPMMNNDQPAMVHGGELQAPMQLLPATTHGGEVQAPMPLNVYEEEQRPSQEDGGQCTNAEG

SEQ ID NO: 17470 - protein, 683 aa, Oryza sativa
  Clone ID: TF_OSC900291j.C1.p15.fg
MKQGKVEMTPAVAAAAVLPVGFRFRPTDEELVRHYLKGKIAGRSHPDLLLIPDVDLSTCEPWDLPAMSVIKSDDPEWFFFAPRDRKYPGGHRSNRSTAAGYWKATGKDRLIRSRPAGPLIGIKKTLVFHRGRAPRGLRTAWIMHEYRTTEPHFQSGKNGSFVLYRLFNKHEQDDTHTPASNLDQQLSTSSQGNPQNGTPAVQPALASIMKDHQTLPSSGFSQLTEIQDASTSVHDKEQTVAHDDAFLDVLSQLPDLEPEQRYNGFPNITSPIRPYSDHPFVGNLGEQDLSAHFGSTLSEQDLQSLLFSPNYTKMDKHPTGNVESNPTASSNNPNNNTLLMDSWRKNDSYQMLLIQRADNTDATCCSSSINAPQTETSDANLEARAQSSSMVYSGVAEGSPLCNQDQLHSAFNPHMESQKSGAFCWAGLWTPYPQHWFDTIVEPGRSGMTFSDALKEQGQEQAPSMKHLTAQDLVDPQQGTAARRIRLVCSVERASVSQPVSSHLQSEYEAGSCCNTRNSSNNKKESVRSEDEAGSCCNTGSSSNNHSEENDDAASQIMVLLQFIDGEPMHIQCKEDTPIQVDHSVEVMDKLQGFSFHEEMLVHANQPRGTNLKQRLLRVESRNSNENNVPSLETREQQHAPHIQKWTSSVVRLGWGWQWPALFVMAGSLLLLVGVWKSLNHTT

SEQ ID NO: 17471 - protein, 322 aa, Oryza sativa
  Clone ID: TF_OSC407684j.C1.p4.fg
MSGGGEGAAAAERQELQLPPGFRFHPTDEELVMHYLCRRCAGLPIAVPIIAEVDLYKFDPWHLPRMALYGEKEWYFFSPRDRKYPNGSRPNRAAGSGYWKATGADKPVGTPRPVAIKKALVFYAGKAPKGDKTNWIMHEYRLADVDRSARKKNTLRLDDWVLCRIYNKKGGVEKPSGGGGGERSNMMSHGETASAGSPPEQKPAVLPPPPPPYAAAAPFSELAAFYDVRPSDSVPRAHGADSSCSEHVLTTSASSGGVVERPEVQSQPKIAEWERTFAGAAAPAGAVSTAGPILGQLDPAAAVAGGGDPLLQDILMYWGKPF

SEQ ID NO: 17472 - protein, 228 aa, Oryza sativa
  Clone ID: TF_OSC401583j.C1.p24.fg
MAAEAASGGGGGYRMLPQAGLPIGFRFRPTDEELLLHYLRRKVMSRPLPADVIPVADLARLHPWDLPGEGDGERYFFHLPATSCWRRGGGGSRAGGGGGAWRASGKEKLVVAPRCGKRPVGAKRTLVFFRRGGARTDWAMHEYRLLPADDHPPEANDVWVVCRVFKKTTTLAHRRSPPSIRGAPRRRAAAADDDDMPSSPSSCVTDGGDAGEEGEESSSCSVVASNCP

SEQ ID NO: 17473 - protein, 272 aa, Oryza sativa
  Clone ID: TF_OSC2451j.C1.p1.np
GLSIPMVNGATIHLLPGFRFRPTDDELVIKYLYPRAFHVPLPCAIITDVDIHHHNPWDIVAEREKGKHFFTRKEVKYPGSRRSNRVAGNGFWRAAGSEVPIYYKPEGAANELVGMRRTLVFHYGKSRSAERTEWAMHEFQLAGAGLLPHPMMSSWVICCIYKKRQQNTKNKSEDITDKNNGSPSAAHTHAPLVETMVEPDNSWMICRIYKKRQRAPQVIIPPSIGNAREAVLAAAIGNAGDRQVTSLTSQGIDFEEGSDESANVITKDKGSD

SEQ ID NO: 17474 - protein, 157 aa, Oryza sativa
  Clone ID: TF_OSC2465j.C1.p1.np
GLSIPMVNGATIHLLPGFRFRPTDDELVIKYLYPRAFHVPLPCAIITDVDIHHHNPWDIVAEREKGKHFFTRKEVKYPGSRRSNRVAGNGFWRAAGSEVPIYYKPEGAANELVGMRRTLVFHYGKSRSAERTEWAMHEFQLAGAGLLPHPIAQNWHA

SEQ ID NO: 17475 - protein, 506 aa, Oryza sativa
  Clone ID: TF_OSC401036j.C1.p17.gm
MERRCGTSAPAIEDMSPHSRSTAGKYIAGYIVKKKMHPNGAPLAVPPGFRFHPTDEELLYYYLRKKVAYEAIDLDVIREIDLNKLEPWDLKDRCRIGTGAQEEWYFFSHKDKKYPTGTRTNRATVAGFWKATGRDKAIFLGSGGGTRIGLRKTLVFYTGRAPHGKKTDWIMHEYRLDDDNVDVPEEGWVVCRVFKKKSIHQRGFDQPDMAAAADEDELRYQLLHGAGMSSSPVDQKHVLLQEQLVAHGAHGGGFVVPAFEASMHLPQLASADAAPCGGGGGGHVAFASMNPLDAAGCGSQNMMTMKMAATSGGEMLLMSGGGVDGGRFGAAADWSILDKLLASHQNLDQLFHGKVAGAHQQQQQMAMDAASSLQRLPFHHYLGLEAADLLKSSPLPVSHRPVPDRVPQAHDSSPPHRPAPPWGQAVVASSLRGQAAAAAGTNRLLAQSPHRRHRSNPRRLCRAPLPPRAVTRHIAAAGPSQPTPPPRRPIASSPASPSSPKIWYDL

SEQ ID NO: 17476 - protein, 301 aa, Oryza sativa
  Clone ID: TF_OSC401231j.C1.p5.fg
MSESEVSVINQLEEEETRLELPPGFRFHPTDEEVVTHYLTRKAQDRSFSCVVIADVNLNNCEPWDLPSKAKMGEKEWFFFCHKDRKYPTGMRTNRATASGYWKATGKDKEIFRGRGLLVGMKKTLVFYMGRAPRGEKTPWVMHEYRLDGKLPPNLPRSAKEEWAVCRVFNKDLAAKIAQMPPPPFPRNDSFDLDLDDFLHLDADLPPLIDDPFASTSTLKTEPPPPANLMHNHYGYFSLPASATNYNHSSGAMADQAIRRFCKAEASTACFSGADADVDPVVDELLSFPDSITDYSYIWKA

SEQ ID NO: 17477 - protein, 678 aa, Oryza sativa
  Clone ID: TF_OSC32411j.C1.p2.fg
MAAAAGDGLPPGLRFEPKDDELVARFLLARIQGKPLPLHGVILDADPLCAPPWRLLADHGRGDDAFFFAEARAKNGKGSRQKRTVEGGGYWQGQRMCVDGERLVVPDGGGGGGVEIAWRKYVLSYFADGEKGSSGWVMHEYAITSPADLASSAMRLYRIRFSGHGKKRKREPDSQSAHDEHGRARCAPQIAMPETALLEDSAPPPQPVHPPAAVVDCVCDVTDQGSSLVFPDQPGSIYEDELQSFVPEFAARNLFVSLPEGSRDVVAEAALIEDLALSPQPVPPPAEVVNQADDSDGADQGCSSVFAALPDLIVLPPEEACGSGGAAPAPSWASSLDNQNDDAPAFFEFPESMDDMVGCFDFASMDNQSCTSAVSEIAVLEEPFLPPPTMVNHDNNSVSDGADQSCFGVGDNSTLVFSDLTGSIDEDELQSFVPEFVSLPQGSCEADAEADSGGGVAPAQFAEFGGPESMDDPLNFPAEASGGGDRAAPASSWVSSQDNQNDEAPMFFELPESLDDMVGCFDFAAMDGQSCTSAVSETALIEELVLPPAAMVNHHDDSVSDIADHGCSGAVPPPNSEVVDLPNDSVGADQSCSGMVDDSLSGYYEAELKDASGGAGSMMSSPDKQKEHSSSGVMDVEATGFGVPDSMDGLSCIDFAETMDDLSCIDFTIDDELFDLWS

SEQ ID NO: 17478 - protein, 706 aa, Oryza sativa
  Clone ID: TF_OSC32411j.C1.p5.fg
MAAAAGDGLPPGLRFEPKDDELVARFLLARIQGKPLPLHGVILDADPLCAPPWRLLADHGRGDDAFFFAEARAKNGKGSRQKRTVEGGGYWQGQRMCVDGERLVVPDGGGGGGVEIAWRKYVLSYFADGEKGSSGWVMHEYAITAPADLASSTTRLYRIRFSGHGKKRKREPESQSDNHQIAVAETAMLEDSAPPPQPVHPPAAMVNCVSDDTDQGFSGAVPPPAPVVHHTNDSDVTDRYSSLVFSDQPGSIYEDELQSFVPEFPARNLFVSLPEGSHEAEPAQSVSSLADVGGPENMDDQSCSGVVFANLPELIVLPSAPSLDNQNDEAPVFFEFPESMDDIVGCFDFAAMDNQSCTSAIPEEPFLPPAAMVNHDDGYASNNADQGCSGAFPLPAAVVDLPNETDGADQSCSGVGDNSTLLFSDVTGSIDEDELQSFVPEFAASNLFVSLPQGSCEADAEADSGGGVAPAQFAEFGGSESMDDSSMMYPLNFPAEAGGGGGRAAPASSWVSSQHNQNDEAPMFFELPESLDDMVGCFDFAAMDGQSCTSAVSETALIEELVLPPAAMVNHHDDSVSDIADHGCSGSVPPPSAVVDLPNDSDQSCSGYYEAELKVPLEYAARNPVDSPAKGGNEAEVDASNGAGSMMSSPDKQKEHSSSGVMDVEAIGFGVPDSMDSLSCIDFAETMDDLSCIDFTIDDELFDLWS

SEQ ID NO: 17479 - protein, 496 aa, Oryza sativa
  Clone ID: TF_OSC407633j.C1.p20.fg
MTAESNGGNSSAAATTASNGGRRRHELVPKLRLPPGYHFVPSDEELVDFYLRGKIEQRRPPMDFINEVDIMSFDPVKLIEKYKGYGENRWYFFTVRKPSKTKKKDEPNRKVVVDGVEEGSWSATGSVAYICGKDHETVIGTKRVLTYKSARSAEEDKWSMHEYVMLDKSQILDTTRDTMSMDQYVLCAIQLKQTYEAEKKAQEEEERGVKRKRTATRKRRKGDIDQTTSQEQEDQQQETPPPGDPHDQSVVDAPYYSTQMALGGEEEVAPVPWCADCMAQPDRIEYPAVWYNQQEQQPSQLVDRSMMTQGYIGDLSYIQNQFDQQQAHDHGSINAFDEALDQCHDTNFAWDNAGIYPGNNLLDGNLDDDTQDQFGNQSTLGALTGELEYGTGYQFHDALQATPGSDDASAQSMGIQPAAGHSMGDDDETCCNDDLSSLLADISRILLDGNGVINNEGNPEGSNQGLHICKDGHQWPLEESTMPTVECVLQHPGESA

SEQ ID NO: 17480 - protein, 285 aa, Oryza sativa
  Clone ID: TF_OSC8882j.C1.p8.fg
MVMSGGGGGARIVSDPAATPGFRFYPTEEELIGFYLRHRLAGTRADDVARVIPVVDVYGYHPSQLAAMAGVATAGDREQWFFFCPRAERELHGGRPARTTPSGYWKATGSPSFVFSSSAAAAARVIGVKRTMVFYQGRAPSGTKTRWKMNEYKAVAAAAADDDHNAAGVAVQLPPMAPPPSSSACVRLRNELSVCRVHHQPQLQQQQRQLPSSAAAAATNGNLIALAGGYECSHDSSGGSSEDAAIDWSSLITAATDSATAAVDFSFNDDIDFSPAAVGPWAPQL

SEQ ID NO: 17481 - protein, 307 aa, Oryza sativa
  Clone ID: TF_OSC900066j.C1.p15.fg
MVMSGGGGGARIVSDPAATPGFRFYPTEEELIGFYLRHRLAGTRADDVARVIPVVDVYGYHPSQLAAMAGVATAGDREQWFFFCPRAERELHGGRPARTTPSGYWKATGSPSFVFSSSAAAAARVIGVKRTMVFYQGRAPSGTKTRWKMNEYKAVAAAAADDDHNAAGVAVQLPPMAPPPSSSACVRLRNELSVCRVYVSTGTLRSFDRRPLDAPPVISHHQPQLQQQQRQLPSSAAAAATNGNLIALAGGYECSHDSSGGSSEDAAIDWSSLITAATDSATAAVDFSFNDDIDFSPAAVGPWAPQL

SEQ ID NO: 17482 - protein, 218 aa, Oryza sativa
  Clone ID: TF_OSC409911j.C1.p6.np
CALISSMAMQLSLPVLPTGFRFHPTDEELVINYLQRRATGLSCPIPIIADVEIYNFNPWELPSMALFGEHEWYFFTLRDHRYPNSVRPSRSAASGFWKATGTDKPVQVANMHPVAMKKALVFYVGRPPMETKTTWIMHEYRLTNTGGSTASHPSLSSSTAHPSVKLDEWVLCKIFNKSRAGQHRTTIKRRLTVTVLAAAAAAGGTARALQSNIKKNKK

SEQ ID NO: 17483 - protein, 196 aa, Oryza sativa
  Clone ID: TF_OSC29108j.C1.p1.fg
MAPRKVHGLSIDLDIIPEVDLYKCEPWELEEKSFLPSKDSEWYFFGPRDRKYPNGCRTNRATRAGYWKSTGKDRRINYQNRSIGMKKTLVYYKGRAPQGIRTSWVMHEYRIEESECENAMGIQLQDSYALCRIFKKNVVLGEFDKKGECSSSQAKGNEEVTDFGDAGQSSGANENDKDNSWMQFIAEDLWCTNKLK

SEQ ID NO: 17484 - protein, 316 aa, Oryza sativa
  Clone ID: TF_OSC401108j.C1.p12.fg
MAAAVGGSGRRDAEAELNLPPGFRFHPTDEELVVHYLCRKVARQPLPVPIIAEVDLYKLDPWDLPEKALFGRKEWYFFTPRDRKYPNGSRPNRAAGRGYWKATGADKPVAPKGSARTVGIKKALVFYSGKAPRGVKTDWIMHEYRLADADRAPGGKKGSQKLDEWVLCRLYNKKNNWEKVKLEQQDVASVAAAAPRNHHHQNGEVMDAAAADTMSDSFQTHDSDIDNASAGLRHGGCGGGGFGDVAPPRNGFVTVKEDNDWFTGLNFDELQPPYMMNLQHMQMQMVNPAAPGHDGGYLQSISSPQMKMWQTILPPF

SEQ ID NO: 17485 - protein, 383 aa, Oryza sativa
  Clone ID: TF_OSC400547j.C1.p10.fg
MRSSDIEKQDEVMLPGFRFHPTDEELVRFYLRRKIQQKSLPIELIRQLDIYKYDPWDLPKLASTGEKEWYFYCPRDRKYRNSTRPNRVTGAGFWKATGTDRPIYSSDGSKCIGLKKSLVFYKGRAAKGVKTDWMMHEFRLPSLTDPSLPQKKPLEKIIPPNDSWAICRIFKKTNSTAQRALSHSWVSPPLSSTNEAYTAPVSQTTQRSQHTSDNTSSVMTDAISSTIQFTGSSYLPSTVPSCHNPLSMIDSNSRPDASVPLPSPVAEHQTMGILSAIPLDITAGIDIASMVFNASSFTLPNMDRMTANIEFGQPQKCNSSSSMTNRCVVDMPDVANNINSGPRSINFNLQGTLSDDWRMTLPWESLPCTTEVSTNFQSTKCYT

SEQ ID NO: 17486 - protein, 515 aa, Oryza sativa
  unsure (1)..(515): unsure at all Xaa locations
  Clone ID: TF_OSC400240j.C1.p17.np
MAPVSLPPGFRFHPTDEELIIYYLKRKINGRQIELEIIPEVDLYKCEPWDLPEKSFLPSKDLEWYFFSPRDRKYPNGSRTNRATKAGYWKATGKDRKVNSQRRAVGMKKTLVYYRGRAPHGSRTDWVMHEYRLDERECETDTGLQDAYALCRVFKKTAPGPKIIEQHHHVEQPQWMTSSIDRSPTLDVSCDGRGDDFESSSFSFPTETPMDSMHGGFGMQMSAPHEDGKWMQFLSEDASNPFLTNPVSANFSCLPSKVDVALECARLQHRLLPPLEVEDFPHDTKIGILRSNPNDDILQEFLSVATASQELINGSTSSYPEMWLGASTSSASYVNELSSLVEMGVGTSNHHESARLQVEIADMEVFKDEKKRVEKSQVGEHSIPYSIQTVYRYSSCMHXLRARLQEAGHRMTDPTDVGGIELPRSSRNLNLTTLLLVSTTSTLASFDLYEKVDVNHRLFVSRVAAAKTFFHRIEPSKKVSFHSNPATAVSKATEKFHFPVTTKVSGRIMGIALSA

SEQ ID NO: 17487 - protein, 966 aa, Oryza sativa
  Clone ID: TF_OSC401213j.C1.p53.fg
MARLVTVAAAKVKGSASRFRYVCSTPRTLDQPWIIAGGKVIATKIRNATQLLSCKLGELVPEAWRECPNCKCHIDNSDVTLQWPEFPDGVKFDPSDLEVLEHLERKINLGNPGPQGLIDHFIPTLEKVEGICYTHPENLPGIKLDGTSSHFFHRISNAYGSGQRKRRKISHTGHAASDENIRWHKTGKIQQIYHNGVLKGWKKILVLYKGSKKNKIVQANWVMHQYNLGVEEGGEDGELVVSKVFYQLSSKQTGTPEMDSVTEEASDALTIRSDPITPITNPPLPRCLMNSPCDTEQNGTISHDQEGECSTSTLRPMVEAGNRAGCSAGASTAGDFNEDLLQRCEFPEDPVPTLDDTLPFLYTDETDLFSWEDFQFGSQESFGWVDGDHTLVQFLYLCMWDRLLVDDLLREKSIPLPNSVENSRKTLLRSPQFHMAPPTSAAAAVAAAARASPTSAAALALFKSVLSADKALSPLAVLPHLDGAPSSLPNLLLTASAAVRPHATSLRLYSRMKSLSLPISTASLHPLLSALPSAPAFALFADMFRLRLPLCTTTFNIMLRHLCSAGKPARALELLRQMPRPNAVTYNTVIAGFCSRGRVQAALDIMREMRERGGIAPNQYTYGTVISGWCKVGRVDEAVKVFDEMLTKGEVKPEAVMYNALIGGYCDQGKLDTALLYRDRMVERGVAMTVATYNLLVHALFMDGRGTEAYELVEEMGGKGLAPDVFTYNILINGHCKEGNVKKALEIFENMSRRGVRATVVTYTALIYALSKKGQVQETDKLFDEAVRRGIRPDLVLYNALINSHSTSGNIDRAFEIMGEMEKKRIAPDDVTYNTLMRGLCLLGRVDEARKLIDEMTERGIQPDLVTYNTLISGYSMKGDVKDALRIRNEMMNKGFNPTLLTYNALIQGLCKNGQGDDAENMVKEMVENGITPDDSTYISLIEGLTTEDERAIDDERLAAADAAKV

SEQ ID NO: 17488 - protein, 239 aa, Oryza sativa
  unsure (1)..(239): unsure at all Xaa locations
  Clone ID: TF_OSC401601j.C1.p17.np
XSFLVXDMEERNDVNMDKSDEILLPGFRFHPTDEELVSFYLKRKIQQKPISIELIRQLDIYKFDPWDLPKLASTGEKEWYFYCPRDRKYRNSVRPNRVTTAGFWKATGTDRPIYSTEGTKCIGLKKSLVFYKGRAARGIKTDWMMHEFRLPTLTDPSLPKKPIDKNIPLNDSWTIDSWTICRIFKKTSSMAQRALCQTWGAQLPGTIDPDIFSTLQSVQASQFALEKTQKVGLSHAKHH

SEQ ID NO: 17489 - protein, 333 aa, Oryza sativa
  Clone ID: TF_OSC900037j.C1.p9.fg
MSMMSFLSMVEAELPPGFRFHPRDDELICDYLAPKVAGKVGFSGRRPPMVDVDLNKVEPWDLPEVASVGGKEWYFFSLRDRKYATGQRTNRATVSGYWKATGKDRVVARRGALVGMRKTLVFYQGRAPKGRKTEWVMHEYRMEGVHDQQASSFSSKEDWVLCRVICKRKSGGGATSKSRSLTTTTTTIVHDTSTPTSSPPLPPLMDTTLAQLQASMNTSSSSAIAAVAALEQVPCFSSFSNSIASNNNNSNSATVNAQQCYLPIVTGSNNNGMSYLDHGLPEFGSFLDTQSCDKKMLKAVLSQLNSIGGEVLPGLPPPSEMAAAVSSSWMNHF

SEQ ID NO: 17490 - protein, 165 aa, Oryza sativa
  Clone ID: TF_OSC401231j.C1.p1.fg
MEMTMSSAATSLPPGFRFHPTDEELILHYLRSRATAGQCPVPIIADVDIYKFDPWDLPSKAVYGESEWYFFSPRDRKYPNGIRPNRAAGSGYWKATGTDKPIHDSATGESVGVKKALVFYRGRPPKGTKTSWIMHEYRLAADPLAAAANTYKPSSSSRFRNVSMR

SEQ ID NO: 17491 - protein, 346 aa, Oryza sativa
  Clone ID: TF_OSC401231j.C1.p13.fg
MEMTMSSAATSLPPGFRFHPTDEELILHYLRSRATAGQCPVPIIADVDIYKFDPWDLPSKAVYGESEWYFFSPRDRKYPNGIRPNRAAGSGYWKATGTDKPIHDSATGESVGVKKALVFYRGRPPKGTKTSWIMHEYRLAADPLAAAANTYKPSSSSRFRNVSMRLDDWVLCRIYKKSGQASPMMPPLAADYDHDEPSGVLDDAYSFYAPPMISTTLIPKLPKIPSISELFDEHALAQIFDAAADPPADHHQHALAVHPSLNQLLGVGDNFLAECYPSTASTATVAGGKRKASPAGDYAGGGHTPAKRLNGSCFDVAPQSVVGGLQATPSSVLAGLNHQMLPPQLF

SEQ ID NO: 17492 - protein, 470 aa, Oryza sativa
  Clone ID: TF_OSC900046j.C1.p19.fg
MATNLHLLLELGFRFNPSPEEVVTYYLPRLIAGHPPKDTESCIHRANVYGAEPRELAAQFAPVARSSNGDRFFLTECKRIKGKVSRVAGGGSWVSQTSKDIKNREGIKVGEAKNFRFKKDGTNTDWLMEEYHLCLRQASDLEPVLCRVYVSPRAAKDSAAHQESAALTPQEPAPPLAHAPAPAPIQEPAALPRQELAPAPPRLEAVITQQQATMKMGGSVPASKATRQSCVTASAPPPRRVAPQPAPPSLRTAPAAVAPPRQVPVITQQQAPPLKRPAPPVPSPPCAKKIRGPVSASPAARQSCVAASAPPPWCVPPPPRPAPPSRRVMAPLPPYPMDPFETPPSPHAPRHDPFEPPPSPDPPIQSYAIDPPIQSYAMDPFEQPPSPYAPHGVDDMDEFTRSLEAQLEEADGDEIAAATVAPPMAQNVAPDDDMDEFTRSLEAQLEEADGDDKIDDDEIDEEIFQIPLKD

SEQ ID NO: 17493 - protein, 252 aa, Oryza sativa
  Clone ID: TF_OSC400590j.C1.p15.fg
MAMTPQLAFSRMPPGFRFQPTDEQLVVDYLQRRTAAQPCVTPDITDIDVYNVDPWQLPAMAMYGSDHDRYFFTMAAREAQARRTTPSGFWKPTGTKKTIFVVAGGHEVPTAVKRRFVFYLGHHQPSGSNNNNKTSWIMHEYRLMNSPRAAVPSSSSVNRLPTDDLTEEMVLCRISNKDLPKPPFIHNSLLQFSSVGLNGDGYNYLILDHLEPPAMEYPNVGIGNVDDAAAGTDDPGDLDEEIDDSMQRNHGG

SEQ ID NO: 17494 - protein, 370 aa, Oryza sativa
  Clone ID: TF_OSC400934j.C1.p72.fg
MTWCNSFNDVRAVENNLATAAAVAAAKKQQQQQQVSQHVNLIKTCPSCGHRAQYEQSQLQAAAAATIQDLPGLPAGVKFDPTDQELLEHLEGKARPDARKLHPLIDEFIPTIEGENGICYTHPERLPGTRQPSGHWNWSTGYYDYEATLVVLLTCCCMHARVGKDGLIRHFFHRPSKAYTTGTRKRRKVHTDEQGGETRWHKTGKTRPVFTGGKLKGYKKILVLYTNYGKQRKPEKTNWVMHQYHLGSDEEEKDGELVVSKVFYQTQPRQCGGGSAATAKDLSVDLVAGNNIKASNAAAEHHHNDGVGGGGHGGNNSSMLKEAAGIVDFYNPAAALIGYSQAAPNNRAAASAHLTMPNFEVHTGGAGFGP

SEQ ID NO: 17495 - protein, 505 aa, Oryza sativa
  Clone ID: TF_OSC400431j.C1.p21.fg
MYTSPTLLALSFALLLLILLLYYSSSLLYSQLATRRRLTHACARSLPDAYESGMNRGHISSSELIDAKLEERRISTAKHCPSCGNKLDCKPDWVGLPAGVKFDPTDQELIEHLEAKVREEGSRSHPLIDEFIPTIEGEDGICYTHPEKLPGVTRDGLSKHFFHRPSKAYTTGTRKRRKIQTECDVQKGETRWHKTGKTRPVMVSGRQKGCKKILVLYTNFGKHRKPEKTNWVMHQYHLGDLEEEKEGELVVCKIFYQTQPRQCSWSSDRGGGAAATASAVTTAAVQQDQQRRRDSGSGSCSSTRDHEVSATSYSTAGYAVAAAVEMQHLKHAADHFSFAPFRKSFEEVGISGDQVHSNQLGRSEQQHAGQEQQPHRPLLATTTAVPATAFLISRPTNPVSNIVPPAMQHASVVLDHDQFHVPAILLHHDKFQQQQQQKLDRRSAGLEELIMGCTSSSTKGVVYTCTFRKLQFLTPKRQNGLTSHTGLLTTRIIMDSSNKAAFDMH

SEQ ID NO: 17496 - protein, 445 aa, Oryza sativa
  Clone ID: TF_OSC401826j.C1.p36.fg
MNRYDNNGHAAAAAAAAVAGGGGGGGGNKAAGEVDGHEDDLVMPGFRFHPTEEELIEFYLRRKVEGKRFNVELITFLDLYRYDPWELPGIEHLINKLDGGAAMAAIGEKEWFFYVPRDRKYRNGDRPNRVTASGYWKATGADRMIRAENNRPIGLKKTLVFYSGKAPKGVRSSWIMNEYRLPPADTDRYHKTEISLCRVYKRTGIDDGHGQVSTARSSAHSRGGGAAPVQDNKQGSSSTSTPTPPPTPSKLHLLSSECTSPPAIVTDHAAMVAHKAPSPRHHQQQQQLHAAKPCGGYLQNSSMASAAGGDQQQQFQQDFAAALYQQYSKNTSGAFASTYSLLNLVNAASMGSSAAAIDELSSLVGHGTPSYINPAAGSHNYSQFLHLPTTPSSHQPTPAPLGTTTAAAAATLPMSLAAFSDRIWDWNNPIPEAGGRDYSTSTGFK

SEQ ID NO: 17497 - protein, 365 aa, Oryza sativa
  Clone ID: TF_OSC1203j.C1.p9.fg
MAEEDDKKQKGPDVTVPSGYFFVPKPEQLIRDYLNHWITGRPIEELRDIVREADVYGSDPATLTEAHRAYGHDGKSWYFLTVAKWKGGRGGAGTAGRLNRCVEGGGTWHNSQRRRVIEGYGDRQAFEYRAPGNKKTNWLMEEIASNLPAAITDEGIMVICKVYLSPRAKEATADEEERQETNVVPGPKRLREAEATGYDAPAPETPQPDVGCSYSGGGETSQATASMDYCCSTTTHTADDTANAAAYYYGDVDAIKPDAYDGGDYGIGINADGELVLCGNGHGGIGTQGQMPLAMQNTNGEMTLFSPMNGYGVGFNEEVRQEPQVGGEVEMNDFFNDLFVDFDGAGDPNPNPNEGGDSHGHILCE

SEQ ID NO: 17498 - protein, 351 aa, Oryza sativa
  unsure (1)..(351): unsure at all Xaa locations
  Clone ID: TF_OSC401589j.C1.p15.np
FGCQHELSLSLSMVEARLPPGFRFHPRDDELVVDYLSRRRRRRRRRPTPTLIDVDLNKCVVDYLSRRRRRRRRRPTPTLIDVDLNKCEPWDLPEIACIGGKEWYFYNLKDRKYARGQRTNRATESGYWKATGKDREITRKGSLVGMRKTLVFYRGRAPKGERTDWVMHEFRQELDHANHHHHLKYMQEGWVLCRVFYKSRTEAVAAPTMESTLPRTSRSPLPPLVDSSISFNQEVLPCFSSSHHHGVDERVGCXSNPPSTSTRKGKETNTKGEVYGPQLGPCKVFAXASXAAQLLHLDSFSRAELFLLATAAGEGDRSDGNVGAGESGAYGEGPLCYLLADLVLGQRCWAC

SEQ ID NO: 17499 - protein, 364 aa, Oryza sativa
  Clone ID: TF_OSC401196j.C1.p76.fg
MDGSSMSSSSTQQQAQVPPGFRFHPTDEELVDYYLRKKVAARRIDLNVIKDVDLYKIEPWDLQERCRINGGSAAEEQNEWYFFSHKDKKYPTGTRTNRATAAGFWKATGRDKPIYATKQHSLLVGMRKTLVYYRGRAPNGHKSDWIMHEYRLETTETAPPQEEGWVVCRVFKKRLPTTRRDSDHDAPCGSWYVDEDAPGAFMSPMMITRSSILRPHQHHAGITLQEQHLHTTYKHRDLTTKIQQLQVPAAGHHLLNTMPHDLESSTSSFHSLLVSPDHHQINMHHAQADPFFDDMHAVDQATTTDWRVLDKFVASQLSNDATNKPADHYTDEGDILQVSDKQQEVAAADYASTSTSSSQIDPWK

SEQ ID NO: 17500 - protein, 240 aa, Oryza sativa
  Clone ID: TF_OSC2467j.C1.p1.fg
MHLPAVGMSHPTEGELVFHYLYRRAVNMPLPSEFICDVNVLPHNPWDIVPGSEKPVYYNQGGGSDCMLVGMRRTLTFYFGNSRTAERTKWGMQEFRLAGNGLSPYPAMKHATGDGSKPPCNCAETTIAKRNDGLSAVLRNVLAVTPLVETVVEPDGSWLICRIYRTRQRALPVITPPAIENAREIIIPPANGNAREAQVRFIDFLQQGSHIESSSPCSCIVGPSLAEGSDESAGSVDQKD

SEQ ID NO: 17501 - protein, 290 aa, Oryza sativa
  Clone ID: TF_OSC401137j.C1.p28.fg
MSPSRPDEADPAADFGSHPTDQELVTKYLRRHVDSGGNPWRYVHEADVYAADPDDLTGKYSPAVASDGSRAWYFFTTVRSKSTGGQRRARAVGDGGCWHSEAGAKDVVGGIRSPRPIGRRQFFSFVNKEGPRRVRSGWIMVEIGLKYAQQNASSDELVLCKVYRSPRAPPAAAAANKSMAAPPPTATKSKTEEATPPPDDVKPVVAAAQTPDTKILRAAKEAAATGCKRKADVKSSGARRGKRLCSRCRAETSESDSETAVLDRSPSIEDETADSSEIHGSSDGKFIRFL

SEQ ID NO: 17502 - protein, 300 aa, Oryza sativa
  Clone ID: TF_OSC33262j.C1.p5.np
EGSGGGGSAKKKEESLPPGFRFHPTDEELITYYLRQKIADGGFTARAIAEVDLNKCEPWDLPEKAKMGEKEWYFFSLRDRKYPTGVRTNRATNAGYWKTTGKDKEIFTAATPELVGMKKTLVFYKGRAPRGEKTNWVMHEYRLHSKSIPKSNKQDEWVVCRIFAKTAGVKKYPSNNAHSRSHHIHTRHGHLSSQLYCNKTHLVVDTTLTNPVDMAELSRFARGSRGCTHTSNHTPVTSTRLRPLSGLNLNLGSSPAMPPPPPPPPQSILQAMSMPMNQPRSTTNQVMVTEQMIPGLANGV

SEQ ID NO: 17503 - protein, 414 aa, Oryza sativa
  Clone ID: TF_OSC401927j.C1.p13.fg
MACAETYIENMEDRCIYFFSRRLFAAKARNKRQPMRVANGGTWKASGGSKTVRSKKVGGIDVGQKLTMVFYERRFEGDQNPVKTNWAMHEYTKIIPSSKNQCIYNKEGGHRAGERCRRGVEHGQALHAGGTATAYATATAIAEHGRIIVGNVATATAIARPGWVVVDDAAGTATAAAWPARVVGGDVALPGLAGEMTSMADQANMASTSQASAPSSELPQDWYDEYEVAYGAAAPPSPSTISCAALPSSPTAWWPSSIGGPVQHDGYLGMADPASCNTLEHLLPSAAIPPEPMAPPKNSPAAPPPADAGGNYDHPELADYGGGVQAQHEHHQPQELTDGADGDAQLELGAAEFDSERVAEMISQIMDGEFVFKFEDDTIVSFNEVAAAPMLIDGGGDGDGDGADGGVGDDPFDN

SEQ ID NO: 17504 - protein, 131 aa, Oryza sativa
  Clone ID: TF_OSC412891j.C1.p1.fg
MDDDEIALEPGYAFRPSDDGLITLFLRPKIAKIPFEHRLINHADVYSADPTELVGEHRPAPGTHGSGSVWYFFCSPRYTSKRKASGRRQRAVGGESVWKSEGGKKAVIGADGRRVGYLQKFSYHYTGQGHL

SEQ ID NO: 17505 - protein, 325 aa, Oryza sativa
  Clone ID: TF_OSC14633j.C1.p4.gm
MAGADGLLPGLRFDPSDDELVSRYLLRRIQQKPLPLDGVIVDADPLSVPPWTLLADHTRGDEAFFFAEARAKNGKGKRQKRTVEGGGFWQGQRMAVDGERLVVPGDDGGGGGDEGLEITWRKYVLSFFAEGERGSSGWVMHEYAVTSPADLASSQLRLYRVRFSGHGKKRKREPQCLDSHDDDDGGDQESATHRRAVAETTLFDGYVPRPAADGTDQGTYGVIDGESSLASHCLPDQIVPPAEEADATAGVENPLLDEERWSPPQPALVKQNSYDLMAISSLLFSDLPDRIDDDDLSVSQTEGTDLFEQGSSGVIDDDYCRVFHG

SEQ ID NO: 17506 - protein, 321 aa, Oryza sativa
  Clone ID: TF_OSC14633j.C1.p5.gm
MAGADGLLPGLRFDPSDDELVSRYLLRRIQQKPLPLDGVIVDADPLSVPPWTLLADHTRGDEAFFFAEARAKNGKGKRQKRTVEGGGFWQGQRMAVDGERLVVPGDDGGGGGDEGLEITWRKYVLSFFAEGERGSSGWVMHEYAVTSPADLASSQLRLYRVRFSGHGKKRKREPQCLDSHDDDDGGDQESATHRRAVAETTLFDGYVPRPAADGTDQGTYGVIDGESSLASHCLPDQIVPPAEEADATAGVENPLLDEERWSPPQPALVKQNSYDLMAISSLLFSDLPDRIDDDDLSVSQTEGTDLFEQGSSGVIDDDYCR

SEQ ID NO: 17507 - protein, 340 aa, Oryza sativa
  Clone ID: TF_OSC407201j.C1.p2.fg
MGDALWEMLGEEMAAAAAAAGEHGLPPGFRFHPTDEELVTFYLAAKVFNGACCGGVDIAEVDLNRCEPWELPEAARMGEKEWYFFSLRDRKYPTGLRTNRATGAGYWKATGKDREVVAAAAAGGALIGMKKTLVFYKGRAPRGEKTKWVLHEYRLDGDFAAARRSTKEEWVICRIFHKVGDQYSKLMMMKSPASYYLPVSHHHPSSIFHDLPPVPFPNPSLVPFHHDLPTSFHPPLLQHSHANSKNSSSNNGGFVFPNEPNTTNSSDNHISCNGAMAAAAAAAFPSFSCASTVTGKGGPPAQLGVNAGQQEPPPPTWMDAYLQHSGFIYEMGPPAVPRGA

SEQ ID NO: 17508 - protein, 320 aa, Oryza sativa
  Clone ID: TF_OSC401860j.C1.p15.fg
MGEQQQQVERQPDLPPGFRFHPTDEEIITFYLAPKVVDSRGFCVAAIGEVDLNKCEPWDLPGKAKMNGEKEWYFYCQKDRKYPTGMRTNRATEAGYWKATGKDKEIFRDHHMLIGMKKTLVFYKGRAPKGDKTNWVMHEYRLADASPPPPPSSAEPPRQDDWAVCRIFHKSSGIKKPVPVAPHQVPAAANYQQQQQMAMASAGIIQVPMQMQMPSMSDQLQMLDDFSTTASLSLMAPPSYSTLPAGFPLQINSGAHPQQFVGNPSMYYHQQQQMDMAGGGFVVSEPSSLVVSPQDAADQNNNAADISSMACNMDAAIWKY

SEQ ID NO: 17509 - protein, 376 aa, Oryza sativa
  Clone ID: TF_OSC400524j.C1.p1.fg
MEVEARIHLLLIKLVFYRSAEERESASVHINLLPVRELYFDPRKKMDAFSHVPPGFRFHPTDEELVDYYLRKKVALKKIDLDVIKDIDLYKIEPWDLQEQCKIGNEEQNEWYFFSHKDKKYPTGTRTNRATTAGFWKATGRDKPIYVKNCLVGMRKTLVFYRGRAPNGQKSDWIMHEYRLETNEYGAPQEEGWVVCRVFKKRVAAVQRAAGDGGDSPFWFNEHVAFMAPAPGLDSPYHGHRQSHPCKLEVEYHHHLLPQEAAPFMHLPRLESPKLPAADIIVATAASSALQPCGHTTAQQLQLQIEPVYVTADASAADWRDLDKLVASQFGHGDSTAKEPSYCNPVQVFQVEGKQEDSLDYVSTSASCGGEEDLWK

SEQ ID NO: 17510 - protein, 370 aa, Oryza sativa
  Clone ID: TF_OSC401780j.C1.p17.fg
MDTFSHVPPGFRFHPTDEELVDYYLRKKVASKKIDLDVIKDVDLYKIEPWDLQEKCKIGMEEQNDWYFFSHKDKKYPTGTRTNRATGAGFWKATGRDKPIYARSCLVGMRKTLVFYKGRAPNGQKSDWIMHEYRLETNENGTTPEEGWVVCRVFKKRVATVRRMADGSPCWFDDHGAVGAFMPDLSSPRQLLPHHHHHHPGSSAALYHGHHHQQLQQMYGHCKPELEYHHLLPQEAFLQHLPQLESPKPPPPPPAAAAYIGGHLGSSSSTALTTHDDEASGSAAQQQPPSLEAVYMAGAGVGIGVDASVTDWRLLDKFVASQLLSKESMSSYGSHPAQVFQAADGGKHEEALDYASTSAGSGGGEADLWK

SEQ ID NO: 17511 - protein, 225 aa, Oryza sativa
  unsure (1)..(225): unsure at all Xaa locations
  Clone ID: TF_OSC900198j.C1.p15.np
LKLIAGAASASASASPCGDQIIIRMSSRHRGAVAVEEDGQAHDMVMPGFRFHPTEEELIEFYLRRKVEGKRFNIELIAFVDLYRYDPWDLPALASIGDKEWFFYVPRDRKYRNGDRPNRVTPSGYWKATGADRMVKVEGDRPIGLKKTLVFYVGKAPKGLRSSWIMNEYRLPHGDADRYQKVEISLCRVYKRPGIEDNCSAIESRSTRHLAICRLITSSALLXLP

SEQ ID NO: 17512 - protein, 571 aa, Oryza sativa
  Clone ID: TF_OSC414191j.C1.p15.fg
MDVDPPPPLPPPPPPPPPPATPQQNKAVELPPGVYFNPTREEAMHHYLNRWIAGKTIPEMEAGFVAGADVYGDGPDALRRRHRPGYWCNCVYKWFFLCHRKRQSSRRTTGNKRAERVVAAGGRWKVEQGKKVLGGGGGGGERDSLGFYSSNSTKKTSWIMEEYTSSAADGAAAARGEEDRMEPVLCKIYLSPRAPAGEKRALFGEDGVAVGPDGRKRNARVTVLATLFDDVAALLGQPVAAPPLPAPGEQLGHGHGHFDDVAARFGQVAVAALPASGDLGHGDFDDDAAALLGQVAMAPAPAPGHHQQGYVVAEAPLPESGYLGHYHHDGHLAQAAAAPEQDHYLGYHSHDAHVVDAEATPEQGYHDDAHVAVAPAPEQGDLGHDQGHLAAALTPEECGEIVGAYEFHPEMVQMLSIGFAAPDEQLLPQLLDPTGGGYDMASSAIAAVGDVNAYAAAAPTPRIRPNAAEAMAATATAETMPPPLDAVAAELSAPPRGLPPELAFSALPSVQQEPSCDDGDNFGELVAEAMPPLIGENAGVDAGSDEPLPDLAGIMTELDFGHDFFSNQHRE

SEQ ID NO: 17513 - protein, 503 aa, Oryza sativa
  Clone ID: TF_OSC5990j.C1.p1.gm
MTWCNSFNDVRAVENNLATAAAVAAAKKQQQQQQVSQHVNLIKTCPSCGHRAQYEQAAAAATIQDLPGLPAGVKFDPTDQELLEHLEGKARPDARKLHPLIDEFIPTIEGENGICYTHPERLPGTRQDIGTGVGKDGLIRHFFHRPSKAYTTGTRKRRKVHTDEQGGETRWHKTGKTRPVFTGGKLKGYKKILVLYTNYGKQRKPEKTNWVMHQYHLGSDEEEKDGELVVSKVFYQTQPRQCGGGSAATAKDLSVDLVAGNNIKASNAAAEHHHNDGVGGGGHGGNNSSMLKEAAGIVDFYNPAAALIGYSQAAPNNRAAASAHLTMPNFEAQDVQRWLALLEIWSLILEILALRAELAPTWRLRGCHAGRREVDDDPAANGRRVAAASSGANHGDTGKSEHTGRLHVTRGDEPTARIRRRLLDGGGLRRRQPAAGEEGNGDEVTRGRFPAVRASTRRRELDASVGLGGTTPSEAGDERVLRSSGGDGGEHTASDGNSRGGAG

SEQ ID NO: 17514 - protein, 292 aa, Oryza sativa
  Clone ID: TF_OSC400621j.C1.p20.fg
MAGGGGGDRAPSSSSTAMISRLLPPGFRFRPTDGELVAHYLARKAADAGFTSAAIRDADLYRAEPWDLLPPPRCDAAAEEEEEEEERCGYFFCTRSFRWPSGTRTNRATATGYWKSTGKDKAVLHGGGGGGGRPVGVKKTLVFYRGRAPRGEKTSWVMHEYRLLHGGAAATASSSPTPTTVVARSEWVICRVFVRKTPDGNNDRGTTEHHLPSDDAHLRSSPAPANSVDGAGHASCSFFSGANESMAPSDHFNIGDDMILHGHDEEELLMMNCSSAFDLPELLDYESFSLDL

SEQ ID NO: 17515 - protein, 425 aa, Oryza sativa
  Clone ID: TF_OSC12503j.C1.p3.fg
MESPDSSSGSAPPRVLRRQQQQPGSAPELPPGFRFHPTDEELVVHYLKKKAASVPLPVTIIAEVDLYKFDPWDLPEKANFGEQEWYFFSPRDRKYPNGARPNRAATSGYWKATGTDKPIMSSGSTREKVGVKKALVFYRGKPPKGVKTNWIMHEYRLTDTSSSAAAVATTRRPPPPITGGSKGAVSLRLDDWVLCRIYKKTNKAGAGQRSMECEDSVEDAVAAYAPSSQQHATAAAGMAGSDGAGGVAAAHGGDYSSLLHHDSHEDTFLVNGLLTAEDAAGLSTGASSLSQLAAAARAAATPCDATKQLLAPSPTPFNWFEAFLPRAKEFPSGLSRSSRDIGDMSLSSTVDRSLSEAGAVAIDTGDAANGANTMPAFINPLGVQGATYQQHQAIMGASLPSESAAAAAACNFQHPFQLSRVNWDS

SEQ ID NO: 17516 - protein, 366 aa, Oryza sativa
  Clone ID: TF_OSC400780j.C1.p51.fg
MESCVPPGFRFHPTDEELVGYYLRKKVASQKIDLDVIRDIDLYRIEPWDLQEHCGIGYDEQSEWYFFSYKDRKYPTGTRTNRATMAGFWKATGRDKAVHDKSRLIGMRKTLVFYKGRAPNGQKTDWIMHEYRLETDENAPPQEEGWVVCRAFKKRTAYPARSMVETWDYSLHERNIMSAAAAAAFADPSAAYAQMRRQHRSGRFKQEAELDGAATALLHYSSHLAELPQLESPSAAAAPLQPNPSQLATAGEDDDCKGDNGGRRAKKARAAGDKVATTTDWRALDKFVASQLSPGECGSMEATAEAAAAAVAGVSSPLDHGDDDMAALLFLNSDERDEVDRWTGLLGSGAGASGVDGDLGICVFDK

SEQ ID NO: 17517 - protein, 664 aa, Oryza sativa
  Clone ID: TF_OSC32412j.C1.p3.fg
MASAAGDGLPPGLKFEPKDDELVARFLLARIQGKPLPLHGVILDADPLCAPPWRLLADHGRGDEAFFFADARAKNGKGSRQKRTVEGGGYWQGQRMCVDGERLVVPDGGLEIAWRKYVLSYFADGEKGSSGWVMHEYAITTPADLASSTMRLYRIRFSGHGKKRKREPESQSAHHDDGRARCAPQIAMPETALLEDSAPPPQPVLPPAAVVNSVSDGAVPPPAPVVNCDSDVTDEDELQSFVPEFSARNLFVSLPQGSHEAEADVVGGALPAQSMSSFADVGGPENMDDQSCSGVVFANLSDLIVLPPVEASGAAPAPSWASSLDNQNDEAPVFFEFPESMDDIIGCFDFATMDDPSCTSAISEEPFLPPAAMVNHDDGYASDNADQGCSGAVPLPSAVVDLPNETDGADQSCSGVVDDSSMVFANIHPLDSPAEGGHEAEAGAGGGRAAPAPSWVSSLDNQNDEAPMFFELPESLDDMVSCFDFAAMDGQSCTSAVSETALIEELVLPPAAMVNHHDDSVSDIADHGCSGAAPPPSAVVDLPDDSDGADQSCSGMVDDSLPGYYEAELKVPLEYAARNPVDSPSKGGHDHEAEVDASGGAGSMMSSPDKEKEHSSSGVMDVEATGFGVPDSMDGLSCIDFAETMDDLSCIDFTIDDELFDLWS

SEQ ID NO: 17518 - protein, 303 aa, Oryza sativa
  Clone ID: TF_OSC400909j.C1.p25.fg
MSGGQDLQLPPGFRFHPTDEELVMHYLCRRCAGLPIAVPIIAEIDLYKFDPWQLPRMALYGEKEWYFFSPRDRKYPNGSRPNRAAGSGYWKATGADKPVGSPKPVAIKKALVFYAGKAPKGEKTNWIMHEYRLADVDRSARKKNSLRLDDWVLCRIYNKKGGLEKPPAAAVAAAGMVSSGGGVQRKPMVGVNAAVSSPPEQKPVVAGPAFPDLAAYYDRPSDSMPRLHADSSCSEQVLSPEFACEVQSQPKISEWERTFATVGPINPAASILDPAGSGGLGGLGGGGSDPLLQDILMYWGKPF

SEQ ID NO: 17519 - protein, 314 aa, Oryza sativa
  Clone ID: TF_OSC401024j.C1.p4.fg
MTWCNSFSDVRTAVDSSLSPAAAVAAAAGKKAAASLAVLVKMCPSCGHRARYEQETTTIQDLPGLPAGVKFDPTDQELLEHLEGKARPDSRKLHPLVDEFIPTIEGENGICYTHPERLPGVSKDGLVRHFFHRPSKAYTTGTRKRRKVHSDEVDGGETRWHKTGKTRPVMANGRPRGYKKILVLYTNYGKQRKPEKTNWVMHQYHLGSDEEERDGELVVSKVFFQTQPRQCGSTAAAAAAKEASAAVAAAVVNSNYSIVHGHQGGGGGSFLKEANVVHEFYDPAATMGYRPPAPAAHFAPNFAVHAARNSFGGP

SEQ ID NO: 17520 - protein, 382 aa, Oryza sativa
  Clone ID: TF_OSC413292j.C1.p1.gm
MAMGGSSPAAGGGLGGRRGGGGAVEAAGLGAGGGPLARPGGGTVGRQRRRWRCRRRAVLRGALERCAAAGRKKEKCDVRTAVDSSLSPAAAVAAAAGKKAAASLAVLVKMCPSCGHRARYEQETTTIQDLPGLPAGVKFDPTDQELLEHLEGKARPDSRKLHPLVDEFIPTIEGENGICYTHPERLPGVSKDGLVRHFFHRPSKAYTTGTRKRRKVHSDEVDGGETRWHKTGKTRPVMANGRPRGYKKILVLYTNYGKQRKPEKTNWVMHQYHLGSDEEERDGELVVSKVFFQTQPRQCGSTAAAAAAKEASAAVAAAVVNSNYSIVHGHQGGGGGSFLKEANVVHEFYDPAATMGYRPPAPAAHFAPNFAVHAARNSFGGP

SEQ ID NO: 17521 - protein, 172 aa, Oryza sativa
  Clone ID: TF_OSC401927j.C1.p10.fg
MGSGRGRRRWCPSTARTGTACLSAATSSPRTLELFAILRCKLVCGQLPGALNNVFEHIRILEFHPALLHETYIGKEEDGYIYFFNRWQFATKAGNKRRPTQVAKGGTWKASSGSKTVRSKKVGGIDIGQKLTMMFYERRFEGDRNPIKTNWGMHEFTKIIDDSKNQKPGSPC

SEQ ID NO: 17522 - protein, 567 aa, Oryza sativa
  Clone ID: TF_OSC900009j.C1.p21.fg
MAAADGLLPGLKFDPSDHDLVGRYLLRRLQGQPLPLDGVILEADPLSAPPWKLLADHGRGDEAFFFAEAHAKNGKGKRQKRTVEGGGFWQGQNTCVDGERLCVPDDGDGSGGGGGGLEIAWRKYVLSFFANGERGSSGWVMHEYAVTAPDGLASSQLRLYRVRFSGYGKKRKREPQCPGAHGDDDGELQCAPPPRSMAETALLEERGPLPHPVLGPASVVDQCTDQGSSGVIDDSSLVFRDLPDLIDLPVAEEADASHGAETALLNEHLPLPPPQLFVPPTAVPLDLADDSNGADQNSYGMMGDDQLLLPDLPGTINDDMPDLFVSQAEEASAVPAISYHSSGFMGNEVAALSDFELPESYSSSDAMDGEALALSNYEFPESFEEDLSCIDFATANASSLGFPMDGYPMDELFDDMPDQGSSGAMDDSSVVFRDLPGLINLPAAEEADAIGDAETALLRDLADDSNGTDRNSYGVMGDDQDRLLLPEIPRRIDMPDLFVSQAEEAGLGGGAALDSSSGAMDGEALALSDFEFPESVEEVLSCMDFSTVDMSFLDVPIDELLDDLPAD

SEQ ID NO: 17523 - protein, 401 aa, Oryza sativa
  Clone ID: TF_OSC401001j.C1.p48.fg
MAESSESAWPQQSQQLQISSTMPAGSAWPEEENLENLEQPLPLLMPSSEDHREQQLVPVPWLQQDQDQEWHEQEQFLPLKNQNQEQLQDQQPLQDQEETRRYLGVPGIRFVPSDIELILDFLRPKLRGEQLPSYSYMHVCDVYSDHPKELTSKLGPSREGNWYMFSPRNRKYNKGKRPSRSTGQLGFWKSTTKNEAVLDALSDNMLIGYKACLTYHEYDESMPTPKLKKENAIKTPWKMWEFVCSNSNRPFDAEEEPMRLNDWVLCKVTNKDNKVTTKKFKPQRSKKPKKPKKLQQEEQPQNQGIVIRQPSESGSASSSHQEIPGSSLPGAGGDAAAAAATAAAVVDPMPLHMIPPSSWNYFSTGVTADGIVMDDSTGVDSYGCVDGAGALNFQRNIFYHR

SEQ ID NO: 17524 - protein, 489 aa, Oryza sativa
  Clone ID: TF_OSC418099j.C1.p5.gm
MEEEKRLERIIKEIDSPISPGGGAALLAEDDDLVFPGFRFHPTDQELVGFYLTRKVEKKPFSIDIIKEIDIYKHDPWDLPKVSHGAVALQGSSSSSSLSTAAAAEKECGYFFCLRGRKYRNSIRPNRVTGSGFWKATGIDKPIYSSSLAAAAAAAGAGDCIGLKKSLVYYRGSAGKGTKTDWMMHEFRLPSSISDSDHLQDASETWTICRIFKRSMTYTKGRAAAAAASMNKRISHELQHIHHHQQQQFYYHEVVHDGHGHHHRRHLQHYAGSASMAAAAANIVDVIDHSSDAETTTRSHSHSQSHLVADIRHRQSPFMLDFHAGTASSSSSTAAGWSEVMSFSRDGGSSSGSSWDELGRIMDISTNSANNNYYFAPPPSPAGAARLLLERASPLPPPPAGAARLLLARTRRSRLTLPAAACFPARAAPRRDGEEREAGGEGAIGGGLEVAAHGPSASARLAGQEASANRGAGEEQAAGAVVGEGADWR

SEQ ID NO: 17525 - protein, 359 aa, Oryza sativa
  Clone ID: TF_OSC410931j.C1.p1.fg
MEHDVHHHRQMMQQQQQQEMDLPPGFRFHPTDEELITHYLLRKAADPAGFAARAVGEADLNKCEPWDLPSRATMGEKEWYFFCVKDRKYPTGLRTNRATESGYWKATGKDREIFRGKALVGMKKTLVFYTGRAPRGGKTGWVMHEYRIHGKHAAANSKQDQEWVLCRVFKKSLELAPAAAAAVGRRGAGAGTDVGPSSMPMADDVVGLAPCALPPLMDVSGGGGGAGTTSLSATAGAAAAPPPAHVTCFSNALEGQFLDTPYLLPAADPADHLAMSSASPFLEALQMQYVQDAAAAGGAGMVHELLMGGGWYCNKGERERLSGASQDTGLTSSEVNPGEISSSSRQQRMDHHDASLWAY

SEQ ID NO: 17526 - protein, 753 aa, Oryza sativa
  Clone ID: TF_OSC401138j.C1.p3.fg
MTVMELKKLPLGFRFHPTDEELVRHYLKGKITGQIRSEADVIPEIDVCKCEPWDLPDKSLIRSDDPEWFFFAPKDRKYPNGSRSNRATEAGYWKATGKDRVIRSKGDKKKQQVIGMKKTLVFHRGRAPKGERTGWIMHEYRTTEPEFESGEQGGYVLYRLFRKQEEKIERPSPDEVDRSGYSPTPSRSTPDNMEPIEDGNTPLNRESPESALHESPIDLPALTEAQAAPITRWLADRTDNATTNEVNISHMPHHGLDGGAKASPSAGAFPQLIGSQQNIHDNNELATVSAPMLPHEDFNNFPLGAIGNFDGNMNPRDPVEEFLNQTIADPDEHSSTTSKAQYDSDTGIIPTEFENHGVMQGEFMDDLSGLENLDFWPDDRNPQLSALYEDTPLLPYDSTDQDVLSMDSGAESLQDLFNSMDDSNARNNVWGNEPFLQGTGFPMSWPLQPNSAFPNQGTANRRLMLQLSESLSPDFDVSMTRDECEDEEPGIVVTSKYVNEAPEESTAEKDMPSDGDDAEPTGITILRRRHAPTASSFSDGDDAESTGITILRQHQAPNASLLSDGDDAESTGITILRRRQAPTASSASSFTQQGAAVQRVRLQSNLDAAPCSSVDGSSSCIINEGESERTMEKPEIEENAGSTLAEGGTCHEDDQKEHDASAANAKSVLRLRKTAEGSDKENKQEEEEGVLASHMLVATYPSCSAVDTLKERVERKLKKASCKREDGHLLPSGLWAKADFDLLENDFKGWFGL

SEQ ID NO: 17527 - protein, 543 aa, Oryza sativa
  Clone ID: TF_OSC400138j.C1.p85.fg
MAAPEDGEDKNFGKNKHGLPIGFYFAPTDQELLAILEAKRLGRPLSRAHDAFFHDIRILDFHPAELYEKYAKDEEKGYFYFFSKREFPTSSKKRPLRVAEGGAWNSSGAVYKVVKSSKSGGGYDVGHKKTLVFHQRFPGDKEAVKTNWAIQEFTRIIGPQNEVPDLAVYRLYKMRKEGRETPADLAADEAAAAAAMNNRGQQASAAAMALPPPATGLPGGRMMSMADKANMASTSKAYGPSKSSSSQLQQDAAAAAAPPNAAGASNWAPRPCNCRECAPAAGHYGYFAAAAAMNNRGGQASAAAKALPLPAPGLPGVRRMSMADKANMASTSKAYATSQSSSSQLQQGAAAVAAPPNAAGPSNWAPRPCNCRECAPAAGQYGYFASMVPRPSLDRKGKGKAPMDCAEQAGGGGGCHAESTSTPAPPKGAEYYGCSVAVEDDDEELLKFLQAMVRGEEVEGDGDHAMADERGPQQGSSPVAAAAASGSAPAGHDGRRGSLQGGHHGSSSPTSLAAAAATGDDVTSAASAGDDVSGSQQEDHPAR

SEQ ID NO: 17528 - protein, 343 aa, Oryza sativa
  Clone ID: TF_OSC418457j.C1.p11.fg
MKRGCEDELGAGDVILRGVEEVEEEDDDDLVLPGFRFHPTDEELVTFYLRRKIAEKRLSIEIIKEMDIYKHDPSDFLKTSTVGSEKEWYFFCLRGRKYRNSIRPNRVTGSGFWKATGIDRPICSAAGGGGGDCIGLKKSLVYYRGSAGKGTKTDWMMHEFRLPPPPADDLAAGRSSPPPSLQEAEVWTICRIFQRNITHKKQPQPQLAVAAAAVPAPVPDATSSITGSLESDSAGDDVVEYMNTLQPPPASNVNGGYSNQRYFQEQWNSSSNDNTTVFHQHAAAAPPPEPSPATAMAGFGHDQSVLSSPAPSDFYYKDGCNDDIYRMVMELADPSLFYDHIYA

SEQ ID NO: 17529 - protein, 195 aa, Oryza sativa
  Clone ID: TF_OSC401435j.C1.p9.fg
MEGVDRIGWNLGLGFLRKERPPVHGDSGGSGGSNSNDGKWKGKEKVVPEYGKNRHGMPVGFYFVPKDLELLAILMCKLVRGKVPGALNNVFKHIRILNSTPPSSMTYIETMEDGYIYFFSKRQFATKARNKRRPMRVADGGTWKASGGSKKVGGIDVSQKFTMVFYERRFEGDRNPVKTNWGMHEFTKIIPGTKN

SEQ ID NO: 17530 - protein, 656 aa, Oryza sativa
  Clone ID: TF_OSC900369j.C1.p22.fg
MSHPSSSSSSAPPAAAEATSLAPGFRFHPTDEELVSYYLKRKVHGRPLKVDAIAEVDLYKVEPWDLPARSRLRSRDSQWYFFSRLDRKHANRARTNRATAGGYWKTTGKDREVRNGPTTVGMKKTLVFHAGRAPKGERTNWVMHEYRLDGQTTIPPQDSFVVCRIFQKAGPGPQNGAQYGAPFVEEEWEEDDEDVGLLPVEEKDNSDDQEKEISGAMEKGYLQMSDLVQNLVDQNENGTIALPVSDNSNNSNHSEDVDGNSGDILSDQNLGSNFLHHVEPVEQNGLVLNENMFSSANAGDLFNISSPNDGFLELKDFADIADLENPLANESTIWPSDGWPWKSTDSMEAVNGASNEFSPLAGEQIFQPEELEQLLQSLQEDSHMGSTISDPPHSSITNLAKPEEDCLMFYDAPFDSSMCDDGFRQLNGFLGSPSTNLSGIDMVDDGMPYYDAMDDNLFNDLLSSVQPSAGSSSHAFSGPVLTQEVNNSTYTYSPTQKVLEPNFVVGAPSSARLPEAGSQLNYVVLPDSQTKSSLIGKRFVKILDSISAPPAFAAAEFPASLRKSLAPISGAHHNTIRVSAEVISIGSLTPDSQDKWSLEKDEGMELLFSAGFEPDTRVHFGCNTITAVLRGGFCLFFFSAIMLLVSYEVGMCIYGK

SEQ ID NO: 17531 - protein, 164 aa, Oryza sativa
  Clone ID: TF_OSC414158j.C1.p9.fg
MESCVPPGFRFHPTDEELVGYYLRKKVASQKIDLDVIRDVDLYRIEPWDLQEHCRIGYEEQSEWYFFSYKDRKYPTGTRTNRATMTGFWKATGRDKAVRERSRLIGMRKTLVFYKGRAPNGHKTDWIVHEYRLESDENAPPQARSPFISLSINKIDLQFLEKIN

SEQ ID NO: 17532 - protein, 886 aa, Oryza sativa
  Clone ID: TF_OSC400167j.C1.p22.fg
MAKDKEVGPPPPPCVDSDHEDLPLAERRRRLLRPPAESKPPAPERREASAAAAAAEDSGGAAQQGWPGLPRGVEFNPTDSDLLWHLAAEVGNGQARRHPFINEFIKSVDETIGFGYTHPQDIPGIRQDGCASYFFHKNFKECANENSKCIRWQKSGNPISITLDGNLQGCKEVFVLYAYETDGNNPQITDWRLHQYHIESTEKDEGELVVSKIFYELEKNQFKWAEKSHAQSAQGASAIDDDSKEELQLDNHSFNMITENSSVQGNENKQKQTQTGTCPNLDKLSYFNVVSNMHIGNQINDHDEIEELDHMSLQERYRILMAENHSSSAVVSSEQCAIDGLENSCKPGTNGMIPKRIHEGTAFRDGMYSMLQEISSAPAIIGSIDNDNNRRLLTEGLSNNQQSHEAGCESGFLSTSSSAAPPQCQVVCSHDLLVNGKTLIYSRDPSSSSTPTFGDKNIQLEGTDDRTLLVDIKLEPALEGDFTEKITSSVQRTDPNHGTEGSNLVGSINSVSSAISKRISEAARSNPENSHVEGLLPSSRIKSEVTGSELPLVVCGLTSISIAELTAKKTNTLNHDGVLAYCSRKRKRRKTLRDPSEKTLEEDSLRNDEGTAYFSRQRRRRKTATDSIETALEEDAPGLLQILLDKGILVKEIKLYGVEEEDDMVPDCTESDFQDLENVITKLFPQRTSLLKSALRHEKGEKAIYCLTCLISLIEQSRYLQFRDCPVEWGWCRDLQSFIFIFKSHNRIVLERPEYGYATYFFEIVKSLPIQWQIQRMVTAMKLSGCGRTALIENRPLLIGEDLTEGEARVLEEYGWVPNSGLGTMLNYRDRVVHDRWNERSGTDWKTKIGKLLMNGYSEGHLVLSHFPTKVGKIEDDTEIKQEDPL

SEQ ID NO: 17533 - protein, 426 aa, Oryza sativa
  Clone ID: TF_OSC417910j.C1.p16.fg
MNPTIENGGSGGDGSAAAAAAEGSAIWKSELVPQLQLPPGYHFVPTDEELVDFYLRGKIEGRDPPRHFISEENIMRYDPQKLIEKYKGYGEDRWYFFMVREPSKTKKKDEPNRKVVVDGVEEGSWSATGSVVQIHSTKETNRKAIIGSKRVLTYKSARSAENDMWSMHEYVLAGKSQMGQYVLCAIQLKQTYEREEKAREEQKNDNKRNKKAARRKNMQQQPTACQAQDEQQETAPTPGEETIVDPDQFMDIAHSMHMMFGGVDQDAPPFMPSLIAPCNNDDGMLQLQPLQLQNPNPAMLYSNQLEPSYIGDQSMFTPCCCDRNCISCRQLQFYQQQQAEDGSVAFEKADLYNNMIGLWEILVYTLTMFGWMVTWQIMLSVRFTMIKIMVVLFRATYWLRSWAQLLKCDEEIKSVKAACRNLESMV

SEQ ID NO: 17534 - protein, 417 aa, Oryza sativa
  Clone ID: TF_OSC400477j.C1.p49.fg
MEKGKLDFLLELGFRFNPSPEQVVTYYLPCLVAGQQPKDTEGCIHSADVYGADEPRDLAGKYAPVARSSNGDRFFFTGCKRMKGKFSRSAGGGTWVSQSSKDLKNREGIKIGEVKNFRFKKDGKNTDWLMEEYHLCGQESGDVVEPVVCRIYVSPRAAPDSVAHQESAVLQPQEPAPLPVPAAPAPPRQVPVVTQQAPPPPPPLVPVITQDAPPLKRPAPVAAPPCAKKMRGDVSAFPVVRQSCVAAPRCAPRVVAPPPRHPPIQTYPTDPFESAPLDPFEPPPAAASVTGGHHTPQPSVPVPATPEQGFSLAASNSPELDPANIGIDMDELMRYLGNTPLDGVLPSQLFVLPTNDDEDVELAKVLEDGLQGGGGRQWQSTAVCDSSSSATGILARHGATAASSTHPDLSQGSVRAQ

SEQ ID NO: 17535 - protein, 567 aa, Oryza sativa
  Clone ID: TF_OSC401688j.C1.p13.fg
MDGVVAEDQAGGSGSGHRRLIGSRIEEHRKYMSEESCCPRCGHKIDRKLDWVGLPAGVKFDPTDQELIEHLEAKVRPGGEAAAHPLIDEFIPTIEGEDGICYTHPEKLPGVSKDGLSRHFFHRPSKAYTTGTRKRRKIQPPAAAASSGGGGGNASSSSSASAAAAVARHGHQQQQQQQRSETRWHKTGKTRAVVGGGRQRGCKKILVLYTNFGKHRKPEKTNWVMHQYHLGEAEEERDGELVVSKIFYQTQPRQCAAADAAATASASAVDRRTTSLRDRAAAAAAAAAAAAPMASANVSVAAFHGGAAGIDEFSFAQFRSSFEEAGMGASSSDHQSAMVDQRRRQQQHDDDEHDHRRGGGGHHYVGQQQSVAATFHVVSSPADPIARLMSPPPAHQGTVMLRQPEPPYIYHHQEDERPHQPRKFDGRSTSGSGLEEVIMGCTSRRSKGGETSGGKDGTEWQYPSFWPSDSQDHHGDKDDIEAKQKGETEKEKGEEKQSFSRYTFAKKYSMNKETLKISSILHSGILSESKLPENFPVCVVEGEYDEHGNAWMNLILPFSDSSKLRLM

SEQ ID NO: 17536 - protein, 267 aa, Oryza sativa
  Clone ID: TF_OSC900391j.C1.p8.fg
MASTSRKRSARSLQEDEQTSSAAEAPAAVREDEERVAVAGMEAWRFGFSRFSWFPAFKFDPTDADIVASYLLPRALYGRGHAAVIQDDVSRCEPWTLMREHGHATSAHAFFVHDHESVGGGGGGGRRKVQRAVKNGGGVWRIQKGEVAILTIVRGGGGGGGELDVVYKRRNLSFHRRGESSSSGWVMHEYEITSPPLPATVLSRIRATPRAKDKKLCIKEEPSCSTSAAGERSGPNPDHTAAGAGDSATANHNNTTSAATTTMAAAV

SEQ ID NO: 17537 - protein, 316 aa, Oryza sativa
  Clone ID: TF_OSC416913j.C1.p16.fg
MAAAVAVAGPSMEVEQDLPGFRFHPTEEELLDFYLSRVVLGKKLHFNIIGTLNIYRHDPWDLPGMAKIGEREWYFFVPRDRKAGNGGRPNRTTERGFWKATGSDRAIRSSGDPKRVIGLKKTLVFYQGRAPRGTKTDWVMNEYRLPDYGAARAAAPPPKEDMVLCKIYRKATPLKELEQRASAMEEMQRGSSHGDYTATRASLVHDASASTGDDYFSSDDVHDSGFLIQSSSSSAAPSGSSSKNGGAGAPREAKKEEADVTVTVASATSLQLPAVSQLPSLQLPAMDWLQDPFLTQLRSPWQDQHCLSPYAHLLYY

SEQ ID NO: 17538 - protein, 404 aa, Oryza sativa
  Clone ID: TF_OSC400477j.C1.p36.fg
MASLDLLLKLGFRFNPSQEEVITYYLPRLIAGHPPKDTEGYIHRADVYGADEPRDLAGKYAPVARSPNGDRFFFTGCKRVKGKFSRSAGGGTWVSQSSKDLKNREGIKIGEVKNFRFKKGGNNTDWLMEEYHLCGKEAGGVVEPVVCRIYVSPRAAPDSVAHQESAALPPPQELVPPPQELAPPPYPAAQAAPQAPAPPRQVPVITQQQAPPQKRPAAPVAEPPCATKKMKGAVSAKPMAPQSSVTASAAPPRCAVAPSQHHPPFQTYPTDPFEPPAPAASVTQPSVPATPEQGPAYVPDPADIGMEMDELMSFLDSIPVDGILPSQLYEYDELAKELEDALQGGGEEDGNDNPPRRRGRGGCDKQSQGGYRVLLKDMGDDQIDQQWLKVSLKDYHHLMKSCKL

SEQ ID NO: 17539 - protein, 518 aa, Oryza sativa
  Clone ID: TF_OSC404859j.C1.p32.gm
MAAAKMAGLTPGFKFEPSDEQLVQFFLLPYLRELPVPLGGLVIRDDPRSVPPWKLFARNGRGDEEDAYFLAPADGEGRQARTCDGGRGRWITQRLERTGNLRLAGGGGSGEAVVFEKHRLNYHAGEGRCGSTGWVMHEYAVVKPAALGARHRACHIAFTGHGQKRKRVPDGYVDVEDDGSKASTNAAAAVPPSSTAAMSACPSNVTYNQGCHISPEQSIEQHFPAEHNNIQIQQQAYYQSQDHEQCQYSDEEKYLLQQIKQEQYYYNQQNCFLPGQGNQELYYNDEQQQIFSLPEHQCSQEQYWHHDDQQDCVLPEQHSQELHGYNNEDQGSLLPPEPIDQEEQALFVGGEPQHEQQPLTSTPRQALLDYDDGKLLPPVGVNGAIAIPPQDAAVASNDDDGGQATEAPAAKMTAEEKKWFMEELLTEGCWSGPLLFDQPYYAAAPTGRYRATLRVALAASATPAPRQAAAARAAAAAPAPLRYCLFATTAVSARKEWIRARKEERIRARREIRRKTLR

SEQ ID NO: 17540 - protein, 518 aa, Oryza sativa
  Clone ID: TF_OSC418655j.C1.p1.gm
MAAAKMAGLTPGFKFEPSDEQLVQFFLLPYLRELPVPLGGLVIRDDPRSVPPWKLFARNGRGDEEDAYFLAPADGEGRQARTCDGGRGRWITQRLERTGNLRLAGGGGSGEAVVFEKHRLNYHAGEGRCGSTGWVMHEYAVVKPAALGARHRACHIAFTGHGQKRKRVPDGYVDVEDDGSKASTNAAAAVPPSSTAAMSACPSNVTYNQGCHISPEQSIEQHFPAEHNNIQIQQQAYYQSQDHEQCQYSDEEKYLLQQIKQEQYYYNQQNCFLPGQGNQELYYNDEQQQIFSLPEHQCSQEQYCHHDDQQDCVLPEQHSQELHGYNNEEQGYLLPPEPIDQEEQALFVGGEPQHEQQPLTSTPRQALLDYDDGKLLPPVGVNGAIAIPPQDAAVASNDDDGGQATEAPAAKMTAEEKKWFMEELLTEGCWSGPLLFDQPYYAAAPTGRYRATLRVALAASATPAPRQAAAARAAAAAPAPLRYCLFATTAVSARKEWIRARKEERIRARREIRRKTLR

SEQ ID NO: 17541 - protein, 350 aa, Oryza sativa
  Clone ID: TF_OSC400138j.C1.p84.fg
MAAPEGQNKFAGVRFLPKDLELLAILDAKLRGSPLGPVEAIFHDTQILDFHPYKLYEMYAEDEEEEGYIYFFSTMQFRCRKIVERAAQGGRWKVNNCETLEVGGVAVGRKFTMNFYEHIGGDNDLIWTNWGMQEFARIIGPNKELADLALYRLYKKKITRGTGEEKPEDIAAASDGDTESSMNKRRRVEASAAAMALPPPPPSPGLPGTMMFMAADQANVASTSQEWHGQFANGAAAAPSPSGCWPWAPPPTPSAVEPFSFWASASAATPPAAANYHPSPQPQPLPPQGGEYYSRHGAFSVAPVPASACSTPSPEAATSCLLATTSPLPAAGTEGSDSQQQEPPCELMEF

SEQ ID NO: 17542 - protein, 193 aa, Oryza sativa
  Clone ID: TF_OSC400773j.C1.p103.fg
MAEQPLGGGGGGGGDGNNNGKWKGKEKVVPEYGKNRHGMPVGCYFVPKDLELFAILRCKLVRSQLPGALNNVFEHIRILEFHPALLHETYIGNEEDGYIYFFSRRQFTTKARNKRRPTRVAKGGTWKASGGSKTLRSKKVGGIDVGQKLTMVFYERRFEGDQNPIKTNWGMHEFTKIIDGSKNQVVLVDLIRI

SEQ ID NO: 17543 - protein, 249 aa, Oryza sativa
  Clone ID: TF_OSC403854j.C1.p1.fg
MGGATNLPPGFHFFPSDEELVVHFLRRKVSLLPCHPDIIPTLLPHRYNPWELNGKALQAGNQWYFFCHLTQSRTSSNGHWSPIGVDETVRSGGRNVGLKKTLLFSIGEPSEGIRTNWIMHEYHLLDGDCVAGGSSNLTSSSSNRRSHRKRGHSSMESNNWVLCRVFESSCGSQVSFHGEGTELSCLDEVFLSLDDYDELLATSNYLRICMDIVFYHHKEKRKVGGAYAIIWPSMLSMEIMHACVEIALR

SEQ ID NO: 17544 - protein, 218 aa, Oryza sativa
  Clone ID: TF_OSC900350j.C1.p4.fg
MAPVGLPPGFRFHPTDEELVNYYLKRKVHGLSIDLDIIPEVDLYKCEPWELEEKSFLPSKDSEWYFFGPRDRKYPNGCRTNRATRAGYWKSTGKDRRINYQNRSIGMKKTLVYYKGRAPQGIRTSWVMHEYRIEESECENAMGIQLQDSYALCRIFKKNVVLGEFDKKGECSSSQAKGNEEVTDFGDAGQSSGANENDKDNSWMQFIAEDLWCTNKLK

SEQ ID NO: 17545 - protein, 613 aa, Oryza sativa
  Clone ID: TF_OSC411286j.C1.p19.fg
MDAVQPSNASINRVHLVYVLVRRLALVGSLVGRGGLRLPAGGAGAAMTGCIVLFMRPGVRTASYIRGTVCSCLRTSWIIDSHRIASKIKNASGSVDASKHKWVSNPTKACPRCNHIIDNSDVVHQWPGLPRGVKFDPTDQELLWHLLAKHGKVGAKAHPFIDEFIPTVEEDDGICYTHPQKLPGVKQDGSVSHFFHRTFKAYNTGIRKRRKINTGDLADVRWHKTGKTRPVVVDGKHLGCKKFMVLYMSTMKGGKPEKTNWVMHQYHLGTGEDEVEGQYVVSKLLFQQQFKPGEKNAQDLTSADALESIVAEDLPNIPPLPLEEHVFTNQELEVLEKSETITDQGKETSEINNEDNAVEDVAHMATEKPEDGDNPSSQDPKWWEGESQFLLDSQQLAENLAICDEFLQSQSQTSCGGGDDETDKIKPRLAVYAQLPVEDLKKDLEECQRLDPSDGTNLELENASEFRLSQIEFSQDSFTTAWAGGKALFPVRNLPRALAERHWVGPTARPRETEGSNKYRAVGRSHSTGSTGPIVWPSKCGVWIKVGPSPWRRAHHPAEAERDTVGLGKNRNGVSLRYNGESFANTINTPGNIFPLANLICKELSARKALEMT

SEQ ID NO: 17546 - protein, 528 aa, Oryza sativa
  Clone ID: TF_OSC8412j.C1.p1.fg
MRSSHQPLCTRAHQAAALLLVAATFFLTRLLDRSPLSAPPPPCAAPYSPWPHRDLRIYVYAEDEVDGLRALLRGRNDDVTAATCIKGQWGTQVKIHQLLLSSRFRTFDKDEADLFFVPTYVKCVRMTGKLNDKEINQTYVKVVLSQMPYFRRSGGRDHIFVFPSGAGAHLFRSWATFLNRSIILTPEGDRTDKRGISAFNTWKDIIIPGNVDDSMVKSDRLAVKPIPLTKRKYLANFLGRAQGKVGRLQLVKLAKQYPDKLESPELKLSGPDKLGRIDYFKHLRNAKFCLAPRGESSWTLRFYESFFVECVPVILSDEVELPFQNVIDYTEVSIKWPASKIGPGLLEYLESIPDGRVEEMIGRGREIRCLWVYAADTERCSAMSAIMWELQRKFLGQDVELTVYYLKRKLLGKHLRCNAVSELDLYKFAPWDLPEKSSLQSKDREWYFFCPRDRKYSSGSRTNRSTEAGYWKATGKDRPVIYNSQTVGMKRTLVFHLGKPPRGDRTDWVMYEYRLEDKELSASGVKLV

SEQ ID NO: 17547 - protein, 236 aa, Oryza sativa
  Clone ID: TF_OSC414184j.C1.p4.fg
MERAAAAAPVVVRHGGVVLPPGFRFHPTDEELVVQYLRRKAFGLPLPAAVIPDLHNLFKLDPWDIPGASSDGDKYFFAVRPPAARGRRQHVTASGGCWKPAGGRDKPVVVARCGGSHLVGVKKGMVFVPRQGRKAPAAAAAAAGGGCWVMHEYSLALPMHKKGCLAEAEEWVVCRIFQRSSSGSRSPRRPDNDVRRTMPAVAELGRSPSPSSSSSQSSCVTSSSDQEECNVTGRKH

SEQ ID NO: 17548 - protein, 637 aa, Oryza sativa
  Clone ID: TF_OSC900216j.C1.p14.fg
MAAAADGLPPGVRFDPADDELVSRYLLRRLRKQPIPLHGVIHEADPLGAPPWMLLADHGRGGDEAFFFAEARAKNVKGKRQKRTVEGGGFWQGQRVCVDGERLSVPGGDGGGEVGGGLEIEWRKYMLSFFAEGERGSSGWVMHEYAITAPDDLASWPIRLYRVRFSGHGKKRKREPERLGARVHDDDVDGGQRAAPRRAVTETALFVQPSAVDCAESAGQSFSGAIEPVFHDLPDMMPEQADAGDTTETTAAVVNLTDAMSEQPVLPLAADGDDQSSYGVIDPAFRDLADLIVLPPEPDDGGMERATPCTPMSETALFEQQGPPGNADCADHQSSYGVIDPAFCEQADAGEAETTVSAAVVNQNYSMALCDFNFPEVLSYVDFTAGMEPSWQQRWPPMSESAPFEQQEPPLAPVAMVDLPPGNADCADHQSCSGVIDPAFRDLPDMTVLPPEQADTGGGAETTTAMVSLTDKLKYSSSMDGEAAQAWCDFDFPESTDEALSYIDFTAGAHTDNDGGVSETAMFEQLGSPPQHDPLPMDADGADQSSSGPLIDTVFRDHAEPIVLPLEQADTGGGAAAAVNLMDKQKYSSSMDGEAVPAWCDSDFPESIDEVLSYIDVSTDDTSCIDFSMDDLFDLAD

SEQ ID NO: 17549 - protein, 605 aa, Oryza sativa
  Clone ID: TF_OSC416548j.C1.p4.fg
MAAGGGGADGLPPGLRFDPTDGELVSRFLLRRLQGKPLPLNGVILEADPLSVPPWKLLAEHGRGDEGFFFAEARAKNGKGSRQKRTVEGSGLWQGQRVCADGEKLLVPDGGGVEVEIVWRKYLLSFFAEGERGSSGWVMHEYAVTSPAELAASPIRLYRVRFSGHGKKRKREPQSGEDGVGRARAAPQSAGTETALLEERVMPPQPAPQSVGTEDALVEERIPPPQPVPIPPIAGTEDALDVGTEDVRGRAAPQSAGTESALLEECVLPPQTAPQITGTGVALLDEVVPPPQTVSISPPAALVDAVDDADCANQGCSGVMDDSTMVFSHLPDMITLPAEEGDAAGGAALASMDYSWADFEFPEINMDELPNCIDFTTTDPSCLDIELSMGDLHEPQSTGIESDLLEEFVPQPQPVLVPPLAALVEVADSSEGPDQGCSVVMHDSSAVFTHLSDPIVLPEEEEADRPDAPAGTMSLDYQNYSLSDFEFPEYPLLDVAGDADGADQCSSNVMDDSSMVFSHLEDLITLPAEEAEADACSAAPAPSLDNQKYSSQGIIDSEAPALSDFEFPETIDEVLNSINFTMADPSCLDMEFSMDDLLDFDPPAD

SEQ ID NO: 17550 - protein, 384 aa, Oryza sativa
  Clone ID: TF_OSC400651j.C1.p2.fg
MPALPPGFRFHPTDEELIVHYLMNQAASVKCPVPIIAEVNIYKCNPWDLPGKALFGENEWYFFSPRDRKYPNGARPNRAAGSGYWKATGTDKSILSTPTSDNIGVKKALVFYKGKPPKGVKTDWIMHEYRLTGTSANSTTTTKQRRASSMTMRLDDWVLCRIHKKSNDFNSSDQHDQEPEESTVEQLEDIHDNNSSEQPPAPADMNNQQSDFQPMTAMSMSKSCSLTDLLNTIDCAALSQFLLDGSSDAIAEPPAPPSPLIYTTPHPNYQTLNYNINSNSSMPHAFESRLDHHDGYVNNYNVNGLRRKRMMACSATSFDDGSSSNDFVHAVVKKPQLLPSDSRGSGFGGGYCNQQLSETATGFQFQNGNLLSHPFPLNNHLQMQ

SEQ ID NO: 17551 - protein, 503 aa, Oryza sativa
  Clone ID: TF_OSC401083j.C1.p2.fg
MAAAARSQGLSPGFKFNPSDQMLVELFLLPYLIDGELPVRGLVFVEDDHLGGLPLPPWILLDRHGRGDEDEAYFVAPMGAGDGARQVRSVAGGGKWVKQRSEGKGEVVVAPGGEAFLWENFSLNFHRDDRRSGSTGWVMHEYIVSPPAGSAVAASHRATHIAFTGHGQNRKRVPDGYVLVLDDAVPPAAAAAAPPPESEQSNQEEQEYAAYTDQIQQQCFVPEQQMSNQEYFPEAAAEQSNQQFFVPAEEQSSHQLFLPAEEQSNQQFFMPAEEQSSHQFLPAEEQSSHQFLPAEEQSNYQQFLPALEQMTQSNQEFAYGEQSQCYIVPEQQQLSNQEYAYSEQSQCYILPEQQQLSDQEYAYSEQSQCYILPEQQELSNQEAEYAFVCYDEQQQQQQQSNQEAEYAFACYDEQQQQQQQQYLHGDLTSWQEPFVTSSSSSSQQFLGQEQLLPDGLLLDGFGEISQQQGDQEYAYCEESQCYIMPEQQQQSNQEAEFAFACYD

SEQ ID NO: 17552 - protein, 304 aa, Oryza sativa
  Clone ID: TF_OSC414142j.C1.p2.fg
MSGMNSLSMVEARLPPGFRFHPRDDELVLDYLERKLLDGGVGGAAAAAAAVTIYGCPVMVDVDLNKCEPWDLPEIACVGGKEWYFYSLRDRKYATGQRTNRATESGYWKATGKDRPISRKGLLVGMRKTLVFYKGRAPKGKKTEWVMHEFRKEGQGDPMKLPLKEDWVLCRVFYKSRTTIAKLPTEGSYNNIDSVATTSLPPLTDNYIAFDQPGSMQNLEGYEQVPCFSNNPSQQPSSSMNVPLTSAMVDQEQNNMGRAIKDVLSQFTKFEGNVKREALQSNFSQDGFDYLAESGFTQMWNSLS

SEQ ID NO: 17553 - protein, 776 aa, Oryza sativa
  Clone ID: TF_OSC900216j.C1.p13.fg
MAAAADGLPPGVRFDPADDELVSRYLLRRLRKQPIPLHGVIHEADPLGAPPWMLLAAHGRGGDEAFFFAEARAKNVRGKRQKRTVEGGGFWQGQRVCIDGERLRVPGDGGGGEVGGELEIEWRKYMLSFFAEGERGSSGWVMHEYAITAPADLASSPIRLYRVRFSGHGKKRKREPERLGARVHDDDVDGGERAAPRRAVAETALFVQQSSAVDCAESADQSFSGVIEPVFHDLPDMMPEQADAGDTAETTAAVVNLTDAMTEQPVLPLAADGDDQSSYGVIDPAFRDLADLMVLPPVLAQQEPPLAPVAMVDLPPGNADCADHQSCSGVIDPAFRDLPDMTVLPPEQADTGGGAETTTAMVSLTDKLKYSSSMDGEAAPAWCDFDFPESTDEVLSYMNFTAGAHDNNDGSVGRAAPWRPVSEIAMFEQPSAVDLPPGDADCTESADQSFSGVIEPVFHDLPDMIREQADAGDTAETTAAVVNQNYSMALCDFDSGIDFTAGAHDSGMERATPWTPMSEAALFEQQGPPLAPAAVVDLPPGNADCADHQSSYGDMIVLPSEQAGAGGGAETTEALFDQPVPPLAADCANQGSYGVIDPVFRDLADLIVLPPEQADAMDGEAAPAWCDFDFPENIDEALSYVDFTAGAHADNDGGVSETAMFEQPGSPPQHDPLLMDADGADQSSSSGALIDTVFGDHAEPIVLPLEQADTGGGAAAAVKLMDKQKYSSSSMDGEEAPAWCDSDFPESIDEVLSYVDFSTDGASCDFSMDELFDLAD

SEQ ID NO: 17554 - protein, 1601 aa, Oryza sativa
  Clone ID: TF_OSC101853j.C1.p5.fg
MRRRRWRRRLAPVFRFYPTEEELICLYLRNKLDGFRDDIERVIPVFDIYSVDPLQLSGTSTRVYLLLPAARRGSGWFYFCPRQEREVRGGRPSQTTPSGYWKAAGTTGVVYSAEPWPRAVGNKDRVEDDEREREGGRWKMRSYRWVFPIAKRQITVLAEKCLPRDTDEDLGGGHVDDMTKLTYLNEPGVLYNLKRRYALNEIYTYTGSILIAVNPFTRLPHLYNEYMMEQYKGVRLGELSPHVFAVADASYRAMVNDSRSQSILVSGESGAGKTETTKFIMQYLTYVGGRAAIDDRTVEQQVLESNPLLEAFGNAKTVRNDNSSRFGKFVEMQFDANGRISGAAIRTYLLERSRVVQINDPERNFHCFYQLCASGKDAELYKLGHPGSFHYLNKSKTYELEGTNNEDEYWKTKRAMDIVGISRNDQDAIFRILAAILHLGNIEFSPGKEIDSSKIKDPTSNFHLQMAAKLFMCDPDLLVSTLCTRAINTLEGAIIKALDCSAAAANRDALAKTVYARLFDWLVENINKSIGQDVDSKVQIGILDIYGFESFKNNSFEQFCINFANEKLQQHFNEKPIGIIALLDEACMFPKSTHETFATKMFRNFSSHHRLEKTKFSETDFTISHYAGKVTYQTESFLEKNRDYIVAEHCNLLSSSRCPLVSGLFGTLPEESLRSSYKFSSVASRFKQQLQALMETLNSTEPHYVRCVKPNSVNQPQIFENQSVLHQLRCGGVLEAVRISLAGYPTRRTYAEFVDRFGVLVPELMLGSYDERALTKGILEKMKLDNFQLGSTKVFLRAGQIAILDMRRAEVLENAARHIQGRFRTFITRKEFVKTREASISIQAYCRGCLARKKYMVKRETAAAIIVQKYVRRWRLHRTYQQSHSAALLIQSCIRGFIARHYFSVIKEQKAALVIQSLWRKRKVIILFQQYRQATVAIQCAWRQKVARRELRRLKMAANEAGALREAKNKLEKKLDDLTLRLTLERRLRAAGEEAKSVEILKRDKLIESLSAKCAAAKSAAQSEHDKNLLLQRQLDDSLREITMLRSSKIMTAEAERENSNLKNLVESLSKNNSSLEYELTSARKGSDATMKKLKDVEGKCNHLQQNLDKLQEKLTNMENENHVLRQKALNMSPLNNMPMTTKAFPQKFATPIGLPNGEQKHGYETPPPAKYLASLPQSLTRSRRTRMPVERQEENHEILLRCIKENLGFKDGKPVTACIIYSCLLHWRAFESERTAIFDHVIEAINNVLKGEEADGRLPYWLSNTSSLLCLLQKNLRSNGLFATPSRRSGGTLGIGDKIVQTLRSPSKLMGRSDNLGQVDARYPAILFKQQLTACVEKIFGQLRDNLKKEISPLLSVCIQAPKSSRAQPGKATKSPGIGAQPPSNSHWDNIVKFLDLLMDTLHENYVPSFFIRKLITQLFSFINIQLFNSLLLRRECCTFSNGEYVKAGLSLLEKWITDATDEFAGTSMHELNYIRQAVGFLVIHQKRKKKLEEIRNELCPNLSVRQIYRICSMYWDDKYNTQGISNEVVSAMREEVNKDTQNLVSNSFLLDDDLCIPFSTEDLSIAIPAIDYVDIELPESLHHYASVQLLLKHHDPQPV

SEQ ID NO: 17555 - protein, 326 aa, Oryza sativa
  Clone ID: TF_OSC401648j.C1.p39.fg
MEANLPPGFRFHPRDEELVVDYLYHKLSGGGEFYGGVAMVDVDLNKCEPWELPAYFLHNLIIFPARARARAAGRRRREDAARVGATEWYFFSLHDRKYATGQRTNRATRSGYWKATGKDRAIVTRRRAAAGEAVAGGEVVGMRKTLVFYQGRAPRGSKTEWVMHEFRVDGHAVADHPSSSTSSSSSNLLKEDWVLCRVFYKSRTATPRAVVSGEAAVSLSGELSLPPPLPPPVAPAVVDGYTGGGYYEQDSSAGYHHHHHHRPPPSAALPFKDLTDFRDLLSNMAQGGGGGAAAAKTEGFHLGWSEEESSGYVQQSAMASQAWNPF

SEQ ID NO: 17556 - protein, 421 aa, Oryza sativa
  Clone ID: TF_OSC400138j.C1.p82.fg
MAAPGDGEEKKAGSGRNKHGFPRGFRFVPRDQELLDILDDKLRGAPLDRALDAVFHDTRILDFHPAKLYGMYAEDEENGYIYFFSTIEFKAAKPKQKKWPRRAAQGGRWKAVLGSSQMVEVGGVPVGRKLSMEFYVKGVRTNWGMHEFVRIIGPNIEVADLAVYRLHKLWTNGEEKPGDLAADVAKSTNQSGQASAADYYQTYQNAVSQAYAYAPPYVLQPGWSQGYPYDVAAAPPTAPWPVCWAPPSAPGSYDCCYASTFSRPPPPPPIAASTLDKAPITSTDHGASTNTSAATPVANNKPPPPPVAATATTLGKKGEGKGKAPTTTSTDHAGSTNTSAPPAANYQPPPTTTTPPLQGTQHVFAPGVVVGHEDEEGYLIVDEVNTWRNTQQLVLEDDDDDDDGRAAGAGAGEGGASASGR

SEQ ID NO: 17557 - protein, 260 aa, Oryza sativa
  Clone ID: TF_OSC400221j.C1.p12.fg
METTAAKKLPPGFRFRPTDEELVVHYLRRRALGSPLPPAVDIPDVRLLAHDPSDLLPPGWSEQERYFFTCKEAKYVKGRRANRATGAGYWKATGKEKPVAVSVAAAPRSQAAAVVVGMKRSLVFYRGKPPTGKKTDWVMHEYRLAGAGLAPCRRAATADHPARPAEGWVLCRVFRKKGSAAASTASPTADADDDDATTERADDAAAGVRFIDFFARADARRRRAASPVSSSCVTDASAEHCREQETTSRNGGAAAGDASD

SEQ ID NO: 17558 - protein, 337 aa, Oryza sativa
  Clone ID: TF_OSC404770j.C1.p8.fg
MGEQQQQVERQPDLPPGFRFHPTDEEIITFYLAPKVVDSRGFCVAAIGEVDLNKCEPWDLPGKAKMNGEKEWYFYCQKDRKYPTGMRTNRATEAGYWKATGKDKEIFRNHHMLIGMKKTLVFYKGRAPKGDKTNWVMHEYRLADASPPQPPPPPSSAEPPRQDDWAVCRIFHKSSGIKKPVQVPMQMPMQMQMPVAHQVPAANYQQQMAMASASIIQVPMQMQMPSMSDQLQMLDDFSTGSLMAPPPPPPSYSTLPGFPLQINGGAPAVCWEPVDVLPAAAAAAAAADGHGRRRLRGERAVVAGGVAAGCCRPEQRRRHLVGGMQHGRYHLEQYVCV

SEQ ID NO: 17559 - protein, 331 aa, Oryza sativa
  Clone ID: TF_OSC400095j.C1.p9.fg
MGLRDIELTLPPGFRFYPSDEELVCHYLHNKVVNQHRFAGVGGAAAAGGGTMVEVDLHTHEPWELPDVAKLSTNEWYFFSFRDRKYATGLRTNRATKSGYWKATGKDRVIHNPKLHAAAHRRASIVGMRKTLVFYRGRAPNGVKTNWVMHEFRMENPHTPPKEDWVLCRVFYKKKAETETESSYSMENEQEAVIAMARSAAAIKAGGCYSNSSSSHDPAAAGHHSPPPFPASLAACSSSHHYSSHPPPPPDHHHHHHMPVTGGGGGSLNEFIPTTSMALYSSIFDFSQHLDGGAVAASASAAGSRVDGGEQCGLMELGLEEHYNYNGLMPM

SEQ ID NO: 17560 - protein, 359 aa, Oryza sativa
  Clone ID: TF_OSC400651j.C1.p8.fg
MVETSTSLVKLEQDGSLFLPPGFRFHPTDAEVILSYLLQKFLNPSFTSLPIGEVDLNKCEPWDLPSKAKMGEKEWYFFSHKDMKYPTGMRTNRATKEGYWKATGKDREIFNLQPTSYGGSSNNKNNKQLVGMKKTLVFYMGRAPKGTKTNWVMHEFRLHANLHNDNPNLRLNLKDEWVVCKVFHKKGDDREAINKQQAQAAAVDQYSAGTPNNGSSVEAGDDDDDLFQLDSIIDPSIYFSNSSAANILSAPPNMSNSVVAANYGASTTTTGTASAGSFQQQPNYCSLINKSISSSNVSSWNNMPPPPPVAEGGVHGIGSSYSLQHQAAMVKALRDVIRLPNPLGMPQYKLDDAYLWDSS

SEQ ID NO: 17561 - protein, 218 aa, Oryza sativa
  Clone ID: TF_OSC29117j.C1.p1.fg
MEKVQASCEGDQGICKRGAKGGHPIDQNLVGGMTMSTGVPTTVPPTPALAALKNLLIRVVAAAAGKGLSSSAEEARCLWAKLPAPEEEEEAGQQPERPPSSYRRPPTSTLMAPVGLPPGFRFHPTDEELVNYYLKRKIHGLKIELDIIPEVDLYKCEPWELAEKSFLPSRDPEWYFFGPRDRKYPNGFRTNRATRAGYWKSTGKDGGWCTSTGGAPSG

SEQ ID NO: 17562 - protein, 362 aa, Oryza sativa
  Clone ID: TF_OSC400510j.C1.p28.fg
MVTSKEFARDQAAMDQKIKSDVGEVVLAGDEEEDGDVVLPGFRFHPTDEELVTFYLRRKVARKSLSIEIIKEMDIYKHDPWDLPNASTVGGEKEWYFFCLRGRKYRNSIRPNRVTGSGFWKATGIDRPIYSAAVNSNSGESIGLKKSLVYYRGSAGKGTKTDWMMHEFRLPPAIAAADASPCMQEAEVWTICRIFKRSITYRKQQQQQAWRPPATVTVKAPPPGDSSSNTGSFESDGGGDEFMNCGLTPAISQQQQHGGRHQMMSTMSCNGGYFFNDGIHHSHSHHKLHSQWGSLQMAPPEPKPEPEQKPLSSPAMTIAFHQNDHGFPAAAADFYKDGYLEEIARMMEVADPSPTGFYDCRY

SEQ ID NO: 17563 - protein, 247 aa, Oryza sativa
  Clone ID: TF_OSC900128j.C1.p13.fg
MATPGQQLPPGFRFHPTDEELVVQYLRRRALCRPLPAAVIPDVHDATVLDPWDLPGAGDGEAYFFSFRQLAAASGGGGWRRRRAGSGYWKATGAEKPVFLRGFGCGGGGGGGGQHLVGVKTTLLFLRAKPPSRTHWVMHEYRLAAAGAVAVAAAGQTKRGNHSCMAQPGEWVVCRIFLKNNRSSRRRAGDADGETPVTGVHGHRRRQPSPSPSSSSCVTAEVSDGEGEEEVSSGSINGAPSASQREA

SEQ ID NO: 17564 - protein, 366 aa, Oryza sativa
  Clone ID: TF_OSC900350j.C1.p5.fg
MEKVQASCEGDQGICKRGAKGGHPIDQNLVGGMTMSTGVPTTVPPTPALAALKNLLIRVVAAAAGKGLSSSAEEARCLWAKLPAPEEEEEAGQQPERPPSSYRRPPTSTLMAPVGLPPGFRFHPTDEELVNYYLKRKIHGLKIELDIIPEVDLYKCEPWELAEKSFLPSRDPEWYFFGPRDRKYPNGFRTNRATRAGYWKSTGKDRRVVHQHGGRAIGMKKTLVYYRGRAPQGVRTDWVMHEYRLDDKDCEDTMPIKDTYALCRVFKKNAICTEVEELQGQCSMALLEGACQQLLASGGGGSQEQYETPSPPDVPVGSTFGGADADAEDDPDKDDSWMQFISDDAWCSSTADGGAEESTSCVALAG

SEQ ID NO: 17565 - protein, 201 aa, Oryza sativa
  Clone ID: TF_OSC418825j.C1.p1.np
DPFATPGFRFYPTEEELLGFYLRHRLAGTRPDVERVIPVVDVYGYHPSQLAALAGEASARDTEQWFFFCPRAERELHGGRPARTTPSGYWKATGSPSCVISSATKVIGVKRTMVFYQGRAPTGTKTRWKMNEYKAVADDADAAAAAMLHQLQLRNELGVCRVYISTGTLRSFDRRPLDNQRWDTNKAKNQIISSGRLTPAS

SEQ ID NO: 17566 - protein, 543 aa, Oryza sativa
  Clone ID: TF_OSC1203j.C1.p2.fg
MATLPQMAATKERQEAANPTTTTRTLVESVTNWIRVYSDGSVDRLGPPEAAAFMVLVPPYDDPRDGVTVHDVATDHGVDVRLYLTTTTPAGRRPVLVHFHGGGFCLSHAAWSLYHRFYARLAVELDVAGIVSVVLPLAPEHRLPAAIDAGHAALLWLRDVACGTSDTIAHHAVERLRDAADFSRVFLIGDSAGGVLVHNVAARAGEAGAEALDPIRLAGGVLLHPGFILPEKSPSELENPPTPFMTQETVDKFVMLALPVGTTSRDHPYTSPAAAVTAAEGAQLPPMLVMVAEEDMLRDAQVEYGEAMARAGKAVETVLNKFPAQCIRVFVSPIRLRNFDLMEKHVEKMLSLGFRFNPSAEDLITFYLPRLIAGKPMKDTEKFICRADVYGSEPSDLAGKFAPVPRCEKGGRFFFTSCKRHKGSSTKKERTAGAGTWVRQNSKEVKNKAGVKVGETQNFRFKKDGSYTDWLMEEHHCCRQQAVAGDEEPVICRMYVSPRAPPDSAARQESAAFVQQQPAPQVSEPPCDKKKRDDVAEEAPAAA

SEQ ID NO: 17567 - protein, 149 aa, Oryza sativa
  Clone ID: TF_OSC11898j.C1.p1.fg
MHPSGGALSVPPGFRFHPTDEELLYYYLRKKVAYEAIDLDVIREIDLNKLEPWDLKDRCRIGTGPQNEWYFFSHKDKKYPTGTRTNRATTAGFWKATGRDKAIFLANACRIGMRKTLVFYVGRAPHGKKTDWIMHEYRLDQDNVDVQLC

SEQ ID NO: 17568 - protein, 376 aa, Oryza sativa
  Clone ID: TF_OSC406028j.C1.p19.fg
MHPSGGALSVPPGFRFHPTDEELLYYYLRKKVAYEAIDLDVIREIDLNKLEPWDLKDRCRIGTGPQNEWYFFSHKDKKYPTGTRTNRATTAGFWKATGRDKAIFLANACRIGMRKTLVFYVGRAPHGKKTDWIMHEYRLDQDNVDVQEDGWVVCRVFMKKSYQRGLNPADMAAVDDDDLLHHHHHPFPPAQLHGGAADHKHDGAGGHHHHHLMQPHHHYDDFPSFDPSMQLPQLMSADQPPPPPPSLLPGVPPSAAAALSSLDVECPQNLMKLTSAAAGGGATGLLHAGGDHRFATAATDWSILDKLLASHQNLDQLFQGRVIAGASSPAAMAAPSHHQHLMDQLAGGGGGTASSLQRLPLQYLGCEAADLLRFSK

SEQ ID NO: 17569 - protein, 396 aa, Oryza sativa
  Clone ID: TF_OSC1060j.C1.p1.fg
MVESTTSLVKLEQDGGLFLPPGFRFHPTDAEVILSYLLQKLLNPSFTSLPIGEVDLNKCEPWDLPSKAKMGEKEWYFFSHKDMKYPTGMRTNRATKEGYWKATGKDREIFRQPAAVNTSSYGGSSNKKKQLVGMKKTLVFYMGRAPKGTKTNWVMHEFRLHANLHNHHPNLRLNPKDEWVVCKVFHKKQGDEAINNQQQQPQYAAVDQYSAETPNSGSSVVQAGDIDGGDDFFQLDDIIDPSIYFVSNSSNILSAPPNNNNAVYSVSASTTTTNTTAVSFQQQPNYYSLINKSSSSSSSNYSAPLQQHVSSWNITPGAGGAHGIGSSYYNLQQQQAAMVKALENVIAVPNFGTLLPSSNKLKGLSKSAMAGLTQQNPLGVPQYKIENYGDHYISRQ

SEQ ID NO: 17570 - protein, 352 aa, Oryza sativa
  Clone ID: TF_OSC33262j.C1.p4.fg
MAMGMEGSGGGGSAKKKEESLPPGFRFHPTDEELITYYLRQKIADGGFTARAIAEVDLNKCEPWDLPEKAKMGEKEWYFFSLRDRKYPTGVRTNRATNAGYWKTTGKDKEIFTGQPPATPELVGMKKTLVFYKGRAPRGEKTNWVMHEYRLHSKSIPKSNKDEWVVCRIFAKTAGVKKYPSNNAHSRSHHPYTLDMVPPLLPALLQQDPFGRGHHPYMNPVDMAELSRFARGTPGLHPHIQPHPGYINPAAPFTLSGLNLNLGSSPAMPPPPPPPPQSILQAMSMPMNQPRSTTNQVMVTEQMIPGLANGVIPQGTDGGFTTDVVVGGTGIRYQNLDVEQLVERYWPGSYQM

SEQ ID NO: 17571 - protein, 386 aa, Oryza sativa
  Clone ID: TF_OSC1062j.C1.p1.fg
MPALPPGFRFHPTDEELIVHYLMNQAASIKCPVPIIAEVNIYKCNPWDLPGKALFGENEWYFFSPRDRKYPNGARPNRAAGSGYWKATGTDKSILSTPTSDNIGVKKALVFYKGKPPKGVKTDWIMHEYRLTGTSANNTTTTKQRRASSMTMRLDDWVLCRIHKKSNDFNSSDQHDQEPEGSTVDEQLEDIHDNNSSSQQPPAPPDMNNQQSDFQPMTAMSMSKSCSLTDLLNNLDCAALSQFLLDGSSDAIAELPAPPSPLIYPNQTLNYNINNNMPHAFESRLDHHDGYVNNYNVNGLRRKRMMACSATSFDDGSSSSSSDFLHVAKKPLLLPSDSRGSGFGGGYCNQQLSETATGFQFQNGNMLSHPFPLNQQLLLNNHLQMQ

SEQ ID NO: 17572 - protein, 326 aa, Oryza sativa
  Clone ID: TF_OSC422386j.C1.p8.fg
MTLPPGFRFHPTDDELVGYYLKRKVDSLKIELEVIPVIDLYKFEPWELPEKSFLPKRDLEWFFFCPRDRKYPNGSRTNRATSTGYWKATGKDRKIACAGEVFGLRKTLVFYKGRAPGGERTDWVMHEYRLCQDLAHGVSNFIGAYALCRVIKRHEAGLHGEPPAAKAKGMISKVSSSSSLVTVEHQLSSRGNASPSFTPTNNGSPLVDEMFVGGGGGDPFQLLPSCVPYHGGDACGFDLPPLCMPQTQDPFFSDAGFTQAAPPLYGDVMGSVSEHELKWDTLGGYSGGGGGELWNAAAAPLLCRQASDGDDLTAWFTAADDNMSVF

SEQ ID NO: 17573 - protein, 105 aa, Oryza sativa
  Clone ID: TF_OSC21481j.C1.p1.fg
MACAETYIENMEDRCIYFFSRRLFAAKARNKRQPMRVANGGTWKASGGSKTVRSKKVGGIDVGQKLPWCSTSVGSRATKTLSRPTGPCTSTPRSFLAPKTSVFTM

SEQ ID NO: 17574 - protein, 341 aa, Oryza sativa
  Clone ID: TF_OSC401316j.C1.p17.fg
MEQHQGQAGMDLPPGFRFHPTDEELITHYLAKKVADARFAALAVAEADLNKCEPWDLPSLAKMGEKEWYFFCLKDRKYPTGLRTNRATESGYWKATGKDKDIFRRKALVGMKKTLVFYTGRAPKGEKSGWVMHEYRLHGKLHAAALGFLHGKPASSKVHERTVFKKSLVEVGAAGGKKAAVVTMEMARGGSTSSSVADEIAMSSVVLPPLMDMSGAGAGAVDPATTAHVTCFSNALEGQFFNPTAVHGHGGGDSSPFMASFTQYGQLHHGVSLVQLLESCNGYGGLVDMAASGSQLQPAACGGERERLSASQDTGLTSDVNPEISSSSGQKFDHEAALWGY

SEQ ID NO: 17575 - protein, 200 aa, Oryza sativa
  Clone ID: TF_OSC101556j.C1.p16.gm
MSQSPPDSSSAAAVPLAPGFRFHPTDEELVSYYLRRRILGRRLRIDAIAEVDLYRLEPWDLPSLSRIRSRDAQWYFFARLDRKVTGAGAGGRGGPGNRTNRATPRGYWKTTGKDRDVHHRGKLVGMKKTLVFHSGRAPKGQRTNWVMHEYRLLDADGTQQQAKSEEEELVIACQVHLKRRVSLASGPQDITGPTDSDTDV

SEQ ID NO: 17576 - protein, 200 aa, Oryza sativa
  Clone ID: TF_OSC101918j.C1.p4.fg
MSQSPPDSSSAAAVPLAPGFRFHPTDEELVSYYLRRRILGRRLRIDAIAEVDLYRLEPWDLPSLSRIRSRDAQWYFFARLDRKVTGAGAGGRGGPGNRTNRATPRGYWKTTGKDRDVHHRGKLVGMKKTLVFHSGRAPKGQRTNWVMHEYRLLDADGTQVPVKSFDPSQISQDLPYHEITRLAVAPKKFCSFSLSPARLV

SEQ ID NO: 17577 - protein, 632 aa, Oryza sativa
  Clone ID: TF_OSC402917j.C1.p4.fg
MSQSPPDSSSAAAVPLAPGFRFHPTDEELVSYYLRRRILGRRLRIDAIAEVDLYRLEPWDLPSLSRIRSRDAQWYFFARLDRKVTGAGAGGRGGPGNRTNRATPRGYWKTTGKDRDVHHRGKLVGMKKTLVFHSGRAPKGQRTNWVMHEYRLLDADGTQDLHVVCRIFQKNGSGPQNGAQYGAPYLEEDWEEEDDAIENMPASGAFAEMAAVTDTADESTEEDGNFSLKTNDEPLQTQEYQPEITPVKAQGSNEETNGGGYSCDVFSLDEILQEPENVCKNEEQNAIDDKFTIAELSGYPRQDDGYVGENGPVNWIDPSNGDNTNWPLRAYSTQNHVNGTLSADGFFDTVNGTNSYSGPSDNQNLYLQDDGLTSSHQVGDNMPFYDASSNHKWVDGKDDYLNLNDLLYPPAENQPLFDAGDDLMAYFDATEDDFKFDIMGTEDSNSQLPDMSNFVQKDDNNNKFTLDGISNTALYGASSSGSHGNMYPDTAVPDMPMDDTVDKSFGKRLASMLGSIPAPPAMASEFPPSTGKSVVPLSAVNPSSSIRVTAGIIQLGGITFTGSTEHLQKNGDFNLLLSFTVEGDVSTKSIGFEPDTQMSTTPMVLRSGMYLFFVSAMILMLSYKVGLCIYSR

SEQ ID NO: 17578 - protein, 324 aa, Oryza sativa
  Clone ID: TF_OSC400500j.C1.p36.fg
MAGLREMESTLPPGFRFCPSDEELICFYLRNKVANHRVASGTLVDVDLHAREPWELPEVAKLTAEEWYFFSFRDRKYATGSRTNRATKTGYWKATGKDRIVHEGTTRAVVGMRKTLVFYLGRAPNGQKTTWVMHEFRLETPNSQPKEDWVLCRVFDKKKPSTIEAEGGGSSGSDLFIPGATDGSTDPSSPTTMAPLLGSSPDPTVVDRFDHRSAAVPPLMVLMQGGGDQMISGSGVHCSNNDNSGSSSALLNLTMLQYSFLEHRPTGDDMAVGAHFGTCQGGNNDATMALGMGFEEHGMGEIIEMEPAWRQGGSNCVYRDELYF

SEQ ID NO: 17579 - protein, 351 aa, Oryza sativa
  Clone ID: TF_OSC101628j.C1.p7.fg
MAGADGLPPGLRFDPSDDELVSRYLLRRIQQKPLPLDGVIVDADPLSVPPWTPLADHTRGDEAFFFAGARAKNGKGKRQKRTVEGGGFWQGQRMAVDGERLVVPGDGGGGVDGSGGGGLEITWRKYVLSFFAEGEQGSSGWVMHEYAVTSSADLASSPLRLYRVRIDDDDLSVSQTEGTELSEQGSSGVIDDDYWREADATGGAEREEIALLDEERCPQPQPAPPTDALVPPLQGQNSYDVMADSSLLFADLPGRIDDDELQRSLRVSDMPDLFLSQTEEAGAGGGGGAAPVLNKQSNSSPLGVMDSEVPIVLSDLEFPESIDEVLSYIDFATDDCLDFDMDELFSDMPAD

SEQ ID NO: 17580 - protein, 288 aa, Oryza sativa
  Clone ID: TF_OSC419079j.C1.p12.fg
MVEARMPPGFRFHPRDDELVLDYLLHKLAAGGRGGGVYGGGGGVAIVDVDLNKCEPWDLPDAACVGGKEWYFFSLRDRKYATGHRTNRATRSGYWKATGKDRSITRRSSISSGEPSSSAAAAAVGMRKTLVFYRGRAPKGRKTEWVMHEFRLEPQPLHLKEDWVLCRVFYKTRQTIPSPSSEEAVTLPNELDLPATPSLPPLIDAYIAFDSAPTTTPSMVGSYEQVSCFSGLPALPMKGSISFGDLLAMDTSAEKKAIRVLHNSNTAKLELSPDWGQESGLSQMWNPQ

SEQ ID NO: 17581 - protein, 492 aa, Oryza sativa
  Clone ID: TF_OSC401860j.C1.p13.gm
MAVEGFEEAIKCLENLKLESGEASLEQRLPAAACGDHHTAAGAGLPPGFRFHPTDEELLLHYLGKRAAAAPCPAPVIAEVDIYKYNPWELPAMAVFGESDGEWYFFSPRDRKYPNGVRPNRAAGSGYWKATGTDKPISISETQQTVLLGVKKALVFYRGRPPKGTKTSWIMHEYRLANAAASSSSSYTSNMKQLASSSSSSSSSASMRLDEWVLCRIYKKKEANQQLQHYIDMMMDDDNDDEHNLQVQQQQQQQAQSHRMPRPPSISDYLLDYSDDLPPSTDQTPSLHLGFTAVNEGNNKRHKTMEEYYSISISTADMLHASSSTSNNKSTQINFSSIFEPQTPAAAGHQLIDEGRWPGGAWRSGPQVQTSDGRKSSGWALSVEAVELWIWGFGAAVVARFGENNGGGHWAPARSEMGSWRDKELGDFVIEMLLSMIKVLVTELLSSWLVTSIVQATWLPYVESTLDVTWQMTAVDVEHGGSDMECARVLAL

SEQ ID NO: 17582 - protein, 364 aa, Oryza sativa
  Clone ID: TF_OSC401559j.C1.p11.fg
MSDGKDSLDLSGLGAAVPNAKELSAEDKANLVESIKNTLQGLAARHTDVLESLEPKVRKRVEVLREIQSQHDDLEAKFFEERAALEAKYQKMYEPLYSKRYEIVNGVVEVDGVTKEAADETPAEQKEEKGVPEFWLNAMKNHEILSEEIQERDEEALKYLKDIKWYRISEPKGFKLEFYFDTNPFFKNSVLTKTYHMIDEDEPILEKAIGTEIEWFPGKCLTQKVLKKKPKKGSKNTKPITKTENCESFFNFFSPPQVPDDDEEIDEDTAEQLQNQMEQDYDIGSTIRDKIIPHAVSWFTGEAAQDEDFEGIMDDEDDDDEDDDDDEDEDDEGDDEDDEDEKKGGRVPAGEGQQGERPAECKQQ

SEQ ID NO: 17583 - protein, 408 aa, Oryza sativa
  Clone ID: TF_OSC400419j.C1.p15.fg
MVREPQDLRLGERDLLEEMSMNEEVEDGEVKPLGRVESMDETPGEVAKLRCRHGARGAAVVASAWRGSNTGSFVLVRSYITITFRGFRPPRLARLIRSPSSPCSKTCRLITPESIIATISHRSTMNGIELSSEDKAILVETLKNKLQALAEQHVDVLESLAPSVRKRVDVLMEIQSQHDELEVKFFEEKAALEAKYQKLYGPLYSKEKGVPDFWLNAMKNNEILAEEIHESDEEALKYLKDIKWCRIDDPKGFKFEFFFYTNPFFKNQVLTKTYHMIDEDDEPILEKAIGTEIEWHPGYCLTQEVLTKESSESTKPITKTEECESFFNFFSPPQVPDDDAKIDENTAEELQNQMERDYDIASTLRDKIIPHAVSWFTREAVQDEDYGASWVDDEEEDDNNDEYSDEEA

SEQ ID NO: 17584 - protein, 186 aa, Oryza sativa
  Clone ID: TF_OSC25825j.C1.p2.fg
MNGIELSSGDKAKLVETLKNKLQALAEQHVDMLESLAPAVRKRVDVLMEIQRSKIVSGVLEVEGETEEREEKGVPDFWLNAMKKNEILAEEVLTKESSESTKPITKTEECESFFNFFSPPQVPDDDAKNDEYTLAHVARSTLRDKIIPHAVSWFTREAVQDEDYGASWVDDEEEDDDDDEYSDEEA

SEQ ID NO: 17585 - protein, 374 aa, Oryza sativa
  Clone ID: TF_OSC23522j.C1.p5.fg
MGGDKENLDLSDLNASLPAAAAALSAEDRAGLVNALKDKLQSLAGQHTDVLEALSPNVRKRVEYLREIQGQHDEIELKFFEERAALEAKYQKLYEPLYTKRYNIVNGVVEVDGGNDEPASENAAEGKDADAKGVPDFWLTAMKTNEVLSEEIQERDEPALKYLKDIKWARIDDPKGFKLDFFFDTNPFFKNSVLTKTYHMVDEDEPILEKAIGTEIEWYPGKNLTQKILKKKPKKGSKNAKPITKTEVCESFFNFFSPPQVPDDDEDIDEDTADELQGQMEHDYDIGTTIRDKIIPHAVSWFTGEAVQAEDFDDMEDDEEDDEDDDEDEEEEEEDEDEDEDDEEEKSKPKKKSAGKPKYFALNCPGNYWLVVHG

SEQ ID NO: 17586 - protein, 301 aa, Oryza sativa
  Clone ID: TF_OSC400044j.C1.p55.fg
MSNPELLSEEKAILVETLKNKLQALAEQHVDVLESLAPVVRKRVDVLIEIQSQHDELEAKFLEEKAALEANYQKLYGPLYSKRSEIVSGVLEVEGETEEREEKGVPDFWLKAMKNNEILAEEIHESDEEALKYLKDIKWCRIDDPKGFKFEFFFDTNPFFKNQVLTKTYHMIDEDDEPILEKAIGTEIEWHPGNCLTQEVLTKESSESTKPITKTEEYESFFNFFSPPQVPEDDAKIDENTAEELQNQMERDYDIASTLRDKIIPHVVSWFTGEAVQDEDYGASWVDDEEDDDDEYSDEEA

SEQ ID NO: 17587 - protein, 233 aa, Oryza sativa
  Clone ID: TF_OSC420713j.C1.p28.fg
MTAPADKGKKAKTDADGGAAEENEQIDGALVLSIEKLQEIQDELEKVNEEASDKVLEVEQKYSEIRRPVYLRRSDVIQTIPDFWLTAFLSHPLLSELLTEEDQKMFKYLESVDVDDSKDVKSGYSITLTFSENPYFEDKELTKTYAFADDGTTTINATSIKWKEGMEIANGNAKKKGSKRPLVEESFFTWFTDTEHKSLADGVQDEEAEELGEDDDEEGSDADEGEEDEEEEN

SEQ ID NO: 17588 - protein, 593 aa, Oryza sativa
  Clone ID: TF_OSC401316j.C1.p10.hg
MAAAEQKGKKPRTDGAEAEPVDAALLQSIEKLQEIQDEIEKVNEEACDKVLELEQKYNEVRRPVYVRRNKIIKQIPDFWLTAFLSHPMLGELLTEDDQKIFKHLESIDVDDSEDIKSGYSITLTFSPNPYFEDTKLTKTYSFSDDEAVKVKATSIRWKKGMDIANDRAYTKKGDKRILIDESFFTWFNSEKNRSFAHGAMDEVADVIKEDLWPNPLKYFNNEFEEELELLDDDDEQYFFALDWYLMMTMRRRMMKTKVKERRMERRTELSVMSDSFGLDNLCLQKAETGPPGGLKQQGVPFCGVVVLDLAGSLNSGGRVRWAARFAGPSGPPSVPARRLVPCLRRSGATGTTEPLGVASTQRRGRKAEARPPRVRSTRGDFANLPYKALPQSPSPPTSSSSPDRRMSGERCAGRPLFGGAISSTFPVRFQEVFVDPARDESLIFELLDLKGEVEDGGSALWFLRDIANEQDAGDNLVVEHSGTIELGGLRFGDAPAVAGTAVGQLAISKGRQGREAQNIVRLYLANIRLKNAATDVVITAYEPLLINPLSESASAVAAGPAVPAEQAGCLAMSEIFKLAVMNFNAPRIRMTNM

SEQ ID NO: 17589 - protein, 1698 aa, Oryza sativa
  Clone ID: TF_OSC4252j.C1.p2.fg
MDHIAEEETVGVAEDPGLADVGKADETKEEGGGAGVHLDETRVAVDDPTEVRASQIDDGTAMVSVLGGDGDSFVEQDGQDTSGGGACNEGNEPEEDARVQVRLDDTSAAVDEGGASLIDDVMNTLPVGGVASFDDGPQTDKNAQDEGALIDVVSSTVLNDASIDLVKASDSVSEEGTGMDILVQPGEDIKEMVTIACDAATDDEGRKVDAVSSSSDRNEEVVGAAGLDETDEDMRLGTVGLSGDDNVANEAAAAAAGGADDEDLKMDGVITAGDKDVENGKADNADGVPEVNVVAISRDNSAENEAAAAGDDGADEEGIQMNVLNTTRGEGEEDDEAAQNVVEYAVDGTEELETIGLTGDDKAEKEAAPAGNNSADEEGMQMDAVTTTGAEDEDGKADENVVEDDDGVSEEAVADTVGEDIPEEDAVQIDEDEDDDDVPPPLTRKGGGRRKRGRASSKAQVVVKPPVRKKDDEEVCFICFDGGDLVVCDRRGCPKAYHPSCVNRDDEFFKSKGRWNCDSGMPDVDFDDKTSWWYLFKDYWLNLKTKLPLTFEEISAAKSQKNGSSLVIRDNDLSEPHDTNDEEEGNSDSSSVRHLEGNSKRKGRKRSKQAANDDSSVVKDSTRKSTKRGLTGGRDTKSSTGRKVRKLSKRALSSDHRPRESESVGTSTSSAEETSWASKELLDFVANMKNGDKSVLSQFEVQSLLLDYIKRENLRDPRRKSQIICDSMLKSLFGKARVGHFEMLKLLESHFLMSEVSPVEIDDNHGGVVDPDPSLDADGNSEASMVMSSEKRKKSRKYDQKALQTNLDDYAAIDNHNISLMYLRRNLLEELISEVDTFDEKVLGSFVRIRISGTGQRQDIYRLVQIVGTGIAPEQYKCGKKSTDITLEILNLDKREVITIDITSNQEFTEEECKRLRQSIKCGFIPRLTVFFWHMCTVSLFLNYLTIQGEVYEKAKVLQSLKVNDWIEIFTLRECVEKLKLLSTPEERVRRLNEEPEVHADHTMDPDYESPEEQEQDTGRSSFNKSRGSFSKKDNNPVSPGKGEGRSPAQRDLKTNWESNRNTWGESSTHIESPLGRRPAFSSHGESAGYTSKSDSPNIGTHAVKVGATAGANIGSGGTHASQSVINESEKIWQYMDPTGKIQGPFSIVQLRKWNGSGYFPPNLKIWKSTEKQDDSILLTDALLGRFEKDLPPWEPPVGSSSDVDGRPRNDSLLEEGTRAGEQPSKSAVLSSTQSFSGRAGQGNDAANLGPATIQSSTQGYYGMQNSQAAYAVQQSLSGSWNASSQFGTAINPVTLSQPAMGSFVVGQNAALGSAGQLTPVPGPATVSAEVVNSQLQSQNQIASFLSQSDGRLADGNDSKLGEDASRERMRSSGEDLGLSGAQPGGVQSNTQQLEDARNQLQTDASNSVKPSQLISTPSAEAVQPSSTAMAGGDNQNTAWAQLASTSGQSQPQAAGNMTWGATLQGNANMGWGMVGQNNMNMSWGGTAQSATGYNMGLAMQAQPNAVPNMGWVTPNPGNTNMNMMWATQGQGTPNAAAMVGTQMQGVAMAPWGAIAQGNTNSYPGWGGQVGNMNQNVGWGAPMQVNPGPSTGNGTGQDNNNMNWNSPSGNPNWNNQQRDNGGRHSGHGGDFNGGDSGGRSWRSQSGGDGGSWRPKRGVCYSILDKGYCKNGEHCNFSHSIPNDGYPSRNSRHFDRQNS

SEQ ID NO: 17590 - protein, 1777 aa, Oryza sativa
  Clone ID: TF_OSC900152j.C1.p16.fg
MDHIAEEETVGVAEDPGLADVGKADETKEEGGGAGVHLDETRVAVDDPTEVRASQIDDGTAMVSVLGGDGDSFVEQDGQDTSGGGACNEGNEPEEDARVQVRLDDTSAAVDEGGASLIDDVMNTLPVGGVASFDDGPQTDKNAQDEGALIDVVSSTVLNDASIDLVKASDSVSEEGTGMDILVQPGEDIKEMVTIACDAATDDEGRKVDAVSSSSDRNEEVVGAAGLDETDEDMRLGTVGLSGDDNVANEAAAAAAGGADDEDLKMDGVITAGDKDVENGKADNADGVPEVNVVAISRDNSAENEAAAAGDDGADEEGIQMNVLNTTRGEGEEDDEAAQNVVEYAVDGTEELETIGLTGDDKAEKEAAPAGNNSADEEGMQMDAVTTTGAEDEDGKADENVVEDDDGVSEEAVADTVGEDIPEEDAVQIDEDEDDDDVPPPLTRKGGGRRKRGRASSKAQVVVKPPVRKKDDEEVCFICFDGGDLVVCDRRGCPKAYHPSCVNRDDEFFKSKGRWNCDSGMPDVDFDDKTSWWYLFKDYWLNLKTKLPLTFEEISAAKSQKNGSSLVIRDNDLSEPHDTNDEEEGNSDSSSVRHLEGNSKRKGRKRSKQAANDDSSVVKDSTRKSTKRGLTGGRDTKSSTGRKVRKLSKRALSSDHRPRESESVGTSTSSAEETSWASKELLDFVANMKNGDKSVLSQFEVQSLLLDYIKRENLRDPRRKSQIICDSMLKSLFGKARVGHFEMLKLLESHFLMSEVSPVEIDDNHGGVVDPDPSLDADGNSEASMVMSSEKRKKSRKYDQKALQTNLDDYAAIDNHNISLMYLRRNLLEELISEVDTFDEKVLGSFVRIRISGTGQRQDIYRLVQIVGTGIAPEQYKCGKKSTDITLEILNLDKREVITIDITSNQEFTEEECKRLRQSIKCGFIPRLTVFFWHMCTVSLFLNYLTIQGEVYEKAKVLQSLKVNDWIESEKMRLGHLRDRASDMGRRKEYPSSLFTLRECVEKLKLLSTPEERVRRLNEEPEVHADHTMDPDYESPEEQEQDTGRSSFNKSRGSFSKKDNNPVSPGKGEGRSPAQRDLKTNWESNRNTWGESSTHIESPLGRRPAFSSHGESAGYTSKSDSPNIGTHAVKVGATAGANIGSGGTHASQSVINESEKIWQYMDPTGKIQGPFSIVQLRKWNGSGYFPPNLKIWKSTEKQDDSILLTDALLGRFEKDLPPWEPPVGSSSDVDGRPRNDSLLEEGTRAGEQPSKSAVLSSTQSFSGRAGQGNDAANLGPATIQSSTQGYYGMQNSQAAYAVQQSLSGSWNASSQFGTAINPVTLSQPAMGSFVVGQNAALGSAGQLTPVPGPATVSAEVVNSQLQSQNQIASFLSQSDGRLADGNDSKLGEDASRERMRSSGEDLGLSGAQPGGVQSNTQQLEDARNQLQTDASNSVKPSQLISTPSAEAVQPSSTAMAGGDNQNTAWAQLASTSGQSQPQAAGNMTWGATLQGNANMGWGMVGQNNMNMSWGGTAQSATGYNMGLAMQAQPNAVPNMGWVTPNPGNTNMNMMWATQGQGTPNAAAMVGTQMQGVAMAPWGAIAQGNTNSYPGWGGQVGNMNQNVGWGAPMQVNPGPSTGNGTGQDNNNMNWNSPSGNPNWNNQQRDNGGRHSGHGGDFNGGDSGGRSWRSQSGGDGGSWRPKRGVCYSILDKGYCKNGEHCNFSHSIPNDGYPSRNSRHFDRQNSGNERRYDRQNERTDRQFDRQSSGNERRDDRHNGRDSDRHDDRLTDTRSQSRERQ

SEQ ID NO: 17591 - protein, 55 aa, Oryza sativa
  unsure (1)..(55): unsure at all Xaa locations
  Clone ID: TF_OSC27143j.C1.p2.gp
FHPSCMGMTIEQAKKLDHFLCADCVKENGTKRPSNSYPASSNSDSKVEPKKRKRX

SEQ ID NO: 17592 - protein, 687 aa, Oryza sativa
  Clone ID: TF_OSC400970j.C1.p1.fg
MEEVKESPVQPTTSTAQTITSSGTADFQGFHGAPKFAVGVPRNLPAVAALPATAPVTSASLVTLKPPGSSPVKSVNNPSVVTMPHMAPSHLKSDKGVNGPPNLVRTGATYGNLNKSFHDTCARSNLNAVQSSNPVAKNQDTKTASIDATAGNPLTGHHATPSVAPVPPKPTFANHSEIAKSVQRVLHQPANHPSWIPPSTEYMRSRLDCQICKVAIMDMESLLVCDACEKGAHLKCLQHYGNKGVPKAEWHCPTCLTKSKGKPLPPKYGKVTRTAVEPKATPPPAGTQVSSQGAAENIAVKENHQKVAVNGNLLNQNSTQAGSVAQSSTVLALGVTAAVAQSQPLSISRLPEGNLNNDAALSSEKTGNVGPCSSIAHRNEKPPDELQSSGLPANSKTGTQSGKSPNEEVSSVLVSGSADSTNDTLHEQKSHEISGEKCSDNSSIVASEANIKSKADSELISGRDVEMVDNDIPPKDQTNNIATEDKPSTQETSEAHKMEVVEVSANTGIQISQGDSAGTEENLHTEVTSVPHMINDVAMATNAGTPICPSNNVAIEEKPKSTVISEVCTTKDTEMTTDATLDQNTNVATEEIPLPESISATEDADMTTDTGIPTNQRQEVNGLAENGRKEHPLGETDKHKSDHSTMPDMSTAPQITSNGVMHSKDEAACGHEGEIVDISAAATEENN

SEQ ID NO: 17593 - protein, 869 aa, Oryza sativa
  Clone ID: TF_OSC401107j.C1.p34.fg
MTIPSAEGFLHAASCLPCTAEEERDLVVALTREAEENVKDGDLRYLVSHSWWLNWQSYVGLIKPDENDADMLPQAPSRPGEIDNSKLVSEESSSIGDEPELQRTLREGDDYALVPQEVWRKLHEWYKGGPELSRRVICSSPTSRSYIVDVYPLRLKLFDGRDSLERIIRISRKAKVSELYSLVCSLLSVEQSKIDIWDFYQKTKGKKLINLNETVEEAQLMMDQEIIIEAKADDAWCSDLGTRSNNELALIPLEPSTSSFSIAGGPAFSNGFSSGFGSSFSQDNSFSPLLRDAEDGYSFSNGTKDDIHGLSGLHNLGNTCFMNSAIQSLVHTPPLVEYFLQDYSREINTENPLGLQELLAFLLDGLHEDLNRVKKKPYIEAKDADGRPDEELAEECWNYHKARNDSIIVDKFQVYVCSQLFTTHQYTFSIACCFCNDYLLETRPERLGQGQYKSTLVCPDFTRMINVTVFSGTGDALPMPYTVKVYDHRIYRYWNPSEPLCHVKDEDKLVAYRLPVGSENLLRVEILHRVVDRYTSESMFNLSRKLIGSPLVTCIPSDSTRKADIYATVSSLLAPFVRAKVHTLDESATKLNSNGPSLDGIVLTDNGVTCEEDVSTSNVDEEAADEEVLPFQLWLTDDKANKREHIDADSNGVPGSTMRLLMDWSDREHEVYDIKYMDELSVVFKPGFMSKKNRQEAVNLFSCLDAFLKDEPLGPDDMWYCPRCTEHKQASKKLDLWRLPEILVVHLKRFSYSRFMKNKLDTFVNFPIHDLDMSRYANHSRGDQPPIYELYAVINHYGGMGGGHYSAYAKLVEEDSWYHFDDSHVSSVGEEDIRTSSAYLLFYRRVGSSSCSVSKNVAVDTDMVDSLDT

SEQ ID NO: 17594 - protein, 826 aa, Oryza sativa
  Clone ID: TF_OSC401949j.C1.p34.fg
MALCPDCGAITVCEVCGVLGYKNLLLSCKNCNGAAVHRYCLDKVDFDGTVDWSCDECHPRHGKGTNRRSLEVTLDDKTVVGKQPENQSSLDTNHDKPGMNGGNDDYVSDDLMLERNKERFQLHDEANNDIHLKSMSANVPRSSTLHENSVARNVSSSANTGLPMDSNCVPSAHIDIGNPRDSSVRLILTGENRRESSMLLDGACSGSLSKDSSKEKIDREANSSHMEPSDAVKNFCKDNPMKRRKLMLLDDDDDDVGVELSDTVQNVVKDNPSKRRKLILPDDDDVEVELCNTVQSIAKDNPGKTIQLIVLDDDDDKQEDAENLNHLSLEFEGPIEKHKIHIGYATGQRCLEDDEHGLLDSLDHRSLENTCPTKKRRRYICPSDDEEEEVIKGSTTTGCAPNDVANTASQHVDAKDHHLQSRMAFASDFTKHQYYIYSEPMGEPAWSGIFMTDSNVPIMLAAHLSTKACQRVSEFARSLQPVVEVIKLPRLKAWPERWDKSGPTDDSIGLFFFPHSMRPNEELDKLVKEVIESDVVLKAVLGTVELLIFPSILLPEQYHEFQGKYYLWGVCKARKHNPDTAVLVEEQCGLVSASEEGSSDKESYVMKHVEDRLPADCNPEAREGDIKTALGEGCFSPDSCLSSNKASPVKGGSPCFMQPGLGDKPHEPGVADQKEDEQDFTSLPRRNDQNATNPPIDSLPSATRLFGFVTARSERCQQLIQEMVKEGALLFSVPEDMTINRSTISKSNGVGAAQAPDSGCQHVQERCEPIEFVPIDHNDPDSASEACLDLFPVRHEQIGLTSQVDVKEVELDLSLGAFRRAPSELP

SEQ ID NO: 17595 - protein, 256 aa, Oryza sativa
  Clone ID: TF_OSC27184j.C1.p6.fg
MVENHVSKEDSKNYKLRMGFVDGHICAICDDGGNLIRCEGACRRYFHRTISNDADFNCETLNMSQEQVESSKFICKNCVYKQHQCFGCGELGSSDMSSGSAEVYQCSKSRCRRFYHPKCLAEFDSSKNPPVFECPLHECFACKNKGEKYNEETCKNKGQESIKKKQGAENNKKMHLALCRRCPIAYHRKCLPRCDMYLALFASDSALLKGYFVDTVFSFLGIFPLFPKVVFQGNGKLIRAKFSSIACKLFALHPFC

SEQ ID NO: 17596 - protein, 821 aa, Oryza sativa
  Clone ID: TF_OSC400909j.C1.p27.fg
MGRRSKQKVEDMAEELCFVCKDGGDIRVCDFKNCLKGYHPHCVGKEESFLDSAEQFICELHKCVSCKRNSEYHCLCCPSSSVCGECLGKVEFAQFRKQSQTKGLCNNCLKLALFVEKNSEANSDGETVEFRYTENYLVLFKDYWETIKDNEGLALIDLQQANICLRTSLSCKQGRDSEKPPDEDYRADKNSLSVNDGAEQPFPVDVKVQPSEAKMSLKRKKSNKKTYVGWGSKELIEFLSCIGKDTTKPLDEFILTGVVKEYIQQKNLFKDRKRKSVICDDKLHSLFRKRKVKSNMILNLLEIHLAANAASEDDFLDDSEDDEGRIMRKRPCNTLKAAETSERDPKRNKKCFAALNHNNLKLIYLRRTLIMNLMGQDTFEQKVVGSLVRVKNDDNHYSYQMPKKHYQLGLVTGIRKSPQEYKIKDKRTDILLCVSNLWDDIKISMLSEEDIEEDECNDLLLLAKKGLFKRPTVADLEEKAASIHVDIVNHYATQCATGHVPNSVKVLMEDSRGATGHIADSVKVLMEGLPGGATARVADVFNVDMAKSQDASGQVTDYLEVVEEETPEDASGQVADILDVVEEEPPEDASGQVADILELVEEETSEDASGQVASILEVVEEETPEAPGKDLCNGGIPGSGLQNKMHNAQDGGTAQGSDMCNGGNTSRRLNDRKSVIVIDSDSDEDEDPHPEQHEPERAAPRAAMDVVMAPTHGAPVAMNGTSAPTLPCAKRGKNGTTAPKGRVPAIAALHALQSMNAPGEHEYIWNYADPQGKVQGPFTMEHMRNWHRNRFFPPDFRVWRLGQTQNDSVLLTEAMGLKFSS

SEQ ID NO: 17597 - protein, 758 aa, Oryza sativa
  Clone ID: TF_OSC401826j.C1.p1.fg
MGRRSKQKVEDMAEELCFVCKDGGDIRVCDFKNCLKGYHPHCVGKEESFLDSAEQFICELHKCVSCKRNSEYHCLCCPSSSVCGECLGKVEFAQFRKQSQTKGLCNNCLKLALFVEKNSEANSDGETVEFRYTENYLVLFKDYWETIKDNEGLALIDLQQANICLRTSLSCKQGRDSEKPPDEDYRADKNSLSVNDGAEQPFPVDVKVQPSEAKMSLKRKKSNKKTYVGWGSKELIEFLSCIGKDTTKPLDEFILTGVVKEYIQQKNLFKDRKRKSVICDDKLHSLFRKRKVKSNMILNLLEIHLAANAASEDDFLDDSEDDEGRIMRKRPCNTLKAAETSERDPKRNKKCFAALNHNNLKLIYLRRTLIMNLMGQDTFEQKVVGSLVRVKNDDNHYSYQMPKKHYQLGLVTGIRKSPQEYKIKDKRTDILLCVSNLWDDIKISMLSEEDIEEDECNDLLLLAKKGLFKRPTVADLEEKAASIHVDIVNHYATQCATGHVPNSVKVLMEDSRGATGHIADSVKVLMEGLPGGATARVADVFNVDMAKSQDASGQVTDYLEVVEEETPEDASGQVADILDVVEEEPPEDASGQVADILELVEEETSEDASGQVASILEVVEEETPEAPGKDLCNGGIPGSGLQNKMHNAQDGGTAQGSDMCNGGNTSRRLNDRKSVIVIDSDSDEDEDPHPEQHEPERAAPRAAMDVVMAPTHGAPVAMNGTSAPTLPCAKRGKNGTTAPKGRVPAIAALHALQSMNAP

SEQ ID NO: 17598 - protein, 1563 aa, Oryza sativa
  Clone ID: TF_OSC422386j.C1.p2.fg
MRAPQERTVRDLYDRTRHKDLALPEESVEGRGSGRRVEGPGHREVVAKMEMLGGDSDPTMLSTIRDKLTARKRPVPLDSPNVKTESGTCNVCCAPCSSCLHRNIALTDSNMDCGSSQTCFARSETKNSSFVRVDKGLRTKAKGGENDDEFSATSSPASYSENGENKVIARSSVAADSEVDKPAKRRRLVNHGSRSPIVECHDDSNSCVTGVSAASKLLLDKKKDKLSTSASSRDLTVNYKDNGINRLRNYCAEESTGKKRSDVHAMHRSSSDRSLPAESPFATKRLLRTQSSLSASHGLSPKRPTHEFGNAQNNLAHQPCEKASSNKTVERSLGGKSDPSVLGGERHSMMTSCGTSNRDKIKAGSLTKNLENGTSCSRNGSLEHADIQSNDAVNRNDNDKQERNQGCSMDTGSGRKLNTQNDVMTDSGNSEGLIDVNVCDICGDVGREYLLATCTRCLEGAEHTYCMRVKLEKVPDGEWLCEECCLKEDENQTRSNGGTSRNKVLDGKNQNSESTNNSKTLKVVVTDLDSQQITCGTPVNDPLAGSNQKLHLASSDLEARQVKCATPTAERLDVKNKNSGIMGNRKKLQVVTSSLEARQSSCRTPTSGSLDKKNQSLDKRSQSSEVLLKRKKLRVATDMESPLSNDGVRSPPKSCKRYAENTLSSTPRLLKADSPRNHDVFSRENSFKSSNKGSIKSPDNAPMRSQAVNSSVTLPRSYSLGNLANVKTPGPSPRGLLSKQPSFNNSSNEPKVKQLAEPVLSKLKPSKHSPRDPRESIRKVMKSGPLKHEASICKGSSSSKQKQSVHSSQNEQPRILKPVKPTILLERGASFNLQKPNISSSPRPDSSIKSGDPRNDQDSPRPGPSILKSSKKPGIVENKHSSILSKSDEQGITSTGVVCSKDTCVVKASDPLIPMDKIKNDSTDGACESPLILVNNDNEMSTKPEVLSIPRASKTCGSDFQDIAPTSSSEDLPPEEVQYEQKVVESDGNISCKSAAAIQASEDLLPESPQGCLVAQNPYSPDTKSNDLNLKQQALVDQSSTVGSSLGALVIPEQSYIWQGTFEVSRPGSSPEMYDGFQAHLSTCASLKVLEIVKQLPQRIQLVEVPRHSSWPLQFKEVKPNEDNIALYFFAKDVESYERAYGKLLENMLAGDLSLTANICGIELLIFTSDKLPERTQRWNGLLFFWGVLYARKASSSTELLVKGMNHSPLEQINGPVNQLVCSPKMPQSLGIDLNECPVDELYDPAVSVQTEMENRGASVNHETLLRSNHEAERLNLCEIHFPETAGTGKILLGTPTAVPYGVHVHTSSKRECLNIKPEYPSDIIGSEGTAGRDNMEEEESFTKNGVPCFTKQHTGATTRSVSDEILANTQARVSFQEVSPQHSVRPKLSDDPSDSVLKDFVLPDSSSIYKRQKTSEGKYSTCSFGDGQLTSKCLSKIPLPADQHTSLDDVQYIGRVPADPCSPTKPILDHVIHVLSSDDEDSPEPRNNLNKTSLKEEEGPSPLLSLSLSMASKKHNLTGSDTGDDGPLSLSLGLPGVVTSNQALEMKQFLPEKPGMNTSLLL

SEQ ID NO: 17599 - protein, 171 aa, Oryza sativa
  Clone ID: TF_OSC400235j.C1.p43.fg
MAGAGTVCSMCGDVGFPDKLFQCARCRYRFQHSYCTNYYGDAAPAPAGADMCDWCLSDVAGKARYSSAAGKQQGAGSQESSTTTSSSSAGRGGGGKPGAGEQESGRRGTKAAGRSFGAGELRSNWPSRTLHAAKPSHVDVGVNESYPKTQSGRQRHAPTQTSSSARPPLYE

SEQ ID NO: 17600 - protein, 466 aa, Oryza sativa
  Clone ID: TF_OSC400822j.C1.p33.fg
MAGEGSGGEGGAGAFEDEAEPTVTIGEYIEGIEAEELEADLVLGGDDGKECTYGGGYLKRQAVFSCLTCVPAGVAGVCTACSLACHDGHELGLVSMFIWVRRMSATRVILGVALAVAKLSIAIFCIKYLYDWVMRTQLMLGWFFLLKVVELWTKRKFRCDCGNSKFGSHVCKLCPEKDPENPVNSYNHNFKGSYCTCGRPYPDPEAEKQVEMIQCCICEDWFHEDHIGLNSIEEIPRDEEGEPLYEDFICPKCSPKCYFLKLYPDTIWASNKQSSAPQAETTNSTVMNGNSSLGDIEKSENGALINHLNCEKTSDNENCPKDSVAPEKASLDDSSDGKCKLGMNICSNTPSADSEKKMPFFMSKSWREVICRCETCTDFYAQQGVAYLIDKEDSIEEYEKVAKQKREKKLEQQEGVEANFLNSLDHVQKIEILSGINDMKNELQSFLSISQINGDTSHVSVSGFEF

SEQ ID NO: 17601 - protein, 639 aa, Oryza sativa
  Clone ID: TF_OSC17126j.C1.p1.fg
MIAAGIRKKPRKRAKKAAAAGSKVTVPADVIIVDDDVNQPSSNTDAQSNADDDLKKAAVASPAATRSKTRSKCKTSSNSAAASPSARSSAIAARKKNNATATGTTATPPPPEAKKHTVLTWLIDTGFLKDKAKVFYVPGDAGAAEKVISGMVTKTGIRCRCCNTVVPVAVFETHARCERPGQPWEKLLLMSGKPLSKCMQEAWAQERVTAMRAREKAMASLEQEKEKSSQAKRKLAKTKKMQLLDGVVVVSTSSPRHQVKKNGGGKDCSDDACGVCADGGQLLCCDTCPSTFHPDCLAIQFMIKSWLLFDRQQLTTIYGQQPWLQTAPGAAISADHQYCRPLQSPGFEIGAYCSETCKKMSSHLSDMIGVMNHTEDGFSWALLKIQKDELVTSEDMPVILESNVKLAVALGVLNECFNPVQDRRTKIDMLHQAVYSLGSEFKRVNYEGFYTMVLEKDGEIISVALLRFHGRKLAEMPFAGTLPAYQKQGMMRRLVKAVEKVLASLQVENLVIPAVADLVETWKRSFSFRPMQAEVRDEAKKLSLVAITGTTLLQKPISAHQQQPVPSRKGSSSSRSKRASAPATVTGSSKEEEEQMTTTAARLTDDELAFLEMAPLCSFTDLLAGGVYPTGLQLLRGMK

SEQ ID NO: 17602 - protein, 897 aa, Oryza sativa
  Clone ID: TF_OSC401197j.C1.p46.fg
MSSSAAPARKENGTVAAPAASSAAASNTFHVLNSGSAAAAVAAGRAYVQSPRATALRSPQVRAITNYGMFPTTGASAARTAMAGRTINGGASMLTTTTTTTTPPHLIQQLMVLAGWTTRSPWLQNHASMSPRGSPSSFSSGRFSDPRGMPSTFAYRTPGASSGRVIDNGAVAGRGKQMAGTSRSLEIIAVDTGAGSSKNASPAGGHANAGVVVKRLAPVLAMPSAGAAGKGKEEAAAAAAAPSPNGRGRKRAPPKVSNDPAAGSDKKPRKRAKKAAAAGSKVTVPADVIIVDDDVNQPSSNTDAQSNADDDLKKAAVASPAATRSKTRSKCKTSSNSAAASPSARSSAIAARKKNNATATGTTATPPPPEAKKHTVLTWLIDTGFLKDKAKVFYVPGDAGAAEKVISGMVTKTGIRCRCCNTVVPVAVFETHARCERPGQPWEKLLLMSGKPLSKCMQEAWAQERVTAMRAREKAMASLEQEKEKSSQAKRKLAKTKKMQLLDGVVVVSTSSPRHQVKKNGGGKDCSDDACGVCADGGQLLCCDTCPSTFHPDCLAIQFMIKSWLLFDRQQLTTIYGQQPWLQTAPGAAISADHQYCRPLQSPGFEIGAYCSETCKKMSSHLSDMIGVMNHTEDGFSWALLKIQKDELVTSEDMPVILESNVKLAVALGVLNECFNPVQDRRTKIDMLHQAVYSLGSEFKRVNYEGFYTMVLEKDGEIISVALLRFHGRKLAEMPFAGTLPAYQKQGMMRRLVKAVEKVLASLQVENLVIPAVADLVETWKRSFSFRPMQAEVRDEAKKLSLVAITGTTLLQKPISAHQQQPVPSRKGSSSSRSKRASAPATVTGSSKEEEEQMTTTAARLTDDELAFLEMAPLCSFTDLLAGGVYPTGLQLLRGMK

SEQ ID NO: 17603 - protein, 1116 aa, Oryza sativa
  Clone ID: TF_OSC100733j.C1.p4.fg
MEASAGLVAGSHNRNELVVIRRDGDPGPKPLRQQNGQVCQICGDDVGLNPDGEPFVACNECAFPVCRDCYEYERREGTQNCPQCKTRFKRLRGKSHPQCRIGCARVPGDEEEDGVDDLENEFNWRDRNDSQYVAESMLHAHMSYGRGGVDVNGVPQPFQPNPNVPLLTDGQMVDDIPPEQHALVPSFMGGGGKRIHPLPYADPNLPESAKGSCATVQPRSMDPSKDLAAYGYGSVAWKERMESWKQKQERLHQMRNDGGGKDWDGDGDDGDLPLIFSPVELLYHFGWTKMDEARQPLSRKVPIPSSQINPYRMVIIIRLVVLGFFFHYRVMHPVPDAFALWLISVICEIWFAMSWILDQFPKWFPIERETYLDRLTLRFDKEGQTSQLAPIDFFVSTVDPLKEPPLVTANTVLSILAVDYPVDKVSCYVSDDGAAMLTFEALSETSEFAKKWVPFCKKYSIEPRAPEWYFQQKIDYLKDKVAPYFVRERRAMKREYEEFKVRINALVAKAQKVPEEGWTMQDGTPWPGNNVRDHPGMIQVFLGQSGGHDIEGNELPRLVYVSREKRPGYNHHKKAGAMNALVRVSAVLTNAPYMLNLDCDHYINNSKAIKEAMCFMMDPLVGKKVCYVQFPQRFDGIDRHDRYANRNVVFFDINMKGLDGIQGPIYVGTGCVFRRQALYGYDAPKTKKPPSRTCNCWPKWKSKKKTTKPKTEKKKRSFFKRAENQSPAYALGEIEEGAPGAENEKAGIVNQQKLEKKFGQSSVFVASTLLENGGTLKSASPASLLKEAIHVISCGYEDKTDWGKEIGWIYGSVTEDILTGFKMHCHGWRSIYCIPKLPAFKGSAPLNLSDRLHQVLRWALGSVEIFFSNHCPLWYGYGGGLKCLERFSYINSIVYPFTSIPLLAYCTLPAICLLTGKFITPELTNVASLWFMSLFICIFATGILEMRWSGVGIDDWWRNEQFWVIGGVSSHLFALFQGLLKVIAGIDTSFTVTSKGGDDEEFSELYTFKWTTLLIPPTTLLLLNFIGVVAGVSNAINNGYESWGPLFGKLFFAFWVIVHLYPFLKGLVGRQNRTPTIVIVWSILLASIFSLLWVRIDPFLAKNDGPLLEECGLDCN

SEQ ID NO: 17604 - protein, 1256 aa, Oryza sativa
  Clone ID: TF_OSC403261j.C1.p1.fg
IGTSSDVEFCARYYNHCDVVKVVQILASSDAYTDICRRMTEYWSHLLDIFQNERSKISKEVGRSLMSQSNILSTATPVKANNGSVQATLKDGQDSKMAVLSQTNAHQVMDNQFTLCSANNNEAFRQTPLAKTYVDNAYRNGAFGPSGTSSISHQSMSMVTVMPNRTQAQPAHGLIRPDLSCGSVIGNGMSRENIRSSISARADLISPPYKSKPPVQLITENMSGGKPAKFSSFRPQAYMNLYNHGNVAASAAANLAVLKSDEGKAPTSHLTTNQRKKLAADCALQVKAFSSAALQFVWPSTEKKVMEVPRDRCGWCLACQSSAGGTKKACFLNMATANASKGSARILSGMRLIKNSDSHFPSIVTYLSHMEESLRGLLVGSLQDVQRRQQWYNQLKDASNCGNIIPLLLELESNIRGVAFSTSWLKLIDDWPVESPSASAGASRPAAYQKRGTGGRRGRKRSMASESAPVTDDDNSWKEVNWWSGGNVSKRILQRGALPILTIRKAARQGGKKRMFSVSYHEGSNFPRRTRQLAWRACVGLSQSSSQLALQVRYLDSHIRWKEFIPPDQIPSEGKSVDSDYSVLRNAVVCDKKIVDNKIRYALKFPNQKHLPVRVTKNILEAEDNQDGDGKFWFSENHIPLYLLREFEQKAGVSSLPTPGMLDSNCFANFYQRRVKSSIGDVFFYLLHKGDVYPCTSCKKDVSFRDIIKCSSCQGNCHKECTLRSVGSKGGNAASSLTCKLCLQKRSLMLTNYNTNASFILPQQKSNVHHAVAAPKIIFKVGSSHSAEPATKVEAPPIVKVEAQPVVKKETWPVVKMETQPTANVEAQPTAKVEAFPISNLATQNNAGAQVQPKTKSKKPKPEKPRKSKKTEEIKYFGLVWKKSTNDKNNNENSGEVFRANDVILKGKDGVGSSIKPTCCLCNKPYCPDFLYVRCERCKKWFHGDALQLEEEKIFELVSYRCCRCRRRAIPKCPHSDDYKKPEPEYSEQTVATSSQSTMLSSEENFAVADQDPLLASYGRVEPFGAQTMDADLSMNMMSFNPGNQKLSVRRGQNKNCEYVDQSSIHVDDYYIQNQPQGNANINFSHSNEFSLSEADGVDASELLGWDFSQGNTSAAPSDFAANCPWNDISCGSVAGDEYEPQTYFSFTELLEADDTQFDNTFGMSNSVQDDGDQQGIGFDEMAFMMEDGASNMPFPAIDSASDEVACDRCKNPQPPPDLKCAVCGLQMHRHCSPWEDGEQPSDSADWSCGACREWR

SEQ ID NO: 17605 - protein, 1092 aa, Oryza sativa
  Clone ID: TF_OSC404183j.C1.p2.fg
MEASAGLVAGSHNRNELVVIRRDGEPGPKPVKHTNGQVCQICGDDVGLTPDGEPFVACNECAFPVCRDCYEYERREGTQNCPQCKTRFKRLKGCARVPGDEEEEDVDDLENEFNWRDKTDSQYVAESMLHGHMSYGRGGDLDGVPQHFQPIPNVPLLTNGEMADDIPPEQHALVPSFMGGGGKRIHPLPYADPNLPVQPRSMDPSKDLAAYGYGSVAWKERMESWKQKQERLHQMRNDGGGKDWDGDGDDADLPLMDEARQPLSRKIPISSSLVNPYRMIIIIRLVVLGFFFHYRVMHPVPDAFALWLISVICEIWFAMSWILDQFPKWFPIERETYLDRLTLRFDKEGQQSQLAPVDFFVSTVDPMKEPPLVTANTVLSILAVDYPVDKVSCYVSDDGAAMLTFEALSETSEFAKKWVPFCKRYSLEPRAPEWYFQQKIDYLKDKVAPNFVRERRAMKREYEEFKVRINALVAKAQKVPEEGWTMQDGTPWPGNNVRDHPGMIQVFLGQSGGHDVEGNELPRLVYVSREKRPGYNHHKKAGAMNALVRVSAVLTNAPYMLNLDCDHYINNSKAIKEAMCFMMDPLVGKKVCYVQFPQRFDGIDRHDRYANRNVVFFDINMKGLDGIQGPIYVGTGCVFRRQALYGYDAPKSKKPPSRTCNCWPKWCICCCCFGNRTNKKKTAKPKTEKKKRLFFKRAENQSPAYALGEIDEGAPGAENEKAGIVNQQKLEKKFGQSSVFVASTLLENGGTLKSASPASLLKEAIHVISCGYEDKTDWGKEIGWIYGSVTEDILTGFKMHCHGWRSIYCIPKRAAFKGSAPLNLSDRLHQVLRWALGSIEIFFSNHCPLWYGYGGGLKCLERFSYINSIVYPWTSIPLLAYCTLPAICLLTGKFITPELTNIASLWFMSLFICIFATGILEMRWSGVGIDDWWRNEQFWVIGGVSSHLFAVFQGLLKVIAGIDTSFTVTSKGGDDEEFSELYTFKWTTLLIPPTTLLLLNFIGVVAGVSNAINNGYESWGPLFGKLFFAFWVIVHLYPFLKGLVGRQNRTPTIVIVWSILLASIFSLLWVRIDPFLAKNDGPLLEECGLDCN

SEQ ID NO: 17606 - protein, 1574 aa, Oryza sativa
  Clone ID: TF_OSC400188j.C1.p8.fg
MGRRKSRPARAVGLGPGAAAAAEPDAPSPSGSGGASKSRRAAKGEARRREDVCFEVDDSTWCLSDGDRRDLAELVMRDVRISGEGEGALDVAALHEAEREKRCSLRLRVRDAPEEGFRLGQWPVVPSDCVILEYAIAGMVFSGCFDGPDEGVSGLAHLVRLRFVTLRVHAFAVSRSADSVSVASFRVRLGLMEQAFATCESLLEVTRHPWRKSFMNMMAWVRPEVMTSAAIYGMDGLARPINGGANGDFTPKKDSQFDLAAFYEAVKPSMEAGLLEEELPDLLPHLRTYQLRAANWMVQREKGNTMISSPNQHYVHSAPYCVPIDFMHKKSRMFYNPFNGNVSMHPEPSPPYVSGGILADEMGLGKTVELLACIFAHRRPYSADCSVSSNIKGADQIKRHKRERVECICGAASVTSAYQGIWIQCDICDAWQHASCVGYSPKEEMHVDDDDGDEASNNEKGTLKSKNRRKKKDRHTRPGSLKVCIYEGAKNTDLTSTQKSDMAEISTADIVLTTYDVLKEDLSHDSDRHDGDRRFLRYQKRYPVTPTVLTRVHWWRLCLDEAQMVESSKTSVTEMAMRLNAQHRWCITGTPIQRRLDDLFGLLRFLKTHPFDTYRWWVDIIRDPYEKGDMVAMNYAHKFFKEIMWRSSKIHVSRELQLPPQEECFSWLIFSSIEEYFYQKQHATCMDHAHEIIRRIRDDANKSEPISDSNVVSNLYLSNDDIAKLLVPLLKLRQACCHPQVGSFGLCSLQRTPLSMGEILQVLIGKAKVEGEEELRKIVVALNGLAGLAVIEQNNQEAISLYKEALALACENFDDFRVDPLLNLHINHNLAELLRASSEYLQECPLKEQTSEVHGARKRKETSPADSETSKEDKNINTQVCGSEEMDVENDSGCHTSSVSTLSMELQNQNMNWWLYALDCIEQNKDSADELIRKIDISSNKSTTGLGSTGMSSRVQTIAGLKYTIQTGIDSLQSSRQQVMDRLLELDKTMDSPKDEDIECQRYCPNCYDGNGSLCIQCELDDLFQGYEARLFLVKKSNNDSVIASVEEARDLQRRKYELNQFFRNTKTNEGSEPGDDNKNPRSAREGFLVYRHPSRIETSLRVILTHSKTIMGEQSAKIAKKNLLLFEAMRKEFSQARNLSIAQTQLLRAHDEIKMSLSRLQLKEKDDEPSAVNIVTREELIPYNVQFTSEKFLSLSSLARIRGQLRYLKGLVLSNKKPLGKHGESLPESGNSVAIATSIPATGQTASDIINEPCPICQEKIFDQKMVFQCGHFVCCKCCLYMTEQAAAHFGRSKKWIMCPTCRQRTDLENVAFVVENQRGNADREIEDLAESAISVQGSYGTKIEAVTRRILRITSTDGAAKILVFSSWNDVLDVLEHSLAANNISYVRMKGGRKSQTALAQFKGLASSISGEKAKKSFSKMQPAQVLLMLIQHGANGLNLLEAQHVILVEPLLNPAAEAQAISRIHRVGQDKSTFIHRFIVKNTIEESIYKLNRGRAVCSTIHRKSKNFKDELVLTLKDIESLFPVATLDQPSEQENKNYGGAGGHMRSLPPSVAAGLAAERRLLEQHDNQH

SEQ ID NO: 17607 - protein, 95 aa, Oryza sativa
  Clone ID: TF_OSC401336j.C1.p5.fg
MEASAGLVAGSHNRNELVVIRRDGGGGGGVGGRRAAEAKAACQICGDDVGEGPDGEPFVACNECAFPVCRNCYDYERREGSQACPQCKTRFKRLK

SEQ ID NO: 17608 - protein, 1189 aa, Oryza sativa
  Clone ID: TF_OSC900180j.C1.p3.fg
MAANAGMVAGSRNRNEFVMIRPDGDAPPPAKPGKSVNGQVCQICGDTVGVSATGDVFVACNECAFPVCRPCYEYERKEGNQCCPQCKTRYKRHKGSPRVQGDEEEEDVDDLDNEFNYKHGNGKGPEWQIQRQGEDVDLSSSSRHEQHRIPRLTSGQQISGEIPDASPDRHSIRSGTSSYVDPSVPVPVRIVDPSKDLNSYGINSVDWQERVASWRNKQDKNMMQVANKYPEARGGDMEGTGSNGEDMQMVDDARLPLSRIVPIPSNQLNLYRIVIILRLIILMFFFQYRVTHPVRDAYGLWLVSVICEIWFALSWLLDQFPKWYPINRETYLDRLALRYDREGEPSQLAPIDVFVSTVDPLKEPPLITANTVLSILAVDYPVDKVSCYVSDDGSAMLTFEALSETAEFARKWVPFCKKHNIEPRAPEFYFAQKIDYLKDKIQPSFVKERRAMKREYEEFKVRINALVAKAQKVPEEGWTMADGTAWPGNNPRDHPGMIQVFLGHSGGLDTDGNELPRLVYVSREKRPGFQHHKKAGAMNALIRVSAVLTNGAYLLNVDCDHYFNSSKALREAMCFMMDPALGRKTCYVQFPQRFDGIDLHDRYANRNIVFFDVFLGHSGGLDTDGNELPRLVYVSREKRPGFQHHKKAGAMNALIRVSAVLTNGAYLLNVDCDHYFNSSKALREAMCFMMDPALGRKTCYVQFPQRFDGIDLHDRYANRNIVFFDINMKGLDGIQGPVYVGTGCCFNRQALYGYDPVLTEADLEPNIVVKSCCGGRKKKSKSYMDSKNRMMKRTESSAPIFNMEDIEEGIEGYEDERSVLMSQKRLEKRFGQSPIFIASTFMTQGGIPPSTNPASLLKEAIHVISCGYEDKTEWGKEIGWIYGSVTEDILTGFKMHARGWISIYCMPPRPCFKGSAPINLSDRLNQVLRWALGSVEILLSRHCPIWYGYNGRLKLLERLAYINTIVYPITSIPLIAYCVLPAICLLTNKFIIPEISNYAGMFFILLFASIFATGILELRWSGVGIEDWWRNEQFWVIGGTSAHLFAVFQGLLKVLAGIDTNFTVTSKASDEDGDFAELYVFKWTSLLIPPTTVLVINLVGMVAGISYAINSGYQSWGPLFGKLFFSIWVILHLYPFLKGLMGRQNRTPTIVIVWSILLASIFSLLWVKIDPFISPTQKAVALGQCGVNC

SEQ ID NO: 17609 - protein, 1093 aa, Oryza sativa
  Clone ID: TF_OSC401656j.C1.p43.fg
MAKTLQGTQQQYAASGFPTQQYPTSGWTQSAAEILQLDNMDQDTSVVRNIIHRKIVEYLNERKEFCNFDLSFLMEIGKCIDRHLFEKADSKIKYMDLETLRTRLNAIVNSASFRGRYNQYENCMGAANFAHSLADKPKQMPERLANTIFTSCASTLPKCSPSIDVLHIGHIKEHFSGDAYQNDSSQPSTSGSSSSLSAVWDQTTCSSAMRTLPMDSFSTVNGQNLSTNNKSLYPTTGQGPLLQQYIECEMKQETWSRSLEQSDQSNITTGNRDLYHAQIHPYINGEHKRDRCIQMKEKLGHTSDHEGFSREKSSNLSNHFMHHQQGFMTNYGACSPVSKTVDRAEQTSNSTVSKPTSPASDGSSGKHYPAKRLKVDVPHLVHVNEMEASKEQQPAANETYASAETVQSEVTNSPTKSPCCTSLGDNIACTDNVHGMDMVRLSGSAVQTEEEFRRENSDIEMKDAKVDLLDQTLSGDSLRARKRRGASVLYALTSEELKDHLCTLNHDTSQSKVPTEELLSVEGLPDQNTCNLCGMERLLFEPPPRFCALCFKIINSTGSYYVEVENGNDKSSICGRCHHLSSAKAKYQKRFSYAETDAEAEWWVQCDKCKAWQHQICALFNPKIVDPEAEYTCAKCFLKEKDNEDVDSLEPSTILGARELPRTRLSDHIEQRLSERLVQERQQRAIASGKSVDEVPGVEGLTVRVVSSADRTLQVQPRFKDFFKKEQYPGEFPYKSKAILLFQKNEGVDVCLFAMYVQEYGSACPSPNQRHVYLAYIDSVKYFRPEIKSASGEALRTFVYHEILIGYLDFCKKRGFVSCSIWTCPSTKRDDYVLYCHPTIQKMPKSDKLRSWYQNLVKKAVKEGVVVERNTLYDFFLQPTNECKTNISAAWLPYCDNDFWPGEAERLLEKKDDDTSQKKETQLGRLLRVAKRDDRKGNLEDILLVHKQFCKHCHHPIVSGSSWVCTSCKNFFLCERCYAEELNTPLKDRHPATTKQKHAFERDYLEGLVHASRCFDRSCTSKLCLTLKKLFFHGVRCHTRARGGGGCHMCVFMWKLLFTHSLLCDNADCSAPRCRDIKAYIADRSMTDLSISG

SEQ ID NO: 17610 - protein, 767 aa, Oryza sativa
  Clone ID: TF_OSC419836j.C1.p17.fg
MALDPADDPLLADCKYKLNHFRIKELKDVLHQLGLPKQGRKQELVDKIIAVLSDQQEQDSRLNGLPNKKMVGKETVAKIVDDTFAKMNGSTNAVPASRNQTDSGHIVKPKRKSDDSAQLDVKVRCPCGYSMANDSMIKCEGPQCNTQQHVGCVIISEKPADSVPPELPPHFYCDMCRITRADPFWVTVNHPVLPVSITPCKVASDGSYAVQYFEKTFPLSRANWEMLQKDEYDLQVWCILFNDSVPFRMQWPLHSDIQINGIPIRVVNRQPTQQLGVNGRDDGPVLTAYVREGSNKIVLSRSDSRTFCLGVRIAKRRSVEQLVGYGQNSVDSLSIYNTSWYLGGTWQLLRFRNPVLFIKGPLNFHSIQVLSLVPKEQDGENFDNALARVRRCVGGGTEADNADSDSDIEVVADSVSVNLRCPMTGSRIKIAGRFKPCVHMGCFDLEAFVELNQRSRKWQCPICLKNYSLDNIIIDPYFNRITALVQSCGDDVSEIDVKPDGSWRVKGGAELKGLAQWHLPDGTLCMPTDTRSKPNIRIVKQEIKEEPLSEETGGRLKLGIRRNNNGQWEINKRLDSNNGQNGYIEDENCVVSASNTDDENSKNGIYNPEPGQFDQLTSNIYDLDSSPMDAHFPPAPTEQDVIVLSDSDDDNVMVLSPGDVNFSSAHDNGNAFPPNPPEASGICGEQPRGAGPDVTSFLDGFDDLELPFWESSSSQDAAGTQVTDNQCEMQNFIVNHQFLHEPILGVNLGGTAASNTLECEHDGALQA

SEQ ID NO: 17611 - protein, 1055 aa, Oryza sativa
  Clone ID: TF_OSC900335j.C1.p17.fg
MEASAGLVAGSHNRNELVLIRGHEEPKPLRALSGQVCEICGDEVGRTVDGDLFVACNECGFPVCRPCYEYERREGTQNCPQCKTRYKRLKGSPRVPGDEDEEDIDDLEHEFNIDDEKQKQLQQDQDGMQNSHITEAMLHGKMSYGRGPDDGDGNSTPLPPIITGARSVPVSGEFPISNSHGHGEFSSSLHKRIHPYPVSEPGSAKWDEKKEVSWKERMDDWKSKQGIVAGGAPDPDDYDADVPLNDEARQPLSRKVSIASSKVNPYRMVIILRLVVLGFFLRYRILHPVPDAIPLWLTSIICEIWFAVSWILDQFPKWYPIDRETYLDRLSLRYEREGEPSLLSAVDLFVSTVDPLKEPPLVTANTVLSILAVDYPVDKVSCYVSDDGASMLTFESLSETAEFARKWVPFCKKFSIEPRAPEFYFSQKVDYLKDKVHPNFVQERRAMKREYEEFKVRINALVAKAQKVPAEGWIMKDGTPWPGNNTRDHPGMIQVFLGHSGGHDTEGNELPRLVYVSREKRPGFQHHKKAGAMNALIRVSAVLTNAPFMLNLDCDHYINNSKAIREAMCFLMDPQVGRKVCYVQFPQRFDGIDVHDRYANRNTVFFDINMKGLDGIQGPVYVGTGCVFRRQALYGYNPPKGPKRPKMVTCDCCPCFGRKKRKHGKDGLPEAVAADGGMDSDKEMLMSQMNFEKRFGQSAAFVTSTLMEEGGVPPSSSPAALLKEAIHVISCGYEDKTDWGLELGWIYGSITEDILTGFKMHCRGWRSVYCMPKRAAFKGSAPINLSDRLNQVLRWALGSVEIFFSRHSPLLYGYKNGNLKWLERFSYINTTIYPFTSLPLLAYCTLPAVCLLTGKFIMPPISTFASLFFIALFISIFATGILEMRWSGVSIEEWWRNEQFWVIGGVSAHLFAVVQGLLKVLAGIDTNFTVTSKATGDEDDEFAELYAFKWTTLLIPPTTLLILNIIGVVAGVSDAINNGSEAWGPLFGKLFFAFWVIVHLYPFLKGLMGRQNRTPTIVVIWSVLLASIFSLLWVRIDPFTIKARGPDVRQCGINC

SEQ ID NO: 17612 - protein, 681 aa, Oryza sativa
  Clone ID: TF_OSC20379j.C1.p1.fg
MPRPSTSASATASRFAAFWAADALAGDDALDFAVTKAMVGVSPDSVRAAPEAVRERVALRCLQEVVSLASSDGERGATASAIAAPGEGMLGVEDASRTCEDLLLQLIREVGSSGSLEKDMLPPFRQDIQKFICIKRPTLPETSFELLRKVYPEITPVVPPSPVEQNGNDQHDNISHDLVNTEKTGFTTDGAQLQQDDLANLVDERNTENLQKDAMATSDFQQPCTSDNRCFDQRQEDSINTVGVNIRSPEDSPTNVNRHMSVAAEPSLASSADLLGSNTGRMSEQDTIDHTTIVQSQSCGVRYPNKHHSNNGDMPLVASIQSPKDSIHEGSTMQTTVSPAVDRSNDALPASNMTHLPEFIAVEDKIMTSEPHFSKTHPNSGQHDTGDKANQDVGCGSTGIQTAAALPSEGFNGDVQGDKSEIKDPAGNTTQHTETFEQENSDKAHLEVGCSDKVNQALYDDGNIIKNNMVFGGLNKQTALESHGCSMTLHNRNSEANHFSEQNIGRNRTEVQNDCCSIPTSPNDVNDKRAKQASNKETMANTVAETLHVHSSDGSFSGFAAGGLLSMAEKLPFCTQDQYANGTVEGLSEQELCIKCGKDGQLLKCSGCFLAVHDTCFGSSVTFDDSGQFYCPVCFYTKATEAYQKAKKTYSEARKNLSAFLGRKQLAEQYQQAAVRQKAAN

SEQ ID NO: 17613 - protein, 850 aa, Oryza sativa
  Clone ID: TF_OSC900210j.C1.p1.fg
MVGVSPDSVRAAPEAVRERVALRCLQEVVSLASSDGERGATASAIAAPGEGMLGVEDASRTCEDLLLQLIREVGSSGSLEKDMLPPFRQDIQKFICIKRPTLPETSFELLRKVYPEITPVVPPSPVEQNGNDQHDNISHDLVNTEKTGFTTDGAQLQQDDLANLVDERNTENLQKDAMATSDFQQPCTSDNRCFDQRQEDSINTVGVNIRSPEDSPTNVNRHMSVAAEPSLASSADLLGSNTGRMSEQDTIDHTTIVQSQSCGVRYPNKHHSNNGDMPLVASIQSPKDSIHEGSTMQTTVSPAVDRSNDALPASNMTHLPEFIAVEDKIMTSEPHFSKTHPNSGQHDTGDKANQDVGCGSTGIQTAAALPSEGFNGDVQGDKSEIKDPAGNTTQHTETFEQENSDKAHLEVGCSDKVNQALYDDGNIIKNNMVFGGLNKQTALESHGCSMTLHNRNSEANHFSEQNIGRNRTEVQNDCCSIPTSPNDVNDKRAKQASNKETMANTVAETLHVHSSDGSFSGFAAGGLLSMAEKLPFCTQDQYANGTVEGLSEQELCIKCGKDGQLLKCSGCFLAVHDTCFGSSVTFDDSGQFYCPVCFYTKATEAYQKAKKTYSEARKNLSAFLGRKQLAEQYQQAAVRQRAANSEDHFNGCNNAIKRQGNHQSEGNNLSHRDEEPARQRKKQKTNARDACTQEVVTKKAPTVHNSDVVSMKKNSVLQNNRKQAQVAEQEQPEENAEASGESGNTNSSHKTAHSSQNKCSPAASQNIDADKEDVLASSQQSEDSDEIEATSSSDPSKQPSPHWRKLRHRKARYQDNNTAIPINSKKTLGHHDQHMASPSRKRNYAYPPKR

SEQ ID NO: 17614 - protein, 123 aa, Oryza sativa
  Clone ID: TF_OSC4045j.C1.p1.fg
MASGGTVCSMCGDVGFPDKLFRCARCRRRFQHSYCTNYYGDGAPVEAGAGVCDWCLSDAAVVAGKKGPSSEGNEEPFSREYRGRSKQAASTGGGEQEGGGGGGRRVSKAGAVRRYKLLKDVLC

SEQ ID NO: 17615 - protein, 708 aa, Oryza sativa
  Clone ID: TF_OSC400792j.C1.p5.fg
MEDAWRKAKRALGLGLCVHVPEAEEGEREDCSSERRRRLPAAASGARCRGEAAVTVGPESVPAPSDVPVPLPLPGVVRRSKSGSSRSSSKRKCAICFDSMRHGNGQALFTAECSHMFHFHCISSNVKHGNYFCPICRAKWKEIPFNRSLSSNIPHGRIGVSRARLTQQDANMALLHQVPNHHQRVRRPHTSEPADFNDDEPLQQPEVFDNLNVRSTKTAEINTYPEFSTIPQSSSKDDFAILIHLKAPSANPDQGTGKLANESSAGSSRNRAPVDLVTVLDVSGSMAGTKLALLKRAMGFVVQHLGPSDRLSVIAFSSSARRLFHLQRISHHGRQQALQAINSLGASGGTNIADALKKAMKVIEDRSYKNSVCSIILLSDGQDTYNISSSVQGASPDYKSLVPSSIINDARHTVPLHAFGFGADHDSDSLHSIAQASGGTFSFIEDEGVMQDAFAQCIGGLLSIVIQEMRVSMECVHPGVQLSSIKSGSYPSKVARDGRNGSVDIGHLYADEERDILLSVNIPQSRHQTSALKVSCAYRDPVTGETIKIQGDEVKINRPTTSNISEHVSIEVDRERNRIQAAESIECARAAAEKGALSEAVAILEDCRRTLSQSFASRSGDRLSLSLDAELREMQERMANRQLYESSGRAYMLSGLSSHSWQRATARGDSTDSSTVIYSYQTPSMVEMLQHSQNHLPSPQGRQRPRPR

SEQ ID NO: 17616 - protein, 1623 aa, Oryza sativa
  Clone ID: TF_OSC900208j.C1.p7.fg
MSGQAPQTNQVGGSGVGGADGLPQQMQDVVGLGGLDTQFLLMRNTMRDRIFEYIGRKQSSTDWRRRLPELAKRLEEILYRKFLNKADYLNMMRGPVEPQLQFAIKTLSAQNQQNQQNQQMPRQMASSSGYGTMIPTPGITQSATGNSRMPYVTDNTGLPSSGATMVPQGANTGTSLPGSMSNGYQHLTTSVPLNSTTSSIPSTMGPVGIQRQVTHMIPTPGFNNQQNVPVNPDFSNGAGYFNGEPTVTSQMQQQKQFPSNQNSHQIQHIGGHSNSGMHSNMLENSSAYGLSDGHVNGGMGVHGSNMQLTNRSAASEAYINISTYGNSPKPVQQQFNQHPPQRIPTPVDISGSGNFYNTGSSALTAANNHSMGATNLPSRSRMNSMLHTNQLNMQSIQPQPQIKTEVLDQPEKMNFQSSQLTHEQLIRQQHSMQQHQMQPSSQFVQNQYHLNQQQPNSQHQQSILRSNSLKQPQLSSSHSMQLSEQGALPHTELISSQATEHADIPIYQGQYQQRSAHDNVKGGQVFGHLSSSQNFHSNASHDSQQLLPTNQQLDDSSNDVSYVLKGSQPEQMHQAQWRPQTMEKAPVTNDSSLEKQIQADLCQRTMSQDGAQQPFSSDWRLPGCTVTPADPALPKLPSGGLEQAAGNIYYFRQMKWLLLLFHAKSCLTPVGSCKFHRCFQCPVCSNAKKLLQRSAELASKQKPPEPRKIAQQNTAQRIMNGVEGDIMDIDLVSDEIFDSQPSVPKRLKMQPVSPSTAEREVSMPSNAGLILQETHSELPDQNNKVGQLKMDVKIDPRPLQKPAKIGYGTDGNVPTARHNVAPGGSNEIKTHVKQEIMPIDKETSETAPEVKNEANDSTDITVSKSGKPKIKGVSMTELFTPEQIQEHINSLRLWVGQSKAKAEKNQLMGHNENENSCQLCKVEKLTFEPPPIYCSPCGARIKRNAPYYTVGTGDTRHFFCIPCYNESRGDTIEVEGQNFLKARFEKKRNDEETEEWWVQCDKCECWQHQICALFNGRRNDGGQAEYTCPNCYVEEVKRGLRMPLPQSAVLGAKDLPRTVLSDHIEDRLFKRLKQERQDRAAQERKSIEEVPGAEGLVVRVVSSVDKKLEVKPRFLEIFQEDNYPTEFPYKSKAVLLFQKIEGVEVCLFGMYVQEFGAECSYPNQRRVYLSYLDSVKYFRPEIRTVSGEALRTFVYHEILIGYLEYCKQRGFTSCYIWACPPLKGEDYILYCHPEIQKTPKSDKLREWYLSMLRKATKEEIVVELTNLYDHFFITMGECKAKVTASRLPYFDGDYWPGAAEDMINQLRQEEDDRKQQKKGKTKKIITKRALKAAGHTDLSGNASKDAMLMHKLGETIYPMKEDFIMVHLQYSCSHCCTLMVSGKRWVCHQCRSFYICDKCYDAEQQLEDRERHPSNSRDTHTLHPVDIVGLPKDTKDRDDILESEFFDTRQAFLSLCQGNHYQYDTLRRAKHSSMMVLYHLHNPTAPAFVTTCNVCCHDIETGQGWRCEVCPDFDLRKMLDLLVHASTCRSGSCQYPNCRKVKGLFRHGMQCKTRASGGCVLCKKMWYMLQLHARACRDSGCNVPRCRDLKEHLRRLQQQSDSRRRAAVNEMMRQRAAEVAANE

SEQ ID NO: 17617 - protein, 712 aa, Oryza sativa
  Clone ID: TF_OSC402966j.C1.p8.np
VLPILNTWCRYNYQPPPGKPNHTCGGADRWADVVSTDDTSNSSSSSPSASTSTSKMELKMSKKISFSRIPRNLKDLLATGLLEGHPVKYIMRKGKVVSPYYFEVHAGSTKKHPSDYIFLENGNNLHDILRACSDATLDMLQSAIQNAIGPAPKKRTLCQTCKSELSSCCTGKFALLCDSCLESKDLKTVPGKLCHSSTFCQRQKIWRTSKIGRNPTSSARRSKNETSKIGRNPTSSARRSKNESPGSKYCNSSARGSKNAFPGVKTTSTGRITRKDKGLHKLAFMSGVLPEGTDVGYYVGGKVSPSQFEAHAGRAARRKPYHNIYMSNGVSLHELSVSLSKGRNMSNRQSDDLCSICSDGECVGFTTIPRGTWCCRYCENRQQRESSLAYNHNAIAAGRIDGIDPMEQIFTRSIRIATTPVTGFGGCALLCRLHDFSKKKFSARTVLLCDQCGREFHIGCLKEHNMADLTAALPEGAWYCTADCVRISETLKDLLSRGAEPISSVDVEIIKRKEQKALNKDGDLDVRWRVLKDKSSADSKLVLSKAVAIFHESFDPIIQIATGRDLIPAMVYGRSVRDQDYTGMHCAVLTVGNTVVSAGLFRVMGSEIAELPLVATSRDSQGLGYFQALFGCIERLLASLKVKHFVLPAADEAESIWTQRFGFVKITQDELRLREYLKGGRTTVFQGTSTLHKLVPKLDASSVNICIGMCRE

SEQ ID NO: 17618 - protein, 1078 aa, Oryza sativa
  Clone ID: TF_OSC400769j.C1.p19.fg
MDTASVTGGEHKGKEKTCRVCGEEVAAREDGKPFVACAECGFPVCKPCYEYERSEGTQCCPQCNTRYKRHKGCPRVEGDEDDGGDMDDFEEEFQIKSPTKQKPPHEPVNFDVYSENGEQPAQKWRPGGPALSSFTGSVAGKDLEQEREMEGGMEWKDRIDKWKTKQEKRGKLNRDDSDDDDDKNDDEYMLLAEARQPLWRKVPIPSSKINPYRIVIVLRLVVLCFFLKFRITTPAMDAVPLWLASVICELWFALSWILDQLPKWSPVTRETYLDRLALRYERDGEPCRLAPIDFFVSTVDPLKEPPIITANTVLSILAVDYPVDRVSCYVSDDGASMLLFDTLSETAEFARRWVPFCKKFTIEPRAPEFYFSQKIDYLKDKVQPTFVKERRAMKREYEEFKVRINALVAKAQKKPEEGWVMQDGTPWPGNNTRDHPGMIQVYLGSQGALDVEGSELPRLVYVSREKRPGYNHHKKAGAMNSLVRVSAVLTNAPFILNLDCDHYVNNSKAVREAMCFLMDKQLGKKLCYVQFPQRFDGIDRHDRYANRNTVFFDVSTAFFSGVRASRRDINMKGLDGIQGPVYVGTGTVFNRQALYGYDPPRPEKRPKMTCDCWPSWCCCCCCFGGGKRGKSHKNKKGGGGGEGGGLDEPRRGLLGFYKKRSKKDKLGGGAASLAGGKKGYRKHQRGFELEEIEEGLEGYDELERSSLMSQKSFEKRFGQSPVFIASTLVEDGGLPQGAAADPAALIKEAIHVISCGYEEKTEWGKEIGWIYGSVTEDILTGFKMHCRGWKSVYCTPARAAFKGSAPINLSDRLHQVLRWALGSVEIFMSRHCPLWYAYGGRLKWLERFAYTNTIVYPFTSIPLLAYCTIPAVCLLTGKFIIPTLNNLASIWFIALFLSIIATGVLELRWSGVSIEDWWRNEQFWVIGGVSAHLFAVFQGLLKVLGGVDTNFTVTSKAAADETDAFGELYLFKWTTLLVPPTTLIIINMVGIVAGVSDAVNNGYGSWGPLFGKLFFSFWVILHLYPFLKGLMGRQNRTPTIVVLWSILLASIFSLVWVRIDPFIPKPKGPVLKPCGVSC

SEQ ID NO: 17619 - protein, 1081 aa, Oryza sativa
  Clone ID: TF_OSC400765j.C1.p1.fg
MDGDADAVKSGRHGSGQACQICGDGVGTTAEGDVFAACDVCGFPVCRPCYEYERKDGTQACPQCKTKYKRHKGSPAIRGEEGEDTDADDVSDYNYPASGSADQKQKIADRMRSWRMNAGGGGDVGRPKYDSGEIGLTKYDSGEIPRGYIPSVTNSQISGEIPGASPDHHMMSPTGNIGKRAPFPYVNHSPNPSREFSGSIGNVAWKERVDGWKLKQDKGAIPMTNGTSIAPSEGRGVGDIDASTDYNMEDALLNDETRQPLSRKVPLPSSRINPYRMVIVLRLVVLSIFLHYRITNPVRNAYPLWLLSVICEIWFALSWILDQFPKWFPINRETYLDRLALRYDREGEPSQLAAVDIFVSTVDPMKEPPLVTANTVLSILAVDYPVDKVSCYVSDDGAAMLTFDALAETSEFARKWVPFVKKYNIEPRAPEWYFSQKIDYLKDKVHPSFVKDRRAMKREYEEFKVRINGLVAKAQKVPEEGWIMQDGTPWPGNNTRDHPGMIQVFLGHSGGLDTEGNELPRLVYVSREKRPGFQHHKKAGAMNALVRVSAVLTNGQYMLNLDCDHYINNSKALREAMCFLMDPNLGRSVCYVQFPQRFDGIDRNDRYANRNTVFFDINLRGLDGIQGPVYVGTGCVFNRTALYGYEPPIKQKKKGSFLSSLCGGRKKASKSKKKSSDKKKSNKHVDSAVPVFNLEDIEEGVEGAGFDDEKSLLMSQMSLEKRFGQSAAFVASTLMEYGGVPQSATPESLLKEAIHVISCGYEDKTEWGTEIGWIYGSVTEDILTGFKMHARGWRSIYCMPKRPAFKGSAPINLSDRLNQVLRWALGSVEILFSRHCPIWYGYGGRLKFLERFAYINTTIYPLTSIPLLIYCVLPAICLLTGKFIIPEISNFASIWFISLFISIFATGILEMRWSGVGIDEWWRNEQFWVIGGISAHLFAVFQGLLKVLAGIDTNFTVTSKASDEDGDFAELYMFKWTTLLIPPTTILIINLVGVVAGISYAINSGYQSWGPLFGKLFFAFWVIVHLYPFLKGLMGRQNRTPTIVVVWAILLASIFSLLWVRIDPFTTRVTGPDTQTCGINC

SEQ ID NO: 17620 - protein, 1350 aa, Oryza sativa
  Clone ID: TF_OSC400272j.C1.p8.fg
MFDDDDDVEPPVNDVDIYYFEESEDKPVCFSVLPIKFDENEEVSCSDYKELNLRGFTDNNRHVFKKVIAWRVDLDCQRPKISVLSSDGKWIELLKPRMCYYEKKVRSILITVQMLHFVRKCPKKQQRSLFDHLGEVFNKFGPVPNGDDIKKHHHLIKLFMERDPILVKSKIIRCFIEDASRKAIEPIPRRACTEDRFIVSDESLESSDDCSYSNSDSSDDNNDDSTDEDTDTDGNATDDDTDMICAICDDGGKLLSCEGPCKRSFHARVKHGRKSKCRTLRFTSVELKLKESGTFLCENCEHNEHQCFKCGELEPSYGPNAKGSPDIIHHARYVGVLSTIRHGLMVFQCNKESCGHFYHPKCIAVLLEPEDTDGACKLEEMIADGMSFTCPVHWCFKCAKMEDRTRSEFQFAVCRRCPRSYHTECLPSYHVLMASNGIFHSEISFETKDKGAPKLAWKIKKRSYFYCLHHGIDATTGTPSGEHIKFPSIPKIKKTKNLSKKDAKVTGKRKKSGNKFSTKSTKLANVSPRGESKQTRRVARNSSSEHIALEHGCAVKRLKKDLQFEVPLVDVSARLSGAKTVEGKEGQPGTPSSFVMGEISKSASCAVDGETEKRVTSTAEKEISAGTSQDMATKDVLRQPRIEIDGLSECLVQIADKLHWYVQPGNTESCGKLPDGVLLERSIVVVREIVDLCFNMDNFSRLMKEKLEDVSKGCNFKNYDLFQHKNNLCFDESNWVTMQPKDLPHGLNLVMVLDLPLDIQAVSANKFVDKVLTFKPRLIIIVSPTDIERLDCKEEPYHLIWEYNQHIFGKPLYQPGDVDVNDDAKNGLHVIPLCVSLWSFPDKTEENMRIAGKHGHLNVGHKAHSVMLKDSSVDKGAKGDNEIFTVGKEDTSEREQTSEHCSGERLIIPNVVTFHANQEQNDELQSLYKEKHANGSGGGNNLTSGKESDVHRGENACGHNSAARQKTEISKRENRMTDSTHEENMRSGKEKIPRDGSNKGTVKPDLVDGLPPDKHVDVAFVHKTTTNRVDTQQECGYNVAVDVDDNYALQHEPKSPHGNDNLRGTEMDTSGDNSRKTREQKEVTDGKRLDLDRKREAVRMKNARDGHHEDDRTAHPQCVDVKSPSHNDDQRARGASVCKSRKRGTSNRILESRDTVSENSARRQVPVERRNGHAPYSRRPDYSATARRGSPSYPRRRRRSRHFSSERDWSTVPPRGNSPDTEYDGTRYNTEYDGYGSQSGCGYHGMDTLPVDRYYPQEHHNGAYRPQTNFGEEEQAAAYGRRRNDHGWGPDYRRRDSFDWEHRSSARGTVTDRYVPDLEQTNHQIPGQASLQDGYFMRRSRSFVNMHVPY

SEQ ID NO: 17621 - protein, 1237 aa, Oryza sativa
  Clone ID: TF_OSC102169j.C1.p27.fg
MAKPLRSTVLVCASAAMAPTSAPRLPTSAPPISPASSRKPKPNRARAGTLCRSSSRAERHRGGRTSTRWAAVAAEGGGEAMRRWVDRRLRDSFPVDTVEEMTTLALQCVAKDAAAQPEMSWPRGSPPRCPSSSCPEPQRQEFGGGNPLRRLPLVSPPPRPADFPPRPGGAVLDSAVRGLPRAQGVDVQPEESHIRRGVEIRVSLYSPPMKGGRLHRLERPPAAHITTAAAATTPAPAPADDWGDGSWTVDCSCGITYDDGEEMVSCDECNVWVHTRPSAPPPPPTRLRSPSSWPSWPTHRPRPLYRRWAEVPLPSRVHVHGLPGGTDTALFRSAAPSPVFSSALWRCAGYVPKRFGFRYCEFPYWADDKDGANALFALAREKRKEKAETRFPLRLGAIHKDKNYVRTLSICGDKVDGVEHSVDDDAKRTSPPSDAKKRGTSISIVEPDTWDNGCEKKRDFDVPASEDQHAKTNMVNSDLHVLVEAKKKRASSSERSGDKKCSASKEITGMLKKYEPKESKRLVISSGVATTAAVAEQEVHSRFVKLYPPHLSAPGGGEMHGSELHLPMGGGAEWQSHQQTLAWRRCKPGVHQGSVYEGLDGNQNVGLQTGVRSNGVVKRDDAKRSNGDVQSDAAPEKMNEGLDLQKQSNQTSNLLVVGGVPDLQTNQSESLTIKKEASTDDHERTEAIQFVSDEHKSGKQDTAMLSTLQRHSSKLASDLVYQHPKSETQNPMHTIPEHPNSSLGNVKVCTASSGPNSTTFDLSCSLLSTEPSSEETTVRLVKKDQTRLVSSADSENDFAKKSESSQDRTRSSDKVQLKGFVPSAPKSSQGSRTYVSSAKNRFIVPKEQLQKTSTEGNAPPGSLQGEVAPLHSRNKAMPLSFYQRKDKIHHRSIHITQDTSNSSASAELQSTETTASLSDEQLALLLHQQLNSSPRVPRVPRCHQASTMQMLHPTGASVFSKRSSAHGGRDQALVLKKRNKDDAWRDNDETKKTGKVSSVERRHRDSSTERVLAAKDSCKFTENIESEQRNRGICSTGATSGVGNDAPIDRGVSHDLPGLIEEIISKNTNITYGELCNAIRQHWGDLSKPNVENNAYPNYLHAVNDCLRNRNDWAHLVDQAAMMNPNKRRKVEESDSLSADVLATEKTNKEAKRGPEDTNAESHHEILPRGKRKARKCRRLELKGRRVNDTRKRSSFDSASDDDDTTLSDSSSDRNDTPMDKSLEDSFVIAKNADSSS

SEQ ID NO: 17622 - protein, 1954 aa, Oryza sativa
  Clone ID: TF_OSC401196j.C1.p89.fg
MPRKKASSPSPTSTARETRSSSARGHASPTPTPTLRRSTRETTSRFSSSSSSSANKHEGSPAKQSANNNTAKRKMNNAAADTSTRPIKKNKKLNAKSYLALFSTPQQTAKSPPAPGGNSRLYSNFGNVAPPLLVQVDDDNASTVPMQDSGTLLEHEEADTQEQGYQSGLHKVPEVVLEETDVSKNKADEHASTSEAKKTIEAGDPREIKGASTSNQALVTHSDGTDYNEYLCAVCRSRETPGILKFKMRQLRRCHHERLWERSCDGKDCKNRYHDSCLDPPLQYVSLGIWLCTLCTKKRLQFGLFAVSEGIESLWDVKEVKWKDLGYEYATWELETSSFLCTPEAKDLKRNYESRHEDARRGFDPAKINKGKQCLFQKLQKLPDGFPPGLDKDHLSSLNRLREFWHNSDGAICLDDQERVIKTILFSMSILPDVCQPLLIVSTSASLSLWEAKFNRLAPSINVVVYNGEKDVRKQIQDLEFYENGLVTFQVLLSHPDAILEDIQTMESIVWEAVMVDDCQSLRVSKCLEQLKHLSTNFRMVLLSFPLKESIPEYINLLSFLNPEGSVISSSSNGDFTDTGDILATLKEKFARHVAFERKADSSKFLEYWVPARLSRVQLEMYCYTLLSNSPALRSHSRTDSVGALRDILVSLRKCCDHPYLVDQSLQSSLTKGHSLTDILDIGSGGGAGNPMGDILDDFVRQRFGFESYERVERGLLVPKKQTALNMFNDKTKGRFIFLIDSRACVPSIKLSSVDAIIIYCSDWNPTNDLRVLQRISIESQSECVPIFRLYSSCTVEEKTLILRSMIIFLTATSRILEEFQKHDYSSKDSEDDGLFMNNVFLEFAAKLSTNVEASTKMENAVISRAQQSGSFYSRDIAVISEREGISAVDGDLPKFWTFWSNLLGGRSPHWQYISEPVQRNRRKIQNMEDQMRIPAEETDEAIMKRRKIGEIMDSSPKILPVKDNDAVLPENSTASSSHETSVDDTWQELGAESLQGTQKGLHTQLKPELSKLYELLELPETVKCLCEELLDYILKNHQCWRAASLLKHKINRRESLALSVRNLNYECDEVLAEYVYEKLRILKKKFSRRASETSKQSQSTPVNNTSSYKQQTSPKLRSDGSICHQVTTIDGDLENVSHEEAPHDILTEEMILEQKELISVLETHREEHVLRDELLERITEKRINLINMVFSLREKNIQDKQGNETTLLDMHKQKEVAKLQETCNLVVEHLRKGHIDSEDRDATVKLIIEWFTLLLYAFLNHMRCQHNKLKMQQSTSWNKELQLKEIFLQQAKSGHLDRSFDQQIPLPDSCFTLEEFSHFKEIVGNFPVGAATSANCQHSLASTMEIALVRSVSPSEVGNSEAAINGAVEVPVHTEKRPTSEVGLSQNRMDNDSDGIDSQGGPPLAVQHSLSSNPAIDNSNNLESSVASHRSEHLGDIAVEVNADNCGTTLADSPHLEAPTVAALPSQSALPMAMEVDIQTDHVVQSAQQNIVTGRVPQEEEREGSTTVTSAQPLQPEMRPSSPVSGILRERTNPDQRRESRQPEAAPSSVDPTQLFPVASLMFNHPPLGNEPLKNELHRLQVHMDSLNKIYELKKSQLQTECSQEIEKIKQKYDLLIKEQDSAHHQHRKTLDDLYGKVLLNQSLADDFRVKFVSTSAAQARAVSPPLCQTTRQTAGVSQQVPTRPSVAGSIALPVGSSSASRPSLQRHCAQPSHVDRSSSSGGSHSSSPSSQVVRPPPAILGSVVRATSTPFSHTPAARGNYGVGSEVARAPAPHLQFRLPRAHPTAPVNQQQRQLPVRLESTCSRTQLTPVSTPVNARQLSSQSVSPVSNSSSSSSSHPGPALSNPALAANSSSNPVLSAGTVALPPSPHPPESIAAPRGQQKGAPSGLNTVPVVGSGLPPSRSMSDSVSLDAWLTSNLGLKDGETSTPRTRMDSHRTVDVVCLSDDEPEEH

SEQ ID NO: 17623 - protein, 1990 aa, Oryza sativa
  Clone ID: TF_OSC900291j.C1.p5.fg
MPRKKASSPSPTSTARETRSSSARGHASPTPTPTLRRSTRETTSRFSSSSSSSANKHEGSPAKQSANNNTAKRKMNNAAADTSTRPIKKNKKLNAKSYLALFSTPQQTAKSPPAPGGNSRLYSNFGNVAPPLLVQVDDDNASTVPMQDSGTLLEHEEADTQEQGYQSGLHKVPEVVLEETDVSKNKADEHASTSEAKKTIEAGDPREIKGASTSNQALVTHSDGTDYNEYLCAVCRSRETPGILKFKMRQLRRCHHERLWERSCDGKDCKNRYHDSCLDPPLQYVSLGIWLCTLCTKKRLQFGLFAVSEGIESLWDVKEVKWKDLGYEYATWELETSSFLCTPEAKDLKRNYESRHEDARRGFDPAKINKGKQCLFQKLQKLPDGFPPGLDKDHLSSLNRLREFWHNSDGAICLDDQERVIKTILFSMSILPDVCQPLLIVSTSASLSLWEAKFNRLAPSINVVVYNGEKDVRKQIQDLEFYENGLVTFQVLLSHPDAILEDIQTMESIVWEAVMVDDCQSLRVSKCLEQLKHLSTNFRMVLLSFPLKESIPEYINLLSFLNPEGSVISSSSNGDFTDTGDILATLKEKFARHVAFERKADSSKFLEYWVPARLSRVQLEMYCYTLLSNSPALRSHSRTDSVGALRDILVSLRKCCDHPYLVDQSLQSSLTKGHSLTDILDIGSGGGAGNPMGDILDDFVRQRFGFESYERVERGLLVPKKQTALNMFNDKTKGRFIFLIDSRACVPSIKLSSVDAIIIYCSDWNPTNDLRVLQRISIESQSECVPIFRLYSSCTVEEKTLILAKHDHILDSNVQNVMPIVSHSLLSWGASFLFNRLEEFQKHDYSSKDSEDDGLFMNNVFLEFAAKLSTNVEASTKMENAVISRAQQSGSFYSRDIAVISEREGISAVDGDLPKFWTFWSNLLGGRSPHWQYISEPVQRNRRKIQNMEDQMRIPAEETDEAIMKRRKIGEIMDSSPKILPVKDNDAVLPENSTASSSHETSVDDTWQELGAESLQGTQKGLHTQLKPELSKLYELLELPETVKCLCEELLDYILKNHQVSQEPKGILHAFNIALCWRAASLLKHKINRRESLALSVRNLNYECDEVLAEYVYEKLRILKKKFSRRASETSKQSQSTPVNNTSSYKQQTSPKLRSDGSICHQVTTIDGDLENVSHEEAPHDILTEEMILEQKELISVLETHREEHVLRDELLERITEKRINLINMVFSLREKNIQDKQGNETTLLDMHKQKEVAKLQETCNLVVEHLRKGHIDSEDRDATVKLIIEWFTLLLYAFLNHMRCQHNKLKMQQSTSWNKELQLKEIFLQQAKSGHLDRSFDQQIPLPDSCFTLEEFSHFKEIVGNFPVGAATSANCQHSLASTMEIALVRSVSPSEVGNSEAAINGAVEVPVHTEKRPTSEVGLSQNRMDNDSDGIDSQGGPPLAVQHSLSSNPAIDNSNNLESSVASHRSEHLGDIAVEVNADNCGTTLADSPHLEAPTVAALPSQSALPMAMEVDIQTDHVVQSAQQNIVTGRVPQEEEREGSTTVTSAQPLQPEMRPSSPVSGILRERTNPDQRRESRQPEAAPSSVDPTQLFPVASLMFNHPPLGNEPLKNELHRLQVHMDSLNKIYELKKSQLQTECSQEIEKIKQKYDLLIKEQDSAHHQHRKTLDDLYGKVLLNQSLADDFRVKFVSTSAAQARAVSPPLCQTTRQTAGVSQQVPTRPSVAGSIALPVGSSSASRPSLQRHCAQPSHVDRSSSSGGSHSSSPSSQVVRPPPAILGSVVRATSTPFSHTPAARGNYGVGSEVARAPAPHLQFRLPRAHPTAPVNQQQRQLPVRLESTCSRTQLTPVSTPVNARQLSSQSVSPVSNSSSSSSSHPGPALSNPALAANSSSNPVLSAGTVALPPSPHPPESIAAPRGQQKGAPSGLNTVPVVGSGLPPSRSMSDSVSLDAWLTSNLGLKDGETSTPRTRMDSHRTVDVVCLSDDEPEEH

SEQ ID NO: 17624 - protein, 430 aa, Oryza sativa
  Clone ID: TF_OSC401546j.C1.p3.fg
MHAHQHQHALLAALLACALAASSSTAGAQPAGQQGYAYGDVSGQQVHVSTTMIVLLAAVVGVFLFIAISTIYLRHCTGYDPATEGGGVGGSRSMILPANSFVSRRQRRPRGLDSSVVRMFPTMKYAEAKALRVGKVAGAALECAVCLSEFEDDEMLRFLPKCSHAFHPDCIGQWLASHVTCPVCRRNLDPNKDTTEEVIIPAAAAADPNSTSSEIVVIRQEDGAHPAAVVIDVVTEEDDEERRKEELELQAIGTQLRAMRSRSGLRPKTSAAKLPRSHSTGHSLAVRLDGDLERYTLRLPEHVHREMVAAGEQSVRRGRRLGEGVGMGARCSPRFSRSGRWSSFLSNSLSGKLSFLSPSSRRTPDSTQVEVSSSSSSSVTKVKGKRVAAVDVADDGSAHGTAQYPGCTVASSAAAAAVDVEKAATRQVRT

SEQ ID NO: 17625 - protein, 272 aa, Oryza sativa
  Clone ID: TF_OSC401826j.C1.p29.fg
MEGGGGGGGGGGGGGGGGGGGGAPYATRTAEEVFRDLRGRRAGMIKALTTDVEKFYKLCDPEKENLCLYGYPNETWEVTLPAEEVPPEIPEPALGINFARDGMNEKDWLALVAVHSDSWLLSVAFYFGARFGFDREARRRLFNMINNLPTIFEVVTGAAKKQAKEKTPNSSSKSNKPSSKVQSKAESRSKSKLSAPKDEEGSGDDEGEEEEDDHDNTLCGTCGTNDGKDEFWICCDNCEKWYHGKCVKITPARAEHIKQYKCPDCTNKRARA

SEQ ID NO: 17626 - protein, 697 aa, Oryza sativa
  Clone ID: TF_OSC419229j.C1.p1.fg
MPSMRALERLASWPTPPPPPPPPPPPAKAAAAEAERPCPPSSAATTSSSSSSSASAAPAAAGAPRVYPLRDFPGREAAGLGGAFRDNVRWLLRQWGGASPASPAAGGPGSASAAVAVAWRVLLSDDRTGVVVPIFAVEEPVASSPKPLCDYCRWAGWSHHWVSKRKYHFIIPAPADWDRQLAADVILGRTDHLLHGLIHSNGFGHLVMLRGRDGGSTALSGRDIMDIWDCLCSALRARAVSVVDFSQKRSLDLRLLLSVAHGDTWFTRWGYCLARGCFCVSTSTYAASVEALAALPVDYLRSRHVRRVVTIYRRLSNKPLVTVREFLRCLLDWKHLEPPLQLPPVKTCTRLQFMLPKPSVMKRHRQQPCQRFEDVIDLLQCRWSKKRLLDAAEVVVDRLLEHGSGAEMTRQAVRDAARGAIGDTGLLDFVIKSLGDTIVGNYIVRRVPDAETRVLHFSLEEYEEPTPALLDVEVECTPLPPVVRWPSTVEVERDLRAVYRAMVEVRSEAAQAVLDCKHWVKWWGLGDESDDQLRFFVEWQPQPWEAAELIRPMPLGEIVVVPLHASMGELLVESEHALRDTYYFFEEFQAEGLHGIAGEKWDPVMLGGAENGDTISVYGNGADMETELRCHGGLDLWEVRCVCGAQDDDGERMIACDACDVWHHTRCVGIADSEPVPPLFLCVLCGGALMAAGPINS

SEQ ID NO: 17627 - protein, 895 aa, Oryza sativa
  Clone ID: TF_OSC900291j.C1.p21.fg
MSTSPGRTRSGRPLSSSSSSSSSSSAPAPAPKRRRRPDKPPDHDPAPAPAPDKDLLVSPHTPPMDAEAPKPIHLLNDKDKDKEGDDGSHQDTPTLQSPPRGSDAHPIPTELNVSAAVARPPQPPHAQPTELNAVAAAASALPMELDAAAAAAVPAESTELNAAATAVPAQPTEVNAAAEIVKPIGLNAVAAETAKPDMAMELQEPPTVTAANGRDVSHESFEQNLQHQVLDNALTDPSLLAESTATPASTAGLKPARRFTRSLLKNKPEEEPTASKSQDPAVSMISEDNNEASVDLALAPGKPQRRFTRSLLKVKVEARSTNNLLQSKEAIDSTSDSSRSVKKMEMKMSKKVACLTKHPSNIRELLNTGLLEGMPVRYIIPSSKLQKAVLKGVITGCNIRCFCLSCNGSKNIFLHHKLKSLEAFCVNVALSQNNIKIPLPHLMLVRAIPGTPGYTNWSLKFCLMRKVDGYIKDQRIYCNHCNRVVSPSAFEAHAGEGTRRKPYDNIFTSNGVSLHELSMKISKDMELSERETDDLCRECGQGGDIFPCKMCPRSFHPACVGLSGVPSEWYCDNCSNLVQKEKALAENKNAKAAGRQAGVDSIEQIMKRAIRIVPISDDLGGCALCKQKDFNNSVFDERTVILCDQCEKEYHVGCLRSQWQVDLKELPEGEWFCCNSCSEIRSSLDKIISDGALILAESDIDIIRKKHEMKGLSMDTNTDLRWRLLAGRKASEDGDLLLSAAVPIIHQSFDPIIEVQSGRDLIPEMVNGRRPKDGMPGQDYSGMYCAVLTLGTSVVSAALLRVMGGEVAELPLVATSKDLQGLGYFQALFSCIERMLISLKIKHFMLPAAQEAEGIWMNKFGFTKIPQEQSDAYLNGAHLTIFHGTSNLYKAIPSS

SEQ ID NO: 17628 - protein, 244 aa, Oryza sativa
  Clone ID: TF_OSC401827j.C1.p32.fg
MEMAAPVSPAPRTVEDIFKDFSGRRAGLVRALTVDVDEFYGFCDPEKENLCLYGHPNGRWEVALPAEEVPPELPEPALGINFARDGMHRRDWLSLVAVHSDSWLLSVAFFFGARLNGNERKRLFSLINDHPTVLEALSDRKHGRDNKSGADNGSKSRHSGKRANDVQTKTSRPAVVDDGYDEEEHSETLCGTCGGRYNANEFWIGCDICERWFHGKCVRITPAKAEHIKHYKCPDCSSSKKSRQ

SEQ ID NO: 17629 - protein, 751 aa, Oryza sativa
  Clone ID: TF_OSC400505j.C1.p44.fg
MGTGGGRVALDGGGRRRRKLDEEDDEEYVADDDEEEDEDEDEEEYQQAAAPSDDGEEGGDDEAEPEDESDADFVGDEEEEEEDLEDEDDLEEVKAPRPKRPPKGKPPPRSRRRRQKDDDDDYEEEEEEDADFDPDVDEDDEEEKDSTKNHVAKRKPPPGRKKKKRKPSRVSKAKPKKPTSGRRRRKRWATDDDEEEEDDADFIVEDDQEEEEDDHRPKKKAKAARKTRDVTPEPDVEASAWPAVESDTSEFEFVTSDEEAADKEAPAAEPAKTKGKKGRKRWGSGSESSSDSDYVISEQELKDLEVSMPPDAALQSPATLPRRTFLSRRVGEKGKEPEEAWKQTCGICLSEEQRATIQGVLNCCAHYFCFACIMEWSKVESRCPLCKRRFTTITKSSMADLGLGSRKAVIRVEKRDQVYQPTEEEMRRWLDPYENVVCIECNRGGDDNLMLLCDICDSSAHTYCVGLGRQVPEGNWYCGGCRSGGEGPSAQDTVVHCRESNTNPANSSSGSFGSATPSGVFQRPPPINTQPSLQGFDLNLSPRETPDEDKREESHVSADAVSTPTGRHATLDRRRAFNRRIRILLFRPRVTPNGWQNPIQSDRTIPENEQNPQSTSTPTEVNPSCSRDSSMQNQQSSSSFVQPARGLIERTYGGGSNFQQTEGAKEQLIPIVKRNLKLMCAQSPLGQSDFKNVARRATHTILALSGIAHNEDFVVTILDEREMEMNIVQSNVMLRNGCSTEYRPCLSCLRS

SEQ ID NO: 17630 - protein, 258 aa, Oryza sativa
  Clone ID: TF_OSC421348j.C1.p6.fg
MDASYRRDGRGGGGGGGGGGSAPRSVEDIFKDFRARRTAILRALTHDVEDFYAQCDPEKENLCLYGYANEAWQVALPAEEVPTELPEPALGINFARDGMNRRDWLALVAVHSDSWLVSVAFYYAARLNRNDRKRLFGMMNDLPTVYEVVSGSRQSKERDRSGMDNSSRNKISSKHTSDVARVENNIKEEDEGYDEDDGDHSETLCGTCGGIYSADEFWIGCDVCERWYHGKCVKITPAKAESIKQYKCPSCSSKRPRQ

SEQ ID NO: 17631 - protein, 679 aa, Oryza sativa
  Clone ID: TF_OSC419173j.C1.p1.fg
MAPKMVISLGSSRRRKRGEMLFRFEAFCQPGYPANFAGAGGFRDNVRTLLGFAHLEAGVHGETKCWSFQLELHRHPPTVVRLFVVEEEVAASPHRQCHLCRHIGWGRHLICSKRYHFLLPRRESAAEADGLCFAINHGGGGGAEKASSKGTTTTASSRGHLLHGVVHLNGYGHLVALHGLEGGSDFVSGHQIMDLWDRICSALHVRTVSLVDTARKGHMELRLLHGVAYGETWFGRWGYRYGRPSYGVALPSYRQSLHVLGSMPLCVLVPHLSCFSQELPMVVTKYQAISGHKLLSLGDLLRFMLELRARLPATSVTAMDYRGIMSEASCRWSAKRVDMAARAVVDALRRAEPAARWVTRQEVRDAARAYIGDTGLLDFVLKSLGNHIVGNYVVRRTMNPVTKVLEYCLEDVSSVLPAVAAGGGVPAQGKMRVRFQLTRAQLMRDLVHLYRHVLKEPSQALTGGAFGAIPVAVRMVLDIKHFVKDYHEGQAAASSNGGGGFGHPHINLCCTLLVSNGSPELAPPYETVTLPAHATVGELKWEAQRVFSEMYLGLRSFAADSVVGVGADQEGLPVLGLVDVGSAVVVQGSVGEQINGEDHERKEEAAAAAVCEGSGGGERVVDCACGAVDDDGERMACCDICEAWQHTRCAGIADTEDAPHVFLCSRCDNDVVSFPSFNC

SEQ ID NO: 17632 - protein, 256 aa, Oryza sativa
  Clone ID: TF_OSC413151j.C1.p11.fg
MDGGYGSVTIVHDARSPEDVFQDFCGRRSGIVKALTIEVEKFYKQCDPEKENLCLYGLPNGTWAVTLPADEVPPELPEPALGINFARDGMQEKDWLSLIAVHSDSWLLSVAFYFGARFGFDKKARERLFMMTSSLPTVFEVVSGGVNTQSKTANGSSKNKSGSKPPKRPNSDSKPQKQVQAKYEEENGGRGNGGDEDQAETICGACGEAYANGEFWICCDICETWFHGKCVRITPAKAEHIKHYKCPGCSNKRTRE

SEQ ID NO: 17633 - protein, 439 aa, Oryza sativa
  Clone ID: TF_OSC16959j.C1.p1.fg
MESEAGSAPNGCTSTVKGSEERHSLERRHDDGSCISEIKLISNMVVKKKRGRRAPPSSRRLSGNKVISGEDAVQNRNHAKEEDQAGNSSDVALSPSSRKTEGQDQSTNPKDLFEKACHQATEMVTESTTGCKKSFWEEKGSDNRRGRQATLCVKQDGLDIETTGKDVSASEAYEKSSTLEDTSVGHAAAKSVNPEDNSLDPMDNVSDTHVNATSSEDKSSEEVEDVKVCDICGDVGEEERLAVCTTCNDGAEHIYCMRVIIQEVPEGEWLCKKCENELEYEKKKQLEKSQLKVGASKSQFFERKTNTIANASKSNSYEDEPSKALEGKISKPDTALKNRSSFENEVENENGDKKELNSTNQCNNSNSKRKEEGAGIISSIKQSITERCGFSMGAESRKRLPLSCESSFRLDVEKGKQAATKVPTSLAFDAAKNLGPPLR

SEQ ID NO: 17634 - protein, 1696 aa, Oryza sativa
  Clone ID: TF_OSC422248j.C1.p10.fg
MEGLVGRAVRKEFPGFGVFDGVVESYDAEAGYFRVMYEDGDSEEVELGEVVGLLVGGSPVGVEMAHPLPLTPGRRPKKRRRGDEEGGVGVGAVVAMEVDSVVLAVPAGGAEPASPVVVVEGSSRDEVDGDVVSEMAEKRRRVVSPGPESSGKPLRRSARQAKAAARVAEMEAAAAVAAAAEAEAAAAAMAEAEAEAAVTPPQSGSKRKRASGAGRYRSVAKDLEKAAVERLPPKPELPPSSQSLDLEGLPALDVFQVYSCLRSFSRQLFLSPFLLETFVAALRCIYVNPLIDWVHFSLLRAMKSHLEDLANEGDPPAMHCIRNLNWELLDLATWPIYLAEYLLTRGSELRYGMKLTDLKLLNTEYYTQPAMVKLELLRALCDDVLEIEAIRSEVVSRMSELDGNDELCKSTRTRRKRRASAVKNLLNSSRAPEDSSDTEDGNSDECYLCGMDGNLLCCDGCPAAFHSKCVGVVEDLLPEGNWFCPECLIQKNDGFKNMVKPGRGAEVLGMDPHDRLYFGTCGYILVVESTAEDSLDSTCHYYGIFDHHSLFNVLRTCHPSYSSITNMISLFWGTAIDSFDSNGRCENNKEFSIFDAKIDCSHLLPSKQHTEHEQLKSDKNGSCEQLACGKAHASDPDRLDHDTSHHKFSLRSAVISENGNATSAKTQQDVCSYANGLPAENKIDQSPHKKISDCYIHSNPAMYVNYYSFGQIAASAAEELKDKLSENKEGKKVGQDAASFQLKTICKKYANIFALTDQKLSVELRKEKCGWCNSCQISGGVDCIFRVTDGKCMEGLQSEKNMNSHIILAIHIILSIEERLNGLLIGPWKNPQFSSYWRKAVLKASDVSSLKQPLLMLESSVRRVAFSVEWQKPADSVEVVGSAAHVLVRTSNKSSRHGSTRKPGRKPFIVELKVDSRDVGVYWRRGGRLSRQVFHWKRLPKSLTYKAVRQAGRIKIPTILYSDGSQFARRSKYIAWQAAVEMAENVAQFILQIKELEFNIRWTEILSTLPASLATKETQKIARLFKKVIVRRKRVDGTNVEYLLDFGKRENIPPVIAKHGKKLDEPSNERNRYWLSEGHLPLSLLKAYEAKALTRLLKKKDIDHLPKKMIDLKPPKPKKSGFDDLLEKAKKQVLGLCGHCDKEVKISDAVNCQYCEALFHKKHFKVPRGATDAYYVCNKCLSEKVLNVKSPQKKVVSKKNSLKKKTKKQSLKIVTRSKQIVAKSKKKMGKNKGKRGRPRKYPLNESKNKLPELRVKEPANVPKNEPAKRISKRLYSKYMKGNSNISERSAKRRRTASHYSYWLDGLRWTQNPNDDRAISFRTERVVFPCEDADLSEVFPVCRLCQKCYSGESIYIACEDCGDWFHGDIYSITLENVNNLIGFKCHRCRLKDVPVCPYVQTDNILMAQSDKDDVTSRSIEDKEDRSPTDLVAHDSLEGSHGHIIEKEVNDHSFEKEVGDHICLQAQEDHNEKELDSHSTEKELGDHNKTEEFDGNMKVLFNLNSTKELDSTSTEKELGDHNKIEEFDVNMEMFFNLNNTKELDSTGESICAGGEAHCLHELNNHEILKECHSLDNNLGELDNQDCQKECHNQNSLKELENHRSSQELDSHKSPEELDNIISPKELDCTENNEHSAAVTQSDGFLDDPFNIRISDKGLIIASENGKIKESIPLQTKNKPEENPVPADHDIDLQVVVTL

SEQ ID NO: 17635 - protein, 973 aa, Oryza sativa
  Clone ID: TF_OSC415418j.C1.p2.fg
MIFKRNQRSEILSLRRCNAGGGAGVGEDDGDGGERRPKRRRGDEFFPVELLGDVPVAGIPYAAFGFRWCEEAEVASPAAASRAAAAAAAASRPPVVRTSRGRAQVLPSRFNDSVLIDPWKKDKPAKPPVPAKAVQLVPKSEVLYRKGAIADRSLTMSELDENGDDDYEEGHNFVASRKYSMSLSTVTSVHGEPYSYYHRKGLMKRQYDDDDDDDDDDDDDDDDEDEEAEEEEEEEEEEEEELSYWRNDFVYGDIVWARLGKRQPVWPGVVVDPAQPAAAQALPPQPRSGAVLCVMLFGWAAEFGDEKKFIWVRQGGIFPFVDYMDRFQGQTELSSCKPGDFQRALEEAFLADQGFFEVPMDGNTTGQPARYKRALQCESCGNCFPNKDPSMMVYVMEQLACRQCAKILRSKEYCGVCLKSWQHKCGGRWKSSKPDKVAVICFGMEGTYLRDLELISCHCGPCKGQKFLFNEWERHAGCRSKNWKSSIKIKDTLMPFGKWIEQHQSSSYSTNPAKRSSQKMKKQKLLDLLSEPYDTVNVKWTTERCAVCRWVEDWDYNKIVICNRCQIAVHQECYGVRGKQDFTSWVCRACETPDQKRECCLCPVKGGALKPTNVDNLWVHVTCAWFQPQVAFASDELMEPAIGILNITPLLFMKMCVICRQIHGSCTQCYRCSTYYHAICASRAGYRMEIRCLEKNGKQTTNKISYCAHHRAPNPDNVLIIQTPAGTISSKKLVQSNGTVAASRLIRKDLPKDSVSEVEISENLSAARCRFYVKKELKRSREGAIAHRVRGSCQHRWDEIDSLNPPREERDPESFSTFKERLHYLQKTEHTRVCFGRSGIHRWGLFARRGIQEGEMVLEYRGEQVRRSVADLREEQYRVQGKDCYLFKISEEVVVDATDKGNVARLINHSCTPNCYARIMSVGHDESRIVLIAKKNVSAGEELTYDYLFDPDEADDRKVPCLCQTANCRKFMN

SEQ ID NO: 17636 - protein, 1478 aa, Oryza sativa
  Clone ID: TF_OSC401520j.C1.p5.fg
MARAEGLPEGAAPGVGVDLYAQARKALSVRTPFEGEGTAPRVPTLPARLVNWSGQSDARKKHKKIQPQDVADVELPPQPATEPSAKTGVWEQFEAYFRPVNLDDIDMLMPKFPFGYGGLDSCILIPFVGSGKELMDTAETFDVAVAETSSYLGLGGEERVSNKEHSERSERSEQSVEQGIHEVIVRQFVGNKERGEQSVEQGIHEVVVQQENWPLEVEQATSSAGIVSSKCEEEGESSLNWLLGSKERFVLTSERPNKKRKLLGVDAGLEQLVLLPRSGAEASSVCDVCCLGESSTVSNSMLNCNRCKVTVHQKCYGLHVVPDGQWLCTWCKDLESLQSLKKDADNTLSMPCVLCPKEKGALKPVKGEPGQTAHGGNLKFVHLFCSLWTPGALVEDMESMEPVTNVGSVQENQWKLVCSICKVKHGVCVRCSHGTCRTPFHPICARESKHQMEIWGKFGYPNVELRAFCSKHSTIGYANSLERSNCASHQSPTEARLKDANLITGKVPKLRFTRKNKDKFMNYEATSFNSSNLIKVETIEQASLPHTVRSSDSLAIQGMEVDTDNLSVGGNLMRNSADVALVLRKLIDQGKVSVGDVASEVGISSESLEAALVGETTTFSHGLKLKIIKWLQNSAHIPAAQAKILKGGPMVVHNSKPGRSEDTNSVNMKNSLVPNDEKGTTAYLSDSAVMKSSSTRSKDNNKIMRDNTAVCATGVTTLLQNGIKKMAEAGAERECSSPAEDCAKGTPKEEHGGLISNNISGNTQFGTSMAIPNENKGTSPGKKRYNLTEAEPGSELEGVSSLNQYFPPGDNVKHELNLVENGVGNNHDCNADHVPGQPFSNFNDSHYYIHPLIKEKMTQLWDNTFKQDKLAPCHPEDPLCYPDERRRVGSSIKLTETTDVMDQVSRAKSLGILEHSPDDEVEGEMLYLQARLLDTAAFLKHRYEDLIAKVVQNLSRELDAFSRRKWDFIFVNQFLRDVREAKKRGRKEKRHKEAQAILAAAAAAVVASSRNSTVRKDANDDVVPAKQENSPKFGTGPPNVGQRTSSLLRLKDLSKPPNNKISQDNNRSTFHMPNYSKENALYCDVCMRSETVLNRIFVCSRCKAAVHIGCYRNIENISGPWKCELCEDISPEDTCVGDQSDCNGTNLSLVQCDLCHGTSGAFRKTADGQWIHAFCAEWLLETEYVRGQDSPVKGMESLVKDKDTCCVCLHTVGACLKCNNGDCQTTFHPYCARHAGFYMNTKGSGGILQHKAYCSKHSIEQKEADMQQYGLEEFNNMKRMRVELEKLRLLCERIIKREKVKRERVLCDHDILAKTKDTLVFSYLTHGASSESATTSVNNKSYSGTMQRSDDVTVDSTISGKKAIRFSLNNRDAEINTADSSRTLISFKRKFSERGSLAGKQLPRRPVTSQKLEAGEKKTKDKKNRETFQKELFMTSDQASTQNQRLPKGYAYVPRDSLSKDKLRNRNTQAHEPQEPGG

SEQ ID NO: 17637 - protein, 1671 aa, Oryza sativa
  Clone ID: TF_OSC401369j.C1.p50.fg
MLASRIPLKRCTAAAVVPLPGELEMEEGPTPPAGGGEGSGAAVVPAKRRRERVVPSRFRDSVVSLPLPPAKKGRPAKKAAAREGGDGEVYDVEVRAVEQQGATAAAFGAVETAVWPGDERPAQTEEELYRACRNIRRSSSSSGFSGSVVTSLSNAGGSVAPEGKPVVVVECKPKREGGDKKEDFYWPEDFVLGDVVWARSGKKCPAWPAVVIDPLLHAPAVVLNSCIPGALCVMFFGFSSGGHGRDYGWIKQGMIFPFVDYLDRFQGQALYKLKANRFRQAIEEAFLAERGFCELEMDEGCSLEKSVNDQSVPDGLQEGSGSNNDQECQSEAQVVGKSTGCCDSCGNRVPPKIAKKKKQAGEQLLCRHCDKLLQSKQYCGICKKIWHHTDGGNWVCCDECQIWVHVECDLTCINMEDLENADYFCPDCKSKRKTVPPVEQMNTPNSSECASTSKEKLPEMIPVFCFGMDGMYLPKKHMILCQCNSCKERLMSLSEWERHTGSRKKNWKMSVKLKSNGDPLVTLLDDIPCANVKSSTPSINKEELLKLLGTLALEFMLVSAVANSFRPVNARWTTERCAVCRWVEDWDYNKIIICNRCQIAVHQECYGARDVQDFTNWVCRACELPKQKRECCLCPVKGGALKPTDIDQLWVHVTCAWFQPKVSFPVDETMEPAMGILSIPSEYFKKACVICKQMHGACTQCYKCSTYYHAMCASRAGYRMELQYSEKNGRNITRMVSYCAFHSTPDPDNVLIVKTPEGVFSTKFLPQNNEKQSGTRLVRKENLQEKVLPAKISDCPAARCLPYEMLKNKKEPGEAIAHRIMGPRHHSQESIEGLNACMKIENKRVSCGRSGIHGWGLFAAKKIQEGQMVIEYRGDQVRRSVADLREARYHREKKDCYLFKISEDVVVDATEKGNIARLINHSCMPNCYARIMSVGDEKSQIILIAKRDVSAGEELTYDYLFDPDESEDCRFFSAVQFQFQIGREWRCCSHPRVETDLKTLARRFWKVAAPYWWSEDKVQARLRLAAVFALTLATTGISVGFNFLGRDFYNALADKDQEQFTKQLLYYLGGFAVGIPIVYTRIISHITRFSFFVLRDYARETLSLRWRSWMTSYYMKRYFKNRTFYKIQSQSLIDNPDQRINDDLSAFTGTALAFSLTFLNAAVDLISFSNILYGIYPPLFIVLIVYSLGGTGISIFLGKNLVNLNFMQEKKEADFRYGLVRVRENAESIAFYGGEENELQLLLDRFRRAFENLSELLIASRNLEFFTNGYRYLIQILPAAVVAPMYFSGKIEFGVINQSVSAFNHILSDFSLIVFQFQSISAFSAVIDRLGEFDDLLDGNGSSLSKPDNIDGINIIFKSTGPTVLSSNGSPTQSNPSMVLEICNLTLLTPRSGNILITDLTMELKEKDHLLVMGPSGSGKTSLLRALAGLWTSGTGDIIYHVRGSMELQTSNSGPDEPSNIQSNGEELLQSSKQRRDNGIFFVPQRPYMVLGTLRQQLLYPTWTEDVCHSSNNDPQSTDPLTFEVSTSDGVGSKSEMPTTDELIRVLEAVKLGYILPRFNGLDSMHDWASVLSLGEQQRLAFARLLLAKPTLVLLDESTSALDDMNERHLYSQIEAAGITYISIGHRKTLHKFHNKVLYISNSDSTDSNPRNWYLKPTEQMSIEESSSFAS

SEQ ID NO: 17638 - protein, 710 aa, Oryza sativa
  Clone ID: TF_OSC403241j.C1.p2.fg
MVVNSRPLKRARTRVEARDFAGFPPAGDGGAAGTFREAVRGFLARYARLLPLPSIFSPAAAAAPPHLLTWRVSLRVGEEGDEEGGGGAVELNVVEEDVLRSRSVYCDQCRVVGWSGHPVCGKRYHFIIENDNNQVCGKRHSCCLRCGTPTVAGESRCLLCNFDMDGEELEECGYMHLDDNTHLLHAVVHANGYGHLLRVNGREGGSRCLTGRDIMSFWDRLCKVLHVRKVTVMDISKKHGMEYRLLHAITSGHPWYGEWGYKFGAGSFALTSDTYQEAVDTLSGIQLALYFSHRQPIRTPLQNTIALYWALSDRQLVTVRDLFRFIMHLLHQARKKNETSKPTTDEHKEVASNVLCKWTKEDIDRAETAMLKVLRVVQPGQWVSWRALRGAASKAVDSQELLDYSLRGLGGKLMDDGHFIAVRCNAETSAIEYRLEDNSNQSVDAAAFGPSVDHLLHDLKFLYNALLNPETMLASQPEVIGASSHSAAAKILDCKQFIKHYDQHTPRAPLNPFLLSVRCSIELLDHPKDYTAPPVELVLLPASATLAELKIQATRAFQETYLMFQSYQVEQLPDFPNFSDTTLVKHVLGSSQLVRVRGRCTGDNRRIVQFRMERGLENWTVDCTCGAKDDDGERMLACDVCGVWQHTRCSGISDFDDVPEKFICRKCASPRRETGRVGAGAMWGSRMNASMSWLYTMKGSHIVESGVLQF

SEQ ID NO: 17639 - protein, 716 aa, Oryza sativa
  Clone ID: TF_OSC403247j.C1.p23.fg
MVVNSRPLKRARTRVEARDFAGFPPAGDGGAAGTFREAVRGFLARYARLLPLPSIFSPAAAAAPPHLLTWRVSLRVGEEGDEEGGGGAVELNVVEEDVLRSRSVYCDQCRVVGWSGHPVCGKRYHFIIENDNNQVCGKRHSCCLRCGTPTVAGESRCLLCNFDMDGEELEECGYMHLDDNTHLLHAVVHANGYGHLLRVNGREGGSRCLTGRDIMSFWDRLCKVLHVRKVTVMDISKKHGMEYRLLHAITSGHPWYGEWGYKFGAGSFALTSDTYQEAVDTLSGIQLALYFSHRQPIRTPLQNTIALYWALSDRQLVTVRDLFRFIMHLLHQARKKNETSKPTTDEHKEVASNVLCKWTKEDIDRAETAMLKVLRVVQPGQWVSWRALRGAASKAVDSQELLDYSLRGLGGKLMDDGHFIAVRCNAETSAIEYRLEDNSNQSVDAAAFGPSVDHLLHDLKFLYNALLNPETMLASQPEVIGASSHSAAAKILDCKQFIKHYDQHTPRAPLNPFLLSVRCSIELLDHPKDYTAPPVELVLLPASATLAELKIQATRAFQETYLMFQSYQVEQLPDFPNFSDTTLVKHVLGSSQLVRVRGRCTGDNRRIVQFRMERGLENWTVDCTCGAKDDDGERMLACDVCGVWQHTRCSGISDFDDVPEKFICRKCASPRRGKGRGGGGGNGGSRMDVSAAGRCKDEIGSSVGGAGKFGRMATVG

SEQ ID NO: 17640 - protein, 1027 aa, Oryza sativa
  Clone ID: TF_OSC900067j.C1.p9.fg
MRKGICTGHITYTGRTRGPITEGKEASSAICRGSAKRENGTTWTMEMDGGDEATSSGTRENLGIPERAARYGASFPCVEEHGETKVGQAGVQAPSREECSPGFKWQWITHYRHSWGSRRVCDCELGFGAAGRGRGGGLAEAAAALEGFLADPWLLRPAAAGEGVGVEEEGGVATVQVEVPPVEAAEEGEEEAGRAAVLRQAAAAEDYARRLEGAAAAGTGLRFMPNGFSVLLTLCFFIWGVDTHDYDVVKLEEGDEEDWGQEDVGNAAVKVMCRICFSGENEGSTKAAKMLPCKLCNKKYHRSCLKNWGEHRDLFHWSSWVCPSCRSCEVCRRPGDPNKLMFCKRCDGAYHCYCQQPSHKNVTHGPYLCPKHTRCHSCGSGVPGSGHSTRWFLGYTCCDACGRLFVKGNYCPVCLKVYRDSEVIPMVCCDVCEKWVHIECDGISEEKYQQFQSDQNLQYTCGACRGECSQIRDTEDAVRELWKRRDVVDHDLMASLRAAAALPSLEDVSPSHPNSDDEKLGAYVMKNDGRNTLKFSFKSNSTKPALDSSEQEKNAIKSSGSNKKHSKKKGNQNNKTVSEQDEIFLEKRNETKSLGSLGDQIADVTRDKSSFKNDADAFVLSSAQSAEKALKLQSAKAAAHNADMIPKVKIKGTKVPSLHFKDVGEENAAKSDTGKGTKLVIHIGSRHKSRSGSPKSEMSNSQKEQELVSMHGGKVDVTSQFKSSRSEIKEKSVMKLVRETGVQQNSLLGDLGASKKHATGKRSNAIVSAMENASESGTRSRSFGQKQSVNHLTENQGNASFSVNNSPDSLKPSLLKLKFKRPIFEQPSTQSSQPEEPGTWASPQEELNVAKGQRSKRKRPSLDKMDGSESKAPAAKRHEQSTGEEAMDANWILRKLGKDAIGKRIEVQLASDGKWHQGVVSNVINGTLCLQLDNGRSENIELGKRAIRLIAQSQLPATRVVSRPLQAPAFGSSQSLIHGRLGGLKRIGFILTSGSVGTNNWEGFLGATLDVEEMPDDGHVHVAVAAE

SEQ ID NO: 17641 - protein, 267 aa, Oryza sativa
  Clone ID: TF_OSC416032j.C1.p4.gm
MDEGGGAGAAAAAAGNAAGAAVHHNARSAEDVFRDFRARRAGIVKALTTDVEKFYRQCDPEKENLCLYGLPNETWDVTLPAEEVPPELPEPALGINFARDGMIEKDWLSLVAVHSDAWLLSVAFYFGARFGFDKEARRRLFTMINGLPTVYEVVTGIAKKQTKVSNGSSKSNKSNPKPSKQSNSNSKPAKPPQPKDEEDSGPEGTEDEDQAYMCGACGETYANGEFWICCDVCEKWFHGKCVRITPAKAEHIKQYKCPGCSSKRSRE

SEQ ID NO: 17642 - protein, 1442 aa, Oryza sativa
  Clone ID: TF_OSC400485j.C1.p3.fg
MPPVASGSGRKRQLVLESSDSEADEFFVSTRRKEDDDDDAGNAGGGSGGGGDQGGEKVVTVSPEKVSGAKSTDEGGGSDKSKGSEVGKSVLQPDVKRIRTEAAHGGGSGSGGSVSKDGTGGKMLRPGFPKWRFEKPEVRAGRVLDEKGGVETKVSSSQKVKDHASSSVYERRRPEPLKPEKSTPSKTNQEVIRVQGKSGVLKIRPKNNKVASETGDGKNLPKNAKVDGDTGDGKVLPKKTTVEENGDGKILTKSGVLKLLPKNNKVAKETSDGNPRSKNTKVVGETSDAKILMKNKANRESGDDKAPKNCTVNLETSAGKILSRNTKEDLKTSDVCRQDKEKSDAIDVSQKQGADGEKRITEKLVSPILLRKSDPSVVGISLGQKMKQQNSKAQLKISSLGQRQPSLNLKDEKNKKKRLLDHKMSPENLSKKAKPNAIDQDTSRPSLEKHGIKKERKGPRYTMKQKLRGQIKDILLNNGWKIDLRRRKNKDYEDSVYVSPQGNGYWSITKAYAVFQEQSKSGKHTGKSSKHKAGVADAACNAISENDLAMLQRNVVKRRTKKELGASKKKYEDSSSRNSKDNNAGRSSGNKHQSSGVRGCALLVRGSTHSMEGNVDGYFPYRWKRTVLSWMIDMGVVSEDAKVKYMNKKGTRARLEGRITRDGIHCGCCSKILTVAKFELHAGSKEQQPYENIFLEDGGATLSQCLVDAWKKQSQSEKKGFYKVDPGDDPDDDTCGICGDGGDLLCCDNCPSTFHLACLGIKMPSGDWHCSSCICRFCGSTQEITTSSAELLSCLQCSRKYHQVCAPGTMKDSVKAESNSSTDCFCSPGCRKIYKHLRKLLGVKNAIEAGFSWSLVRCFPDKLAAPPKGKAHLIHCNSKTAVAFSVMDECFLPRIDERSGINIIHNVIYNCGSDFNRLNFSKFYTFILERGDEVISAAAVRIHGTDLAEMPFIGTRGIYRRQGMCHRLLNAIESALSSLNVRRLVIPAIPELQNTWTTVFGFKPVEPSKRQKIKSLNILIIHGTGLLEKRLLATGTINQENTTVNDMMDAQTHVEATGSRTPVHFSCELPVGGDPDIKHHDDSHPLVGNSKGLTLNLPCVPEEKTAELTSPVLDVVQCMPESENTQEMKNGETDATLTSEDIIAEQKYEDKSNSSLTDSSAIPMTVDPGSCSSNETVKGEHHTSSEPSVEAILVRDKPEPSISCNVTNQEDKNSSMVPVDTTVHLATIVGNHDIQNSVEVKGMEHNTAKDQTFVSAVANNVATTEDPSDSVADCEVPIVRSIQQKDEVIADKNACATIDQTAVDDVANNFVATTENDTDSTAELGVSMERCIQQKVEVIKDKSDSPLRTSISKVMLEKSDQMKSTESDSVKMKDMAIEVKVTVENFSEAGKPASALVMSNDINGEVMAKPNLTCGDDQLHGGDGTYKNSMEDDLASREPVNA

SEQ ID NO: 17643 - protein, 388 aa, Oryza sativa
  Clone ID: TF_OSC401369j.C1.p51.fg
MGEPPPAGEGSGMMMPAKRRRERVLPSRFKDSVLVLPTAAAKKGKPAEAAAEGGVVDGELYDVELEEGDPGMLWTGDERPVQTEEELYWACRNIRRSSTSTSGSFSSSIFSGSSAVTSLSNAGGGGGNGRPEGKPTVVVECKPKSDGGERKEDFYWPEEFVLGDVVWARSGKKCPAWPALVIDPLLHAPRVVLNSCIPGALCVMFFGYSNSGLRDYGWVKQGLIFPFVEYLDRFKGQTLYKIKASRFREAIEEAFLAERGLFELETDEGCSLEKSVNDQSIPDGLLEGSGSNNEQECQSEAQVVGKSPGCDICGNRLPCKIASKKKQAGERLLCRHCDKLLQSKQYCGICKKIWHHTDGGNWVCCDECQIWVHVECDQTCIKMETCSM

SEQ ID NO: 17644 - protein, 1988 aa, Oryza sativa
  Clone ID: TF_OSC900258j.C1.p11.fg
MPTPSQTIVFGSITGLVKEKEDSYLEFSWWFREDFGGVNGLLLCSSGALHLGTNAADGAHLTEFAVQLPHFEGLHLKNTALYDGNQFMPAFGLAHCLSMRQQFTSMDRDIMADGNIVQRSIHLRRKRRDLPQTSSLPKFAENHELGSANIFMDPSFYTKATESSSTENKSSSKPPKFLGENSSRRPHHRTVGLPVQYSDFFITSLGEIDKRPSYHNSYQIWPVGFTSYWHDRITGSLFECEVCDGGNFGPLFKVRRISCSVFPLPDASTILSQNSTRKAETIETNENNTLLEDTANDTDDNILMLLSDSSETNQDLLSCFSNDMESKMTSLGCNDLHSSNRSVPTVPSHSGTDKIGEFTFEGTSPSSVWRMISCAMMEACEKMYKEHGHLVFFCTHGTEKHSFDSGSGFQDFNGPYTPLTRFCSSYGPSIPRIVEKENDVEPTYSLLKEWLYQDRIGFDLEFVQEIVESLPRSRACSNYQFLCNRAEFVSSLTVASGSLRVVHKNGQSNGDVMSYGRHGSVVTGLQDHTQPSGFRIRELPLGRPISNKLPPELAGEVLQIWEFLGRFSEIIGLKEIPSYEQLEDELIDPWPICADQKEKLSNDIHRDHTSPINSPANVSTSYSNGESGLTSNEEIVSLFIPVETSSMKKAAQDKSAAQTLGRCSGVVLPGVHLTLFRVLFGELLSKVAIFVDPNIDPKESKTRRGRKKDTENLISAKEFKFDMLTANKLTWPELARRYILAISSISGCMDLSDISSREGVKLFRCLQGDGGILCGALPGVAGMEKDALLLVEAENLICKSSVNEESKVFMMDQKDTDMVDSPEVSATDNKTLPDWAKSLEPVRKLPTNVGTRIRKCVYESLERKPPEWARKILEHSISKEVYKGNASGPTKKAVLSVLTEACRVKVPHNPEKPRKERNAISISEAILKKCRIALRSAISSDESKLFGNLLGTTLVNSNENEDEGILGFPGMVSRPLDFRTIDIRLAMGAYYGSWEAFLEDVQEVIRNLHTAFGDRPDVLEMVVALSQSFESLYKTEVLDLVEKFDKYLSDKNAGSEMHEELHDILTAANSLPKAPWEDGVCKVCGIDRDDDSVLLCDKCDSEYHTYCLNPPLARIPEGNWYCPSCMLGQTKAHHDQGVQDVKRQQKKFVGEEAHAFQEELNKLATAMEEKEYWDLNMQERIYLLKFLCDEMLNTALIREHLDQCSDKLGDLQQKFRASNFELKDLKYKEEMRTSYARQSRSSKTEQHFNNSSGPVENQQQCTPTALDHLEEAEQGNVGVNLNNPADGVPDGQLNVGKPYKSDKDISSASMVEERKSSGLSEQPSGMAIDQIDGDAIDEGSQSCEKRSLGAKSSTCDNLNLKDTEFSTPGRELPDERASTSFQDNLEASSTKSIELDADNNEMDTLSDDISKLQDSISLLESQINMASSRRECLGKDSIGRLYWVIGRPGKRPWLVADGSMLKPKERDISMVNSYPPSAFDCKGWNSASIFIYESDEEIQCLLDWLRDYDPREKELKDSILQWQRHFCHQSSSPLVDPPISGPKGEQLMELPNTKAAVILEQKYGLQLDQDTSDLPKKRGKKIKLSSEDRTYRCDCLEPVWPSRYHCLTCHETYLISTEFEGHNDGKCSKIHQSPDESRENDEPKVKVTKSDTKEKDSLECSSVIEPSSDRKLMQCPYDFEEICRKFVTNDSNKETVKQIGLNGSNGVPSFVPSPAFFLEPAIVQSQNRKDDELKDWTSSLEECNAMSAQKLVQEVSKSGQSCPGNVGDEKVQKSKKPTPDNTSGEEAHSTTGKPTRLLAVNGGLVPESSLRPLIGRNSHILKQQKINLLDIEAALPEEALRASKCQQIRRRSWRAFVKDAESISQMVLAANLLEGMIKAEFLKNDWWYWSSFTAAMKTSTVSSLALRVYTLDDCIIYSKDQVPSVEPADNTRFQKEELVLHVRAFDLDATMGGALGRCIDHLFDVSGKFATSDRNVDSSCDRYNFDCN

SEQ ID NO: 17645 - protein, 187 aa, Oryza sativa
  Clone ID: TF_OSC400909j.C1.p25.gm
MNWISSIFTPPEAPDPINLISHRCCSPGSIAFIKGWPTSSAIDASFATGCGWPQLVVTNSEIVRDKASIEDEAMDNGARALIELSQGTPGSFCKVPKIILCDGCDEGYHLYCLIPPLTLVPEGEWHCSSCIVQEEKETKRRLHGKDIATNVSMLETDGFAELEAANVLMLLKNSSTDGEIVVSPVSQ

SEQ ID NO: 17646 - protein, 385 aa, Oryza sativa
  Clone ID: TF_OSC401197j.C1.p44.fg
MGRRALPPSSSSSSSSSTTTTSPELRRKRTAAPPPPPSPRRYRSISDVMRRSLPVDAAPPVARAYESTRCDVCGSGERDEELLLCDGCDRGRHTFCLRPIAARVPTGPWFCPPCAPRSKPVKRFPMTQTKIVDFFRIQKGAEDAEAEKYGLFQDVKKRRKRSLVMHKKRRRILPYVPTEDKVQRLKQMASLATAMTSSKMKFSNELTYMPGMAGRSCNQATLEEGGMQILPKEDKETIELCRTMQKRGECPPLLVVFDSREGFTVQADADIKDMTFIAEYTGDVDFLENRANDDGDSIMTLLLTEDPSKRLVICPDKRGNISRFINGINNHTLDGKKKKNIKCVRYDIDGESHVLLVACRDIACGEKLYYDYNGYEHEYPTHHFV

SEQ ID NO: 17647 - protein, 1146 aa, Oryza sativa
  Clone ID: TF_OSC401058j.C1.p97.fg
MDGVDKDKGNGKVHFRDSSPQEAFRTYKRRRQPRPEPQQQPQPQPQSEPEPQQQPQPQPQPQPQPEAEAEAEAEAKAADVLARQVTETFWKSRDIGWKHGIMIDENRQHWKCMYCHLTRYGGGVSRLKRHLAGDLDVKMCPKVPADVSEKIREHLRKKRERRKKRAAQNRDNCVTAKSTSDDIKSGKDPLPVDSEVLTGVDTVLEEVTNQTNHDNQDLTYPKATMLLRGIRDIGWEHAVDLDGNKRRWKCKWCSLCRSGGVTTLKAHLTDSSCPNIPKEISKKVLNFIEEKRAARHLFNSAAKSPFNVKFDEDAVNLSEIQVEGTPPLTDDRQPLGNSLHIQTSECTINEFEKVAAGSNQQGAEHSNQLLNHGEQLMKSSDQPEEHCTLEHGRCQVLDNNKQQTMDNKTDNPEHKEVLKHPKKTRFNIRKHIVIVDESARHWRCRYCGLDGYGKTSRLHFHLAAVFRHPKCPSVPKEVFAKARHHIHLKRRLNVKKAGQQARSRPHILGQSSQQQQNNNPVLSNYPTRLRDNAWEHSLIHDKEKGHWKCKWCSLEGYHGITRLKWHLVGWQNRPQCLNVPEDVAKTIRDKMISREKQKEGRLNLDVIDSCNMPCSSESLQFDQENFAEVMQGKGSSEDFNQAERQSNTLNTVCNTTHPPQNSNNYQGLQENGLYSSKNKSEKQTERYDCWSHWRYVLDGLMHLPGALEGPGIQSCIRDVLLYGSAEFGTVGDKVEMDSNRKVSSDGNIAKCQSVLVDVLKSENFALLCNVLGRTVHQDEQRTKYFDFTMIDSRMKNGDYGRAPLLFKHDLKMVERERGSDDSEENLKGAAATNLEPMNMVKSNALVLSTSQGFNQLDQPDPMDVCDEQNGTNCNECGKVAKIDSILTCKRCMLAFHVSCIEPPVPSTSTGSWCCKTCSTICNESAEVGMALVHYEPNRLHGHCVACKDLEFCRPPRCEETASERAPADNSRAIVIPSAEPVEDVELSDIDVRGLCKMCGNPEEKDKRFLVCGHTHCLYKYYHISCLKATQIASDKQLDKPCWYCPSCLCRVCHSDRDDDLTILCDGCDEAYHLYCITPRRTSIPKGKWYCSSCAIERAKEGMARHEKRMLKLHRKDDPGLQGMRYEMVDMILAAAEMLSDDEQQGT

SEQ ID NO: 17648 - protein, 78 aa, Oryza sativa
  Clone ID: TF_OSC400756j.C1.p2.gp
EGQVKRSRVVAEEYEDDDEEHNETFCGTCGGLYNANEFWIGCDICERWFHGKCVRITPAKAEHIKHYKCPDCSSSSSK

SEQ ID NO: 17649 - protein, 296 aa, Oryza sativa
  Clone ID: TF_OSC400756j.C1.p3.fg
MAPAAQVASNPRTVEDIFKDYSARRGALVRALTSDVDEFFGLCDPDKENLCLYGLANGSWEVALPAEEVPPELPEPALGINFARDGMNRRDWLSLVAVHSDSWLVSVAFFFAARLNGNERWRMCLHVHMYPVLFFLFPFFALSELESCVLDVLAVVYWPFYFKKSAYAMSWKRLFNMINDLPTVYEALVDRKHVRDRSGVDSSGKSKHSTKRTGEGQVKRSRVVAEEYEDDDEEHNETFCGTCGGLYNANEFWIGCDICERWFHGKCVRITPAKAEHIKHYKCPDCSSSSSKKTRL

SEQ ID NO: 17650 - protein, 476 aa, Oryza sativa
  Clone ID: TF_OSC900059j.C1.p1.fg
TSKIGRNPTSSARRSKNESPGSKYCNSSARGSKNAFPGVKTTSTGRITRKDKGLHKLAFMSGVLPEGTDVGYYVGGKVSPSQFEAHAGRAARRKPYHNIYMSNGVSLHELSVSLSKGRNMSNRQSDDLCSICSDGGELLLCDSCPRAFHRECVGFTTIPRGTWCCRYCENRQQRESSLAYNHNAIAAGRIDGIDPMEQIFTRSIRIATTPVTGFGGCALCSMSGFMDKQSVLSRSRPDYDDELAVLDQLHDFSKKKFSARTVLLCDQALPEGAWYCTADCVRISETLKDLLSRGAEPISSVDVEIIKRKYEQKALNKDGDLDVRWRVLKDKSSADSKLVLSKAVAIFHESFDPIIQIATGRDLIPAMVYGNTVVSAGLFRVMGSEIAELPLVATSRDSQGLGYFQALFGCIERLLASLKVKHFVLPAADEAESIWTQRFGFVKITQDELREYLKGGRTTVFQGTSTLHKLVPKLDG

SEQ ID NO: 17651 - protein, 1740 aa, Oryza sativa
  Clone ID: TF_OSC400295j.C1.p8.fg
MDGGTGPGAELLSPGEAEWPPELRLPPPPPPHPPPPPPLEPAPPSTPQLRGEASPPPPPPPPVGPPGAAVVAAAARKEASASAEGFDDSHFLGSIMGAPAHQHQHQHQQPPAVGPPVVVKRKRGRPPKNRDGAAPPPPPKPVKKREDDEDVVCFICFDGGNLVVCDKKGCTKVYHPACIKRDESFFRSRAKWTCGWHLCSTCEKAVQYMCYTCTYSLCKGCIKQKPVKFFGVRGNKGFCDTCYSTILLIESKDDRAKAKVDFDDKNNWEYLFKLYWLDLKGKHSLTLEELVNAKSCWTVRSTSARREKEDSSNDLYDANFDLDASSDGASRKRRRNSFSGKRGRKRQNNGAESLPKRVQNEGMTFIGDTQWASSELLEFIGHMRNGDISYISQFDVQILLLEYVKQKNLRDPRRKSQIICDARLANLFRKPHVGHFEMLKLLEMHFHAKETVNGDGQKGIDSDSAQIDSGGYSDMPSKLCSDKRRKIHKKIERESPANLEDYAAIDMHNINLIYLRRSLLEDLIDDNGTFSDKITGAFVRIRTPCVGQKQDIYRLVKVLGTHKVAERYSVGKKTTDHALEILNLDKKEVITMDTISNQDFTEEECKRLRQSMKCGLITRLKVVLLIKIHYTGDIHEKAKIFQLLRVNDWLENEKQRLSHLRDRASETGRRKQYPFNLIKDLHAYGHHRLIYEAFNSYHHCEIIICMRIHFFMHTLLMEYVECVEKLQLLGTPEERARIINEDPEVHVDPCMSPDYESAEELDVKKAVDSTSRNGSDLLFLGRKGIETNSLQNHRQNCSATSHHTTTSPPTEGMTHGQGEEASFASSEIVSGDMEPEKVWHYKDPSGSVQGPFTLLQLSKWAAYFPRDLRIWLTFESEQNSLLLTEVLSKQQKDFIQPSPKVDNNRSTWEGVGQDRVDSSLTGNNSSSPIGYNVIYSSRLPSPSADYCASAREGPNLPSGTLPFMTSQKTQKDPQMLHGQAQHQGDYSCTIPSSVVSYRPAGSHDEWPPRGNIGEWNNSQDSGGMWSPTTPHMSRSNLEHQPDRCITKKQLQNDSKRNTLAGSAENLNSQMDFGSQKVHIPTPQQPERDLATSVGTSRQFEFKTCHQEGSHWSSTADSITHDGLQLSLASAKPESCSAVNPIRDGDSSSASRVPNQSGAHVYSPPHPATTNLSKSEETMNQCKSCEPEASNKSRKPDASHAPVNQHPKPESDPLLPDTQDFERTHPSPSTEHDTKEPLKDQSRSTSVAPEGSGTMAHGQSSIAFISEASGPLSSKIVGLQPPKDTSFLVEKDIKDGGSITQTEQQKEESTAFKKENVAVDPISDSEAIVSGVLESLTETYNLHEETALENFTPTSAEEEQPQCSTPIALSPWDETSDYQGEAVDSALWGVQDDQNNEMWSLSSPTPTLQPSGIGADTKGASCAIEEVIVAQGNSGVVEPSPALEKKRIEKVPSASIDRGVPEQVKPKSDAALSPEESRKPSGLQLSSTYLQGSTKSSGLPPSGTSLDGGIEPSGLLPSGTSLEWGTKISGVQSSASSLEGSKKAFVRQPSGSSLEGNTKASEKLQHGNHQVLRLLQGAQKHQVGSHHLARARNLSLIPHGVPAKAATRLRTNQQHQQLNTHQKPQGDKETTTQILLAGETLSETRAGIHPQAMRAAEAAILATTMTGTIRAANHGVVAQIIPGDQIIVKNMATVARRDHRRRGGNLKGGSVDTTRMATAGRALPASSSTVENALTFLYSPK

SEQ ID NO: 17652 - protein, 658 aa, Oryza sativa
  unsure (1)..(658): unsure at all Xaa locations
  Clone ID: TF_OSC421069j.C1.p1.np
ICLSQDQTTSHSTATQSMILLLPHLSRDSTASAHFVQLDNSVRILVRQAQKAVAAKRKPQAWEKYAKKRPRVLRINDDDLLITAMVKNRDLGYAKKFTKFKSSKKCAKKFTKFKSSKKCGRLLARMSGKGGSKLGGKRVSLARKTVLCWLIATGFLTVKDVIQYQNLKSNEVVKDGQVTWEGILCNCCTKTFSISDFKVHGGCSLPKSSLGLFLQSGKSYTLCQVEAWSAEFLSRKCDASGRKVEAMDENDDTCGFCGDGGELLCCDNCPSTYHQTCLSDQELPEGSWYCHNCTCRSCGNPLSEKEVSTFSAILKCLQCGDSYHDTCIDQEMLPCGDKQSNIWFCGRYCKEIFIGLHNHVGIENFLDNELSWSILKCNTDGQKLHSSKKIAHMTECNTKLAVALTILEECFVRMVDPRTGVDMIPHVLYNTRSNFARLDYQGFYTVILEKGDEILCVASIRVHGTKAAELPFIATSVDYRRQGMCRRLMDTIEMMLRSFHVETLVLSAIPELVNTWVSGFGFKPIEDNEKKQLRNVNLMLFPGTSLLTKRLDGITAANAGEVRNPEQIKINGRREELGLAAGVARGEGDGEEVLGLGDGAGAAELDDVPTLNWLSGSCAWYFFLMRSRRLYFGXGASRTTSTPTVLSAFVVTTRPVSC

SEQ ID NO: 17653 - protein, 1108 aa, Oryza sativa
  Clone ID: TF_OSC900258j.C1.p16.np
MGSKQIVAVLQVGGEFKTDDDGQMSYSGGEAHAMHVKSDWTFKTFKHEISSTLNNLKLDSYVFKYFLPRNNKTLISISNDKDLKRMVEFHAESETTYIYVMKKADNRVKTSAVVPAASADVKTSAVVPAASADHAVAATTPDGSKRQKICASWENAITGAGQVFEGPKEFRDALHKYAIAHRFHYRFVKNDSSRVTVECTAEGCPWRIHASKSPAKKDFMIKKVFGSHTCESESVKSHRLASQKWVASVIKEKLRDSPNYRPRDIANDLQREYGLSLNYSQAWRGKSIAQKELYSSHEEACNQLPWFCQRIVETNPGSAATVEALEDSKFRFFVAFHASIQGFVHGCRPLLFLDVISVKPNKHWKLLAATSVDGEGDMFPVALSVVDDESQENWHWFLEQLKASLPVSGELTFISNGKCGLLDEVSLIFPDSYHGYHVNYFIEEFKAQLDDSWSEELKDTMVEHVKKAMYSCKVDEFNQCIELIKVESDKLAEWLLETKPEKWSDAFFKGSRLGQYTCNVPETILQWVPSRYELSVVQLVDTIRCNLMEMMYTRREYSNSWTEPLTPSTNQKIQEEMGKALTHSVVCSTGNDGNNNVFEVCDGAVNVVNIDTWDCTCRKWHVSGIPCSHAIAVFERTDHNPLDFCAKYFTTECYRLTYAMSINPIPDIVVAAPSTDPSQGEALHQSPILTRRQVGRPKEKPADPRIAIKRAVRCSRCKGYGHNKATCKVPILIDRYTSTRFTYHENTYTPSRGANGFSRRVHQPKHTSASPPETAARTDTATTTGARATRASTLPHPTPRAVIDSETSDFFAAPIRLPDTWVPHLPQPTRQRHNRKGGRPHQRETSDLLRPASESPTSGSHSTTASSSAPHLAPRLDSPRIPLSSLNPLLALLVLCFACCSPRTAPAAVGGAVVSQVGMLPYEAREVAMGIHRDAVAQAQALRVAAASAIESVTARAPPFGPPAARHPGEAGRGNPPPPCAACGLPENPGGTIVCDSCERGFHLACVRVWPPLMPPPPPPPAPPGARRPRATANEDWICPECEMRGARTNRWKLGPVPLDINVPPPSTPDAEDPVAVATRDVTRQLSQLSFPQLLLLTADLIRWSKKC

SEQ ID NO: 17654 - protein, 370 aa, Oryza sativa
  Clone ID: TF_OSC401605j.C1.p16.fg
MDAQYNPRTVEEVFRDFKGRRAGLVRALTADVEDFFRQCDPEKENLCLYGFPNEHWEVNLPAEEVPPELPEPALGINFARDGMQEKDWLSMVAVHSDAWLLSVAFYFGARFGFDKNDRKRLFGMINDLPTIFEVVSGKSKAKPPSANNHSNSKSKSSNKTKSSEPRAKQPKPQPQPPVKNEGREEEGGPDDEEGGGGGGGGGREEEHGETLCGACGESYGADEFWICCDICEKWFHGKCVKITPAKAEHIKQYKCPSCSGGNGRWRRRQRQRQACAPVLSTKREAIISQYLVRDERSKNTSTHARSPLISDNPYEVISDIRIMLAEQYTTNAREDDFDAKPNDKDNQGEGNVAWGGINKELYSLQVTIQN

SEQ ID NO: 17655 - protein, 1790 aa, Oryza sativa
  Clone ID: TF_OSC1881j.C1.p2.fg
MPPTRPKRRRGGSARSRGRKKQKRLDAIHDVAPVSAPPAGAAVVVGGGGESEDSDAEGPRRSTRVRRAPALLDTSPLPSPRRKRARGGGGGGVAGSSGGSSRRRSRGRARGEAGVAREIGEEEEEEEDDEAGNVVWRSRLRDRVKGKAKLDKRVRSLWFDEDYEVELKEEEEVVVEEEEEDEEEGDEEEEEEQVRTLVVDLREGAEEETMGEGSGSLPMRGREVMDREINLTIDLNVEEHEAVEGVNVVEEEDGEKGGEADEEKGDAIGPGNDLHEGKHEEVGDEEGLHEKERTEELGSAVLEGRNGDELPCNENNAEDGTGSSHEHEHLLVQNEQTVEESNLCVEQQMELDGSSPSEQLKEVQQDVQTGGASNVVLPEEAPKEGVRKFPVSEEKQGTMEIKEGRRCGLCGGGTDGRPPKVALHDTVDSDNEAYEGALPSEDPNYDMWDGFGDDPGWLGRLLGPIHDQFGIARVWVHQNCAVWSPEVYFAGLGCLKNVRAALCRGRLLKCSRCGRPGATIGCRVDRCPKTYHLPCSRAEACIFDHRMFLIACNDHRHYFQPQGDKYVELLRKMKIKKMKADIRKVSHDAWRKDIEAEEKWLENCGEDEEFLKREGKRLNRDLSRIAPVYIGGTSENEKAYCGWESVAGLSNVIQSMKEVVILPLLYPEFFSSLGLTPPRGVLLHGHPGTGKTLVVRALIGACSQGNRRIAYFARKGADCLGKYVGDAERQLRLLFQVAERCQPSIIFFDEIDGLAPSRSRRQDQTHNSVVATLLSLLDGLKSRGSVIVIGATNRPDAIDPALRRPGRFDREIYFPLPTFEDRSAILSLHTKKWPSPISGAFLSVIASQTVGYAGADLQSICTQAAINALKRTCPLKEILLSAEKGFEHGRLPLPSILVEERDWLAALAAAPPPCSQREAGIAANDLVSSPLVSYLVPCLLKPLLHLFISLYLDERIWLPSSLLKAFASIKQVIFSSMEKNNVPHTFWSSYLPSLIQQKGIAKRIASILSGYGLIAYQLGNHDSVLNHNEQHEKFDAHRLNSTGSHPKGGLAHKLSGFRALAAGAPRSGQQHLIRCLLHGFVGHTVIHKLDLATMAQEGNGDILSGLTQILQHTIPRFSVNVDSYFTWDEVIDACCLRISHDLVQQHVQLLHDRAHNNHDEQKEVFVPMEISAPGEHRSSGSKEASMLTKYPLNMDKHPSCGVSSREHPTQLGTCSAQQEPPTSNVEDKEDNTEKIDFNEKVATNRSNRIVKDSESLAIMAFGIQILQHPQFSKLCWVTSKLREGPCTDINGPWKGWPFNSCLLQSTTADKSLSGGNNVLKGKEKIPSVRGLVAVGLLAYRGAYASVLEICSEVRKVLELLVGQVRTKILEKRSRYRYFHILSQVAYLDDIMSSWAYTFQRLHSENRRVKTSPKVTVGKSSTRECQGDSNTAEANILGAPAGCSEAQGTPGQHTDDLEVIPAHCPSEMQENSVQHAPGHLEIHGIVCDLDNDNVTSISSINAVEPDLIHSASLDVHTDSLTPADAVINDGQSCGVDNDGQMSRVINGEENHISNIERPESHTVSVADFNELQRKNAVASSTSTDSAGTSRNMVSSEARGSDNERNTDFPVDDVKLGHLVNPQSQDTMKSLSVLKPPCLYKCCPVCFNAVYKMVHDILSNSVRPSLHCLAVDDMHDLLSSWSVNLLATVRKWYTSQGIVGSEENSGEGHCVCSSDNGCVPRECTCHLESNEDAGTIKDESYYLSGQPLSFFFKDGVLIPPDITAPTTLHCSYMRLCVCSIPGSISMFNRISS

SEQ ID NO: 17656 - protein, 37 aa, Oryza sativa
  unsure (1)..(37): unsure at all Xaa locations
  Clone ID: TF_OSC401827j.C1.p19.gp
CERWFHGKCVRITPAKAEHIKHYKCPDCSSSKKSRQX

SEQ ID NO: 17657 - protein, 1345 aa, Oryza sativa
  Clone ID: TF_OSC403329j.C1.p21.fg
MKDLEKSTSLEVDDSTIDGDVDLGGGLTVVGRKRKDGRGSVDENGASTKRILRSNSMKMHVDAETAGGVALDVCKGDILEKKQCDIIAEGDRGGVLTVDTCNAEEDGEVTGAVVSDAVVEAVRCSANNVESLGLAEVEIAEGNGLDADIQESDGEMDKADDKLSTPSEEQNESGGGTSVGGINDSQENKGVNGLCQGEVIDPLATANGDELSMGLSRSASGRESIEQEDTVMCASDDQKVENHCQFDDKHKEAEISQIELAVDNHIMLTDCTNQKKGIDSPVNETKGDSTPDIVFIRRKSITRKTCEAKQVKSEDEVRFEKRVTRSATVRQREVSASMCVGATNDANLESKERKEDVHHYTRKVGSTVRSKVHHTGVAECDTDTKKKLKGTVTTRRNSDAIANDDPPSITQNKESKTQMKIDIKSQPLTRRGSIVNKTEDAVSGLDQNICSSAITDKNDIELTDSEGVKSENKAAVRKSILSVGAKIVASKKRILESGLDKASGESPVAIPSLKKARDTSSDTELEQPKMSSGKKLTRNNCGSSKKGMSTRRQHQSQTAKLSTSVNCSNKNESKLSQNESDDDGTGSDTSLKNTCVRRTRSGGVVPKKQEDSSESEEPIILRKNHQRGKYSGKRAGSTPRKVKAPKGNRKEVKASSLKSSGPSEQINTGSLREEKQKISDHIKGMLLDAGWTIDLRPRNGRNYLDSVYIPPSGKGSYWSVTKAYAVFLEGMESEKKGRAKDQRPSKKSVGSPGKSHVSEEILSKLKRIVVNKRRTKVELQKLKKRKHGLLKKQKTSKRNSRGSKNKISNSRKLHLGSERKKRGGCALLARGSNKDGGSSTNGFVPYEWKRTVLSWLIDLDIIDINAKLKCVDETHSKVLLEGVTTRDGINCRCCSKVFTVLEFVAHAGGPVSKPYRNVLVDGLDTDLLHCLINAWDKQSDSERQAFFPISTETDDPNDDTCGICGDGGNLICCDGCPSTFHMSCLELEEHSRQDAQDIAEVDSSLCTCSQCEEKYHPGCSPETTNTSNVSSQACDLFCQQSCRLFSIRFLGGNDIYGTVNSALMQSLRYIYSLFSCDIHYRGKLFEGLRNLLAVKKDLEPEFSCRIIQRIHENVPETVVALDERVECNSKIAVALSLMDECFLPIVDQRTGINLIRNVVYNCGSNFVRMDFHGFYIFVLERGDEIIAAASVRIHGTKLAEMPFIGTRNMYRRQGMCRRLLDGIEMILSSLNVEKLIIPAIAELVDTWTSKFGFSSLDVSEKQEVKSTSMLVFPGTGLLQKPLLKKTSPGENSSSQEVDGVFSELESGKTSNVANEDSLCSANAETQGSAAPCYGDNSKDASACND

SEQ ID NO: 17658 - protein, 142 aa, Oryza sativa
  unsure (1)..(142): unsure at all Xaa locations
  Clone ID: TF_OSC401520j.C1.p8.gp
KVTVHQKCYGLHVVPDGQWLCTWCKDLESLQSLKKDADNTLSMPCVLCPKEKGALKPVKGEPGQTAHGGNLKFVHLFCSLWTPGALVEDMESMEPVTNVGSVQENQWKLVCSICKVKHGVCVRCSHGMYFTLCLHFTILVRX

SEQ ID NO: 17659 - protein, 729 aa, Oryza sativa
  Clone ID: TF_OSC900333j.C1.p1.fg
MVIAVEGGFVHEEEEVDHPIRYLPLGRVYSSSAPCPLPKKPRSAEDGKPPVIVYYRRRRKKPRVEGPPPSPATAPPMLHPREDDEDEEVTRRKGSLKYELLSLGQAPPALGGDGEEPARRRCLRRSGGAERRGYFSEPKRRQRQGVHKEAASSAGRRWLELEIEAADPLAFVGLGCKAKVKYDDGESEDLNLADERIKFSISSEEMKCRNLKFGISNLNKRGYDELLALAVSLHDYQGLDPGDLVWAKLTGHAMWPAVVVDESNVPANRALKPGRLDQSILVQFFGTHDFARFLCTQLLPENMLQLQKSMEKGSSDANSNKDVHSCDNLSEDKTAESGGDYDEMTPIELGNLRVSKLGRIVTDSDYFHNKKHIWPEGYTAFRKFRSVKDPHVVILYKMEVLRNSDIKARPLFRVTSEDGTQIDGSTPNTCWKEIYCRLKEKQRNVASGLDRDVCQGSGSYMFGFSNPQIRQLIQELPNARSCLKYFENAGDTFRGYRAVHVNWKDLDYCSVCDMDEEYEDNLFLQCDKCRMMVHARCYGELEPLNGVLWLCNLCRPEAPRVSPRCCLCPVTGHAFNYINPNFGTETCLKDVKRMEPIDGLSRINKDRWKLLCSICGVAYGACIQCSHPTCRVAYHPLCARAADLCVELEDDDKIHLMLLDEDEDPCIRLLSYCKKHRQPSTERPSLESNLAKPAVVVQTDAVPPSGCARTGKRANVYLRLRASFVKFSA

SEQ ID NO: 17660 - protein, 998 aa, Oryza sativa
  Clone ID: TF_OSC900332j.C1.p8.fg
MVIAVEGGFVHEEEEVDHPIRYLPLGRVYSSSAPCPLPKKPRSAEDGKPPVIVYYRRRRKKPRVEGPPPSPATAPPMLHPREDDEDEEVTRRKGSLKYELLSLGQAPPALGGDGEEPARRRCLRRSGGAERRGYFSEPKRRQRQGVHKEAASSAGRRWLELEIEAADPLAFVGLGCKAKVKYDDGESEDLNLADERIKFSISSEEMKCRNLKFGISNLNKRGYDELLALAVSLHDYQGLDPGDLVWAKLTGHAMWPAVVVDESNVPANRALKPGRLDQSILVQFFGTHDFARFLCTQLLPENMLQLQKSMEKGSSDANSNKDVHSCDNLSEDKTAESGGDYDEMTPIELGNLRVSKLGRIVTDSDYFHNKKHIWPEGYTAFRKFRSVKDPHVVILYKMEVLRNSDIKARPLFRVTSEDGTQIDGSTPNTCWKEIYCRLKEKQRNVASGLDRDVCQGSGSYMFGFSNPQIRQLIQELPNARSCLKYFENAGDTFRGYRAVHVNWKDLDYCSVCDMDEEYEDNLFLQCDKCRMMVHARCYGELEPLNGVLWLCNLCRPEAPRVSPRCCLCPVTGHAFNYINPNFGTETCLKDVKRMEPIDGLSRINKDRWKLLCSICGVAYGACIQCSHPTCRVAYHPLCARAADLCVELEDDDKIHLMLLDEDEDPCIRLLSYCKKHRQPSTERPSLESNLAKPAVVVQTDAVPPSGCARTEPYNIHGRRGQKQPQVMATASVKRLYVENMPYIVSGFCQNRVGHDAISEPIQSVGFLDVAHQEAVGNVSSMIEKYKSMKATFRRRLAFGKSRIHGFGVFAKVSHKAGDMMIEYIGELVRPPISDIRERRIYNSLVPEGYMWKTLVKLIGLFMEFNLKALMGVIITTFLGAGTYMFRIDDERVIDATRAGSIAHLINHSCEPNCYSRVISVLGDEHIIIFAKRDINPWEELTYDYRFVSSDQRLPCYCGFPKCRGVVNDVEAEGQSAKIRGSYLELPQGTGLRTVLLRG

SEQ ID NO: 17661 - protein, 799 aa, Oryza sativa
  Clone ID: TF_OSC400342j.C1.p6.fg
MGKGGEGAVPVGESGGRRRRRPGEDGGDDDDEEYVVEEDEEEECDEDLSASSAGEGGEGTDEEYEEGDEDEEEDETPRPRQPVKSRENGRKGKADPPVARSRRRKYEDDDDYSEEEDDRVDEYGEDLEEEEEDLEEEEEEDDEAPRSKRMKKRGGRNVEGKLPLERSNRRRYEEDMDFDPDMDEEEEEEDVDFDPEVEDEEEEDFEDEEDDELEATKVRVKNMGRRKSTLNQRRGKMKSSSKVASRKVGSVKARNAASIRRRQKKRSMLDRYEDDDFIVEDEVMADWQPRKKARIRKQMEVDPPTPVFEAEIWPTIDSDTTDFEFVTSDEEAAIAEPTRVIKKGRKKRVFVSDSSSDSEFVVSDKELGNLKESEPPESLKVLPSSPRKISVTGNGEHKGKEKKEPQEAGRATCGICLSEEQRVTVQGVLDCCSHYFCFACIMQWSKVESRCPLCKRRFTTITKSSKEDTGLELTNSVIRVEERDQVYQPTEEEIRRWLDPYENVVCIECNQGGDDSLMLLCDICDSSAHTYCVGLGREVPEGNWYCGGCRLDGEAHSYHNHVNGNSGMFGAISPIGTFERQGIDLNVSPREIPRGNHSVESQASTAGASTPSGRQTNATNFRRRQMHDWIRSLLSRPRTTLGPVMHHNGVHQSGFVPSTEPDHMNFCAPLESDTLHNTGSVPQSEPSQNFHVMSEANTSETSFGRHAALSERRQIYERFFMLLSRPSPTIRPDLCHNASEHGSSVPRVEPNHMNFHAPPVANSPQTLLDGIPNRSNGFSFTQAHSNFVDGNNFQGTEGV

SEQ ID NO: 17662 - protein, 1103 aa, Oryza sativa
  Clone ID: TF_OSC400766j.C1.p6.fg
MAGGSSPSPAAAPIQVRCAGCRGVLAVGPGMTEFICPKCGMAQRLPPQLMPKPPPSSSSSAAATPAPPAPAAPPPPTSRRGGGGGAALPPPQAQGVDPTKIQLPCANCQAVLNVPHGLARFRCPQCGVELAVDLAKLHNFLASSNNNAAAAPPDNVPPASGPASRAPLVPAPPPAPFPPVPTPGMTQAPQMVPGALIPMVLPITDPPEEINEVAIDVEREEDEGGTVGETFTDYRPPKLSLGLPHPDPIVETSSLSAVQPPEPTYSLNIMDELDETKALSCLQIETLVYACQRHLYHLPTGDRAGFFIGDGAGVGKGRTIAGLIWENWQQGKHKAVWVSIGSDLKYDARRDLDDVGAKCVQVHPLNKLPYSKLDSKAIGIKNGCHKAKNLIPDAGSQPTRTGSLEKGGVGALELVAMDMKARGMYVCRTLSYKGVDFDIVEAPLEERMMNMYRKAAEFWAEFRLELLSAGESFTEGISNQIWRLYWASHQRFFRHMCMSAKVPAVVKLAKEALAENKCVVVGLQSTGEARTEEAITKYGVEMEDFVSGPRELLLKLVEENYPLPPKPDSFQQGEEKVTEIHRKRHSAPDVSFKGRVRKVAKLVEVSDDDSDDYSPSESDHGSTESDEEFHMCQICNTEEEKTLLLHCSGCSRHVHPGCLTPPWTGVLTDDWSCYTCKKLEGEENEQDAHVADFSQRYDAAVEKKKKILDMIRSLDLPNNPLDDIIDQLGGPDNVAEITGRRGMLIRASDGKGVVYQARNAKEVSMEMINMHEKQQFMDGKKLISIISEAGSAGVSLHADRRAKNQRRRVHITLELPWSADRAIQQFGRTHRSNQTSAPQYRLLFTNLGGEKRFASIVAKRLESLGALTQGDRRAGPSLSAFNYDSNYGKKALTIMYRGIMEQSYFQDDQDSFPVVPPGCSDNQSSIQEFIAEAKAALVSVGIIRDAVVCNGKVAGKLSGRIVDSDMHDVARFLNRLLGLAPKIQNRPFTLIACQARQLYFLLSPLTEELLGRQKDGAGSSNDGFYESKREWMGGRHFILAFEGSIEGMYKIIRPAIGEALREMPLTELKSKYRKVSSIEKVNKGWQDEYDASSKQILKRIRIS

SEQ ID NO: 17663 - protein, 744 aa, Oryza sativa
  Clone ID: TF_OSC401951j.C1.p1.fg
MVEHMDWQPVTTLGPNFSPELHSLLLSDHRASLLSLLRRQDDELRTKIKNHLLALGWTIASKPKPPGLAPRLRYVSPAGTKSYYSLRRLIQTIHLHHHPTQSQSQSQSDSCGCGDTPLLLEESDDDQYQEQQEDDAIAGYVAFMEEQNARRDRGQGNDEEQRSMAKELRIKAKDQLRSSGWTFSMKVKYNGREELRYTEPRGRSHISLITACKAYLLHHTPSTTMASCSNNNNKRPAPPAACKTATSSKKNKKKKASLQQARVLRPQPRNEEGNALTTARARTLLSLLIDKKILAPRDQLIYTTKRGLITGDGMVKCMCGGCINNNNKRRVAEYTVAEFAVHGDGDVASSSSRQPWARMFVGDGRSLSQCLVQLMMADDEAGSGRKKKKKKYLPYVWRGARVKRKWEEDDDYVCSVCHDCGELLMCDRCPSMFHHACVGLESTPQGDWFCPACTCAICGSSDLDDPPATTTTQGFSSDRMVISCEQCRREYHVGCMRERDNGLWYPEADGEGPWLCSEACSKIYLRLEELAVVQAPCRSVASGLSLVVLRRGAARDGEEEEHAKLCMALDVLRECFVTLIEPRTQTDLTADIVFNTESELRRLDFRGFYVVGLEKAGELIAVATLRVYGEEVAEVPLVGTRFARRRQGMCRLLMDEIQKLLGEMGVERLVLPAVPEMVATWTGPSFGFREMGQADRQDVAHHAILRFQGTIMCHKQLPPQPQPQPQLGHTTTTPAGRIPSPIPL

SEQ ID NO: 17664 - protein, 1764 aa, Oryza sativa
  Clone ID: TF_OSC401375j.C1.p5.fg
MASFYCVRVQIDSASLRHILRPFAAQGAAPPEQLAASHPSSQYGQPARAAPSTSLLAQVAGNHPHATHVSDRKALFGMLNAGNAANVIDLTRASPLGGAEPLPKHPRHGLEASSSVEQPSCLGPLFQNTSANVQGSFPGECSVNNGISQGAIQFQDSSTCAVQKLPSQSTPRHHPALLGDQICVSCLNVGGEFFVGEAGIFGVRCFCHRLRMSVAKFCEHSGGPAEKAGEIVIMDNGMTIVQWLKYCMGVGASISDTKWDWPEWAYMRYSSEEYWTKSLLTTNNNMEKTGLFSGHGKSTGHINNPVYSSDIHNEVGRFTSVEKLVNKPDETFYRKSVGLHEAFSKNPAIQQSSKINLANHMIHDMNMNSISRPSERTYSTANMGITYSRNHLAHDYANFLEKNLNNLSRSPGPSSTRVLSNDSRACMPDVPHKIIQDGSESLGADAYPKQTTKANKTIENIEPSFGTGNRKRSLDVSNGTSHSELNEITDDAAKNSFISLFLSHLERNSTSESIDDVLNSNEHYLLKAPDVAYSSDRLKTASTQVETRANDNQLKLAPAIIHTKRISDSRSLPVPVASKGYVHQDVLHANSQEPLINGDCLPHLLPSQPNAGISKICAEVSSPVNCRCCNHVADKSHLAHSETGAPCFYDRTENQCIDAVAKLKKILPNLVLELAISADLISVMMALQFQPIGLDEVRTRSTFIPRSSLCSRELMLQSCCHACPIDGYYRSSMGHTANSLTKNTLLDAPNNTECSPYRDGKCCCSLAPKCLAGYGFTKHCVARIDQTDHTVQKSKDDGMQAAARCCTLGESEKLICQCSSEIIARKSDSKASFQNEVSTEVLNRPCVPTLQQLKNVTEASAVGGHWPYETVKEKASACRDSGIFKELKSGFSSGFSSDVVTKFSASPELNKYGLEHKNLVFDEGSRIEKCSSSSYLPISTGCEEAQNSFSRFHLEPSLVKHKNNQISEGSTRKEHENEGQCSEMSKKTRTLRCCANKSESDDCTRKIDLSSREGDSQPQHKAGPFSRRVSKTKRKHPPTHLNKHVKRLHSNCKVLNVDNERSDDEGIYVGESNSSDRKKQEDNMTTLDRTKCQQQGSRLLVRKLPKYVSLNCIVNETNSEDACSGSASIDSSLIATGITNDNRKSPKIVPLNLILKKAKRCHAIKPLSKTENIHFSEEKSSDGSADKSSSGDRSFSPQDELWSPKKNRYSSNVSRPHVKTDCQSPCCVLEEDEPLSLADMGTSQLSASRSRGSKNQRACISLNRMERYIQRPSLDASCCVCGISNLEPSNQLIECSKCFIKVHQACYGVLKVPRGQWFCKPCKINTQDTVCVLCGYGGGAMTRALKAQNILKSLLRGIATAKRSDKYVYSSGNVNSECTSKLHGEYVRHDSFNGHRSRSFNAISSFGIKEASIGSARGDIISKSWTSNRNSSLLGPRTRQWVHVVCGLWTPGTKCPNTITMSAFDISGASPAKRNTECSMCNRTGGSFMGCRDVNCSVLFHPWCAHQRGLLQSEPEGEHNENVGFYGRCLDHAMLDPNHVNPKKECLRSNDWTCARTEVFRGRKGDSFGANRSRKPEEKFGECSVSQEQINAWIRINGSKSCMRGQKEYVHYKQLKGWKHLVVYKSSIHGLGLYTSEFIPRGSMVVQYVGEIVGQCVADKREIEYQSGKRQQYKSACYFFKIGKEHIIDATRKGGIARFINHSCQPNCVAKIISVRNEKKVVFFAERHINPGEEITYDYHFNREDEGQRIPCFCRSRGCRRYLN

SEQ ID NO: 17665 - protein, 607 aa, Oryza sativa
  Clone ID: TF_OSC400426j.C1.p15.fg
MEFAVGSGSVRDLPPSKRFKYVGGSSLGMAPCLPARKRLCPPMLEAAAAAAAAVPVCLPAKKRAYAAAAAVEGGGFALCLPAKKRAYAPPVDDAVAPACLPAKKRIHAPPPPPPDSGASPSVPTTKRVDTLPPAAADKAAISPSIPVPVRKRVHAPQPPPAPAPEKAAVSPSIPVPAKKRVSATAAAAATDASPRVPFKDLVNTLPPPRDAAVSPSIPAKKSARAPPSPKDTAAPVSVCLPSNKRVMPPFLPPSPPPSKESDGARVAAVKEAKPQGSNKRGATTNSSVANGVEDDYARAEASKIQEKPKIPEKPINHEEIKEQVSKKQRSNTCRESKDQECNQSCSAISAKQSEVEALEKACKAIDLNEAAREEDSWDGERVAREPTQEAMAAAAEEEVEEEDDGVHCAVCGSTDGDPSDPIVFCDGCDLMVHASCYGNPLASFIPDGDWFCSVCTAAAAKKSKGNKPPPPPPRCCLCPARGGAMKRTTDARWAHIACALLVPEVFFRDPDGRDGVDCSRVPAHRFATACYVCESGGGCALECSQPRCGLGFHVSCGLDAGLCIEYQEAKAGGGGGGVVAGFCLEHTKLWEKQQLTGKYKIVSRGQK

SEQ ID NO: 17666 - protein, 1774 aa, Oryza sativa
  Clone ID: TF_OSC401733j.C1.p15.fg
MEGAAAAAGGGEMLSPGEADWPPELRLPPPPPPSAASEGEPPPARAAVGMDDSQFLGSIIGLPAQPPQATAEALAVVGVKRRRGRPPKKRDGAAAATAVVPAARPARRREDEEEVVCFICFDGGNLVVCDRRGCPKVYHPACIKRDEAFFQSRSKWNCGWHICSSCEKAVHYMCYTCTYSLCKVCIKQGKFFSVRGTKGFCDTCYSTILLIESKDEGDTKIVVDFDDQNSWEYLFKLYWVDLKGKLSLTLEELTSAKARWNAPTTYTRKEKDESSDDLYDANNDDDAGSDCSSGKRKRNSSRKKGRKRRKPNSDCSIATKKVETVTRDDGTLPNKVPTEEASLPVDTKWASPELLEFVGHMRDGDQSFISQFDVQALLLDYIKQNNLRDPQRKSQIICDSRLHRLFRKTRVAHFEMLKLLEMHFIVSEPSAVNDGSQGIINPDSAQIDHASGYNDMAAKFSPDRRRRMHRKMEREPQANPEDYAAIDMHNINLIYLRRSLMEDLIDDPTLSDKISGAFVRIRISGLGQKQDMYRLVKVVGTHKVSEKYSIGKKMTNFALEIMNLNKKEIITMDTVSNQDFTEEECKRLRQSMKYDLISRLKVGDIQEKAKIFQFVRVNDLLNTPEERARRINEVLDVHVDSHMDPDYESDDEFGNKKAVERSVNWARSDPFVSPVKVKYSNSSQKNGDATRHLKNLSKQNTERKSGAARNFENSHSPVGMDIPKSGTNVKSTRCETTSPSSHGVVSSDMEPEKVWHYKDPSGNVQGPFTLVQLSKWTSYFPRDMRVWLTFESEERSLLLTEVLSKQPKDFGQPASVTTSSKSTVADTGQNRNTEIVDLNKAPSPVGYSMLNSFETTVQSTKHSAPERESVNSLDDRLSHSTDSVPPKDANASNSQAMCQIKHSGSLPSPGSPHQRSDLHHDEVQGGRSGEWNNQHNSELWSPSMPQTSSSAHSNVESHHDHYPSWSQVQHDPKNSLQAGSGKDLNSRYDIAQKLPSQRITRDVPSPVFAWSPSESRTASSQHEGSCLSSTTNLCTHDELHSSIASAKAKSFAPATPVEDRGSSSPSGMLSLSERAPICSPQSAPSASASDTCKMEENMNQQKTLEADISNTSVNQSPQSKILPESSPDNQDAEHEYRSPPPISESKELSPQSRTTPGSSPDNQDTEREYPSPPPISGSKEISPQSRTILESSPDNQDNGHEYPSPPPIPESIELSPHSKALPESSPDNQDIEPECPSPPQIPESKELSRQSKILPESSPGNQDIEPECPSPPQIPESKELSQQSKILPESSPDNHDIKCEYSSPTPIPESKELSLQSKILPESSSDNQDIKCEDPSPTPISKSKEVSPQSKILSESYLDNQDVERECPSSILITESKELAVDLPGSISLAPEKTASTDVGENSSLAFIFPKSTLAGDDALKSVFDMAKAHLECEDSKVKEELYVESTVVIRDDMVVNPASGVESIDMSENLLESLMEQSCGTFYMDGTTALEGFLSGSTKEEPQCSSPIALSTCSSPIALSPWGEHGYYQGDSVGSSLWGVQDDDPIGNIWPLSSQAPALQYSSGSTAHFIDEATVTHGNNGVVLSSTPGEEVGLPNSGVCTDWGLVEQVNPETNDASVSMIDKNSGLVDSQPSANDGSDVGTARNTNHNTNLSLNHETAVPLSRSSGEASRKHGFITDLNVATSEEALGNTKNWNPYAGNANRGSQRNHHRDRYSQISESWLLSSNYSRSRSDGFGTGGSSRSTPRGQTQRGICKFHENGYCRKGASCNYLHP

SEQ ID NO: 17667 - protein, 361 aa, Oryza sativa
  Clone ID: TF_OSC400429j.C1.p18.fg
MGPATPLRRRTRARPAATRAEGGSGGDGDDDDVRCEACGSGESAAELLLCDGCDRGLHIFCLRPILPRVPAGDWFCPSCASPSPHSKKSHAAKKPKQFPLVQTKIVDFFKIQRGPAAALAAAAESSEGKKRKRKVGGIRLVSKKKRKLLPFNPSDDPARRLRQMASLATALTATGAVFSNELTYVPGMAPRAANRAALESGGMQVLPKEDVETLNLCKRMMARGEWPPLLVVYDPVEGFTVEADRFIKDLTIITEYVGDVDYLTRREHDDGDSMMTLLSAATPSRSLVICPDKRSNIARFINGINNHTPDGRKKQNLKCVRFDVGGECRVLLVANRDISKGERLYYDYNGSEHEYPTHHFV

SEQ ID NO: 17668 - protein, 1229 aa, Oryza sativa
  Clone ID: TF_OSC101008j.C1.p5.fg
MACAPSSHLVHMDVLAVIFLEERSEKSSLCFEFGGRESRGRKPPSGSRKSSSILMTSDELAGEGEVDGAELILSLPEDVLGLISAHLRPRDLLALSAASRSLRNAVSTADKAWLAQCRRLLPTASHLLAWRTALAHSSLAVCRFLHSAAPLLGLWAHQNPELGNLVLALPGFLSLVAVRSIPQELSPRLLWAPVFELLADHRGHPAFLFLHGAAHDSLFPGLLSSSLHPLANTLFLEAHTSTSTSHFSRLAFADRRRLLNALVAASRLTLPPDVATAPLFARSDADLPLLAARREAMLRLHSQSGGGMVRRAEIEALLIGARKTAALPADTAGDKMRLRRTFSVVAGFVRNSLRQMVTRSASANSRAEYAHPKHLPLDEFLRAGESVGLSLRGARMRLSIYRNWPSMHDNRFVLYKLTTQAPMPGREYAGLWGGTFGWPPGRPEDERKPGKALFFLLLSYEEDSEGKLQLIATKVLEGTHYVVHPNGSSMFIVRVGEPSTETFPWQTDEESRAVEINRSFAGEGIATGYGFRYPGSKPGSLFVLLDGRLAFVWRENKAVLTLQRLDLEDMIRRGERVPSLPPIPNFAYLTKSYSNVFAVAPGSTSFPASPRFIYFGNSVVSKIRRFMLNFRYKLKCQNLANELQSQIQPPDDNIMSIDYLRAIATSTAVMVEYKWRSKRNATSCIWAFGGVWSVDFGPARPLPLMANGANSKKDAKAQHWISWRDTLHGFLQSPAISQGGGIQTCIRHALQHNPCLLTNGVVVHTEFKGNPAHSQGEEAKVQHPNGAAGGKVVSADAAIQDAAAAASSEANKAMCNNALFDILVSQKFALLCHLLLGTFHVNKPGDVIDLEKIDAKMRNGDYAHNPALFDDDIQQMWEKFEQVGQEMTGLASNLSTISRVSYQKQASGFSEAEVAEHRIEEISLPGAVHVVTKESTTTVQLAPCDSSHSTIPKRTVPPGRDLCPCDGCGTKVDVEEGLICDECDTMYHFACVKLLNPDIKQVPAIWHCSTCSFKKKELAADTTNNVAHDCLHGGNCVLCDQLELVKTEEEDPKLPIKIELAEEREGSSVSSMGEDNEPDLSTTALSNLCKHCGTCEDDDKRFMVCGHPYCVYKFYHIRCLKTSQLAIEQQKKLGCWYCPSCLCRGCFQDKDDDQIVMCDGCDEGYHIYCMRPARNTIPKGKWYCTFCKIRRAAEGMHKYEDSVLKIHGNSKHACNVNQSKDSEGDGTEK

SEQ ID NO: 17669 - protein, 614 aa, Oryza sativa
  Clone ID: TF_OSC421502j.C1.p2.fg
MDQARISFFPDGLRVMIIDDDAKAVRRATATLSQLQYAVVATHSTASAGLRALSGDNVVEIQAILCDVHKVVSSGFDFRRVVESELRIPVIYLLSKMEEEDMVAGEDAEFLNHLLLTATYIVRKPLNPTVMARLWRVVAWRMYCLEERIQANVAANAGAGGEDDDDDDDVVIVEEPQVHFKVVRRTSGGSRKRQLTINVVDDGNRGSGSGGGGGGGADANPTRILQHITSNLQEFRTKHQKKDMAIERPLISSDSMFLKAILPTLKISPCNPLTLTGGIGSSSVAAEAFAGGSSSAAPLQIPVFQQQSTGNGNTVISFSNNASPMAMRAPTDNTMISFNNVSAAPVANAVISFSNISRSAAMQAPAARGQHLSGDVQQLDFPQQKLYFGPFSYQGPPPPSMHNHINLLPPTSSPVTCSMDKGKVPIIELPYGMPVDDFLVSQTTYGGAGPSIGATDAAAAAYPYTDAPSNNVATGCLMVPPMGPAFSITEPTVVAQGEGTGTGVDAGTSEKNAIVEAPNNPAPLMVLDQVAADAAMDVQEDIMFSLESLLGPDYDLLPMEDVSAPDTAAAGDAAGGSLDGEEGGMDIGWDLDLDDILVENVNDFAFLDNLAGSE

SEQ ID NO: 17670 - protein, 188 aa, Oryza sativa
  Clone ID: TF_OSC407404j.C1.p6.fg
MSSIGAGAGGAVVGAAVAAVAVGGGAPPHVLAVDDSSVDRAVIAGILRSSRFRVTAVDSGKRALELLGSVAVICSRNFLMFLWLAHHLAGTKCEHDNHGLLDAGDDGIRAPEESQGVIQAEEDPRGDHVLGECANKNQQITEHLTIVLPSLLCSIGLLTRCLEEGAEDFLVKPVRPSDVSRLFSRVLP

SEQ ID NO: 17671 - protein, 288 aa, Oryza sativa
  Clone ID: TF_OSC405568j.C1.p1.fg
MLNVMVIDEDRRHAYSTSSMLTQFNFCVTVYTSPIKALDFLENHAQDFDLVLAEVHMEELNGFAFLTASRKIHKSIQVINLKVVRMEKIKGLLQDDSSKNTKVIKNKGTTDCNQIATHVHQMQVLNGDDVYTAMRRSLHLGTIFDESNYSNDPCSNEYKVGEDEIGGYGCANEANATHSSDDHNVVVPDLSCNIADDVSQEIMSKATTCVDHRKQDTTRTDGPAAMSADEANATFSTGNLQQVNVIVTCNGDGSQESIQKNTCDDQHAPTGSKPETFRLVNYSDSESD

SEQ ID NO: 17672 - protein, 252 aa, Oryza sativa
  Clone ID: TF_OSC405568j.C1.p4.fg
MAQRVGHSADGVFVMIVDEDKSHANFARGMLSSLNFHVIVYSSPVNALVFLENNAQDVAVVLAAVDMKQLSGFQFLEAARVKRQDLQVIMMSAETTMSTMMRCVKLGARFLVKKPLNEETVGNLWQHVDLKVLKMEKIRELLQDENNEEEEVNSFEAKKADSVKVQSDEKGHDNAKISNTAAAEGSDEKVSSGDGHVVPKAYNNVNVEESIGSNNTSGEQVSDKIKSDARVGVILVDYPDFEDDETKKPTST

SEQ ID NO: 17673 - protein, 293 aa, Oryza sativa
  Clone ID: TF_OSC421794j.C1.p4.fg
MATRLGREARGERWVQGIAAYVHGGGRLGTPDRERWRWGEVTRLRKGAEVGREYGRSRWEYDGQETLPGDGTPTPWYSTGIRTMRVPAAVTGGCGCGVDGGGGCCRGGGKLADWEEGKDDEMKSVVVKGWTRMAQVVPLHDNASAEDDDDDEEDDDEDDDDDDDEDDEEEAAPPYVMAVDDSSVDRAVITALLRRSKYRVTAVDSGKRALEILGSEPNVSMIITDYWMPEMTGYDLLKKIKESSELKQIPVVIMSSENVPTRISRCLEEGAEDFLLKPVRPADISRITSRMLQ

SEQ ID NO: 17674 - protein, 610 aa, Oryza sativa
  Clone ID: TF_OSC404834j.C1.p7.fg
MQNSIDLVLTEVVMPGVSGISLLSRIMNHNICKNIPVIMMSSNDAMGTVFKCLSKGAVDFLVKPIRKNELKNLWQHVWRRCHSSSGSGSESGIQTQKCAKSKSGDESNNNNGSNDDDDDDGVIMGLNARDGSDNGSGTQAQSSWTKRAVEIDSPQAMSPDQLADPPDSTCAQVIHLKSDICSNRWLPCTSNKNSKKQKETNDDFKGKDLEIGSPRNLNTAYQSSPNERSIKPTDRRNEYPLQNNSKEAAMENLEESSVRAADLIGSMAKNMDAQQAARAANAPNCSSKVPEGKDKNRDNIMPSLELSLKRYHTPVASNQGGTGFMGSCSLHDNSSEAMKTDSAYNMKSNSDAAPIKQGSNGSSNNNDMGSTTKNVVTKPSTNKERVMSPSAVKANGHTSAFHPAQHWTSPANTTGKEKTDEVANNAAKRAQPGEVQSNLVQHPRPILHYVHFDVSRENGGSGAPQCGSSNVFDPPVEGHAANYGVNGSNSGSNNGSNGQNGSTTAVNAERPNMEIANGTINKSGPGGGNGSGSGSGNDMYLKRFTQREHRVAAVIKFRQKRKERNFGKKVRYQSRKRLAEQRPRVRGQFVRQAVQDQQQQGGGREAAADR

SEQ ID NO: 17675 - protein, 200 aa, Oryza sativa
  unsure (1)..(200): unsure at all Xaa locations
  Clone ID: TF_OSC8667j.C1.p1.hg
MSKPSPPWKATRRSNAISYRIISTSRSSSVGRARRHRIRAFRFGKVAGCIAKIWLGKVGSNREIVRSGGFLGXEEKNISVLALPSSMAVAIEAPFHVLAVDDSLPDRKLIERLLKTSSFQVTTVDSGSKALEFLGLHDHEDSPISTQSDQQEVAVNLIITDYCMPGMTGYDLLKKIKESSYLRDIPVVIMSSDNIPSRIN

SEQ ID NO: 17676 - protein, 224 aa, Oryza sativa
  Clone ID: TF_OSC400220j.C1.p88.gm
MTPSRTGRGPAAAGAASPRLRRARLLRGTSPPLASSAAAASSAASSAAAARLLCRRSLPHPSPPLPLAASSPTAARRPLPAADCRRDIDLMATCRSRGVERGGAPHVLAVDDSSVDRAVISGILRSSQFRVTAVDSGKRALELLGSEPNVSMIITDYWMPEMTGYELLKKVKESSRLKEIPVVIMSSENVSTRINRCLEEGAEDFLLKPVQPSDVSRLCSRVLR

SEQ ID NO: 17677 - protein, 127 aa, Oryza sativa
  Clone ID: TF_OSC400542j.C1.p8.fg
MARKMIRVLLVEDEEINRVVARAALKAAGGGDVVDEAENGEVAVQRVRDAAAPYDLVLMDKQMPVMDGHEATRRIRGMGVTTPIVAVSSDGLPADVDAFITAGADDFTSKPLSKEKLGVILAKFRLA

SEQ ID NO: 17678 - protein, 1048 aa, Oryza sativa
  Clone ID: TF_OSC412867j.C1.p3.fg
MREVEEVSKWRRRCCYFWILFPLAVIATCMTITVVTFCSSTMYMTEVMGEATKGAMDSALMHIAGNMRPLLEANRSVFTIANTLHVQGNMASFSHVGPKLFLAFSMQPLQAQISYAAVDGAAFAYYRAGGGDGEARAMFARPNGTWFTQAVDPATGRPVGNATAAAPHQQLPPNVTRLLLDGGGGGASLADGWARPGVRMLFLSAPVGGGGGAVSAAVAVDDVVLRGAAGLRQLRDLGMYYAVAGNGGATAAPPAPEPAAYRSLLGDGAAAEEMALFSSVKCTASAIDAPPKLDVHGVKSDKYRFACTNFDISGVQMGFRVVLRKSAMVGVFRRGGVTMVAVACAAAAAATVACVLMARALRRAVAREAALGADLARHRDALRQAERKSMNKSNAFASASHDIRSALAAVAGLVEVSRPEANPNIVDNLNQMELCTNKLLDILNSILDTTKVESGKVQLEEVEFNMADVLEESVDMANVVGITKGIEVIWDPCDFSVMKCDNIIGDSKRFKQILDNLLGNAMKFTQEGHVILRAWANRPIARGSIGAPSRFAYRSLENNFFSFFFGAKEDRVSQNSFNPLQNDPNSVEFYFEVVDTGIGIPKEKRESVFENYVQVKEGHGGTGLGLGIVQSFVRLMGGEISIKEKEPGERGTCFGFNVLLKTSGNQAAEEDIEEGPSTVSELDIRASVFRETNCFKGWHCILFVHGDETRRVLQAWMESIGMKVWMVPGVESISSTLEKARSSRDDCDVDRCFSSKEMVSQVLPTTLRNNNIMARNLGEHHPLGMLLIVDVSNGQLENIQRQARDFTQMRSQVPCKFVCLTDLRTSYKDFRRFEEMSCDLILRKPVHGSRLYSLLMTLRDVQSSPMHRSSLVGHENYVTRHQDSANIVALAEVGRLDQGLKTEEDRPLDGMHVLLVEDTLVLQTIQRKMLNQLGAIVELAGDGAKAVDMFRDAIERASVSEEHSVPLPYDVIFMDCQMPRMDGYEATRRIREEESRYGIRTPIIALTAHSMEDDLQKAIDVGMDLHMTKPIERRRIVEAVHGVCKGKN

SEQ ID NO: 17679 - protein, 665 aa, Oryza sativa
  Clone ID: TF_OSC406972j.C1.p7.fg
MGGGVEERKVVDLEDGDGEEGEDAAAVAAGSSRETRMLPRMPVRVLLAEGDDSTRHIICALLRKCGYRVAAASDGVKAWDILKEKSFNIDLVLTEVELPLMSGFLLLSTIMEHDACKNIPVIMMSSNDSVSMVFKCMLKGAADFLVKPIRKNELRNLWQHVWRKQLSSGVLDVQHTQQEDNLTERHEQKTGVTKAEHVTENVVHKNMECSEQESDAQMYLALQICINVGELIYQFFKSAKCHSSVLLGIAKWSTYDNSKSSCTRSELEADSRQTNNLLEYKQPMGRHFSKPDHKNTEKNGGTKIHASNDGNLIPRREEDASLRRMTCSNDINCEKASRDMELVHIIDNQQKNNTHMEMDVARANSRGNDDKCFSIPAHQLELSLRRSDYSRLESQEKNERRTLNHSTSSPFSLYNCRTASSTINAGDAQACSTSATHIDLENKNGDSKTPSQDKRETNQPPIRVVPFPVPVGGLTFDGQPFWNGAPVASLFYPQSAPPIWNSKTSTWQDATTQAISLQQNGPKDTDTKQVENVEEQTARSHLSANRKHLRIEIPTDEPRHVSPTTGESGSSTVLDSARKTLSGSVCDSSSNHMIAPTESSNVVPENPDGLRHLSQREAALNKFRLKRKDRCFEKKVRYQSRKLLAEQRPRVKGQFVRQDHGVQGS

SEQ ID NO: 17680 - protein, 1024 aa, Oryza sativa
  Clone ID: TF_OSC415694j.C1.p3.fg
MGKPEARSGWRNAAAAAWVLVAVACAAYMHWHLRRETMDRAEERLVSMCEERARMLQEQFGVTVNHVHALAILISTFHFEKFPSAIDQDTFAKYTARTSFERPLLNGVAYAQRIFHHEREMFENQQGWIMKTMKRQAAPPQDEYAPVIFSQDTVSYLARIDMMSGEEDRENILRARATGKAVLTNPFRLLGSNHLGVVLTFAVYRPGLAADASVEERVEATAGCLVVVVSSNQIPTNRYLGGAFDVESLVENLLSKLAGNQDIVVNVYDVTNASEPMAMYGPQSPDGKVSLFHVSTLDFGDPFRAHEMRCRLVASFSWHKFVGCFLLGSCTNSGNLSRYRQKPPLPWSAITNPLGTFVIWMLVGYIICAAWSRYDKVSEDCRKMEELKTQAEAADVAKSQFLATVSHEIRTPMNGVLVVQRSKILPFDVGMLDMLLGTDLSMTQKDYAQTAQMCGRALITLINDVLDRAKIEAGKLELEAVPFDLRSLMDDVISLFSSKSREKCIELAVFVCDDVPKVVIGDPWRYRQILTNLVGNAVKFTERGHVFVRVCLAENSKVEANQVLNGTMNGKDGKVETTANGAFNTLSGFQAADERNNWDYFKLLLSDKEPHMDELECDRSYQNDCDCVTLMISIEDTGVGIPLHAQDRVFTPFMQADSSTSRNYGGTGIGLSISKCLAELMGGQISFTSRPFVGSTFTFSAVLKRSCKDTSSDSKRSLSEALPTAFKGMKAILVDGRPVRGAVTRYHLNRLGIVVKVVNNLSMGLQTLAGQNGVKESREKLSMLFIESDIWRPETDILLLNRLHELKNNGQVHELPKLVLLVTSEADKDRYGSAFDIVMYKPIRASTIASCLQQLLKVVMPERKDNQNRPSFLRSLLIGKNILIVDDNKVNLRVAAAALKKYGAKVHCVESGKDAVSLLQQPHCFDACFMDVQMPEMDGFEATRQIRQMEVKANEERKALDLMEGSTFVESHLPVLAMTADVIQATYEECIKSGMDGYVSKPFDEEQLYQAVSRLVVGTKESAV

SEQ ID NO: 17681 - protein, 802 aa, Oryza sativa
  Clone ID: TF_OSC403629j.C1.p1.fg
MGSACEAGTDEPSRDDVKGTGNGILENGHSHKPEEEEWRNGMGEDLPNGHSTPPEPQQTDEQKEHQVQIVRWERFLPVKTLRVLLVENDDSTRQVVSALLRKCCYEDSRGFCASRFPSAVIPAENGLHAWQCLEDLQNHIDLVLTEVVMPRLSGIGLLSKITSHKICKDIPVIMMSSNDSMGTVFKCLSKGAVDFLVKPIRKNELKNLWQHVWRRCHSSSGSGSESGIRTQKCTKPKVDDEYENNSGSNNDNEDDDDNDEDDDDLSVGHNARDGSDNGSGTQFSLNVGQLCQCILMPSACFKTQSSWTKRAVEIDSPQQMSPDQPSDLPDSTCAQVIHPTSEICSNRWLPTANKRSGKKHKENNDDSMGKYLEIGAPRNSSMEYQSSPREMSVNPTEKQHETLMPQSKTTRETDSRNTQNEPTTQTVDLISSIARSTDDKQVVRINNAPDCSSKVPDGNDKNRDSLIDMTSEELGLKRLKTTGSATEIHDERNILKRSDLSAFTRYHTTVASNQGGAGFGGSCSPQDNSSEALKTDSNCKVKSNSDAAEIKQGSNGSSNNNDMGSSTKNAITKPSSNRGKVISPSAVKATQHTSAFHPVQRQTSPANVVGKDKVDEGIANGVNVGHPVDVQNSFMQHHHHVHYYVHVMTQQQQQPSIERGSSDAQCGSSNVFDPPIEGHAANYSVNGSFSGGHNGNNGQRGPSTAPNVGRPNMETVNGIVDENGAGGGNGSGSGSGNDLYQNGVCYREAALNKFRQKRKVRNFGKKVRYQSRKRLAEQRPRIRGQFVRQSGQEDQAGQDEDR

SEQ ID NO: 17682 - protein, 896 aa, Oryza sativa
  Clone ID: TF_OSC900171j.C1.p16.fg
MSPDADAAAAAAAGGEGAAAAGVGTAGEGRGVIRWDQILPRRSLRVLLVEHDDSTRQVVTALLRKCGYRVAAVADGMKAWGVMRERAYAFDLVLTEVTMPTLSGIELLSRIVASDECKNIPVIMMSSQDSIGTVLRCMQKGAVDFLVKPVRKNELRNLWQHVWRRHAMNSQTNASENNAASNHLSANGGNGSKTGEHSDEESDAQSSGSKREVEIQSAEKLPEVVADGGAGSSREHKIQNGFIDGMNTKSHALKGNDDAPSGNACGDSELQVLSTEKNVRSKFLNGITSAKVAGQIMDNALRFADSSSLRSSDPGKDLLVVAQTTADRKCKSSALENNAVMENNLSENSKGTATGHAESCPSHFVEINLEKQHHLNGYTNHKLNEKDIFNHSNSSAFSRYGNKRIESSAQRPFPPSFRVVHQQPVYDKNPQSSRVLLSCEHNTRESTVQAQVPLDRSTEGAAILCSSSVREDAGTSSSSPRKDSLTHPSYGFIPVPIPVGAAIPYHYGAIMQPMYYPQGAFMHCDSAAINKTAIQHVSCQSNYHENLGKPPQIDEHKQPEENHQLHHSRQILRESGEPVDLAKAHMERINQSASCSQDIRKGSGCTGSGETDANTNTVIALESGNESGVQNCSNNVLDGDRSRREAALLKFRMKRKDRCFEKKVRYHSRKKLAEQRPRVKGQFLSSISNGGRRSSGGAGRDAGRVRDRLAVGGVLRRRRGAGREPAVRQRVRDVPDDMHVAAAAASARAAVVVVAVDAVRAAAVLGASAAVPDAAAPAAISGGRERHVPASGGADDDEPAAITAASTVVTTAADDEEQQRVDGVAAVVLVPLLIAAVSAVVVQPVLLLLPLRQRQALRRRRRGERLHGADPSGVAAHRHIPDVTTRTNFSARYDRN

SEQ ID NO: 17683 - protein, 968 aa, Oryza sativa
  Clone ID: TF_OSC415438j.C1.p1.fg
MGDEYLAEPEDEVAISMWPENIGDKHQKQFKMEKLGKDQDALEDANFQQKPSSVDLNRLMELANSEKGVSQMQYFVKHWEYKRANTARLLKEQIGLLCQQRKEIEQRKQQILEEQQFQDESYYAVKWQVPILDEVYKDEWKRPSKKNDDLSHNQELKIDAEYDSISYWKERAMQLEKTLEASLQRERSLEEKLEENIKNLQSHTPVEEFSGMLKRADYFLHLVLQSAPIVIAHQDADLRYRFIFNHFPTLADEDVIGKTDYEILSGEGIEEMNNVKKEVMASGKATKREFVFNTPLFGAKTFVTYIEPVFSKSGETIGVNYVAMDITDQVTRREKMADIRVREAVQKAKETELSKSLHITEETMRAKQMLATMSHEIRSPLSGVLSMAEILATTKLDKEQYQLLEVMLSSGDLVLQLINDILDLSKVESGAMKLEATTFRPREVVKHVLQTAAASLKKELILEGCIGDNVPLEVTGDVLRIRQILTNLISNAVKFTHEGKVGINLHVLDKQLPGCRIEGGQLHSKAHSAPAAAAEHFSASPRKCDNDTLGCSNHEDACQTGIPSNDNFGEHHEGDEVVWLRCDVYDTGIGIPEKSLPLLFKRYMQASDDHARKYGGTGLGLAICKQLVELMGGTLTVVSKENEGSTFSFVLPCKIPVKEDHSDDPDDMPSSGGDFTTSDIEGSFIFKPQARPYLLTSGVSVMNNTKLIGGNQFYDPPNILEDRKPFSNGFVLAEDHSTNSASTAHQSNGPSVSRTNKEQHDNAMVIELNRQAERVSSSRGDTTSVSGLIHDERGPCRVHEEKSLHKKSKCSPSSNKAKILLVEDNKVNIMVAKSMLEQLGHGIDIVNNGLEAIRAIQKRQYDIILMDVHMPEMDGLQATKFIRSFENTGCWDTSVKPEHDQIIAGSDNLSDCAHMKKQGKRVPIIAMTANSFSESAEECLAAGMDSYISKPVNFQNIKECLQQYLPPQ

SEQ ID NO: 17684 - protein, 170 aa, Oryza sativa
  Clone ID: TF_OSC401250j.C1.p22.fg
MAAAAQAPAAAKVVVATSPRAGGGGGGGGDRKVVPVVVAAAAGDEAQSEMHVLAVDDSSVDRAVIAKILRSSKYRVTTVESATRALELLCLGLVPNVNMIITDYWMPGMTGYELLKRVKESSQLKEIPVVIMSSENVPNRISRCLEEGAEDFLLKPVRPSDVSRLCSRIR

SEQ ID NO: 17685 - protein, 170 aa, Oryza sativa
  Clone ID: TF_OSC900261j.C1.p15.fg
MAAAAQAPAAAKVVVSTSPRAGGGGGGGGDRKVVPVVVAAAAGDEAQSEMHVLAVDDSSVDRAVIAKILRSSKYRVTTVESATRALELLCLGLVPNVNMIITDYWMPGMTGYELLKRVKESSQLKEIPVVIMSSENVPNRISRCLEEGAEDFLLKPVRPSDVSRLCSRIR

SEQ ID NO: 17686 - protein, 494 aa, Oryza sativa
  Clone ID: TF_OSC415117j.C1.p1.fg
MVGAGEGDRVGGGAAVGGGQQFVDRSKVRILLCDSDPSSSREVLRLLCNCSYQVTCAKSPRQVINVLNCEAGEIDIILAEVDLPVSKCFKMLKYIARNKELRHIPIIMMSNRDEVSVVVKCLRLGAAEYLVKPLRMNELLNLWTHVWRRRRMLGLSEKNFFNDNFELALSEPSDANTNSTTLLSDDTDDKPKENINQETSTSNQHEYESNPSDAEPKQKGTPEGLLVSTEGGDQASYVKSSTPTTSSFDSELQKGGNRLDSSDHRGNFSSTTDRSDTGTDVNIRDKEAFEMPVQYPVVCFSSSNLHLERSNEGQNDASGTPPVYHFPFYYPGMMDHGMTHPPVQNFQGNINNAQVHTPQTLLPQYNVYPQCHGVSMMPPFQYNPAGMSIQSNQLPTQNMWPQASSTPMPEETCSRSERRAAALAKFRLKRKERCFDKKVRYVNRKKLAETRPRVRGQFVRQANYTDITSTGDDISEDEDDDPSSREVEMVSSPE

SEQ ID NO: 17687 - protein, 775 aa, Oryza sativa
  Clone ID: TF_OSC101556j.C1.p19.fg
MASIGWHLSLEPNIDSFTVADNKLVLLNFEQQQLVHWMMPPRFRCQDYLLPLLLALSPAAAAAREVEYHHCHCDGGGGGGGGGLWSMDSIFRWQKVSDLLIAAAYFSIPLEILYFVAGLRHLLPFRWVLVQFGAFIVLCGLTHLLTAFTYEPHPFMVVLLLTTAKFLTALVSFLTAITLLTLIPQLLRVKVRESLLWLKARELDREVVLMKRQEEASWHVRMLTHEIRKSLDRHTVLYTTLIELSRVLGLTNCAVWMPAAGEMCLTHELRRDGGGEDGVVGVDDADVVEVRGSDGVKLLGPDSVLAAASGGKEEGTGAVAAIRMPMLKVSDFKGGTPEVIQTSYAVLVLVPPAGKSWGRHEMEIVEVVAGQNRELLQARRDALMANEARQAFQGVMSQGMRRPIHSILGLVSMVQEEALAPEQRLVVDTMARTATVVSTLVNDVMEMSADSRERFPLETRPFHLHAMIRDAACVARCLCDFRGFGFAVHVENALPDLVVGDERRIFHVLLHMVGNLIGRTEPGHVTLRVRAADDDVLDDRLGQRWDPWWPSYSTGYSSVKFVIGVKRQQNGDAGSPLSRRPSGKGIDLRLSFSMCRKLVQMMQGNIWAILDPQGLPESMTLVLRFQLQSPLTSSSLGGSFEQKHSSPSCQIAGLKVLLIDDDDDINLVVARKLLEKLGCVVSSPPSGSGFLSSVGSSAAAFQLVMVNLEMKRVKALDVATRISQYRSGRWPIVMAMASDQKAWEKCAQSGINGILKKPVILQELKDELARILQST

SEQ ID NO: 17688 - protein, 799 aa, Oryza sativa
  Clone ID: TF_OSC101556j.C1.p3.fg
MASIGWHLSLEPNIDSFTVADNKLVLLNFEQQQLVHWMMPPRFRCQDYLLPLLLALSPAAAAAREVEYHHCHCDGGGGGGGGGLWSMDSIFRWQKVSDLLIAAAYFSIPLEILYFVAGLRHLLPFRWVLVQFGAFIVLCGLTHLLTAFTYEPHPFMVVLLLTTAKFLTALVSFLTAITLLTLIPQLLRVKVRESLLWLKARELDREVVLMKRQEEASWHVRMLTHEIRKSLDRHTVLYTTLIELSRVLGLTNCAVWMPAAGEMCLTHELRRDGGGEDGVVGVDDADVVEVRGSDGVKLLGPDSVLAAASGGKEEGTGAVAAIRMPMLKVSDFKGGTPEVIQTSYAVLVLVPPAGKSWGRHEMEIVEVVAGQVAVALSHATLLEESRAMRDRLAEQNRELLQARRDALMANEARQAFQGVMSQGMRRPIHSILGLVSMVQEEALAPEQRLVVDTMARTATVVSTLVNDVMEMSADSRERFPLETRPFHLHAMIRDAACVARCLCDFRGFGFAVHVENALPDLVVGDERRIFHVLLHMVGNLIGRTEPGHVTLRVRAADDDVLDDRLGQRWDPWWPSYSTGYSSVKFVIGVKRQQNGDAGSPLSRRPSGKGIDLRLSFSMCRKLVQMMQGNIWAILDPQGLPESMTLVLRFQLQSPLTSSSLGGSFEQKHSSPSCQIAGLKVLLIDDDDDINLVVARKLLEKLGCVVSSPPSGSGFLSSVGSSAAAFQLVMVNLEMKRVKALDVATRISQYRSGRWPIVMAMASDQKAWEKCAQSGINGILKKPVILQELKDELARILQST

SEQ ID NO: 17689 - protein, 232 aa, Oryza sativa
  Clone ID: TF_OSC400376j.C1.p28.fg
MTVVDAESRFHVLAVDDSLIDRKLIEMLLKNSSYQVTTVDSGSKALELLGLRDEGDDSSSSPSSSSPDHQEIDVNLIITDYCMPGMTGYDLLKRVKGSSSLKDIPVVIMSSENVPARINRCLEDGAEEFFLKPVKLADMKKLKSHLLKRKQQLPMAAAAPDKPPHKPDEAAASAAAIAEAATAQTDGIISDCSCSGSSKRKAAAMEQEVISSPDQRTKPRLSSTSSGLAVET

SEQ ID NO: 17690 - protein, 763 aa, Oryza sativa
  Clone ID: TF_OSC404904j.C1.p5.fg
MPPIPSLWIRVFFSWLLLSLPAAAAADFSHCGGCDDGDGGGGIWSTDNILQCQRVSDFLIAMAYFSIPLELLYFATCSDLFPLKWIVLQFGAFIVLCGLTHLITMFTYEPHSFHVVLALTVAKFLTALVSFATAITLLTLIPQLLRVKVRENFLRIKARELDREVGMMKRQEEASWHVRMLTHEIRKSLDRHTILYTTMVELSKTLELQNCAVWMPSESGSEMILTHQLRQMETEDSNSLSIAMDNPDVLEIKATKDAKVLAADSALGIASRGKLEAGPVAAIRMPMLKASNFKGGTPEVMETSYAILVLVLPEDGSLGWGEEELEIVEVVADQVAVALSHAAVLEESQLMREKLAAQHRDLLRAKHETTMATEARNSFQTAMYDGMRRPMHSILGLVSMMQQENMNPEQRLVMDAIVKTSSVASTLMNDVMQTSTVNREYLSLVRRAFNLHSLVKEAISVVRCLTGCKGIDFEFEVDNSLPERVVGDEKRVFHIVLHMVGTLIQRCNAGCLSLYVNTYNEKEERHNQDWMLRRANFSGSYVCVKFEIRIRESRGNLLSSSSSRRLQGPNSTSSEMGLSFNMCKKIVQMMNGNIWSVSDSKGLGETIMLALQFQLQHVTPVSGASSDLFRSAPIPNFNGLQVILVDSDDTNRAVTHKLLEKLGCLVLSVTSGIQCINSFASAESSFQLVVLDLTMRTMDGFDVALAIRKFRGNCWPPLIVALAASTDDTVRDRCQQAGINGLIQKPVTLAALGDELYRVLQNN

SEQ ID NO: 17691 - protein, 185 aa, Oryza sativa
  Clone ID: TF_OSC400678j.C1.p9.fg
MAVKYFGHRTPVIVVTKSHMYERGQIHQSLYIVWYIKIIKYTVTSDTVHFPQQQFKVTLHQKFAMSSPHVLVVDDTHVDRHVVSMALMRHNVRVTAVESVMQALMFLDSEHDVDMIVSDYCMPDMTGYNLLMEVKKSPKLAHLPVVIASSDNIPERIRKCLDGGAKDYILKPVKIVDVPRIMKYI

SEQ ID NO: 17692 - protein, 235 aa, Oryza sativa
  Clone ID: TF_OSC402928j.C1.p7.gm
MFTTKERGSCKESERRKRKWGRNRERIRGTGKRHFRVAIEAPFHVLAVDDSLPDRKLIERLLKTSSFQVTTVDSGSKALEFLGLHDHEDSPISTQSDQQEVAVNLIITDYCMPGMTGYDLLKKIKESSYLRDIPVVIMSSDNIPSRINRCLEEGADEFFLKPVRLSDMSKLKPHILKSRCKEHYQQEQNLQSNSESNNSSNPTSENSSSSTSSNSHKRKAVDEEILPHTIRPRHS

SEQ ID NO: 17693 - protein, 440 aa, Oryza sativa
  Clone ID: TF_OSC400888j.C1.p1.fg
MEALDDTSPENIEVTANSKNTMPYNTLSGLEVANNRKTLESFRMFKDSSDAIDSVNLLVTVEDTGIGITKDAQTRIFTPFMQADGSTSRTYGGTGIGLSITKRLVELMGGEIGFVSKPGVSSTFSFTAIFKENRKDPGDIKRYCPEPTPPDFQGMRALVVDGRCARAEVTMYHLRRLGIQCDLAATSESALSALLESCNSSVKSSLNMVLVDKEAWGEDSGLAFFRCLIDLRLKGTLKSWQTMPKFFLLAGSITPADSDCLRLAGYSNSIRKPLRLSTVAACLSKALGVGLTGRRSRDNSLVLRSVLTGKNILVVDDNAVNRIVAAGALKKYGAIVTCVDSGKEAISRLQPPHKFDACFMDVQMPEMDGFEATRLVRSVESKINDTIQAASAKNPFGDNNIAKQKSYAVNREQKFDWTAIYVSFDNWMKSISTSRLQPCA

SEQ ID NO: 17694 - protein, 1023 aa, Oryza sativa
  Clone ID: TF_OSC401583j.C1.p6.fg
MDEMSCGGGGGGARWKRARVAGMGEGKAGGGGGAAFLGLERVGMVVRMLPVPEKVSARARVVRGSLVAHFRGWRVVRETWWWVLLLWILAGSLGSFYLFLFMNAQSLDKRRDSLASMCDERARMLQDQFNVSMNHLQALAILVSTFHHSKTPSAIDQMTFARYAERTAFERPLTSGVAYAVRVTHGEREQFERQQGWAIKKMYSSSNKKQSSPGPGPGDAAVAEIREPAEEYAPVIFAQDAYKHVISFDMLSGNEDRDNILRARKSGKGVLTAPFKLLNNRLGVILTYTVYKYELPAYARPHERIQAAIGYLGGIFDIQALVEKLLKQLASQESIMVNVYDTTNESPISMYGDDTGSGMCHVSVLNFGDPSRKHEMHCRFEKKPPWPWLAITSSFGTLVIALLTGHIFQATVHRIAKVEDDFHKMSELKKRAEDADVAKSQFLATVSHEIRTPMNGVLGMLQMLMDTDLDTTQQDYVRTAQASGKALVSLINEVLDQAKIESGKLELETVPFDLRTVCDDILSLFCGKAQEKGLELAVYVSDQVPQILIGDPGRIRQIITNLVGNSIKFTERGHIYLTVHVVEEVMSCLEVETGIQNTNTLSGYPVANRRCSWESIRLFNRELHSSEKSFAPIASDSISLVISVEDTGVGIPFEAQSRVFTPFMQVGPSIARIHGGTGIGLSISKCLVGLMKGEIGFASKPHVGSTFTFTAVLMRAHCKGNDIKSSEFKGINALVVDHRPVRAKVTKYHLQRLGVKTELTAELNQFISKLNSGSLTAKLVLIDKETWLKESHCTPLLVNKLRNNDKPDSPKLFLLGSSASSPKGGSDTSREHNLNVIMKPLRASMLQVSLRRALGGVDKVHCRNGVVGNSTLGSLLHKKQIIVVDDNIVNLKVAAGALKKYGAEVTCADSGKKAITLLKPPHNFDACFMDIQMPEMDGFEATRRIRVMERDLNERIERGEAPPECASIQRWRTPILAMTADVIQATHEECLKSEMDGYVSKPFEGEQLYSEVARFFQNHDQVE

SEQ ID NO: 17695 - protein, 135 aa, Oryza sativa
  Clone ID: TF_OSC407447j.C1.p3.fg
MIEIIDLSQYIGPELDKKKAKLEKAKSKLLELEKKADIEENTRVTAVESVMQALVFLDSEHDVNMIVSDYCMPEMTGYDLLMEVKKSPRLVHLPVIIASSDNIPERIRKCFDGGAKDYILKPVKIADVPRILNYI

SEQ ID NO: 17696 - protein, 131 aa, Oryza sativa
  Clone ID: TF_OSC401978j.C1.p21.fg
MSTKTVPEPEPHVLAVDDSIVDRTVISRLLRSSKYRVTTVDSGKRALEVLSLDRNVHMIITDYCMPEMTGFDLLKRVKESAELKEIPVVLMSSENSPTRIRRCLEEGAEDFLIKPVRPSDVSRLCNRVIMK

SEQ ID NO: 17697 - protein, 777 aa, Oryza sativa
  Clone ID: TF_OSC401835j.C1.p36.fg
MAMVTARQFLASAAELGSGRRRCGGGGACDMREDGGVEALMQCQRVSDLLIAASFLSIPLELFYFATCADLSEVKCAVLHFCAFIVLCGATHLLAAFTHAHPHSAPLLRALTAAKVLAAVASSAAAVSLLTFIPKLLRIKVRESLLRDKASRLHRDLGLVRRREEATSRAVRELTGRIRASPPDAHAILRTTALQLADALGLHACAVWMPAAGRPHDLVLVHHLTSRPDDAADLLLEVGDACTVAADDPDVVDVMASKVAKVLGPDSALAMASSVGAAPAGAVAAIRIPILRVSIYDGGGTPEVTEASYAILVLLLPPHDAAGGWSSHDLEIVQVVADQAAVALSHAAVLEESRSMRDRFAEQHRALMQAKHRAAMATRAFSSIQSAMCHAMRRPVHSVVGLVSMLQHPEADTMRPEQRLAVDAIARTSNLLSALMDEVTVNRQHLSVQRKPFSLHALIKEAISVAGCLSHCGGAGFLHQPECALPEWVVGDERRVFHLLLDMVGTLLNRCNTGSGACRLSFSVRICNVGEERYSLDWIPMRPTFSGCNVCVKFKVGIGRSRSCAIERSLPCELPRRSAATTSSQMGHIFSGYFNKIVQMMNGNMWSASDSEGVGESVTLILQFKLQQGHVEASPPYIPHLNGLRVLLADDDAMNRGVTKKILERLGCQVMSAPSGAHCLSLLASAEASFQLVVLDLDDRAVPSAAMDRFEVALRIRELRNSCWLLIVIAVAAGVVATDDGGAVQELCQRAGINGLVQKPVTLPALGAQLCRVLQDN

SEQ ID NO: 17698 - protein, 247 aa, Oryza sativa
  Clone ID: TF_OSC900071j.C1.p16.hg
MSKPSLPWKATRRSNAISYRIISTSRSYSVGRARRHRIHAFRFGKVAGCIAKIWLGKVGSDREIVRSGGFLGWCGNPIRSEDLKPDYILIFNKSDAANWQPLPSVLPEKRNISVQALPSSMAVAIEAPFHVLAVDDSLPDRKLIERLLKTSSFQVTTVDSGSKALEFLGLHDHEDSPISTQSDQQEVGVNLIITDYCMPGMTGYDLLKKIKESSYLRDIPVVIMSSDNIPSRINSIIKEQAPQLTSS

SEQ ID NO: 17699 - protein, 233 aa, Oryza sativa
  Clone ID: TF_OSC900087j.C1.p6.fg
MAYENYANTTVSVNLNLQYRFHNLAEFDDGKKSCRKRLDGHNRRRRKPQHDALNPRSFLPYHQANQFSVYPQTFPIADQNADALMRPLDRHPPFSISFSGTFREPKQFPFMQDGGSGLGAARHDLLRPFSSPEDGANITTTRSACNGVPHGLDPECALSLLSSSLHPSPAAGISSATAPPQFAPSSFSRIAASSQAVTTAFASDGGSVAGDHVLVPAVTYEDPSQAMPFSWQV

SEQ ID NO: 17700 - protein, 36 aa, Oryza sativa
  Clone ID: TF_OSC400461j.C1.p1.gm
RCRDYHRRHKVCEAHPKTPVVVVAGQEQRFCQQCSR

SEQ ID NO: 17701 - protein, 400 aa, Oryza sativa
  Clone ID: TF_OSC33170j.C1.p3.fg
MATGGSGGGGGGGGGGDDVHGLKFGKKIYFEQDAAASASAAAVESSSTSSGGGGKKGKGVAAAAAPPPPLPPRCQVEGCGVDLSGVKPYYCRHKVCYMHAKEPIVVVAGLEQRFCQQCSRCSVHMVRFHQLPEFDQEKKSCRRRLAGHNERRRKPTPGPLSSRYGRLAASFHEEPGRSRSFVVDFSYPRVPSSVRDAWPAIQPSDRMSGSIQWQGGHELHPHRSAVAGYSDHHAFSSHGGSAAGAPMLHHPAFELTSGGCLAGVATDSSCALSLLSTQPWDTTQSTSSHNRSPPMSSTASAFGGGNNPVSPSVMASNYMAASPGWNSSSRGHDGARNVHLPPPHGVVLNEVPPGSVHHGHFSGELELALQGGAPSNRPEAEHGSGSGAFSHSTNAMNWSL

SEQ ID NO: 17702 - protein, 472 aa, Oryza sativa
  Clone ID: TF_OSC33084j.C1.p13.fg
MDWDLKMPVSWDLAELEHNAVPNMAAAASAAEPGIAAVAASRGAPGRPECSVDLKLGGLGEFGAADALKEPAAAAKAPVSSAAAAASVAKVPPSTSTLKRPRGGGGGGGGQCPSCAVDGCKADLSKHRDYHRRHKVCEPHSKTPVVVVSGREMRFCQQCSRFHLLGEFDEAKRSCRKRLDGHNRRRRKPQADSMSSGSFMTSQQGTRFASFTPPRPEPSWPGIIKSEETPYYSHHHHPHPVMTSRQPHFVGSPSSATTAAFSPKEGRRFPFLHEGDQISFGGGGGAAAAATLEISVCQTTVVAPPPPESSSSNKMFSSDGLTTATTTTTTAHHHHHHHQVLDSDCALSLLSSPANSSSVDVSRMVQPSPAAAAGAEHHHHHQIPMAQPLVPNLQQQFGGSSPWFASSPAAAAVAGGGFACPSMDSEQQQQQQLNAVLVPGSNENEMNYHGMFHVGGEGSSDGTSPSLPFSWQ

SEQ ID NO: 17703 - protein, 326 aa, Oryza sativa
  Clone ID: TF_OSC900405j.C1.p10.fg
MDWMPPPKPTSPRSPPLLWDWADAAVPGSSSGEVSAAAAAAAAHPGRRRKEKRGRAEEGGGGGGEVRCQVEGCGVELVGVKDYHRKHRVCEAHSKFPRVVVAGQERRFCQQCSRFHALSEFDQKKRSCRRRLYDHNARRRKPQTDVFSYASARPPSSLLFDDNRQISFVWNKAPLSHVRPFAISPWESSSEVGTTDGHIYLDKSHISKSLPAFNTDIDELLPMKGPDASLTASKFDGAPDLQRALSLLSSSSCGLPDPVQQASRVIQFTGASQNNRELPPLNGGNSASASCANVQTIAQPAQLVRFTMNASSNACQSNFFGLNQIN

SEQ ID NO: 17704 - protein, 1117 aa, Oryza sativa
  Clone ID: TF_OSC416193j.C1.p1.fg
MPRRRRSAGTRGRPPRWRRRRLREEGTGTPGCGTGIAAPSPPSRPPMRCASTRGLSHHQQQQQQSPPAAAKAAEALRQGGGGSGGLNLQLGLREDAATPMDVSPAATTVSSSPSPPASSAPAQEPVVRPSKRVRSGSPGSASGGGGGGGGGGNSGGGGGSYPMCQVDDCRADLTNAKDYHRRHKVCEIHGKTTKALVGNQMQRFCQQCSRFHPLSEFDEGKRSCRRRLAGHNRRRRKTQPTDVASQLLLPGNQENAANRTQDIVNLITVIARLQGSNVGKLPSIPPIPDKDNLVQIISKINSINNGNSASKSPPSEAVDLNASHSQQQDSVQRTTNGFEKQTNGLDKQTNGFDKQADGFDKQAVPSTMDLLAVLSTALATSNPDSNTSQSQGSSDSSGNNKSKSQSTEPANVVNSHEKSIRVFSATRKNDALERSPEMYKQPDQETPPYLSLRLFGSTEEDVPCKMDTANKYLSSESSNPLDERSPSSSPPVTHKFFPIRSVDEDARIADYGEDIATVEVSTSRAWRAPPLELFKDSERPIENGSPPNPAYQSCYTSTSCSDHSPSTSNSDGQDRTGRIIFKLFGKEPSTIPGNLRGEIVNWLKHSPNEMEGYIRPGCLVLSMYLSMPAIAWDELEENLLQRVNTLVQGSDLDFWRKGRFLVRTDAQLVSYKDGATRLSKSWRTWNTPELTFVSPIAVVGGRKTSLILKGRNLTIPGTQIHCTSTGKYISKEVLCSAYPGTIYDDSGVETFDLPGEPHLILGRYFIEVENRFRGNSFPVIIANSSVCQELRSLEAELEGSQFVDGSSDDQAHDARRLKPKDEVLHFLNELGWLFQKAAASTSAEKSDSSGLDLMYFSTARFRYLLLFSSERDWCSLTKTLLEILAKRSLASDELSQETLEMLSEIHLLNRAVKRKSSHMARLLVQFVVVCPDDSKLYPFLPNVAGPGGLTPLHLAASIEDAVDIVDALTDDPQQIGLSCWHSALDDDGQSPETYAKLRNNNAYNELVAQKLVDRKNNQVTIMVGKEEIHMDQSGNVGEKNKSAIQALQIRSCNQCAILDAGLLRRPMHSRGLLARPYIHSMLAIAAVCVCVCVFMRALLRFNSGRSFKWERLDFGTI

SEQ ID NO: 17705 - protein, 458 aa, Oryza sativa
  Clone ID: TF_OSC422778j.C1.p2.fg
MAVPAAAVAADVVDFGYAAPMPPPYVGFDPAGMGGERQLFQHGGACHGLYDGGLDFSAAAAFQEAATLGVGLPGGNLLQSLAPPAAAAATPSSLQMPMMMSLPGLPATAADVYPFGGGGFVKREDGPVLDVVGGGGGGRIGLNLGRRTYFSPADVLAVDRLLLRSRLGGMGMEMGMGMGVLGLGLAAAAHHHQPPRCQAEGCKADLSAAKHYHRRHKVCDFHAKAAAVLAAGKQQRFCQQCSRFHVLAEFDEAKRSCRKRLTEHNRRRRKPTAGGQSSKDSPPPPPSKKGTDASIASSYTSCDHHKAAASTTTASGVSCLQELADHHDVGGGHQAAMAAAPPPTLSLAALPPQEEDDEDEDGGLGNVLMMQQHHQRRRLQHDGDGDDDVAAAAAHHHLMRSLARQQQQHRHSSGCSNNNDGDDDDHNNNNNILSCSSASDQQNSSNNNNMHFFEVDFI

SEQ ID NO: 17706 - protein, 320 aa, Oryza sativa
  Clone ID: TF_OSC900393j.C1.p8.fg
MPMPGDVYPALGIVKREGGGGGQDAAAGRIGLNLGRRTYFSPGDMLAVDRLLMRSRLGGVFGLGFGGAHHQPPRCQAEGCKADLSGAKHYHRRHKVCEYHAKASVVAASGKQQRFCQQCSRFHVLTEFDEAKRSCRKRLAEHNRRRRKPAAAATTAVAAAKDAAAAPVAAGKKPSGGAATSYTGDNKNVVSMSAAKSPISSNTSVISCLPEQGKHAAAAARPTALTLGGAPPHESSAPQIGAMLHHHHHHQQDHMQVSSLVHINGGGGGGSNNILSCSSVCSSALPSTATNGEVSDQNNDNSHNNGGNNNNMHLFEVDFM

SEQ ID NO: 17707 - protein, 341 aa, Oryza sativa
  Clone ID: TF_OSC404997j.C1.p1.gm
DPPCAVDGCKEDLSKCRDYHRRHKVCEAHSKTPLVVVSGREMRFCQQCSRFHLLQEFDEAKRSCRKRLDGHNRRRRKPQPDPMNSASYLASQQGARFSPFATPRPEASWTGMIKTEESPYYTHHQIPLGISSRQQHFVGSTSDGGRRFPFLQEGEISFGTGAGAGGVPMDQAAAAAAASVCQPLLKTVAPPPPPHGGGGSGGGKMFSDGGLTQVLDSDCALSLLSAPANSTAIDVGGGRVVVQPTEHIPMAQPLISGLQFGGGGGSSAWFAARPHHQAATGAAATAVVVSTAGFSCPVVESEQLNTVLSSNDNEMNYNGMFHVGGEGSSDGTSSSLPFSWQ

SEQ ID NO: 17708 - protein, 195 aa, Oryza sativa
  Clone ID: TF_OSC422154j.C1.p2.fg
MAALAAAAAAGDGGAALPSPMEEDKKPRLVASSLAPVAGGGGGGSSSSAAVAAGASSSSSSSSVAAAARRGAGRAGGGAPSGGGGGPRCQVERCGVDLSEAGRYNRRHKVCQTHSKEPVVLVAGLRQRFCQQCSRFHELTEFDDAKRSCRRRLAGHNERRRKSAADTAHGENCRHADQDAGRSHQGTGNPPFQIR

SEQ ID NO: 17709 - protein, 337 aa, Oryza sativa
  Clone ID: TF_OSC900087j.C1.p1.fg
MDAGEPYTSDSLVLATAASQWSPLHLSLLLHQQQPRPVRSLSSPPGDTAPLWPRHRHQGNQQPGSFSAIRMGNALATVLGTATKLFLSKGWDVIFHYLKKMDAGEPKRATTEGNRQPGSRGRSSAGRAARGKEIGGGGGEGWGRRRGGGQGGDQHGGGGRDLAGGADDDDTRHRSARWLRDEGIDNDDAGAARPDGSETRCQQRRHARSRLAVERGVRDERPPPPLKRLSVAGPSSSSSSPDAAASAAAAAAAALHDFSVRARPAAAAPATRRARGGSGGGGGGGGGAEACSVDGCRSDLSRCRDYHRRHKVCEAHAKTPVVVVAGQEQRFCQQCSR

SEQ ID NO: 17710 - protein, 469 aa, Oryza sativa
  Clone ID: TF_OSC406405j.C1.p2.fg
MGSFGMDWNQKSSVLWDWENMPPIGNSANENPKNVMLAESKLAGVGVDIGHESGHSSGGTFSSSSEIGYGSSKSSISASIDSPSKVGNTIELNFASAEEHDKNMDKGKSKVDDTGTSRSPVVAANRVEPLIGLKLGKRTYFEDVCGGQNVKSSPSGVSVATPSPGLAKKVKVAQQNTQNPHCQVEGCNVDLSSAKPYHRKHRVCEPHSKTLKVIVAGLERRFCQQCSRFHGLAEFDQKKRSCRRRLHDHNARRRKPQPEAISLSSSRLSTLLYGDARQQASFLFGQAPYGQMGSCASSWDNPVPGGFKFTATKAPWSRPTIAAGVDGTHVSNQQASGNVLPHGAHHSFDGLMAFKETNAKVLNQGMEASAVASGSARGPDFEHALSLLSIDSVGAANLQPGSQIHPGVTAIAGTSNPVMMPSPAIWQGGLSLDQQAQFQAFDRLGNDDDEDHLQLPKPSYDNSHYDQMN

SEQ ID NO: 17711 - protein, 513 aa, Oryza sativa
  Clone ID: TF_OSC400657j.C1.p2.fg
MASFGMNWNQKSPVFWDWENPAPFGPNTMENPKSIPHPEPRGVVVAAANHGSTNSSGGTFTSSSELANGSSKSSLSASFDSSSKLGNSLEFRFASVKGHGKNMCKDGEAGRVEDSGTSPAVAVSHGEPVIGLKLGKRTYFENVCGGQNVKSSSAASGVTCPSTVVKKMKVSQQSTQSSYCQVEGCKVDLSSAREYHRKHKVCEAHSKAPKVIVSGLERRFCQQCSRFHGLAEFDQKKKSCRRRLSDHNARRRKPQQEAISFGSSRLATMFYDARQQTDIYFGQSPFGQVRSNAISSCDNLGGFKFTEAKLPWMKPMKTIGLEDLNFSTLQMPGNVVSHTVHHHDFDGLIPFKGNTPKVLNQACFMDKLEPQIVSQKNKNKNREARSTNYLLQAFWTSCLGVDPACAVVSSNSNGAPDLRRALSLLSSDSWGPADVQAGSQVHPGGVMPPLAVAAATVTAPTNPVSVMHALHPSTGGGGFWQDGDDPPPLDHASQAQAFMHPGNGSSSGYGHLH

SEQ ID NO: 17712 - protein, 343 aa, Oryza sativa
  Clone ID: TF_OSC401261j.C1.p16.fg
MECNPVSSTTSSSLLWDWDATASAEPPPPPGKRGGRDSSSASASAKRGRSAAAAGDAAAVAAEAPRCQVEGCGLELGGYKEYYRKHRVCEPHTKCLRVVVAGQDRRFCQQCSRFHAPSEFDQEKRSCRRRLSDHNARRRKPQTDVFAFGSGTLPRSLFDDRQQISFAWDNNAPLNHANTTSSSSWTSDLQLSQVMDISKRSRKAGADSANIRLSNALPTLCHDTNELLPIKGADASETASKLDGALDVQRALSLLSASSRGLTDPGHQTSSIIQFTNSNQNSTLPSVPSEGNSNVPFWVDGQHQAVEPQVFQFTMDTGNTVFPDLERIKPSYESSMFGLNQIH

SEQ ID NO: 17713 - protein, 179 aa, Oryza sativa
  Clone ID: TF_OSC222j.C1.p2.fg
MEAARVGAQSRHLYGGGLGEPDMDRRDKRLFGWDLNDWRWDSDRFVATPVPAAEASGLALNSSPSSSEEAGAASVRNVNARGDSDKRKRVVVIDDDDVEDDELVENGGGSLSLRIGGDAVAHGAGVGGGADEEDRNGKKIRVQGGSPSGPACQVEGCTADLTGVRDYHRRHKVEYAMQV

SEQ ID NO: 17714 - protein, 360 aa, Oryza sativa
  Clone ID: TF_OSC400235j.C1.p44.fg
MEGNGCGGSGATPRGVVGMHWAPVVTSPPSPQPPFLPPAPCRPDVQMQQQGGLTCLKLGKRPCFWGGDGAGQVAQGSGGGGGGGGGGSADQGKRKEKAATAVPVVPRCQVEGCDITLQGVKEYHRRHKVCEVHAKAPRVVVHGTEQRFCQQCSRFHVLAEFDDAKKSCRRRLAGHNERRRRSNASEAMARGSAHPHGMPVLGHGFPPYGLPTSSAGALSLLSSARATGPWLMPTPDISARSSAALDELIAENRAALLSWQFFSDRQPPPAGRPTGRSPGSETAGGWHAHLQARPPPPGAGGQHENQSGHVTLDLMQATTAAGGSGAPFRPVPARPPKEGGDAGCTSDAWTPSPMEGARVV

SEQ ID NO: 17715 - protein, 287 aa, Oryza sativa
  Clone ID: TF_OSC33170j.C1.p5.gm
MATGGSGGGGGGGGGGDDVHGLKFGKKIYFEQDAAASASAAAVESSSTSSGGGGKKGKGVAAAAAPPPPLPPRCQVEGCGVDLSGVKPYYCRHKVCYMHAKEPIVVVAGLEQRFCQQCSSGKGAMNSILTAAQLRDTVITMRSAAMVAQRLGHQCSTTQPLSSPQPWDTTQSTSSHNRSPPMSSTASAFGGGNNPVSPSVMASNYMAASPGWNSSSRGHDGARNVHLPPPHGVVLNEVPPGSVHHGHFSGELELALQGGAPSNRPEAEHGSGSGAFSHSTNAMNWSL

SEQ ID NO: 17716 - protein, 753 aa, Oryza sativa
  Clone ID: TF_OSC401478j.C1.p49.fg
MSSGLKKKGLEWDLNDWRWDSNLFLATPSNASPSKCSRRELGRAEGEIDFGVVDKRRRVSPEDDDGEECINAATTNGDDGQISGQRGRSSEDEMPRQGTCSSSGPCCQVDGCTVNLSSARDYNKRHKFYGNYLTCLVRFHFLQEFDEGKKSCRSRLAQHNRRRRKVQVQAGVDVNSLHENHSLSNTLLLLLKQLSGLDSSGPSEQINGPNYLTNLVKNLAALAGTQRNQDMLKNANSAAIASHTGNYVAKGNSLHDSRPHIPVGTESTAEEPTVERRVQNFDLNDAYVEGDENRTDKIVFKLFGKEPNDFPSDLRAQILSWLSNCPSDIESYIRPGCIILTIYMRLPNWMWDKLAADPAHWIQKLISLSTDTLWRTGWMYARVQDYLTLSCNGNLMLASPWQPAIGNKHQILFITPIAVACSSTANFSVKGLNIAQPTTKLKILIKAAFHFPLLLLKKMSHIRATSETPKDCTEGFPAARFRWLLSFAVDREFCAVIKKLLDTLFQGGVDLDVQSTVEFVLKQDLVFVAVNKRSKPLIDFLLTYTTSSAPMDGTESAAPAQFLFTPDIAGPSDITPLHIAATYSDTAGVLDALTDDPQQLGIKAWKNARDATGLTPEDYARKRGHESYIEMVQNKIDSRLPKAHVSVTISSTTSTTDFTEKHASQSKTTDQTAFDVEKGQQISTKPPLSCRQCLPELAYRHHLNRFLSTRPAVLSLVAIAAVCVCVGLIMQGPPHIGGMRGPFRWNSLRSGPK

SEQ ID NO: 17717 - protein, 806 aa, Oryza sativa
  Clone ID: TF_OSC418761j.C1.p28.gm
MALSTAQTGESMHSSTFASRYVRTALPRFRMPEKSIPKDAAYQIINDELMLDGNPRLNLASFVTTWMEPECDKLMMAAINKNYVDMDEYPVTTELQNRCVNMIAHLFNAPIGDDETAVGVGTVGSSEAIMLAGLAFKRKWQNRMKAEGKPHDKPNIVTGANVQVCWEKFARYFEVELKEVKLTQGYYVMNPEKAVEMVDENTICVAAILGSTLNGEFEDVKMLNDLLTAKNAETGWNTPIHVDAASGGFIAPFIYPELEWDFRLPLVKSINVSGHKYGLVYAGVGWVIWRNKEDLPDELIFHINYLGADQPTFTLNFSKGSNQIIAQYYQLIRLGFEGYKDIMQNCRDNATVLREGIEKTGHFDVVSKDSGVPLVAFSLKDSSRYTVFEVAESLRRFGWIVPAYTMPADAEHVAVMRVVIREDFSRGLAERLITDLTKTVADMDAHAVKKAAAEPAKKTVREIEKEVTTYWRSFVARKKSSLWEDEGNGGSGGPRCCSSSSPSQLPVRSSTARESLDHISINCTGGVGATSGCRSVHSRRSAPTRRARLLVPAQPRLCLDSPDWRQSAAGREWEQERDDGDDRRGSWLASESWWFVGDDATAAAATRVRREKRRACAGAGGAGGDGAARAPPSSSSASTRAAASTPGGGMRGSRMHYLRYYDAAFDAVDAAGLLETRPARAKVEEMFAREIRNAVAFEGAERFERHESFAGRRRRMEDGGGLQWGSKAEEKCLLPSSSLARRPRRQPSPPVSLRPDGSLPPAVAAAPLVLPLPRASAAEPPRCAPMPPTAAPLVLPPPLPTEKERI

SEQ ID NO: 17718 - protein, 255 aa, Oryza sativa
  Clone ID: TF_OSC22910j.C1.p3.gm
MITFGLNSRPHPEFRNDLRPSSSSLAAGESESPKAVERLEREGCTRSGSSRRQPRRGAAAALAVASAPSLASCCRRPSIRKLLSLPLHARPVPPPGSGMRQPLRPSPAALHPRGAAVAPTRSPGAAVAGAEMRQQATGGWGGGWRGAPPARPRAPAAAAAANLSRTAMALTKEAERLDVPFQFNPVVSRLDALDVESLRVKTGEALAICFSLQLHCLLASDDDATAGAGGDKERRSPESGLSPSKSRADAFLGAL

SEQ ID NO: 17719 - protein, 216 aa, Oryza sativa
  Clone ID: TF_OSC412551j.C1.p9.gm
MITFGLNSRPHPEFRNDLRPSSSSLAAGESESPKAVERLEREGCTRSGSSRRQPRRGSGMRQPLRPSPAALHPRGAAVAPTRSPGAAVAGAEMRQQATGGWGGGWRGAPPARPRAPAAAAAANLSRTAMALTKEAERLDVPFQFNPVVSRLDALDVESLRVKTGEALAICFSLQLHCLLASDDDATAGAGGDKERRSPESGLSPSKSRADAFLGAL

SEQ ID NO: 17720 - protein, 137 aa, Oryza sativa
  Clone ID: TF_OSC407154j.C1.p12.fg
MGAGRRRRQKMMPPPLSNFDARNGVPTPGQAEQETMELVRMLTACADSVSAGNHEAAIYYLARLCEMASLAGPMPIHRVAAYFIEVLTLRVVRMWPHMFNISPPRELTNDAFSGDDDAMALRILNTITPILLLGKHS

SEQ ID NO: 17721 - protein, 129 aa, Oryza sativa
  Clone ID: TF_OSC1414j.C1.p5.gm
GEIADIVSREGSSRVERHEQMPRWVERLRRGGMTQLPLGATGLWQAAMQLREFSGAGFGVQENGGFLTLTWHSQRLYSASAWRATAGKKMTMMASGAADAMEESQNSNTNGGGGGSSGGGHGALNQIMQ

SEQ ID NO: 17722 - protein, 542 aa, Oryza sativa
  Clone ID: TF_OSC9377j.C1.p2.gm
MAVEAMAWASKLLDGGGRRHSDGFVKPVVGVGDNADGDCDSEDGGNVGGGEGVGCKVGMMTARCGAVFGARRLAGEGRRCRGPTCRQSLCGGGASVHQSWLRRGNLVGSGGTGGGAAAVARQQLVLAGEGGDEAGVSCLFAPFQHHEPLGEHARGASRRNGEPDVPVARCEAHIDGGLPQGVQAVHGGLLRQEGERHLLIFSNKTIYNAVAGKRKLHIVDYGLSYGFQWPALFFLLGTREGGPPEETVRREDLHLDREEEEVLVVNCLHGLNNLQDESVVMDRDSPSPRDVVLNNNRDMRPHVFVQCVVNGAYGAPFKEASRVRRLIGLGISARCCLAGKQTSRSAPSSSPPRPSLHLHLHLRRRPPPSSSRHAADDAALHPLSRRRDAYVERMGEGEVVDGIWPDGGGERRPAAAVLALHRSARHRSACHSQTAAALARCQPPASAGEKRRATEGGLRARVEADEQDSTSAARRGRAGEAGWRSRGGAVAGELLALAGLHRRGEVAIHRLRRASRGEAAGRSSAEERPHGKGSWRGVARRR

SEQ ID NO: 17723 - protein, 240 aa, Oryza sativa
  Clone ID: TF_OSC414562j.C1.p7.gm
MPSPLVLLLQCFGDVALTDLLVGLALLLSCLQSRRRWLDARSKQQPAPLESERFEVGMDSVLLGAYELGFAALYPPLDSGLVGPTAMALMKEAERLDVPFQFNPVVSRLDALDVESLRVKTGEESGLSPSKSRADASPKVMVVTKQEASHNAALLTERFVEALNYYAALFDGLEEWHERLERWVGRLEGAGFGRIPLSYYALLQARRVAQGLGCDGFKVREEKGNLFLFFVSTWRGRRFD

SEQ ID NO: 17724 - protein, 165 aa, Oryza sativa
  unsure (1)..(165): unsure at all Xaa locations
  Clone ID: TF_OSC402543j.C1.p5.gp
VIDSPRDIVLSNIRKMQPHVFIHAIVNGSFSAPFFVTRFREALFFYSALFDVLDATTPRESEQRLLIEQNIFGRAALNVIACEGIDRVERPETYKQWQVRNQRAGFKQLPLNPEIVQVVRNKVKDCYHKDFVIDIDHQWLLQGWKGRILYAISTWTPNDALSYFX

SEQ ID NO: 17725 - protein, 190 aa, Oryza sativa
  unsure (1)..(190): unsure at all Xaa locations
  Clone ID: TF_OSC416737j.C1.p13.gp
CRAGEIEASKLGCEAGEALAVNLAFALSHVPDESVSPANPRDEILRRVRALGPQVVALVEQELNSNTAPLTTRFTDACAHYGAILESLDATIPRESAERARAEAALGGRAANAVAREGADRLERCEVFGKWRSRFGMAGFRPVALGPGIADQVLARQGPVAAGFAVKAENGVLRLGWMGRVVTVASAWRX

SEQ ID NO: 17726 - protein, 245 aa, Oryza sativa
  Clone ID: TF_OSC900243j.C1.p1.fg
MIRITVPSVRPAVPPLLAVSSSELGARLAIFAKSKGVQLEFNVVESATTTSPKKTSTTLCQELASVLSDPPSLGLRDGEAVVVNCQSWLRHVAPDTRDLFLDTVRALNPCLLTVTDEDADLGSPSLASRMAGCFDFHWILLDALDMSAPKDSPRRLEQEAAVGRKIESVIGEEDGAERSEPGARLAERMSRKGFAGVVFDEEAAAEVRRLLSEHATGWGVKREDDMLVLTWKGHAAVFTGAWTPN

SEQ ID NO: 17727 - protein, 493 aa, Oryza sativa
  Clone ID: TF_OSC401329j.C1.p80.fg
MDTFPFQWPMDPAASSGLDAGFLPPPAAVAPDDGVGYYDPPAGADVDAAALPEFAAAFPPCAPDAAAAVLAMRREEEEVAGIRLVHLLMSCAGAIEAGDHALASAQLADSHAALAAVSAASGIGRVAVHFTTALSRRLFPSPVAPPTTDAEHAFLYHHFYEACPYLKFAHFTANQAILEAFHGCDHVHVIDFSLMQGLQWPALIQALALRPGGPPFLRITGIGPPSPTGRDELRDVGLRLADLARSVRVRFSFRGVAANSLDEVRPWMLQIAPGEAVAFNSVLQLHRLLGDPADQAPIDAVLDCVASVRPKIFTVIEQEADHNKTGFLDRFTEALFYYSAVFDSLDAASASGGAGNAMAEAYLQREICDIVCGEGAARRERHEPLSRWRDRLTRAGLSAVPLGSNALRQARMLVGLFSGEGHSVEEADGCLTLGWHGRPLFSASAWEAAGDGGGDNNNNSNSNVSGSSGSDSNNSGSSNGKSSGARDGSSVCL

SEQ ID NO: 17728 - protein, 107 aa, Oryza sativa
  Clone ID: TF_OSC20530j.C1.p4.gp
DMLDATTPRESGLRLALEQNVLGPYALNAIACEGADLVERPEKYRQWQARNHRAGMQQLKLRPDIVDTIREEVNKYHHKDFLLGEDGQWLLQGWMGRVLFAHSAWVP

SEQ ID NO: 17729 - protein, 575 aa, Oryza sativa
  Clone ID: TF_OSC100759j.C1.p3.fg
MEVTMEDVAGDFEFSGCGSTTTTSSASSLDDGTGMCYAWGELSPVADWANFCCSDDDGGHDLHGLIESMLCDDTLVGVDDDGQAGLHHADMFRDDLYCYGNGSNPSSTTTTNPGSPVFDDPTQGCPEKGLRLLHLLMAAAEALSGPHKSRELARVILVRLKEMVSHTASANAAASNMERLAAHFTDALQGLLDGSHPVGGSGRQAAAAASHHHAGDVLTAFQMLQDMSPYMKFGHFTANQAILEAVSGDRRVHIVDYDIAEGIQWASLMQAMTSRADGVPAPHLRITAVSRSGGGGARAVQEAGRRLSAFAASIGQPFSFGQCRLDSDERFRPATVRMVKGEALVANCVLHQAAATTTIRRPTGSVASFLSGMAALGAKLVTVVEEEGEAEKDDDGDSAGDAAAGGFVRQFMEELHRYSAVWDSLEAGFPTQSRVRGLVERVILAPNIAGAVSRAYRGVDGEGRCGWGQWMRGSGFTAVPLSCFNHSQARLLLGLFNDGYTVEETGPNKIVLGWKARRLMSASVWAPPPLPVPSSPPEGVCQPVVGMAPVATGGFARTEFDYIDSFLVEPAYALV

SEQ ID NO: 17730 - protein, 583 aa, Oryza sativa
  Clone ID: TF_OSC20525j.C1.p3.gm
MAAAPKPEELVVAIEQPFSPSLFLDLPPTPHHDDDPNNVNDDLLLPFISRILMEDDIDDKFFYQFPDHPALLQAQQSYAQILHAPATSSSSDDTTINNNTTNSTSVPDTLAMPDHDADTQSAPDDMEMLYMAFLKGREEATKFLPTNNTLFSGFKAEPVLDIQPTFTFGPSGGGRGRKNRHAEEDDLETETSRSSKLMAPEHDDAAAADEIFDEIILNGYQMIIKGIDELRVAMGSQSQADKNGRRASRAKTAVVDLHTLLIHCAQAVATGDWRSATELLKQIKQNSSARGDATQRMACCFAEGLEARLAGTGSQMYQSLVAKRTSTVDFLKAYKLFTAACCIKKVSVIFSNKTIYNAVAGRRKLHIVDYGLSYGFQWPALFFLLGAREGGPPEVRMTGIDVPQPGFRPADQIEETGRRLSICARQFGVPFKFRAIAAKWETVRREDLHLDPEEEEEEVLVVNCLHGLNTLQDESVVVDSPSPRDVVLDNIRDMRPHVFVQCVVNGAYGAPFFVTRFREALFFYSAHFDMWTPPSRATTTIGCSSSGTCWGDAPSTSSPARAQTELIGRRRTSSGRCATIAPG

SEQ ID NO: 17731 - protein, 585 aa, Oryza sativa
  Clone ID: TF_OSC1203j.C1.p6.fg
MGPAAPPSEAAAAADDVVLPYISRILMEEDIDDDMFFCLYPDHPALLEAQQPFAQILSSSSGIAGEVNSAPMEDSAALMMQGSGNGRGRKGSKHGGDELEAEVGRASKLMATPEEEDDDDDGVGEMLEKMMLNGDEEMNAPRVPAEKNGGKAARRKRRQGKGEVVDLRELLMSCAQAVASGNRRSAGELLEQIKRHSSPTGDATERLAHYFADGLEARLAGAASLEHRLLASAEERASAMELLEAYQVFMAACCFKWVAFTFANMAILRAAEGRSKVHIVDYGGQYHGLQWPSLLQRLAEREGGPPEVRMTLVGHPQPGFRPARRLERTGRRLSNCARAFGLPFKFRAVAAARWETVTAEDVVGVDHDEAAVVVNDVLSLGTLMDESGVFDDPSPRDTVLGSIRDMRPAVFVQAVVNGAHGAPFFPTRFREALFFFSALFDMLDATTPEEGSHLRAVLERDVLRRAAVGVIAGEGAERVERPETYRRWQARNRRAGLRQVAVEADVVEAVRRRVRRRHHEEFVIEEDAGWLLQGWKGRILYAHSAWVVAEDATSVGELTVVTTSLVAIILSAASAQDELPLSTNE

SEQ ID NO: 17732 - protein, 492 aa, Oryza sativa
  Clone ID: TF_OSC400909j.C1.p3.fg
MPYMVTADGHSPSSADNSCSDVAKDSPLVSNVSQQNSQSISDNQSSELEVEFDEDDIRMKLQELEHALLDDSDDILYEISQAGSINDEWADPMKNVILPNSPKESESSISCAGSNNGEPRTPKQLLFDCAMALSDYNVDEAQAIITDLRQMVSIQGDPSQRIAAYLVEGLAARIVASGKGIYKALSCKEPPTLYQLSAMQILFEICPCFRFGFMAANYAILEACKGEDRVHIIDFDINQGSQYITLIQFLKNNANKPRHLRITGVDDPETVQRTVGGLKVIGQRLEKLAEDCGISFEFRAVGANIGDVTPAMLDCCPGEALVVNFAFQLHHLPDESVSIMNERDQLLRMVKGLQPKLVTLVEQDANTNTAPFQTRFREVYDYYAALFDSLDATLPRESPDRMNVERQCLAREIVNILACEGPDRVERYEVAGKWRARMTMAGFTPCPFSSNVISGIRSLLKSYCDRYKFEEDHGGLHFGWGEKTLIVSSAWQ

SEQ ID NO: 17733 - protein, 987 aa, Oryza sativa
  Clone ID: TF_OSC900004j.C1.p19.fg
MAAHTVTDPLEELWNHTMSMDKTHLMCFYPSKITMGGVWTGDNPLDFSIPLLLFQILLITSTTRAATLLLCPVRLPTYISQILAGFLLGPSVLGHLPHFSNLVFPVRSLFVLESMALLGLVYYTFIVGVEIEVSAITRAGIRSFGFAIGCTLPPFLVGALTGYVALSTDDKHKGDTFLNKLSFPIFLGSTFSSTAFAVLARNIAELKLAGTDVGQLTLSASLINDTFAWTGLTVATVLGHSRCTITQTTWTLTSGVVIFGASYLLLRPMLLRLARRAAEGEAVGEDRECWILIGVMVAALVADAGGTHAIFGAFVFGLAVPNGPVGVALVEKVEDFVRPPHRHRKITNMHSAVLLMVAAMVAAVLKVVAAIGVADHQEQHHLAAPMVRKRPASDMDLPPPRRHVTGDLSDVTAAAAGAPTLSASAQLPALPTQLPAFHHTDMDLAAPAPPAPQQVAAGEGGPPSTAWVDGIIRDIIASSGAAVSVAQLIHNVREIIRPCNPDLASILELRLRSLLNSDPAPPPPPPSHPALLPPDATAPPPPPTSVAALPPPPPAQPDKRRREPQCQEQEPNQPQSPKPPTAEETAAAAAAAAAAAAAAAKERKEEQRRKQRDEEGLHLLTLLLQCAESVNADNLDEAHRALLEIAELATPFGTSTQRVAAYFAEAMSARLVSSCLGLYAPLPSPSPAGARVHGRVAAAFQVFNGISPFVKFSHFTANQAIQEAFEREERVHIIDLDIMQGLQWPGLFHILASRPGGPPRVRLTGLGASMEALEATGKRLSDFADTLGLPFEFCPVADKAGNLDPEKLGVTRREAVAVHWLRHSLYDVTGSDSNTLWLIQRLAPKVVTMVEQDLSHSGSFLARFVEAIHYYSALFDSLDASYSEDSPERHVVEQQLLSREIRNVLAVGGPARTGDVKFGSWREKLAQSGFRVSSLAGSAAAQAALLLGMFPSDGYTLIEENGALKLGWKDLCLLTASAWRPIQASGR

SEQ ID NO: 17734 - protein, 671 aa, Oryza sativa
  unsure (1)..(671): unsure at all Xaa locations
  Clone ID: TF_OSC12505j.C1.p1.np
LTPPPPPPPPHPLHHLHPPPPAPVPPLAPPRPVVLRSPSQRERRATARAKPARGRAAAPPQPRGGDGGSKDATAVAGAWRGGNGESEDAAAIAHAAPSFLVPQPQLGQPPPPPLLQNPASSPPPAVPDTPSPDKEKTAHSSTDGVRRQFASAGSATATDRSLVSEGEVLSVPSSPALFALARPLLCSSLPPSNDPCCPSTHPRRLVCVQLSPTASCCCRPDPTXRPSPSRDREKNRVLLCSRKKNRSRPLIPSAWAPPATTREQLPATRQTAQAASPSRARQRTGEEEEAAAETRGLRLLSLLLRCAEAVAMDQLPEARDLLPEIAELASPFGSSPERVAAYFGDALCARVLSSYLGAYSPLALRPLAAAQSRRISGAFQAYNALSPLVKFSHFTANQAIFQALDGEDRVHVIDLDIMQGLQWPGLFHILASRPTKPRSLRITGLGASLDVLEATGRRLADFAASLGLPFEFRPIEGKIGHVADAAALLGPRREATVVHWMHHCLYDVTGSDAGTVRLLKSLRPKLITIVEQDLGHSGDFLGRFVEALHYYSALFDALGDGAGAAEEEAAERHAVERQLLGAEIRNIVAVGGPKRTGEVRVERWGDELRRAGFRPVTLAGSPAAQARLLLGMYPWKGYTLVEEDGCLKLGWKDLSLLTASSWEPTDGDADA

SEQ ID NO: 17735 - protein, 108 aa, Oryza sativa
  Clone ID: TF_OSC20530j.C1.p8.gp
DMLDATTPRDSGLRLALEQNVLGPYALNAIACEGADLVERPEKYKQWQARNHRAGMQQLKLRPDIVDTIRDEVNKYHHKDFLLGEDGQWLLQGWMGRILFAHSAWVRQ

SEQ ID NO: 17736 - protein, 450 aa, Oryza sativa
  Clone ID: TF_OSC415629j.C1.p8.gm
MEDVDERVDLHQGEAALQAAEKPFYDILGQSWEATEKPFYDILGKAYPSSSKETAINGDSQADYPDNGSSSYHEQACSGSFVSDLLGSQDAHSITTDWSSEFDRLALQFRRGVEEAKRFIPNIEKLVDDPEKNGLYACKQTTETTEQKGKHENKIRNHPHDPHVEHIELMEARNSKHMAISTSETIRDEMFDSILLCNRQLPGEVANLRGMMAKEASDNPKKFQSKGYGKGQRKPHSSKKKQKEAIDLSVLLIQCAQAIASNNHPFASELLRKIRHHALPDGDGSQRLANCFADGLEARLAGTGSQIDLQMKKGVHPSLGSQGIASRWETVQIEDLNIDKDEVFILGVVNGLYSSPFFLTRFREVLFHYSSLFDMLDNNVPRNHEARILVEKDLFGNDALNAVACEGAERIERPESYKQWQMRILRAGFKQRPGWKGRIIQALSTWKVET

SEQ ID NO: 17737 - protein, 731 aa, Oryza sativa
  Clone ID: TF_OSC101577j.C1.p23.fg
MGLDNNFGELSGMFCGLSYDGYTDHGSQSDYFRFADPQPAIVPQMDAGPSSAASSTASRAAVSSGTDNPEDWEFISDESLNYISRMLMEEDIDEKVSMYQEESAALRAAAKPFYDILGHKFPPSPDRQLVAWPLDSPSESSTSSYPHSLASSVTSSNISGAVDSSQRRYVGHSEYRSLSGHSSQPPVGPSSDVRNAMETLEDPLISNGRIPEYLFESFPTWDFRRGVDEAQKFLPGSDKVVIDLEAGGVAKRQEAGKAISLNVSKAEVLKVKKNRQSEDLDVMEGRNSKQSAFCSDEPDWIEMFDVLLRQTEKKATDLRKMMRFEASKNSQVAQPKGPSGTRSRGRKPTKKDVVDLRTLLIHCAQAVAADDRRTANELLKQIRQHAKPNGDGSQRLAYCFADGLEARLAGTGSQLYHKLVAKRTTASDMLKAYHLYLAACPFKRLSHFLSNQTILSLTKNASKVHIIDFGIYFGFQWPCLIRRLFKREGGPPKLRITGIDVPQPGFRPTERIEETGQRLAEYAEKIGVPFEYQGIASKWETICVEDLNIKKDEVVIVNCLYRFRNLIDETVAIDSPRNRVLNTIRQVNPAIFIHGIVNGSYSVPFFITRFREALFHFSALFDMLETTVPRDDAQRALIERDLFGREALNVIACEGSDRVERPETYKQWQVRNLRAGFVQSPLNQDIVLKAKDKVKDIYHKDFVIDEDSEWLLQGWKGRIIYAISTWKPNNN

SEQ ID NO: 17738 - protein, 495 aa, Oryza sativa
  Clone ID: TF_OSC401401j.C1.p8.gm
MSVWEGGTDIGRSSQQAGSSASGQNASSSSFTLTSPGLRPPTHAASTPPPPPWLDDADHHHDNAFLHWVINDHHHPLLDLDDVDLDYAKPAPFFFADRGLHHHHPASSSFPNPKPTADDNTSTVEQLVQAAKLTEAGDVLAARHILARPAINYRLPASAAPPLLRSALYFKDALRRALISDDDSSSSSTPPPPLHEPHPHDLLLKLTSYKSFSDLSPLLHFAHFTCVQAVLDELAPSASCIHLLDFDIGVGEQWASLMHDLAHRHPGVALKVTALNVTASSSSHHPLQLQLIHDTLSTFAADLSVPFRFAAFNLDATDLTPLLAVAAATDAIAVHLPVGSVHATAVPSVLHLVRRLGAKLVVSVDRGCDRGELPFAAHLLQALRSTVSLLESLDAMGTDSDVAAKIERFWVQPKIQECVRAAVGVGGDKTAASAWRATLASAGFVPVQVSSMAEAQAESLLKKLPVRGFRLERRAGSLFLHWQRGELASVSAWRC

SEQ ID NO: 17739 - protein, 602 aa, Oryza sativa
  Clone ID: TF_OSC401196j.C1.p71.np
MQDALLGRRCQRRAGAGSQRRWDSGRARIGSPLRARDFETAAGSGDGGERRRRGRGAAALERWRCWEWQQPDSLAAAASALDELDVSSKTLLGLTSPCTTGGLTTEWRIGVLYMLPMINIALMSSSSCHPHNPTTLPLPEPDSSKSPEPTSVLYNRSSPSTSLGSCSSKPPEDPPPPIAADDDCDWDAVVDMHMHMLAPAPAPDSSFLRWIMDTGYADADTFPDHPSFDSDLLQLPMPMPSDHPPQPLVDDLLDAARLLDAGDSTSAREILARLNHRLPSLPSPPGHAHPPLLRAAALLRDALLPPTALPVSSTPLDVPLKLAAHKALADASPTVQFTTFTSTQAFLDALGSARRLHLLDFDVGFGAHWPPLMQELAHHWRRAAGPPPNLKVTALVSPGSSHPLELHLTNESLTRFAAELGIPFEFTALVFDPLSSASPPLGLSAAPDEAVAVHLTAGSGAFSPAPAHLRVVKELRPAVVVCVDHGCERGALNLLQSCAALLESLDAAGASPDVVSKVEQFVLRPRVERLAVGGGDKLPPPLQSMLASAGFAALQVSNAAEAQAECLLRRTASHGFHVEKRQAALALWWQRSELVSVSAWRC

SEQ ID NO: 17740 - protein, 472 aa, Oryza sativa
  Clone ID: TF_OSC400553j.C1.p7.fg
MQFTHTAPPPPPLHPNGHGLGLGLYLDVGATRGGGGARPWSSSSSTTTLGGSGYFPSSAAASKISLGNLNSTGCMEQLLVHCANAIEANDATLTQQILWVLNNIAPADGDSNQRLTAAFLCALVSRASRTGACKAVTAAVADAVESAALHVHRFTAVELASFIDLTPWHRFGYTAANAAIVEAVEGFPVVHIVDLSTTHCMQIPTLIDMLAGRAEGPPILRLTVADVAPSAPPPALDMPYEELGAKLVNFARSRNMSMDFRVVPTSPADALTSLVDQLRVQQLVSDGGEALVVNCHMLLHTVPDETAGSVSLTTAQPPVSLRTMLLKSLRALDPTLVVVVDEDADFTAGDVVGRLRAAFNFLWIPYDAVDTFLPKGSEQRRWYEAEVGWKVENVLAQEGVERVERQEDRTRWGQRMRAAGFRAAAFGEEAAGEVKAMLNDHAAGWGMKREDDDLVLTWKGHNVVFASAWAPS

SEQ ID NO: 17741 - protein, 752 aa, Oryza sativa
  Clone ID: TF_OSC402781j.C1.p4.gm
PGRLSSRTCKRLLQGLDPLASVDLGSFSSSRPNGQPPRSRKEEIEGQSDLAAVDMDVRFGPEEQIVWPASVLAGILMCAAVYDITREVSSRCYKGYNGLNELHKLEWNNRGFSTFHALVAAVVSFYLLVISDLFSKDVHGAIIIDRKSWMSDAMFGVSLGYFLTDLLMILWHFPSLGGKEYLLHHGLSMYAISLALLSGKGHVYILMVLITEATTPFVNLRWYLDLAGRKDSKLYLYNGVALFAGWLVARVILFVYFFAHVYLHFDQVRTVFPLGFYSMMAVPPAMSAMNLLWFRKICKGMVKAMSSANRTNEGCAGEDDSPEFVEPPAAAAAAGTFEQRPELGACKEVYSEEGGAAEERTGVAMAGADVEQVAVEDEEEAHGVRMIALLMECAAAMSVGNLAGANGALLELSQMASPYAASCGERLVAYFARAMAARLVGSWVGVVAPMAPPPSCGAINAAFRALYNVAPFARLAYLACNQAILEAFHGKRLVHIVDLDVVPGGALQWLSLLPALAARPGGPPVIRVTGFGMSASVLHDTGNQLAGLARKLCMFFEFYAVAKRPGDADAVADMPGRRPGEAVAVHWLRHAMYDAAGDDGASMRLVRWLEPARFVSALHHYSAVFDAMGASRPDGEDASRHLAEHGVLGREIANVLAVGGPARSSGREGPGSWREVLARHGFAHAGGGGGGRAQLVAAACPGGLGYTVAGDHDGTVRLGWKGTPLYAPQEMKNGLSWIVASKTSGNKMSYGS

SEQ ID NO: 17742 - protein, 593 aa, Oryza sativa
  Clone ID: TF_OSC20530j.C1.p3.fg
MANPEDFFWEALLKENEAPSPPPVFFDLPATPLSNSDGTDPSSLDNQLLSYVSRMLMEDEMGSSAAITNLQCVNRGSTEEANNMLPGSEVVRVFSKGMGEASKLLPRNNSFRTLETVDQVSSDGHCRGRKKKNHDRDEQQLEEELGRTSKLAALTIAGTQEAGARELLDELMLHAHETCIKDMEKLRIDMDNEAEKKINKKDKKGSSSKVVDLRLLLIQCAQAMATDNQQSAGELLKKIKQHALATGDAMQRVAHYFAKGLEARLAGSGKHLYQNHVRMSLVEYLKVYKLYMAACCFKKVALMFAAMTIMQAVQGKKRLHIVDYGIRCGLHWPDLFRRLGSREDGPPEVRITIVDIPQPGFRPFQRIEAAGHCLSSCANEFRVPFRFQAVVAAKWETVGAEDLHIEPDEVLVVNDLWSFSALMDESIFCDGPNPRDVALRNISKMQPDVFIQGIINGGYGASFLSRFRGALLYYSALFDMLDATTPRDSGLRLALEQNVLGPYALNAIACEGADLVERPEKYKQWQARNHRAGMQQLKLRPDIVDTIRDEVNKYHHKDFLLGEDGQWLLQGWMGRILFAHSAWVRQSQDTSSG

SEQ ID NO: 17743 - protein, 207 aa, Oryza sativa
  Clone ID: TF_OSC20530j.C1.p3.gp
MLLIQCAQAMATDNQQSAGELLKKIKQHALATGDAMQRVAHYFAKGLEARLAGRGKHLYQNQMRMSLVEYLKVYKLYMAACCFTKVALMFAAMTIMQAVQGKKRLHIVDYGPRCGLHWPDLLRRLGSREDGPPEVRITIVDIPQPAFRPFQRIEEAGHCLSSCANEFRVPFRFQAVVAAKWETVGAEDLHIEPDEVLVVNDLWSFSA

SEQ ID NO: 17744 - protein, 619 aa, Oryza sativa
  Clone ID: TF_OSC416737j.C1.p10.fg
MEPGAPWRDPRQGYLYGVGSAVQMPMQQRSDAAAAGGVLKRSLGDMERWQQHQHQQRQIAMQQQLYLRTVRQRTAAASAAVSPLTSADIAAVLGGPPSQPLVLSGSSMGGAFGSPSSTLSSITTASRAVAMPLMQPQLQRQQQVTYMASSPQVQAFGTARALPPAPATSDLSILQELEKQLLGDDDEVEAAMSGTGSAVTGSEWEEQLNSITAAPSPPLTAATTPNNNNNAVGMTRSPSNSSTSTASSSASCSPPTSATTSRQLLSEAAAAIADGHNETAATHLTALKRAANSRGDVEQRLVAMMVAALSSRIGQTASVPDICGGETRAGSQLLHDISPCFRLALHAANVAIVDAVGDHRAIHLVDFDVSAPQHADLIRCLAARRLPGTSLKVTAVTDPASPFTQSVTATLHLQKLAERAGIDYRFKMVSCRAGEIEASKLGCEAGEALAVNLAFALSHVPDESVSPANPRDEILRRVRALGPQVVALVEQELNSNTAPLTTRFTDACAHYGAILESLDATIPRESAERARAEAALGGRAANAVAREGADRLERCEVFGKWRSRFGMAGFRPVALGPGIADQVLARQGPVAAGFAVKAENGVLRLGWMGRVVTVASAWR

SEQ ID NO: 17745 - protein, 411 aa, Oryza sativa
  Clone ID: TF_OSC405105j.C1.p1.fg
MLRSLHSSSSSDTDNNSGGCKNNGGGGGEAAAAVEGGGDQRAVAAAAPSTRDLLLACADLLQRGDLPAARRAAEIVLAAAASPRGDAADRLAYHFARALALRIAPFLRFAHLTANQAILEAVDGARRVHILDLDAVHGVQWPPLLQAIAERADPALGPPEVRVTGAGADRDTLLRTGNRLRAFARSIHLPFHFTPLLLSCATTAPHHVAGTSTGAAAAASTAAAATGLEFHPDETLAVNCVMFLHNLAGHDELAAFLKWVKAMSPAVVTIAEREAGGGGGGGDHIDDLPRRVGVAMDHYSAVFEALEATVPPGSRERLAVEQEVLGREIEAAVGPSGGRWWRGIERWGGAARAAGFAARPLSAFAVSQARLLLRLHYPSEGYLVQEARGACFLGWQTRPLLSVSAWQPSSS

SEQ ID NO: 17746 - protein, 532 aa, Oryza sativa
  Clone ID: TF_OSC400032j.C1.p10.fg
MGMSPEPCNSISDCSQQQSHHLTLTQQQDSTIICTNQELDYYYRFYDVDEAAFDGNEVELVSRFSKVTRMDHMISSPYQPTWSPAQAAVDVVGSSETSRVRKKRFWDVLESCKQKVEAMEAMDTPATATFRVGAGDGGGGGGGGAGGGGGGADGMRLVQLLVACAEAVACRDRAQAAALLRELQAGAPVHGTAFQRVASCFVQGLADRLPLAHPPALGPASMAFCIPPSSCAGRDGARGEALALAYELCPYLRFAHFVANACMLEAFEGESNVHVVDLGMTLGLDRGHQWRGLLDGLAARASGKPARVRVTGVGARMDTMRAIGRELEAYAEGLGMYLEFRGINRGLESLHIDDLGVDADEAVAINSVLELHSVVKESRGALNSVLQTIRKLSPRAFVLVEQDAGHNGPFFLGRFMEALHYYAALFDALDAALPRYDARRARVEQFHFGAEIRNVVGCEGAARVERHERADQWRRRMSRAGFQSVPIKMAAKAREWLDENAGGGGYTVAEEKGCLVLGWKGKPVIAASCWKC

SEQ ID NO: 17747 - protein, 493 aa, Oryza sativa
  Clone ID: TF_OSC29408j.C1.p10.gm
YASDTQLFRYGPEPYNPENSFYNQQASPMPYMVTADGHSPSSADNSCSDVAKDSPLVSNVSQQNSQSISDNQSSELEVEFDEDDIRMKLQELEHALLDDSDDILYEISQAGSINDEWADPMKNVILPNSPKESESSISCAGSNNGEPRTPKQLLFDCAMALSDYNVDEAQAIITDLRQMVSIQGDPSQRIAAYLVEGLAARIVASGKGIYKALSCKEPPTLYQLSAMQILFEICPCFRFGFMAANYAILEACKGEDRVHIIDFDINQGSQYITLIQFLKNNANKPRHLRITGVDDPETVQRTVGGLKVIGQRLEKLAEDCGISFEFRAVGANIGDVTPAMLDCCPGEALVVNFAFQLHHLPDESVSIMNERDQLLRMVKGLQPKLVTLVEQDANTNTAPFQTRFREVYDYYAALFDSLDATLPRESPDRMNVERQCLAREIVNILACEGPDRVKSGIRSLLKSYCDRYKFEEDHGGLHFGWGEKTLIVSSAWQ

SEQ ID NO: 17748 - protein, 472 aa, Oryza sativa
  Clone ID: TF_OSC10722j.C1.p5.fg
MVLDSNELHQHDAPDVDVSINCDDRIFGQESVNLAAIQEELLEEDSLSDLLLAGAEAVEAGDSILASVAFSRLDDFLSGIPENGAASSFDRLAYHFDQGLRSRMSSASTGCYQPEPLPSGNMLVHQIIQELSPFVKFAHFTTNQAILDAIIGDMDVHVVDLNIGEGIQWSSLMSDLARCGGKSFRLTAITTYADCHASTHDTVVRLLSEFADSLELPFQYNSICVHNEDELHAFFEDCKGSVIVSCDTTSMYYKSLSTLQSLLLVCVKKLQPKLVVTIEEDLVRIGRGVSPSSASFVEFFFEALHHFTTVFESMASCFIGSSYEPCLRLVEMELLGPRIQDFVVKYGSVRVEANASEVLEGFMACELSACNIAQARMLVGLFNRVFGVVFKKISLLMVYYISLGKNDLREPNKVIWSSLAAGCGSHGIVVLAFYAADKLLEFKPKGIETYIHPAVERAHFHKEDRMWQEYEN

SEQ ID NO: 17749 - protein, 810 aa, Oryza sativa
  Clone ID: TF_OSC1192j.C1.p3.fg
MMHGLWVQDQGVVDHLAQLVPLLHECASHVTEGSFEKADFSFKKIRMLTIADGPLQRLSTIIVDSLAHRLLSSIQGLPGALIDPSDYFEKSTLRAARHNFFKLNPYLSTGFVTINWAIMEAMEDEKSLLSKKAESLGVSFHFISVIGRLETLDFSNLRSTFQIKFGVAVAISCALQMHRLLLVDDNLSSTSIAQLQKMANFTQPKQMASSVCSPASTLNYLQTPSPRTPKLLARLLSAIRALKPNIMLIMEQDADHNTLLFRDRFNEVLNYYAALFDCFHAVAAANPGRTDERLRVDRMILREEIKNILLRLCCTDRGMFQDDMLSSATSSPASSVYSPSPSPSNGSWVQELSHDQQSVRLIGLLYQCAAEVSAGSFDRANLCLEHITQLASLDAPHALQRLAAVFADALARKLLNLILGLSRALLSSANSADAHLVPVARRHMFDVLPFLKLAYLTTNHAILEAMEGERFVHVVDFSGPAANPVQWIALFHAFRGRREGPPHLRITAVHDSKEFLANMAAVLSKEAEAFDIAFQFNAVEAKLDEMDFDALRHDLGVRSGEALAVSVVLQLHRLLAVDDGRRHAAAGCLTPVQIIARSSPRSFGELLERELNTRLQLSPDASVVSSLSPHSPAAATAAHPTTSTPKLGSFLSAVRSLSPKIMVMTEQEANHNGGAFQERFDEALNYYASLFDCLQRSAAAAAERARVERVLLGEEIRGVVACEGAERVERHERARQWAARMEAAGMERVGLSYSGAMEARKLLQSCGWAGPYEVRHDAGGHGFFFCWHKRPLYAVTAWRPAASRRGHTRS

SEQ ID NO: 17750 - protein, 492 aa, Oryza sativa
  Clone ID: TF_OSC403597j.C1.p9.gm
MFQDDMLSSATSSPASSVYSPSPSPSNGSWVQELSHDQQSVRLIGLLYQCAAEVSAGSFDRANLCLEHITQLASLDAPHALQRLAAVFADALARKLLNLILGLSRALLSSANSADAHLVPVARRHMFDVLPFLKLAYLTTNHAILEAMEGERFVHVVDFSGPAANPVQWIALFHAFRGRREGPPHLRITAVHDSKEFLANMAAVLSKEAEAFDIAFQFNAVEAKLDEMDFDALRHDLGVRSGEALAVSVVLQLHRLLAVDDGRRHAAAGCLTPVQIIARSSPRSFGELLERELNTRLQLSPDASVVSSLSPHSPAAATAAHPTTSTPKLGSFLSAVRSLSPKIMVMTEQEANHNGGAFQERFDEALNYYASLFDCLQRSAAAAAERARVERVLLGEEIRGVVACEGAERVERHERARQWAARMEAAGMERVGLSYSGAMEARKLLQSCGWAGPYEVRHDAGGHGFFFCWHKRPLYAVTAWRPAASRRGHTRS

SEQ ID NO: 17751 - protein, 219 aa, Oryza sativa
  unsure (1)..(219): unsure at all Xaa locations
  Clone ID: TF_OSC410945j.C1.p12.gp
KLTAFMSTASHHPLELHLTQDNLSQFAAELRIPFEFNAVSLDAFNPAELISSSGDEVVAVSLPVGCSARAPPLPAILRLVKQLCPKVVVAIDHGGDRADLPFSQHFLNCFQSCVFLLDSLDAAGIDADSACKIERFLIQPRVEDAVIGRHKAQKAIAWRSVFAATGFKPVQLSNLAEAQADCLLKRVQVRGFHVEKRGAALTLYWQRGELVSISSWRCX

SEQ ID NO: 17752 - protein, 124 aa, Oryza sativa
  Clone ID: TF_OSC16170j.C1.p1.gm
NSGSSVDQTEHRAPAAPPPRRRRWEQIITCSSLRSFNELLTGELNTRLQLSPDASVLSSLSLHSPAAVMAAHPASTSTLNYYATLFDGLQQSTTAPAERVLLGMEIRSVVACEGAERVERHEWA

SEQ ID NO: 17753 - protein, 551 aa, Oryza sativa
  Clone ID: TF_OSC413654j.C1.p5.fg
MAVEIPRLALGGGGGGAGGERLPAAGEDSAPAATNAGKRPVVGLGFGSSLAAMAAAAAAGIQPDAFALGGPAEYPAGDGERDVLMVSFLRSIAAFLADGTCQMQVNDGLSCVVDLAGGDADGGGVGEGRSAQRLASAFAEALALRFILPCDGVCRSLHLTRAPPPPAVSAARQGFRAMCPFVRLAAAAANLSIAEVMEAERAVVHVVDLGGGVDANQWVELVRLVAARPGGPPGLLRLTVVNESEDFLSAVAAYVAAEAQRLDLSLQFHPVLSSIEELSATATGSIGSRLVVIPGQPLAVVANLQIHRLLAFPDYVDGVASRRPAAEQSGSSQHTMTTATKTKADALLRAIRDLNPKLVVLTENEADHNVAELGARVWNALNYYAALFDALEASSTPPAAVPPHERACVERWVLGEEIKDIVVREGTGRRERHETLGRWAERMVAAGFSPVTAARALASTETLAQQMVAAGGGGAGAGVLRAAHGGGCFPVICWCDVPVFSVSTWTARRVLVPAPPLWPPAAAGGAGPSGSGYGGDGPSTASSSAAMWWVG

SEQ ID NO: 17754 - protein, 249 aa, Oryza sativa
  Clone ID: TF_OSC406886j.C1.p1.fg
MQGLQWPGLFHILGSRPGGPPRVRLTGLGASMEALEATGKRLSDFADTLGLPFEFCPVADKAGNLDPEKLGVTRREAVAVHWLRHSLYDVTGSDSNTLWLIQRLAPKVVTMVEQDLSHSGSFLARFVEAIHYYSALFDSLDASYSEDSPNRHVVEQQLLSREIRNVLAVGGPARTGDVKFGSWREKLAQSGFRVSSLAGSAAAQAALLLGMFPSDGYTLIEENGALKLGWKDLCLLTASAWRPIQASGR

SEQ ID NO: 17755 - protein, 478 aa, Oryza sativa
  Clone ID: TF_OSC401949j.C1.p29.fg
METMSYPCSLLIPFSTQFEEISSSSLLLWSPQAEENPHENANMYEFDADHSHDQIHQDHQFLDMMVIQESANEFDGNHSHDQIHQDHEFLETMVIQESANEFDGDHSHDQIHQDHEFLEMMAIQESANDLLQLQDDFSVPNADPLAASFEFDERLAVAGHENGNVVATQEESAGDLLLAGAMAVDAGDAVHASAIMSRLDDLLADIAGRRSCEATSPVDHLAYYFARGLKLRISGAATPASSPPPPAANWSSPAYRMLQELTPFVKFAHFTANQAILEATADDLDVHVVDFNVGEGVQWSSLMSDLAAAGRHRCSTSRTLKLLLLGTITILQPKLVILIEDELSRISKNPPSPSLAAPPPFPEFFSDAVAHFTAVMESTASCLVSYDDEAWLSLRRVGEEVVGPRVEDAVGRYGSLAGGAQMMEGLRAREVSGFSVAQGKMLAGLFGGGFGVVHQEKGRLALCWKSRPLISVSLWCPK

SEQ ID NO: 17756 - protein, 237 aa, Oryza sativa
  unsure (1)..(237): unsure at all Xaa locations
  Clone ID: TF_OSC9377j.C1.p3.np
KSMLWATNSRXFHCLENTLEARLAGTGSQMYQSLVAKRTSTVDFLKAYKLFTAACCVKKVSVIFXSSNKTIYNAVAGKRKLHIVDYGLSYGFQWPALFFLLGTREGGPPEVRMTGIDVPQPGFRPADQIEETGRRLSIARARQFGVPFKFRAIAAKXETVRREDLHLDREEEEVLVVNCLHGLNNLQDESVVMESPRDVVLNNNRDMRPHVFVQCVVNGAYGAPFRLHRRGEVAIHR

SEQ ID NO: 17757 - protein, 460 aa, Oryza sativa
  Clone ID: TF_OSC1192j.C1.p1.fg
MEKATRCLARATGLAAAAAAGDGPRKRLAVAMVDCLARRLLRPVQAITDALIDPSVYLDRRSVRAARRGFFELSPFPKVAFVVGNRAIVEAVENESLVHVVGMSGPFTQPCQWIQLLHELRRRPEGPPRVVRLTVVHDDGELLAKMEELVSDEAEELGMEFQFHGVVGQLEDLDFSNLRNVLEIKSGEALVVSCTLQLHRLLAADDDAMYSSRSAHLNQMASIAQLQHMAVNSCPSSSGGGSVQYKDDDPYRSPATPLTFVSPPVSTPHFQTPAALASFLSAVRALSPKILVVAEQDADHNGVSFRKRFCEALHHYAAVFDSLDAAAATTSAASRLWSPDERAQVERVVVGEEIKGVLLRDGAHRREWHDRLRQWAARMEMAGFTGVPLSYAAIKKGNDMVRRCGLRRCENKECGGCLLLCWSSRPLYSISAWRPAASRGSGSGSERSEYVHVGAEPDDR

SEQ ID NO: 17758 - protein, 738 aa, Oryza sativa
  Clone ID: TF_OSC402543j.C1.p3.fg
MGSSAADSFPACGDDAIRDVYGIGGGGEEDDPSLFLYLSDLAPVSPSAYLDLPPSPPPPTTTATTMVKEGEEAPEDLVLPFISRMLMEEDIDDKFFYDYPDNPALLQAQQPFLEILSDPSSNSRSSNSDDPRLSPTSSSDTSAAINSYDAAATATAVAAAAVPVPQYESIELDPAAFFAAANSDLMSSAFLKGMEEANKFLPTENKLIIDLEASSENNYLRGLEEAKRFLPSDDKLQVGFAAAAAPVVSVKKEAVDVVVATASGGGGRGRKNPYDDEELELEGGRSSKQTAVQGDDVAARAMFDKVMMPSHENCTEMMEKLRIAMKEEAAKNEASAGGKGGNGKVKGGRRGGRDVVDLRTLLIHCAQAVATDDRRSATELLKQIKQHAKPTGDATQRLAHCFAEGLQARIAGTGSLVHQSLVAKRTSAVDILQAYQLYMAAICFKKVSFIFSNQTIYNASLGKKKIHIVDYGIQYGFQWPCFLRRISQREGGPPEVRMTGIDLPQPGFRPTERIEETGHRLSKYAQEFGVPFKYNAIAAVKMESVRKEDLNIDPDEVLIVNCQYQFKNLMDESVVIDSPRDIVLSNIRKMQPHVFIHAIVNGSFSAPFFVTRFREALFFYSALFDVLDATTPRESEQRLLIEQNIFGRAALNVIACEGIDRVERPETYKQWQVRNQRAGFKQLPLNPEIVQVVRNKVKDCYHKDFVIDIDHQWLLQGWKGRILYAISTWTPNDALSYF

SEQ ID NO: 17759 - protein, 802 aa, Oryza sativa
  unsure (1)..(802): unsure at all Xaa locations
  Clone ID: TF_OSC900311j.C1.p8.np
RDAGVGGARRARPLPRRRPHRPLNPLLRLAAAMGSSAADSFPLVEMMQSETCTAGGGGRTIRPSSSTSPTSPPSPPPPTSTSPLAAAAATATTMVKEGEEAPEDLVLPFISRMLMEEDIDDKFFYDYPDNPALLQAQQPFLEILSDPSSNSRSSNSDDPRLRYNFKRPPRISKNFKRPPRISKTLVVLGEXPTSRARXPLFPANFYDPGFSPTSSSYTSVAINSYDAAATATAVAAAAVPVPQYESIELDPAAFFAAANSDLMTPFLKGMEEANKFLPTENKLIIDLEASSENNYQGSRGGQEVPAQRRQASVDVVVATASDVVVATASGGGGRGRKNPYDDEELELEGGRSSKQTAVQGDDVAARAMFDKVMMPSHENCTEMMEKLRIAMKEEAAKNEASAGGKGGGKVKGGRRGGRDVVDLRTLLIHCAQAVATDDRRSATELLKQIKQHAKPTGDATQRLAHCFAEGLQARIAGTGSLVHQSLVAKRTSAVDILQAYQLYMAAICFKKVSFIFSNQTIYNASLGKKKIHIVDYGIQYGFQWPCFLRRISQREGGPPEVRMTGIDLPQPGFRPTERIEETGHRLSKYAQEFGVPFKYNAIAAVKMESVRKEDLNIDPDEVLIVNCQYQFKNLMDESVVIDSPRDIVLSNIRKMQPHVFIHAIVNGSFSAPFFVTRFREALFFYSALFDVLDATTPRESEQRLLIEQNIFGRAALNVIACEGIDRVERPETYKQWQVRNQRAGFKQLPLNPEIVQVVRNKVKDCYHKDFVIDIDHQWLLQGWKGRILYAISTWTPNDALSY

SEQ ID NO: 17760 - protein, 711 aa, Oryza sativa
  Clone ID: TF_OSC400235j.C1.p17.fg
MRAAPFSADGNGAAELAGSIAALLWPEDKGGGGGGGGGSLLVEPRSVLDCRGSPSPPNSTSTLSSSHGSGAADSISTGVAAVSESSAAAAEATRWAAPGEHGGGGGGELPPIPGALDVGFVAEESWDAMLGDAAAAAGQEQTFLNWIMAAPGDMEPQAPGLSQQQLLANAAGFGFPLQHHPGGVSSPAALASDLSSSGGRSLTSSSGSNSKATSAFGLLSPEAALQPPPATTAPFHNGADMKPPLLGLPSPTLLLNQHQPTPASTLFMPFPSFSDHQQQPLLQPPPKRHHSVPDNLFLLHNQPQPPPPAPAQCLPFPTLHSAVPFQLQPSMQHPRNAMKSTAAAAAAQQQHLLDELAAAAKATEVGNSIGAREILARLNQQLPPIGKPFLRSASYLKDALLLALADGHHAATRLTSPLDVALKLTAYKSFSDLSPVLQFANFTVTQALLDEIASTTASCIRVIDFDLGVGGQWASFLQELAHRCGSGGVSLPMLKLTAFVSAASHHPLELHLTQDNLSQFAADLGIPFEFNAINLDAFDPMELIAPTADEVVAVSLPVGCSARTPLPAMLQLVKQLAPKIVVAIDYGSDRSDLPFSQHFLNCLQSCLCLLESLDAAGTDADAVSKIERFLIQPRVEDAVLGRRRADKAIAWRTVLTSAGFAPQPLSNLAEAQADCLLKRVQVRGFHVEKRGAGLALYWQRGELVSVSAWRC

SEQ ID NO: 17761 - protein, 1363 aa, Oryza sativa
  Clone ID: TF_OSC101500j.C1.p28.fg
MVIELPFDNQYTTTETEQPHDGSSCSSQQQLSLYNYSPSDPQLFSQPTTGSRTYLSGAVTIPGICNDKSNLGQQQFQIDAALSLGYQRIRSSDALCYISRVLMEDVDERVDLHQGEAALQAAEKPFYDILGQVYPPSLNRLALHSANEPDTPDESSSRNNYHNRYHSSHSSFNMLQPLPTPLSPYSYGRSLFLPNQHLVSTAWTSTFGIPGFQIRRGAEEAKRFVPIIDKLVIDLDTDRGLSISKMTTKAKVGDKKRYAIFELTDQRHSPYTTDLDILEGRNSKRYAITYCEIIRNDMFDRVLLCYGVENFAEASNLRKIMTKQARKNSLNGQTRGSAQRKLRGMKQLKKDVVDLRNLLIHCAQAVAADDRISASELVKKIRQHSSPDGDSNQRLAFYLVDGLEARLAGIGSQVYRKLMASRTSAESLLKAYSLYLSACPFERASFAYANQTILDASKGQQPRKVHIVHFGICTGFQWPSLIQRLANEEGGPPKLRITGIDMPQPGFHPCEIIEETGKRLADYANLFKVPFQYQGIASRWETVQIEDLNIDKDEVLIVNCMFRMKNLGDEMVSMNSARDRVLKIMRMMNPRVFILGIVNGSYSSPFFITRFKEVLFHYSSLFDMIDANVPRDNEARKMIEGGLFGQEALNIIACEGAERTERPESYKQWQARCLKAGFKQLPVDPATLKEIINMKKGIYHEDFVADEDGAWLLQGWKGRVIYAISTWKPNESYLDQCLPEFGGYPCQKYDLHSRILMEEDIDEKISIKKGQDALQATEKPFYDILGKAYPSSSKETAINGDSQADYPDNGSSSYHEQACSGSFVSDLLGSQDAHSITTDWSSEFDRLALQFRRGVEEAKRFIPNIEKLVDDPEKNGLYACKQTTETTEQKGKHENKIRNHPHDPHVEHIELMEARNSKHMAISTSETIRDEMFDSILLCNRQLPGEVANLRGMMAKEASDNPKKFQSKGYGKGQRKPHSSKKKQKEAIDLSVLLIQCAQAIASNNHPFASELLRKIRHHALPDGDGSQRLANCFADGLEARLAGTGSQMYEKLMAKQTSTRDMLKAYHLYFVACPFEMVTYYFSNKTIIDALEGKTTLHIVDFGILFGFQWPCLIQRLAKREGGPPKLRITGVDVPQPGFRPHERIEETGKRLAEYANMFNVPFQYHGIASRWETICIEDLSIDKDEVLIINCMSRMRKLGDETENIDSARDRVLHMMKRMNPQVFILGVVNGLYSSPFFLTRFREVLFHYSSLFDMLDNNVPRNHEARILVEKDLFGNDALNAVACEGAERIERPESYKQWQMRILRAGFKQRPVNQAILNRSVHYKEFYHEDFVIDEDSGWLLQGWKGRIIQALSTWKVET

SEQ ID NO: 17762 - protein, 235 aa, Oryza sativa
  Clone ID: TF_OSC416395j.C1.p2.gp
KERKEEQRRKQRDEEGLHLLTLLLQCAESVNADNLDEAHRALLEIAELATPFGTSTQRVAAYFAEAMSARLVSSCLGLYAPLPNPSPAAARLHGRVAAAFQVFNGISPFVKFSHFTANQAIQEAFEREERVHIIDLDIMQGLQWPGLFHILASRPGGPPRVRLTGLGASMEALEATGKRLSDFADTLGLPFEFCPVADKAGNLDPEKLGVTRREAVAVHWLRHSLYDVTGSDSNT

SEQ ID NO: 17763 - protein, 363 aa, Oryza sativa
  Clone ID: TF_OSC272j.C1.p1.gm
PPPKRHHSVPDNLFLLHNQPQPPPPAPAQCLPFPTLHSAVPFQLQPSMQHPRNAMKSTAAAAAAQQQHLLDELAAAAKATEVGNSIGAREILARLNQQLPPIGKPFLRSASYLKDALLLALADGHHAATRLTSPLDVALKLTAYKSFSDLSPVLQFANFTVTQALLDEIASTTASCIRVIDFDLGVGGQWASFLQELAHRCGSGGVSLPMLKLTAFVSAASHHPLELHLTQDNLSQFAADLGIPFEFNAINLDAFDPMELIAPTADEVVAVSLPVGCSARTPLPAMLQLVKQLAPKIVVAIDYGSDRSDLPFSQHFLNCLQSCLCLLESLDAAGTDADAVRFAPQPLSNLAEAQADCLLKRVQ

SEQ ID NO: 17764 - protein, 188 aa, Oryza sativa
  Clone ID: TF_OSC295j.C1.p4.gm
MQFLDHHQYLYSSSSSNLPLQQPLLSHHHRFLEANEGCAGEDDSPEFVEPPAAAAAAGTFEQRPELGACKEVYSEEGGAAEERTGVAMAGADVEQVAVEDEEEAHGVRMIALLMECAAAMSVGNLAGANGALLELSQMASPYAASCGERLVAYFARAMAARLVGSWVGVVAPMAPPPSCGAINAAFRA

SEQ ID NO: 17765 - protein, 332 aa, Oryza sativa
  Clone ID: TF_OSC20531j.C1.p1.gp
MEMLNMAFLKGREEANKLVPTNNTLFAGFDGASLLKTEPAVDEPTLMFGRSGGSGRGRKNRHGEEDDLEAETGRSSKLMVPPQEATAAASEMFDEIMFNWYEVIMKGMEELRVAMDSEAEKKARNGGGAGRRAARAKAAVVDLHTLLIHCAQAVATSDRRSATELLKQIKQNSSARGDATQRLACCFAEGLEARLAGTGSQVYKSLVAKCTSTVDFLKAYKLFAAACCIKKVSFIFSNKTILDAVAGKRKLHIVDYGLSYGFQWPGLFKCLSEREGGPPEVRITGIDFPQPGFRPADQIEETGRRLSNCARQFGVPFRFQAIAAKWETVRRE

SEQ ID NO: 17766 - protein, 164 aa, Oryza sativa
  Clone ID: TF_OSC406886j.C1.p3.gp
VSSCLGLYAPLPSPSPAGARVHGRVAAAFQVFNGISPFVKFSHFTANQAIQEAFEREERVHIIDLDIMQGLQWPGLFHILGSRPGGPPRVRLTGLGASMEALEATGKRLSDFADTLGLPFEFCPVADKAGNLDPEKLGVTRREAVAVHWLRHSLYDVTGSDSNT

SEQ ID NO: 17767 - protein, 210 aa, Oryza sativa
  Clone ID: TF_OSC1273j.C1.p1.gm
NQQALQFRRGFQEASKFLPDESKLVIDVDKLYSGDEGSRFLGEVRQEKKLVKVKTETSDVESAGHRGKKHFYGDDLDAEEGRCSKHSAQGIDTDHLVRDLMDKVLLCNGETCSKGVKELREALQHDVAKHSGGGHGKGSSHGKGRGKKQPKKEVVDLETLLIHCAQSVATDDRRSATELLKQIRQHAHANGDGDQRLAHCFANGLEARLA

SEQ ID NO: 17768 - protein, 172 aa, Oryza sativa
  Clone ID: TF_OSC400419j.C1.p1.fg
MSPAVVTIAEREAGGGGGGGDHIDDLPRRVGVAMDHYSAVFEALEATVPPGSRERLAVEQEVLGREIEAAVGALRRPVVARHRAVGRRRPRRGVRGAAAQRVRRVAGAAAAPAALPVGGLPRAGGARRLLPRVADAPAALRLSVAAVVVVAGDEDDDGDGGGDHGLGFAKLD

SEQ ID NO: 17769 - protein, 380 aa, Oryza sativa
  Clone ID: TF_OSC400011j.C1.p18.fg
MAGDYAAAAGSLSDAREIFAKMPTTRTGIGRVLTHFADALAERLFPAFPQSAPPPPPPRGEQRELFRGFYEAGPYLKFAHLAANQAILEAFEGCNSVHVIDFALTDGIQWPSLIQALAVRPGGPPFLRITGIGPHAAGNRDELRDVGLRLAEFARSCSVPFAFRGIAADQLDGLRPWMFQVAPGEAVAINSVLQLHRLLVDQDAAAAASFPAPIDGVLDWVASMNPRVFTAISRHGGGDGAGNPLAEAYLQGEIADIVSREGSSRVERHEQMPRWVERLRRGGMTQLPLGATGLWQAAMQLREFSGAGFGVQENGGFLTLTWHSQRLYSASAWRATAGKKMTMMASGAADAMEESQNSNTNGGGGGSSGGGHGALNQIMQ

SEQ ID NO: 17770 - protein, 524 aa, Oryza sativa
  Clone ID: TF_OSC401739j.C1.p20.fg
MPYYNNSVPSGGNGRFYITQNHQDAHYASSDDGSQKIGSSPQAFEAPYCTLESSSANGAHPAHSSASSHSISPISGSPLSHHDSHSDHTYNSPPSASCVTEITDLQIKLRELENAILGPELDIAYDSPESALQPNIMATPENWRQLLGINTGDLKQVIIACGKAVAENDVRLTELLISELGQMVSVSGDPLQRLGAYMLEGLVARLSSSGSKIYKSLKCKEPTSSELMSYMHLLYEICPFFKFGYMSANGAIAEAIKGENFVHIIDFQIAQGSQWMTLIQALAARPGGPPFLRITGIDDSNSAYARGGGLDIVGMRLYKVAQSFGLPFEFNAVPAASHEVYLEHLDIRVGEVIVVNFAYQLHHTPDESVSTENHRDRILRMVKSLSPRLVTLVEQESNTNTRPFFPRYLETLDYYTAMFESIDVALPRDDKRRMSAEQHCVARDIVNLIACEGAERVERHEVFGKWKARLTMAGFRPYPLSSVVNSTIKTLLHTYNSFYRLEERDGVLYLGWKNRVLVVSSAWC

SEQ ID NO: 17771 - protein, 482 aa, Oryza sativa
  Clone ID: TF_OSC401887j.C1.p6.fg
MPLHPAAAASPTPPWMVRELRSDERGLCLIHLLLNCAAAAAAGRLDAANAALEHIASLAAPDGDAMQRVAAAFAEALARRALRAWPGLCRALLLPRASPTPAEVAAARRHFLDLCPFLRLAGAAANQSILEAMESEKIVHVIDLGGADATQWLELLHLLAARPEGPPHLRLTSVHEHKELLTQTAMALTKEAERLDVPFQFNPVVSRLDALDVESLRVKTGEALAICSSLQLHCLLASDDDAAAVAGGDKERRSPESGLSPSTSRADAFLGALWGLSPKVMVVAEQEASHNAAGLTERFVEALNYYAALFDCLEVGAARGSVERARVERWLLGEEIKNIVACDGGERRERHERLEPVGAAAGGRRLRPRPAQLLRAAPGAAGGAGPRLRRLQEFNFGRSNFNVSEEAAKIELTLSEIPRNRQPVAWRFQIPPNFCQSWELQPQKRPCFAFHGNRIAAACSHCGFYLFFMFFILVLQISYLDI

SEQ ID NO: 17772 - protein, 620 aa, Oryza sativa
  Clone ID: TF_OSC410211j.C1.p1.fg
MACRIEVWPPSATAGRSCLFISRSGGGGGEQPGRLYNLLPEEILLTEIWNSDNNGKINSLLIVRKCIIPQRLQHINKIQKVAPENMSMQASNRPYRYPDNSQIPYYSRSSMHVGQNGTYHVQQNHEDLYASSDDGSQNGNSKAQGLQAQYCTLDSSSGNFVYPAHSSTSSHISGSPISQQDSHSEHTSGSPASASCVTEVPGLRFTTIEEIENAMFGPEPDTVSSDCSLLTDSAFYQDNWREHLGINTGDLKQVIAACGKAVDENSWYRDLLISELRNMVSISGEPMQRLGAYMLEGLVARLSSTGHALYKSLKCKEPTSFELMSYMHLLYEICPFFKFGYMSANGAIAEAVKGENFVHIIDFQIAQGSQWATMIQALAARPGGPPYLRITGIDDSNSAHARGGGLDIVGRRLFNIAQSCGLPFEFNAVPAASHEVMLEHLDIRSGEVIVVNFAYQLHHTPDESVGIENHRDRILRMVKGLSPRVVTLVEQEANTNTAPFFNRYLETLDYYTAMFEAIDVACPRDDKKRISTEQHCVARDIVNLIACEGAERVERHEPFGKWRARLSMAGFRPYPLSALVNNTIKKLLDSYHSYYKLEERDGALYLGWKNRKLVVSSAWR

SEQ ID NO: 17773 - protein, 487 aa, Oryza sativa
  Clone ID: TF_OSC422725j.C1.p1.fg
MVRKRPASDMDLPPPRRHVTGDLSDVTAAAAGAPTLSASAQLPALPTQLPAFHHTDMDLAAPAPPAPQQVAAGEGGPPSTAWVDGIIRDIIASSGAAVSVAQLIHNVREIIRPCNPDLASILELRLRSLLNSDPAPPPPPPSHPALLPPDATAPPPPPTSVAALPPPPPAQPDKRRREPQCQEQEPNQPQSPKPPTAEETAAAAAAAAAAAAAAAKERKEEQRRKQRDEEGLHLLTLLLQCAESVNADNLDEAHRALLEIAELATPFGTSTQRVAAYFAEAMSARLVSSCLGLYAPLPSPSPAGARVHGRVAAAFQVFNGISPFVKFSHFTANQAIQEAFEREERVHIIDLDIMQGLQWPGLFHILASRPGGPPRVRLTGLGASMEALEATGKRLSDFADTLGLPFEFCPVADKAGNLDPEKLGVTRREAVAVHWLRHSLYDVTGSDSNTLWLIQRYYTFLLSSLVNSGPPGIMATLHPILLIDIVT

SEQ ID NO: 17774 - protein, 420 aa, Oryza sativa
  Clone ID: TF_OSC401762j.C1.p34.fg
MNLKLSLAIDGGGGGDAAAAVAKKSKVVGGGAVVVDGVGSSAICGGDRGSRVRDRMVKKAEEFDHENGMAATSSDGGGRGGAGMDLASPFYQFAHFTANQTIVEAFESGGRRRLHVVDFDVSYGFQWPSLIQSLSDAAAAATSSSSHDDDDNGGGCGDGPVSLRITGFGASADELRETEARLRRFAAGCPNLRFEFEGILNNGSNTRHDCTRIDDDATVVVNLVFPASSREACAATRMAYINSLNPSMVFLIEKHDGGGGLTGGDNTTTGRSASLLPRFAANLRYFAAVFDSLHECLPADSAERLAIERDHLGREIADAVASLDHQHRRRHGGGGGGGDHAAASWNWKAAMEGAGLDGVKLSSRTVSQAKLLLKMKSGCGGGGFRVVEGDGGMAMSLAWRDMALATATLWRRRRRRRRCR

SEQ ID NO: 17775 - protein, 506 aa, Oryza sativa
  Clone ID: TF_OSC20523j.C1.p1.fg
MAAAPKPEELVVAIEQPFSPSLFLDLPPTPHHDDDPNNVNDDLLLPFISRILMEDDIDDKFFYQFPDHPALLQAQQSYAQILHAPATSSSSDDTTINNNTTNSTSVPDTLAMPDHDADTQSAPDDMEMLYMAFLKGREEATKFLPTNNTLFSGFKAEPVLDIQPTFTFGPSGGGRGRKNRHAEEDDLETETSRSSKLMAPEHDDAAAADEIFDEIILNGYQMIIKGIDELRVAMGSQSQADKNGRRASRAKTAVVDLHTLLIHCAQAVATGDWRSATELLKQIKQNSSARGDATQRMACCFAEGLEARLAGTGSQMYQSLVAKRTSTVDFLKAYKLFTAACCIKKVSVIFSNKTIYNAVAGRRKLHIVDYGLSYGFQWPALFFLLGAREGGPPEVRMTGIDVPQPGFRPADQIEETGRRLSICARQFGVPFKFRAIAAKWETVRREDLHLDPEEEEEEVLVVNCLHGLNTLQDESVVVDSPSPRDVVLDNIRDMRPHVFVQCVVNG

SEQ ID NO: 17776 - protein, 214 aa, Oryza sativa
  Clone ID: TF_OSC20530j.C1.p7.gp
SKVVDLRLLLIQCAQAMATDNQQSAGELLKKIKQHALATGDAMQRVAHYFAKGLEARLAGSGKHLYQNHVRMSLVEYLKVYKLYMAACCFKKVALMFAAMTIMQAVQGKKRLHIVDYGIRCGLHWPDLFRRLGSREDGPPEVRITIVDIPQPGFRPFQRIEAAGHCLSSCANEFRVPFRFQAVVAAKWETVGAEDLHIEPDEVLVVNDLWSFSA

SEQ ID NO: 17777 - protein, 414 aa, Oryza sativa
  Clone ID: TF_OSC416456j.C1.p5.fg
MDMEHELRGGGVGAAAHGHGSICFSGGPVLVDGRRIQQLLLHCAAALESNDVTLAQQAMWVLNNIASSQGDPSQRLTSWLLRALVARACRLCAAAPAGAAVEFLERGRAPPWGRAMSVTELADYVDLTPWHRFGFTASNAAILRAVAGASAVHWPTLIDVLSKRPGGAPAIRITVPSVRPAVPPLLAVSSSELGARLAIFAKSKGVQLEFNVVESATTTSPKKTSTTLCQELASVLSDPPSLGLRDGEAVVVNCQSWLRHVAPDTRDLFLDTVRALNPCLLTVTDEDADLGSPSLASRMAGCFDFHWILLDALDMSAPKDSPRRLEQEAAVGRKIESVIGEEDGAERSEPGARLAERMSRKGFAGVVFDEEAAAEVRRLLSEHATGWGVKREDDMLVLTWKGHAAVFTGAWTPN

SEQ ID NO: 17778 - protein, 202 aa, Oryza sativa
  Clone ID: TF_OSC422742j.C1.p1.fg
TLGLPFEFCPVADKAGNLDPEKLGVTRREAVAVHWLRHSLYDVTGSDSNTLWLIQRLAPKVVTMVEQDLSHSGSFLARFVEAIHYYSALFDSLDASYSEDSPERHVVEQQLLSREIRNVLAVGGPARTGDVKFGSWREKLAQSGFRVSSLAGSAAAQAALLLGMFPSDGYTLIEENGALKLGWKDLCLLTASAWRPIQASGR

SEQ ID NO: 17779 - protein, 125 aa, Oryza sativa
  Clone ID: TF_OSC401329j.C1.p97.gp
VIEQEADHNKTGFLDRFTEALFYYSAVFDSLDAASASGGAGNAMAEAYLQREICDIVCGEGAARRERHEPLSRWRDRLTRAGLSAVPLGSNALRQARMLVGLFSGEGHSVEEADGCLTLGWHGRP

SEQ ID NO: 17780 - protein, 709 aa, Oryza sativa
  Clone ID: TF_OSC410945j.C1.p6.fg
MRAALFGAERSGVVDHGGGDKEELFWPAGKGGLVVVEPRSVLDCTRSPSPPYSTSTLSSSLGGGSADSTGVAAVSESSTAAAGATKWGAPGEHGGGGKEEWGGGCELPPIPGALDVGLVGGEGWDATATLGNAAGPDQSFLNWIIGAAGDLEQPGPPLPVLQQPLIDNAGFGIPAVDTMGFSLDHPLSGVASDLSSSGAHTATGGGGKASLGFGLFSPEATSLEQPPPSMLFHEGIDTKPPLLGAQPQFLLNHYQPQPPNPAAALFMPLPPFPEHNHQSPHLQPPLKRHHAIPDDLYLARNQQQSSAVAPGLAYSPPLHGPAPFQLHPSPPPIRGAMKSTAAEAAQQQLLDELAAAAKATEAGNSVGAREILARLNQQLPQLGKPFLRSASYLKEALLLALADSHHGSSGVTSPLDVALKLAAYKSFSDLSPVLQFTNFTATQALLDEIGGMATSCIHVIDFDLGVGGQWASFLQELAHRRGAGGMALPLLKLTAFMSTASHHPLELHLTQDNLSQFAAELRIPFEFNAVSLDAFNPAELISSSGDEVVAVSLPVGCSARAPPLPAILRLVKQLCPKVVVAIDHGGDRADLPFSQHFLNCFQSCVFLLDSLDAAGIDADSACKIERFLIQPRVEDAVIGRHKAQKAIAWRSVFAATGFKPVQLSNLAEAQADCLLKRVQVRGFHVEKRGAALTLYWQRGELVSISSWRC

SEQ ID NO: 17781 - protein, 134 aa, Oryza sativa
  unsure (1)..(134): unsure at all Xaa locations
  Clone ID: TF_OSC16404j.C1.p6.gp
VNGTYNAPFFVTRFKEALFYYSSLFDMLETTASRVDENRLLIERDLFGREALNVVACEGTERVERPETYKQWQVRNIRAGFKQLPLNQETVKKARYKVKKSYHRDFLVDEDNKWMLQGWKGRIIFALSAWEPNX

SEQ ID NO: 17782 - protein, 593 aa, Oryza sativa
  Clone ID: TF_OSC416395j.C1.p2.fg
MVRKRPASDMDLPPPRRHVTGDLSDVTAAAAPSSASAQLPALPTQLPAFHHTDMDLAAPAPPPPQQQVAAGEGGPPSTAWVDGIIRDIIASSGAAVSVAQLIHNVREIIRPCNPDLASILELRLRSLLTSDPAPPPPPPPSHPALLPPDATAPPPPPTSVAALPPPPPPQPDKRRREPQCQEQEPNQPQSPKPPTAEETAAAAAAAKERKEEQRRKQRDEEGLHLLTLLLQCAESVNADNLDEAHRALLEIAELATPFGTSTQRVAAYFAEAMSARLVSSCLGLYAPLPNPSPAAARLHGRVAAAFQVFNGISPFVKFSHFTANQAIQEAFEREERVHIIDLDIMQGLQWPGLFHILASRPGGPPRVRLTGLGASMEALEATGKRLSDFADTLGLPFEFCPVADKAGNLDPEKLGVTRREAVAVHWLRHSLYDVTGSDSNTLWLIQRLAPKVVTMVEQDLSHSGSFLARFVEAIHYYSALFDSLDASYSEDSPERHVVEQQLLSREIRNVLAVGGPARTGDVKFGSWREKLAQSGFRVSSLAGSAAAQAVLLLGMFPSDGYTLIEENGALKLGWKDLCLLTASAWRPIQASGR

SEQ ID NO: 17783 - protein, 549 aa, Oryza sativa
  Clone ID: TF_OSC403595j.C1.p11.fg
MAGIAALANCQSDERSSSCGAALLEFMGPAAPPSEAAAAADDVVLPYISRILMEEDIDDDMFFCLYPDHPALLEAQQPFAQILSSSSSIAGEVNSAPMEDSAALMMQGSGNGRGRKGSKHGGDELEAEVGRASKLMATPEEEEDDDDGVGEMLEKMMLNGDEDEAFHGETNAPRVPAEKKCGKAARRRRRQAKGEVVDLRELLMSCAQAVASGNRRSAGELLEQIKRHSSPTGDATERLAHYFADGLEARLAGAASLERRLVASAEERASAMELLEAYQVFMAACCFKWVAFTFANMAILRAAEGRNRLHIVDYGGQYHGLQWPSLLQRLAEREGGPPEFRAVAAARWETVTAEDVVGVDPDDEAAVVVNDVLSLGTLMDESGVFDDPSPRDTVLGSIRDMRPAVFVQAVVNGAHGAPFFPTRFREALFFFSALFDMLGATTPEEGSHLRVVLERDVLRRAAVGVIAGEGAERVERPETYRRWQARNRRAGLRQAAVEGDVVEAVRRRVRRRHHEEFVIEEDAGWLLQGWKGRILYAHSAWVVAEDGAH

SEQ ID NO: 17784 - protein, 138 aa, Oryza sativa
  unsure (1)..(138): unsure at all Xaa locations
  Clone ID: TF_OSC422742j.C1.p1.gp
EQDLSHSGSFLARFVEAIHYYSALFDSLDASYSEDSPERHVVEQQLLSREIRNVLAVGGPARTGDVKFGSWREKLAQSGFRVSSLAGSAAAQAALLLGMFPSDGYTLIEENGALKLGWKDLCLLTASAWRPIQASGRX

SEQ ID NO: 17785 - protein, 1045 aa, Oryza sativa
  unsure (1)..(1045): unsure at all Xaa locations
  Clone ID: TF_OSC20530j.C1.p1.np
HEICMKGVKQLSLKSKSSSSKKARGRRTVIHTEPVDLHNLLLHCAQAVATDDRRSAHELLRQIKQHSSAWGDAGQRLAHCFAQGLEARLAGTGSQVYQSLMSQRTSVVDFLKAYRLYMEACCCKKVAFVFSNKTIYAVAGRRKLHIVDYGLSYGFQWPGLLRELAARRGGPPEVRITGIDLPQPGFRPDQHIEETGRRLSRYADELGVPFKFHGIAATKKESVRREELGEAEEDEVVVVISLCHFRNVMDESLQEDSSRSPRDEVLGNIRRMRPDVFIHGIMNGAYGATYFLTRFREALYYYAAQFDLLDATVGRESHERMLVERDIFGRAALNVIACEGAERVERPEMYKQWQARNQRAGLRQLPLNPQVVRLVLDKVRDKYHKDFVVDEDQRWLLHRWKGRVLYALSTWVAQHXLLGELILKNILSILFSQKYSGYNFFGTNINSXYDEQEQRLPPLNDYQQDFFWEALLKENEAPSPSPVFFDSPQHPSPTVMAVQIPRHCWTTNFSPTSLVCSWDEMGSSAAVTNLQCVNRGSTEEANNMLPGSEVVRAFLKGMEEASKLLPRNNSFRMLETVDQVSSHGHCRGGKKKNHDRDEQQLEEELGRSRLAAMTNAGTEEAGARELLDELMLHSHETCIKDMEKLRIDMDNEADKTIKKKGKKGSSSKVVDLRMLLIQCAQAMATDNQQSAGELLKKIKQHALATGDAMQRVAHYFAKGLEARLAGRGKHLYQNQMRMSLVEYLKVYKLYMAACCFTKVALMFAAMTIMQAVQGKKRLHIVDYGPRCGLHWPDLLRRLGSREDGPPEVRITIVDIPQPAFRPFQRIEEAGHCLSSCANEFRVPFRFQAVVAAKWETVGAEDLHIEPDEVLVVNDLWSFSALMDESIFCDGPNPRDVALRNISKMQPDVFIQGIINGGYGASFLSRFRGALLYYSALFDMLDATTPRESGLRLALEQNVLGPYALNAIACEGADLVERPEKYRQWQARNHRAGMQQLKLRPDIVDTIREEVNKYHHKDFLLGEDGQWLLQGWMGRVLFAHSAWVPQ

SEQ ID NO: 17786 - protein, 944 aa, Oryza sativa
  Clone ID: TF_OSC400622j.C1.p58.fg
MPFGGSAREGHAGTLLQHHLIHGVGLAAAGKLVSSSSAAAAAAGAGGFWEPRSVLDHRHSPSPSPPTSASTLSSPLADVAALAGANAKNVSVSPPPPGWGTGGGGGGGEEVVAAKEEWVHQLTPLDMGLGAGEGWDAAGNVLSDAAAAATSGMAPDNTFLRWIIGGGEDASAAMAGVMDPPVLELDHGGGGGGAAPAAFGPFAPPPAMEDTKPVVPFAAGHPPPNFLLQHHHHHPQPHAAFFGAHHPSFDAAPPPSKRHHPMAAAPAPKLPPFPAGGFVPALKPKAEAANDEAAAAVEQLAEAAKLAEAGDAFGAREILARLNYRLPAAPTAGTPLLRSAFYFKEALRLTLSPTGDAPAPSASTPYDVVVKLGAYKAFSEVSPVLQFAHLTCVQAVLDELGGAGCIHVLDFDIGMGEQWASLMQELAQLRPAAALKVTALVSPASHHPLELQLIHENLSGFAAELGVFFHFTVFNIDTLDPAELLANATAGDAVAVHLPVGPAHAAATPAVLRLVKRLGAKVVVSVDRGCDRSDLPFAAHLFHSFHSAVYLLESIDAVGTDPDTASKIERYLIHPAIEQCVVASHRAASAMDKAPPPPWRAAFAAAGFAPVQATTFAESQAESLLSKLGSASASACADAECHVAMVLYCPLIKERERKRWNVHLVIVLVELNTPQAEKNQREVGGYGGEKNKILSEYNLLPLPVLEMQRKGGNHGVKRPCFTEMAAKHLRVRTGTSRTAAATLDGYTTLTWDSAPEWPWHRMHKPDRLRWAHWRVTGEPQCAAGAVAIGQASGHTGVRDTAGANWQETCIVVTEMDVKLADKFRKKWYHSSKLQKRRCTVGLIKQDLKVQNQGGESEASRHKGLQISFRQVQISLRKPNRKCKHSGQTVKLINENCYYLSTKRNNLKIKEVNYICYIYAEELHPLKVMFRNTQAKICQIDVQKS

SEQ ID NO: 17787 - protein, 544 aa, Oryza sativa
  Clone ID: TF_OSC400135j.C1.p1.fg
MADTPTSRMIHPFSNIPSQNLKQFQYSDNPQHPCHPYRAPSDTHVVPHHYGLKSHSPDAGYESQATPNKYTLDSSEGAGCMRHDSPSSQSFTTRSGSPLSQEDSHSDSTDGSPVGASCVTEDPNDLKQKLKDLEAVMLGPDSEIVNSLENSVANQLSLEPEKWVRMMGIPRGNLKELLIACARAVEEKNSFAIDMMIPELRKIVSVSGEPLERLGAYMVEGLVARLASSGISIYKALKCKEPKSSDLLSYMHFLYEACPYFKFGYMSANGAIAEAVKGEDRIHIIDFHISQGAQWISLLQALAARPGGPPTVRITGIDDSVSAYARGGGLELVGRRLSHIASLCKVPFEFHPLAISGSKVEAAHLGVIPGEALAVNFTLELHHIPDESVSTANHRDRLLRMVKSLSPKVLTLVEMESNTNTAPFPQRFAETLDYYTAIFESIDLTLPRDDRERINMEQHCLAREIVNLIACEGEERAERYEPFGKWKARLTMAGFRPSPLSSLVNATIRTLLQSYSDNYKLAERDGALYLGWKSRPLVVSSAWH

SEQ ID NO: 17788 - protein, 750 aa, Oryza sativa
  Clone ID: TF_OSC401488j.C1.p12.fg
MSASQNLHRLPEFCVIPATACSREPGLPRIVIRSNMGSDDNKRFDDFHVITNGPGSDAYSNEESINLDSYIAPSTSFCSKIYNPQLYVEKGNGTTDWCQTSGGDYPEKSSINSDITLSYIDKILMQEDIDDRGNEDTALQAMEEPFYELLGEKYPAFPQQQPLCVCDHLQNLSANTDKSNGHACNTWSVTRMTNISSSMNSNGNFQGFQFPWSLSSITRETEQFTHHSNRMVVGLKVDGLSISEKPSQDNCSLQIDAHYMRKHPLFEVHDRKSYPCIEDLDLLEGRSNKQYAIYYDEPIRDEMFDNVLLCSDHKPLDEGVSLSRAMTNNSSKSSQIGQGKTSARRKTTGKRIQKRDVVDLRTLLINCAQAVSVSNHSLASDILKIIRHHASPTGDDSQRLALCLAYCLDVRLTGTGSQIYHKFITKRRNVKDILKVHIIDFGICFGFQWPSLFEELAKIEDGPPKLRITGIELPESGFRPYARSNNIGLRLADYAKTFNIPFEYQHISSNKWEALSPEDFNIEKDEVLIVNCIYRIKDLGDETISINSARSRVLNTIRMMKPKVFVQGVLNGSYGVPFFLTRFKEVMYHYNSLFDMLDKNIPRDNETRMIIERDIYQYIMLNVIACEGPERIERPESYKKWKVRNLKAGLVQLPLNPAIVRETQDMSSDKASIRLCLVCYGNIYDSYHVSGDTREVSCDTYQVSDDFYHVSGDTREISCDTYQVLDDFYHVSGDTYEISDDTYRISGDSY

SEQ ID NO: 17789 - protein, 493 aa, Oryza sativa
  Clone ID: TF_OSC410358j.C1.p2.fg
MQDSLGLMQFLDHHQYLYSSSSSNLPLQQPLLSHHHRFLEANEGCAGEDDSPEFVEPPAAAAAAGTFEQRPELGACKEVYSEEGGAAEERTGVAMAGADVEQVAVEDEEEAHGVRMIALLMECAAAMSVGNLAGANGALLELSQMASPYAASCGERLVAYFARAMAARLVGSWVGVVAPMAPPPSCGAINAAFRALYNVAPFARLAYLACNQAILEAFHGKRLVHIVDLDVVPGGALQWLSLLPALAARPGGPPVIRVTGFGMSASVLHDTGNQLAGLARKLCMFFEFYAVAKRPGDADAVADMPGRRPGEAVAVHWLRHAMYDAAGDDGASMRLVRWLEPAAVTLVEQERAHGGGGGHGRFLDRFVSALHHYSAVFDAMGASRPDGEDASRHLAEHGVLGREIANVLAVGGPARSSGREGPGSWREVLARHGFAHAGGGGGGRAQLVAAACPGGLGYTVAGDHDGTVRLGWKGTPLYAVSAWTWCSPPHARA

SEQ ID NO: 17790 - protein, 235 aa, Oryza sativa
  Clone ID: TF_OSC422725j.C1.p1.gp
KERKEEQRRKQRDEEGLHLLTLLLQCAESVNADNLDEAHRALLEIAELATPFGTSTQRVAAYFAEAMSARLVSSCLGLYAPLPSPSPAGARVHGRVAAAFQVFNGISPFVKFSHFTANQAIQEAFEREERVHIIDLDIMQGLQWPGLFHILASRPGGPPRVRLTGLGASMEALEATGKRLSDFADTLGLPFEFCPVADKAGNLDPEKLGVTRREAVAVHWLRHSLYDVTGSDSNT

SEQ ID NO: 17791 - protein, 986 aa, Oryza sativa
  Clone ID: TF_OSC16404j.C1.p7.gm
MESELGALSHVRQAAGAPAEAAASEATTSSPTIGIIHQILNLNRDNHFHPLRTQQENEPITKSAPPAAAHIAVSPMGLPVMEHLGSSSIVRGRGKNKRIWTYFEDEELIKALFEIALDPSWKSEGGFKNGYCQVLENVLAKKLPSSGLTAVPHIESRVRHFRTKFGAIEVMLTKSGFSWDDNRKMIQCEKQQYDDHCRKNNEAKGLYGVAFPHYDTLAAIYGKDIATGEGAEGLGEAVANMEKEIVQDIQDEEDEEDEERVSRETPRRSIDSAAARRSIDSAAARRSIDSATPRRSIDSTASSSKKRKKDSNKLKNTLSSDPFMDVFANVQGDLRDVTKHVGAMVASMQREAEIQEKAMAEEDPLQKIQNEAILECQKIGLTGTEVVNAAAAFVKVPAQMSMLLALPESLRREYVLKILAEDLSESADDAVLAYINQFLLEDEEDESCPGTITSVEDSALLAVEKPFVDILTASQEACQENSWIDSCCDFTGNGGLLDTFTTTHAACQPAPCEFEKEKGECAVHKGRKNPHDDCLLFEEESRRSKQLAVSEEETVREMFDKVLLCNGECELRAPLPAEARNCGVYVKGSGNKRGRKKGKSGASAEDDAVDLTTLLIHCAQAAAIDDHRNSNELLKQIRQRSSAYGDAGQRLAHCFANALEARLAGTGSNIYRSLAAKRTSVYDILNAFKLYVTACPFKKISNFFSIEAILNASKGMTRLHIVDYGIQYGFQWPIFFQRISKRPGGPPSVRITGVDLPQPGFRPAQLIEATGRRLHDYARMFNVPFEYHAIAAKWDTIRVEDLKIDKDKDELLVVNCLFRMRNMMDEMVTDDSPRMQVLKTIRKMNPNLFIHGVVNGTYNAPFFVTRFKEALFYYSSLFDMLETTASRVDENRLLIERDLFGREALNVVACEGTERVERPETYKQWQVRNIRAGFKQLPLNQETVKKARYKVKKSYHRDFLVDEDNKWMLQGWKGRIIFALSAWEPN

SEQ ID NO: 17792 - protein, 1143 aa, Oryza sativa
  Clone ID: TF_OSC400939j.C1.p12.gm
MESELGALSHVRQAAGAPAEAAASEATTSSPTIGIIHQILNLNRDNHFHPLRTQQENEPITKSAPPAAAHIAVSPMGLPDRAPPQLLLHIARVAIAAPSPCARRRRLLLTLCASPAQPPRPARVPAPPHRPACRRRRPLTPRASPTPPSCAPPPPPSSDVDLDRKNSGNKGEAVKQGAGAINHIGLPSLLSSINHLAVMEHLGSSSIVRGRGKNKRIWTYFEDEELIKALFEIALDPSWKSEGGFKNGYCQVLENVLAKKLPSSGLTAVPHIESRKNNEAKGLYGVAFPHYDTLAAIYGKDIATGEGAEGLGEAVANMEKEIVQDIQDEEDEEDEERVSRETPRRSIDSAAARRSIDSAAARRSIDSATPRRSIDSTASSSKKRKKDSNKLKNTLSSDPFMDVFANVQGDLRDVTKHVGAMVASMQREAEIQEKAMAEEDPLQKIQNEAILECQKIGLTGTEVVNAAAAFVKVPAQMSMLLALPESLRREYVLKILAGWILFEDSRVMLDSGSYDDVDYGDLFSIPNPPAPHLLNFPLQFFPSNGFISSADDSHRSPAGMFGSTPSPTSTTTELENSEDLSESADDAVLAYINQFLLEDEEDESCPGTITSVEDSALLAVEKPFVDILTASQEACQENSWIDSCCDFTGNGGLLDTFTTTHAACQPAPCEFEKEKGECAVHKGRKNPHDDCLLFEEESRRSKQLAVSEEETVREMFDKVLLCNGECELRAPLPAEARNCGVYVKGSGNKRGRKKGKSGASAEDDAVDLTTLLIHCAQAAAIDDHRNSNELLKQIRQRSSAYGDAGQRLAHCFANALEARLAGTGSNIYRSLAAKRTSVYDILNAFKLYVTACPFKKISNFFSIEAILNASKGMTRLHIVDYGIQYGFQWPIFFQRISKRPGGPPSVRITGVDLPQPGFRPAQLIEATGRRLHDYARMFNVPFEYHAIAAKWDTIRVEDLKIDKDKDELLVVNCLFRMRNMMDEMVTDDSPRMQVLKTIRKMNPNLFIHGVVNGTYNAPFFVTRFKEALFYYSSLFDMLETTASRVDENRLLIERDLFGREALNVVACEGTERVERPETYKQWQVRNIRAGFKQLPLNQETVKKARYKVKKSYHRDFLVDEDNKWMLQGWKGRIIFALSAWEPN

SEQ ID NO: 17793 - protein, 95 aa, Oryza sativa
  unsure (1)..(95): unsure at all Xaa locations
  Clone ID: TF_OSC101577j.C1.p27.gp
IERDLFGREALNVIACEGSDRVERPETYKQWQVRNLRAGFVQSPLNQDIVLKAKDKVKDIYHKDFVIDEDSEWLLQGWKGRIIYAISTWKPNNNX

SEQ ID NO: 17794 - protein, 715 aa, Oryza sativa
  Clone ID: TF_OSC410945j.C1.p7.fg
MRAALFGAERSGVVDLGGIGGGNRGLFWPAGKGGLVVVEPRSVLDCTRSPSPRNSTSTLSSSQGGGGADSTGVAAVSESSAAAAEATKWGAPGEHGGGGGGGGGGGKEDWSSGCELPPIPGTLDVGLVGGEGWDTMLGNAAAAAAGQDQSFLNWIIGAAGDLEQPGPPLLDNAGFGIPAVDPLGFSLDHSLSGVASDLSSSGAHTATGGAGGGKASLGFGLFSPEATSLEQPPPPMLFHEGIDTKPPLLGAQPPGLLNHYHHQPPNPAATLFMPHPSFPEHNHQSPLLQPPPKRHHSMPDDIYLARNQLPPAAAAAQGLPFSPLHASVPFQLQPSPPPIRGAMKTTAAEAAQQQLLDELAAAAKATEAGNSVGAREILARLNQQLPPLGKPFLRSASYLREALLLALADSHHGVSSVTTPLDVALKLAAYKSFSDLSPVLQFANFTATQALLDEIGGTATSCIHVIDFDLGVGGQWASFLQELAHRRAAGGVTLPLLKLTAFVSTASHHPLELHLTQDNLSQFAADLGIPFEFNAVSLDAFNPGELISSTGDEVVAVSLPVGCSARAPPLPAILRLVKQLSPKIVVAIDHGADRADLSFSQHFLNCFQSCVFLLDSLDAAGIDADSACKIERFLIQPRVHDMVLGRHKVHKAIAWRSVFAAAGFKPVPPSNLAEAQADCLLKRVQVRGFHVEKCGAALTLYWQRGELVSISSWRC

SEQ ID NO: 17795 - protein, 560 aa, Oryza sativa
  Clone ID: TF_OSC17536j.C1.p2.fg
MVAQAATAAATTTAAATTAAVPMTNFQLFGSMVPVPVASMATATAPAAVAAADNGGHGSSSASQNASGSGEGQGGSMSLSLQLRPLGSTPTAAVAVSVPPMAAAPMMAGPAAAAPAPAPPLATMAVAQNASLAAVASALAAHRRNQATHRSAALHGHLRRCAEALAASRPADADAELASIARMASSDGDAVQRVAAAFAEAMARVVIRPWRGVSAALFPSDAGAAGDALTAWEAEFARQSFLNLCPLLHLAAVAVNEIILETTRNDKFIHIVDLGGIHHAHWVELLQGLATRRAAVRPCLRLTIVHEHKHFLGQAAQVLAAESDRHGVPLDLHIVESSVEALKLDALGVRSDHAVVIVSTLQLHRLVGAGILSTTAPPSPAAAAAASMITSPLPPANMSSKVDRLLRGFHLLSPRAIILTENEANHFVPSFTDRFASALPYYEQLFAAMEEAGAATVERKAAERYLLREEIKDVIACDHDGPRWARHETLGRWVVRMGAAGFALAPAITVVTAAGRVRAVAARLPGGGDERRYGVTEGGGWLILNREEKPMFCVSAWRRQ

SEQ ID NO: 17796 - protein, 617 aa, Oryza sativa
  Clone ID: TF_OSC34032j.C1.p48.np
MLAGCSFSSSRHQMSTAQRFDILPCGFSKRGSRGDGAAPRVAGDARSGATTCSFRTHPAPPVTQSVSWGAKPEPGGNGNGAHRAVKRAHDEDAVEEYGPIVRAKRTRMGGDGDEVWFHQSIAGTMQATAAGEGEEAEEEKVFLVPSAAAFPHGMAAAGPSLAAAKKEEYSKSPSDSSSSSGTDGGSSAMMPPPQPPEFDARNGVPAPGQAEREALELVRALTACADSLSAGNHEAANYYLARLGEMASPAGPTPMHRVAAYFTEALALRVVRMWPHMFDIGPPRELTDDAFGGGDDDAMALRILNAITPIPRFLHFTLNERLLREFEGHERVHVIDFDIKQGLQWPGLLQSLAARAVPPAHVRITGVGESRQELQETGARLARVAAALGLAFEFHAVVDRLEDVRLWMLHVKRGECVAVNCVLAMHRLLRDDAALTDFLGLARSTGATILLLGEHEGGGLNSGRWEARFARALRYYAAAFDAVDAAGLPEASPARAKAEEMFAREIRNAVAFEGPERFERHESFAGWRRRMEDGGGFKNAGIGEREAMQGRMIARMFGPDKYTVQAHGGGGSGGGEALTLRWLDQPLYTVTAWTPAGDGAGGSTVSASTTASHSQQS

SEQ ID NO: 17797 - protein, 275 aa, Oryza sativa
  Clone ID: TF_OSC400032j.C1.p8.fg
MEMDKFSSSYQPSWPPAQATVDVVGSVETPARRAFQRVASFFVQELLDRRASAGAGPCEHGVLHPAVVVREAYAEGLGMYLEFRGINRGLESLHIDDLGVDADEAVAINSVLELHSVVKESRGALNSVLQTIRKLSPRAFVLVEQDAGHNAPFFLGRFMEALHYYAALFDALDAALPRYDARRARVEQFHFGAEIRNVVGCEGAARVERHERADQWRRRMSRAGFQSVPIKMAAKAREWLDENAGGDGYTVADEKVCLVLGWKGKPVIAASCWKC

SEQ ID NO: 17798 - protein, 333 aa, Oryza sativa
  unsure (1)..(333): unsure at all Xaa locations
  Clone ID: TF_OSC272j.C1.p1.gp
QQLPPIGKPFLRSASYLKDALLLALADGHHAATRLTSPLDVALKLTAYKSFSDLSPVLQFANFTVTQALLDEIASTTASCIRVIDFDLGVGGQWASFLQELAHRCGSGGVSLPMLKLTAFVSAASHHPLELHLTQDNLSQFAADLGIPFEFNAINLDAFDPMELIAPTADEVVAVSLPVGCSARTPLPAMLQLVKQLAPKIVVAIDYGSDRSDLPFSQHFLNCLQSCLCLLESLDAAGTDADAVSKIERFLIQPRVEDAVLGRRRADKAIAWRTVLTSAGFAPQPLSNLAEAQADCLLKRVQVRGFHVEKRGAGLALYWQRGELVSVSAWRCX

SEQ ID NO: 17799 - protein, 163 aa, Oryza sativa
  unsure (1)..(163): unsure at all Xaa locations
  Clone ID: TF_OSC401887j.C1.p14.gp
SPESGLSPSTSRADAFLGALWGLSPKVMVVAEQEASHNAAGLTERFVEALNYYAALFDCLEVGAARGSVERARVERWLLGEEIKNIVACDGGERRERHERLEXRWARRLEGAGFGRVPLSYYALLQARRVAQGLGCDGFKVREEKGNFFLCWQDRALFSVSAW

SEQ ID NO: 17800 - protein, 423 aa, Oryza sativa
  Clone ID: TF_OSC400659j.C1.p9.fg
MLGSSPARDRGGGDDAEASEQPQPQPQPPLSPRAGGGEARGLVLACADLVHRGDLDGARRVAEAVLAAADPRGEAGDRLAHHFARALLALRGGGKGGHGGGGGGVVPSSAAYLAYIKIAPFLRFAHLTANQAILEAAAADAGGAHRRVLHIVDLDAAHGVQWPPLLQAIADRADPAVGPPPEVRLTGAGTDRDVLLRTGDRLRAFSSSLNLPFRFHPLILPCTAELAADPTAALELHPDETLAVNCVLFLHKLGGDGELAAFLRWVKSMNPAVVTIAEREGVLGGDVDDDNVPDELPRRVAAAMDYYSSVFDALEATVPPASADRLAVEQEILSREIDAAVAAPGAGGGGRARDFDAWASAARAAGLAPRPLSAFAASQARLLLRLHYPSEGYKADDDGGRGACFLRWQQRPLMSVSSWQPQP

SEQ ID NO: 17801 - protein, 603 aa, Oryza sativa
  Clone ID: TF_OSC900388j.C1.p10.fg
MDTLFRLVSLHHHHHHQHAASPSPPDQPHKSYPSSRGSTSSPSSHHTHNHTYYHHSHSHYNNNSNTNYYYQGGGGGGGGYYYAEEQQPAAYLEECGNGHQFYMDEDFSSSSSSRQFHSGTGAPSSAPVPPPPSATTSSAGGHGLFEAADFSFPQVDISLDFGGSPAVPSSSGAGAGAGAAPSSSGRWAAQLLMECARAVAGRDSQRVQQLMWMLNELASPYGDVDQKLASYFLQGLFARLTTSGPRTLRTLATASDRNASFDSTRRTALKFQELSPWTPFGHVAANGAILESFLEAAAAGAAASSSSSSSSSTPPTRLHILDLSNTFCTQWPTLLEALATRSSDDTPHLSITTVVPTAAPSAAAQRVMREIGQRLEKFARLMGVPFSFRAVHHSGDLADLDLAALDLREGGATAALAVNCVNALRGVARGRDAFVASLRRLEPRVVTVVEEEADLAAPEADASSEADTDAAFVKVFGEGLRFFSAYMDSLEESFPKTSNERLSLERAVGRAIVDLVSCPASQSAERRETAASWARRMRSAGFSPAAFSEDVADDVRSLLRRYKEGWSMRDAGGATDDAAGAAAAGAFLAWKEQPVVWASAWKP

SEQ ID NO: 17802 - protein, 100 aa, Oryza sativa
  Clone ID: TF_OSC401583j.C1.p68.gp
DINKCCFAQFPDYQLPLFLQKRAGSDMHLPSLHAENDSDPPAPEYCIDAGSIGNFARFINHSCEPNLFVQCVLSSHNDVKLAKVTLFAADTILPLQVSLF

SEQ ID NO: 17803 - protein, 400 aa, Oryza sativa
  Clone ID: TF_OSC21512j.C1.p1.fg
MTFEALRRRHLQLDEIQETSKRADLKAGAIMMASNIRANVGKRVGLVPGVEIGDIFYFRMELCIIGLHAPSMGGIDYMSAKFGSDEDSVAICIVAAGGYENVDDDTDTLVYSGSGGNSRNSEERHDQKLERGNLALERSLHRKNEIRVVRGFRDPFCLTGKIYIYDGLYKIQESWKERTKSGINCFKYKLLREPGQPDGAALWKMTQGWIDNPASRGRVILPDLSSAAEALPVCLVNEVDHEKGPGHFTYASQVKYLRPLSSMKPLQGCGCQSVCLPGDPNCACGQHNGGDLPYSSSGLLACRKPIIYECGDACHCTTNCRNRVTQKGVRFHFEVFRTANRGWGLRCWDPIRAGAFICEYTGEVIDELKVNLDDSEDDYIFQTVCPGEKTLKFNFGPELI

SEQ ID NO: 17804 - protein, 381 aa, Oryza sativa
  Clone ID: TF_OSC401607j.C1.p14.fg
MESNQHKASDPQDSMVHLDLDEDKIMVTSALPCPSMSVGKSVMRKRGRPSRHARGTSLSSVTPEDNPREAVDDILMTFGGLHRRIMQLIDVKMASKQLVFQALNLMRKVGYHVNKDKRVGEVPGVKIGDIFYSRIEMLLVGLHSNINRGIEFMSGAFINKEDKIATCIVSSGMYENGDDDPYTLVYNGQGKVHHKLEREIARVCVVNNIDSEDAPNNFTYSTKLDNGNHMVSANKMCVCKCTSSCLGEDNCSCLKTNGSYLPYNSSGILVCRKTMIYECNDSCACTINCSNRVVQRGSYLHFEVFKTMDRGWGLRSWDPIPAGAFVCEYVGVVIDKDSLVEEDEYIFEVTRPEHNLKWNYLPELIGEPSFYDMNDTFKKLC

SEQ ID NO: 17805 - protein, 536 aa, Oryza sativa
  Clone ID: TF_OSC401896j.C1.p25.fg
MATPGLDDDSLQQLRSRATQLLLKENWTEYIAVCSLIIEAFDAAAACKDRRVLCSTLAHRADARARLGDAPGALADCDAALAADPAHPGALLSKGAVLRGLGRYSRAAECFRAALAVSGTDEVREMVEQCKRLDAQARSGAVDLSEWVLAGFSGKCPDLAEHVGAVEVRRSAHGGRGVFAVKNIEAGANLVISKAVAIGRGVIPDAADSGEKMVVWKDLVDKVLDAAEKCPRTASLIYTLSTGEEPEDELPIPDMAHFKQETEELDDGTAMAPKASLDVDKILKVLDVNCLTEDAAPSANLLGSNGVVNCGVGLWILPAFINHSCHPNARRTHVGDHAIVHASRDIKAGEEITFAYFDVLTPASKRREAARAWGLECQCDRCRFEASDAIVGQELTKLENELVNGRGGDMGALVVRLEERMRKSMVKERRKAFLRASFWSAYSALFDSDKLVRKWGRRVPGEAAVAESVAGAIGGNESVLRAMLRGADNGNGCGNRLEVEDKVVRIGRATYGRVVKRQAMRALFRLTLDADSNKSL

SEQ ID NO: 17806 - protein, 409 aa, Oryza sativa
  Clone ID: TF_OSC9931j.C1.p1.fg
MAGPPGPAPGTSSSSSSLPSRRRRRPPPRLGRRRGGDDQQPPHPPKASSEALPCAASPPARCRGGDHQPPHPPEAALEALRGAASPPARRRGGDLHPSHPPEAASEALRGAASPPERRRGGDRQPSHPTEAASEAPSGSASPPARRRGGDQQPPPAVAVAVTSEGGVGPRRSFRISLRHRVRVVPWVKPPVARKPKDPAKPPRPSIEALAAEWAKEKAASGAPEEECVLPFLQKDAPKKLDIVKVLGLDGFGYMDTVILSLKSYRKNIPITVGNFVIVMQSCIRLVLKKVMDAVLDMMQVQQMEAFRRLPLPHTFQEFNIDPIKKEELDNGTEPPPYKIKIIPTGLYWLAALGLVTAQMSALTNHFADRKRLRSLSGILLQTQYCGWGSRALEAIEKDDFVIEFVGEEQ

SEQ ID NO: 17807 - protein, 393 aa, Oryza sativa
  Clone ID: TF_OSC8416j.C1.p1.fg
PKKRAIQPCSKVNTGEGSSVIDVASSTMGEVKMSLKCSVDPKFRMPSLEAVFKMVEDKYLHSYKILPPEFSIGSLMNEICQCVVQLGSDHIAEHNTESDVAGNGRCSQNEPMTGSIPFVKPIACEDGGNRKCKSAGESFIVEDSENSSVAKQQTHLALANLKPIHDVTDISKGEERVRISVANEFASEKCPPSFYYIRGNLVFQNAYVNISVARIGDEDCCADCFGNCLSAPIPCACTRETGGEYVYTPEGLVRTPFLDECVSMNRFPEKCHKFFCKSSCPLERSRNEASPEPCRGHLARKFIKECWSKCGCNMQCGNRVVQRGITCNLQVFFTGEGKGWGLRTLDELPKGAFVCEYVGEVLTSTELHERTLQNMNNGRHTYPVLLDADWGSE

SEQ ID NO: 17808 - protein, 375 aa, Oryza sativa
  Clone ID: TF_OSC900167j.C1.p2.fg
MASWEEQLRDELAARDLAVASVPGKGRGLFAARSFFPGEVVISQEPYASTPNKISVGSNCDNCFASRNLRKCSVCRVAWYCGSACQREEWKLHQLECRAIAALTEDRKKMLTPTIRLMVRLVLRRKLQDDKMANLVQLILPSFELDLKEITHTFSKFACNAHTICDPELRPLGTGLYPVLSIINHSCVPNAVLIFEGRTAYVRALQPISKNEEDSEEDALLEGYRCNDQKCDGFLLPNAVDNSEVGSMYKTIEELERKLYHPLSITLLHTRETLLKIYMELQDWQTALMYCRLTIPVYERIYPPFHPMIGLQFYTCGKLEWLLEYTEDALMSLTRAADILRITHGTKSEFMKELLGKLEEVRAEASFRLSAGDEQ

SEQ ID NO: 17809 - protein, 562 aa, Oryza sativa
  Clone ID: TF_OSC400525j.C1.p32.gm
MAEEAKNLETARADRSVWLMKCPTVVSRAWQEAATAAASSSSSSDAAAGANSNSNANPNPVVAKFKMEMAQTGNGNTPKSYSLNMFKDFVPMCVFSESNQATPGAVGELAELVLPWLPPQDLAAAASASRALRAAASSVSAGRAADAAHGLEPHPIPFDNLVDGKPYAYFLYTPFSLTPSSASASPRRAQPWGRTWARPPGPTWPRSDLGGFPSSGCACAQGACGGARGCPCADPEAEAVGLGSEAGMGSLRECGDGCACGPSCGNRRTQLGVTVRLRVVRHREKGWGLHAAEVLRRGQFVCEYAGELLTTEEARRRQGLYDELASVAQPPGSSKRRGAVERPASGAGLQAEEASSAGPGAPCGACKFLRRRCVPGCVFAPHFSGCGGSGVGAGVGGRGRERGAAEFAAVHRVFGASNVAKLLSRVPAALRREAARTVCYEAQARIADPVYGSVGTILALQHQLSVLESQLFNLRVALASAHPDTPPQHFVVLQPAHSAASTLNQVVVNYDDLPHAVDFMDAEPAALRGLESLQLSQPLQREEDEGHRDMNLFSDSVGQRQL

SEQ ID NO: 17810 - protein, 103 aa, Oryza sativa
  unsure (1)..(103): unsure at all Xaa locations
  Clone ID: TF_OSC400536j.C1.p9.gp
MEDGSSIIDPTKFPERWREWGDASVVYPDRVPHFPLFAGARYRLDVSQRRNVACYISHSCSPNVFLQYVIRGNEDESYPHMMVFAMETIPPMRDLSIDYGLDX

SEQ ID NO: 17811 - protein, 531 aa, Oryza sativa
  Clone ID: TF_OSC900282j.C1.p4.fg
MAVSVFNTRRRTSLVSAFIDRTRMFISTPLPQVRDKVSRTKPPKPHGGGGERRRKKQPQEAAARAGGGMGGSSASPCDLDRDFAPQIAQLLATPPLQPAQEYYNGLIQSRKHDGIRVNFSSKHGKGVCANKEFAEGDLILKDQILVGAQHSLNKIDCAVCSYCFRFIGSIEFQIGRRLYWQSVGSSSDCTNRRHCHESDVGSSASSSGATKENSSTLPEEVLGSLITGDMSLPFTDHFSLPQVVPCRGCEEERYCSQSCADSDWETYHSLLCTGSKTEPSQRSALQKFIEHANGSNDIFLVAAKAITFTLLRYKKLKTQPEFQNNTDESNFSLLMEAWKPLSMGYKKRWWDSVALPEDVDSCDEDTFRQQIRDLALTIIIFCVSQSLQLLKDAIFDSDGLVVASPVEDYFIHIDDLPDDEKCNISQEEAEKVTRPFLDALGEDYAAPCEGTAFFPLQSCMNHSCCPNAKAYKRDEDTDGNAVIIALEPIKKDDEITISYIDEDVSYEERQAELADYGFICTCPRCQEEKPN

SEQ ID NO: 17812 - protein, 463 aa, Oryza sativa
  Clone ID: TF_OSC406486j.C1.p10.fg
MGGSSASPCDLDREFAPQIAQLLATPPLQPAQEYYNGLIQSRKHDGIRVNFSSKHGKGVCANKEFAEGDLILKDQILVGAQHSLNKIDCAVCSYCFRFIGSIEFQIGRRLYWQSVGSSSDCTNRRHCHESDLGSSASSSGATKENSSTLPEEVLGSLITGDMSLPFTDHFSLPQVVPCRGCEEERYCSQSCADSDWETYHSLLCTGSKTEPSQRSALQKFIEHANGSNDIFLVAAKAITFTLLRYKKLKTQPEFQNNTDESNFSLLMEAWKPLSMGYKKRWWDSVALPEDVDSCDEDTFRQQIRDLALTIIIFCVSQSLQLLKDAIFDSDGLVVPSPVEDYFIHIDDLPDDEKCNISQEEAEKVTRPFLDALGEDYAAPCEGTAFFPLQSCMNHSCCPNAKAYKRDEDTDGNAVIIALEPIKKDDEITISYIDEDVSYEERQAELADYGFICTCPRCQEEKPN

SEQ ID NO: 17813 - protein, 768 aa, Oryza sativa
  Clone ID: TF_OSC401001j.C1.p46.fg
MALQLMMDNYLLCSAMKGRLSVYSDSQLILVKMNRESNFMPTPDQDVLEVKPLRTLAPMFPAPLGIDVLNRLTAPPLVFVAPAGQFPGGFGSLNIPAVRSFAAFGGQDASGGKTAGGGDQDASGGKTAAGGDQDAGRGETAAFGGQETVRGEFVANGTPNVGASATGPIDATPISACKSTQPSVISLDDDDNDDDEPYGGNQTSASGRKIKRPSHLKGYNVSDGLGTDSSNGTKKRPKTSNRKAATDNEISLMPPSSDPREVVEVLLMTFEALRRRHLQLDETQETSKRADLKAGAIMLASNLRANIGKRIGAVPGVEVGDIFYFRMELCIIGLHAPSMGGIDYMNKFGDEDDSVAICIVAAGVYENDDDDTDTLVYSGSGGISRNSEEKQDQKLERGNLALERSLSRKNVIRVVRGYKDPACLTGKVYIYDGLYKIHESWKERTKTGINCFKYKLQREPGQPDAVAIWKMCQRWVENPAARGKVLHPDLSSGAENLPVCLINDVNSEKGPGHFNYITQVKYLKPLRSMKPFQGCRCTSVCLPGDTSCDCAQHNGGDLPYSSSGLLVCRKLMVYECGESCRCSINCRNRVAQKGVRIHLEVFRTTNRGWGLRSWDPIRAGSFICEYVGEVVDDTKVNLDGEDDYLFRTVCPGEKTLKWNYGPELIGEHSINISADTFEPLPIKISAMKMGNVARFMNHSCNPNTFWQPVQFDHGEDGYPHIMFFALKHIPPMTELTYDYGDIGCESRGVGSRAKNCLCGSSNCRGFFS

SEQ ID NO: 17814 - protein, 506 aa, Oryza sativa
  unsure (1)..(506): unsure at all Xaa locations
  Clone ID: TF_OSC401179j.C1.p22.np
SPFLGSTAISFSSAFFAFPSIGLASCGTKCASASAARSTTSPHVGSDKSNPCILNLIPPSSAARLRAWAAGARQGXRPPRPGRACRRGPAFEEYVKEWKAKKAALGVPAGRCELPFLTGTPKAVECRLCSKIIHPGEEIKCSVSRCGELFHLTCAAEDTTNFIAESFKCPQHGCMVCKQKMFFWRCGRCTVAAHTKCAPWPVIHLKDDQGSAICWRHPSDWLLQNEVYPFTLKIDEVFCRLPVPYVNEDFKIDSTIRDSAAVCKPPHFTFIRRNVYLIKKKRPDSRAEAGCTNCSADSTCKDDCECRGLYMSCSKNCHCSDMCTNKPFRKDKKIKAVKTKRCGWGAISLEPLEKGDFIIEYVGEVINDATCEQRLWDMKRRGDKNFYMCEISKDFTIDATFKGNTSRFLNHSCDPNCKLEKWQVDGETQVDGETRVGVFASRSIQVGEHLTYDYRFVHFGEKVKCYCGAQNCQGYLGNQIKNPTQRALAIAALENEWLESLKIQQD

SEQ ID NO: 17815 - protein, 421 aa, Oryza sativa
  Clone ID: TF_OSC22139j.C1.p1.fg
MLRSHSKARALPLDGTVEHLGCGQGVVIGAARQGEDQVGFLQELRSMPTTESMTVRTVRRKLRSAMAWGISEKASGLRSLSWTGWLRSPTTASSSACRPRREDVLVHEIAGELRRLGDHAPHLLHVVVVAGPPPAHHHARDDVAGDTHQRGVDVDVLGVGGTPAERADEARHLLAADMAEPEEERMEPPPPPPYIHIETNDFLHRRHKRQKEEDIAVCECQYNLLDPDSACGDRCLNVLTSTECTPGYCLCGVYCKNQRFQKSQYAATRLVKTEGRGWGLLADENIMVTEFTLILWSANVVKYIQAGQFVMEYCGEVISWKEAKRRSQAYENQGLTDAYIIYLNADESIDATKKGSLARFINHSCQPNCETRKWNVLGEVRVGIFAKQDIPIGTELSYDYNFEWFGGAMEATYLWEDDDDR

SEQ ID NO: 17816 - protein, 1153 aa, Oryza sativa
  Clone ID: TF_OSC401762j.C1.p10.fg
MLRSHSKARALPLDGTVEHLGCGQGVVIGAARQGEDQVGFLQELRSMPTTESMTVRTVRRKLRSAMAWGISEKASGLRSLSWTGWLRSPTTASSSACRPRREDVLVHEIAGELRRLGDHAPHLLHVVVVAGPPPAHHHARDDVAGDTHQRGVDVDVLGVGGTPAERADEARHLLAADMAEPEEERMEPPPPPPYIHIETNDFLHRRHKRQKEEDIAVCECQYNLLDPDSACGDRCLNVLTSTECTPGYCLCGVYCKNQRFQKSQYAATRLVKTEGRGWGLLADENIMVTEFTLILWSANVVKYIQAGQFVMEYCGEVISWKEAKRRSQAYENQGLTDAYIIYLNADESIDATKKGSLARFINHSCQPNCETRKWNVLGEVRVGIFAKQDIPIGTELSYDYNFEWFGGAMVRCLCGAGSCSGFLGAKSRGFQEATYLWEDDDDRFSVENVPLYDSADDEPTSIPKDILIKDEPNTQDGNNNTIQNTGIPIIASSSEFTPMNVEPSIASSNEFTPMNVEPLNVSSNELTPMTIEPLNAIPMGVDFTQNGSIEYGAQCAEDALQNSTRGVANLQNQSAPRDNNHTELVAVKRRPTLRGGKAKRGMRKQLNVVGICDRLASEVAREEILYCEEMKNEAAAEIDSLYDEIRPAIEEHERDSQDSVATSLAEKWIEASCCKYKADFDLFPLFRISRVMGKSEHGNLLVSLSDGLPHYSLAAAVGLAIGVAGLCKALHSSLVIPPVSQKKLLSNSDRLYYTGGLKNLGNNCFLNVILQALASCDGFVSSLDNLLGSEDVLPEEKSEKMPLIFALSSLIKVENKVLVPVTLVVSGITEQWWSGGIVTYCNTVNTLSLDFENFYCLPLSPVATINGDIINGCSLVDCLEHFTALEHLDNYRCDHCWHNVAAKYLSLKSEVDEEKINKLHTCVDYGTCSCRHIFTPEEMTCSISSQATKQLAITHFPKILCIHLLRASVGLDGEFVKRGGHISFPLLLDLSPFAGGALIPGQGPKPSAMNKQRHGQQTLHLWRQLNAEMPVNMFPAATDGDSSSHHCGDESINTLGRSFYVGNRDADSRFLSSSSLTDKLYGLSSVVEHYGVCGGGHYAAYRRVTPNSDSNEPVQSLASFRKEWLYVSDDHVSHVSECEVLAAEATLLFYERL

SEQ ID NO: 17817 - protein, 699 aa, Oryza sativa
  Clone ID: TF_OSC900423j.C1.p11.fg
MADDQSVGRRRIYYDPIVNEALICSESDDDVPEPEEEKHVFTEGEDQLIWWKERSEVLFEKYEKQSQSSYKTDLQLFLDKTMDVALDSFDNLFCRRCLVFDCRLHGCSQNLVFPSEKQPYGHELDENKRPCGDQCYLRRREVYQDTCNDDRNACTTYNMDSRSSSLKVSATILSESEDSNRDEDNIKSTSIVETSRSKITNSEYADKSVTPPPGDASETENVSPDMPLRTLGRRKISKHASKSNDHSPDKRQKIYSSPFPFAMSVLNKQSVPEIGETCPDSIESAVDQLPSLDDPNKKISTKDMCAGSTTNTTENTLRDNNNNLFISNKEHSISHWSALERDLYLKGIEIFGKNSCLIARNLLSGLKTCMEVASYMYNNGAAMAKRPLSGKSILGDFAEAEQGYMEQDLVARTRICRRKGRARKLKYTWKSAGHPTVRKRIGDGKQWYTQYNPCGCQQMCGKDCACVENGTCCEKYCGCSKSCKNRFRGCHCAKSQCRSRQCPCFAASRECDPDVCRNCWVSCGDGSLGEPLARGDGYQCGNMKLLLKQQQRILLGKSDVAGWGAFIKNPVNRNDYLGEYTGELISHREADKRGKIYDRANSSFLFDLNEQYVLDAYRKGDKLKFANHSSNPNCYAKVMLVAGDHRVGIYAKDRIEASEELFYDYRYGPDQAPAWARRPEGSKKDEASVSHHRAHKVAR

SEQ ID NO: 17818 - protein, 2139 aa, Oryza sativa
  Clone ID: TF_OSC403850j.C1.p3.fg
MEEPDGEARGREDHAAVGRLGGEEGAVGGGGLALLAVPEIGGELGDGGKVCGGQERRLPTEEDGVRDNGGGSAAELVESAVNVSTPFEGRGQIGGEKESSMQEGSMNMAGEKHGSYHVESAEPSNLQTCHAPNGGVSNKTLFAPFSEVFSSDNSHMRYLLDKATEGSICEHGDLADSKDDLGGATDVKTNTEDLQMVCTKPHCDSEGLSDLHNDSERWPQVVDGVGFTIKGNNELKQVDLIPKIEAEVSRSVEDDSIPSFSGGIDDSLRKAGCACETLNDMGMSHMANGDLWCNVLYAPLSEGCQSKDARHIAVMGNKVTQGSQCGQGDLACDGIVLRGGVDVEKSLDDLQMCSKEPQCDNKGFPYLTEFGVQQPSYGMNVICSKTDPNHQLEKDELLTNTRGEFSSSIHEDSVPSISVSSVDFTFDGNAGQIGKTSEHRAIMEKVSHGSQRGGVLSCESRSLKESHADENQSSTLEVKTCEEGLQTGQVEPCHSIVALSDSGKYGTDILPRGGDGLRSMTGANHELVKDDFHPKSDVVVSCPVDEASIPSNYNSPIDVLLYKEDGLVGEISENRIGVEKLAHDLLGEVMLSFDSRPQTEASGDENQHFWMDVPKGSTASVCEVENTGTRRSCDPCAEIEFPLQQSREKHVISESPPERDLTSSSHNLPCENEPCYSGRETPAFCLGHQDSAGLGLESSDCLVQELNTCTSTDDKACSVDFVENGNGSHNQKEVPVIFFRRRNPVRAASSRNSNFEKCDQINKSGNSTRKSKKVDSVSSLLKSTMIKFPNKTTKGRSGINRPLNSSAWGSLQKLMDGFNQNCGPSTSRSHQTCLGKEISNRGSSEKKQLSIRKIRTSRCSKYKNTSLSDIGYLAGELNGQPTCSVRIDTNVSSDALFNSPNGAHKAAQCVEGNHTLKLTSSLTDTQQFGLENVTQETCPGYIHGECGTSTSERSLNNIVGFSPDSVLDIASVTCESNTSATLDVIVHENPSCPGGLIGGGLRASALSTSHCENHHASSLMDLEQQVKTVRENDMGEEDVIPSHAMMYNDIGEGKQTLAKSNTMRKGRNVGKQECRKKDGKKGKNINKNRSSTKISSSEASKLVSFSNDSPSLDPSELLLHTRPPKFGSCSKVVTSAIHDVGMHGYDNMRPFGIDNDDEGSAFDNVKSLRRKKKDSHGGKKGKVRDPHGKGRSKKKNIADNTYGDLIPAAELVFKNSSAVSVELPAVVACKTDGASVPPAPAWVCCDDCEKWRCIPTELADKISKENLRWTCKENEDKTFANCSIPQEKTDDEINAELGLSDASADEANGDGSNSKASGEPNFALLRSNLFLHRNRRTQSIDEFQRRTYAKLGKFHTGKKGYGLQLKEDVSEGRFLIEYVGEGNMLCLNVDYVGFTFVVLDITAYESRQRYYASKGQKHFYFMALNGGEVIDACTKGNLGRFINHSCSPNCRTEKLYSYFESIKLLFPCEQWMVNGEVCIGIFAMRNIKKGEELTFDYNYVRVSGAAPQKCFCGTAKCRGYIGGDISGADMITQDDAEAGTFEPMAVQEDAEEVLGANGLSSHGTHLDIVDHEASTKTEDSNDCPSVNPPELESEQQTSGTLFDTSEPENSLEALSPQDDEDVVRTPVHVSRTVESTSRQFPEYGTRSSEILQRAPCTLDGPKVPSTTNGIPPSSDLGSHWVPGFHANKKTNVKHHLILNPSSAPIDSEHILGGLHMTVNDRYLTCTVEGRLNSLLDVNGGISKRKDATNGYLKLLLVTAAEGDNAGGTSKSVRDLSLILDALLKTRSNSVLLDIINKNGLQMLHNILKQNKSDFHRIPIIRKLVKVLEFLASKGILTSEHINGGPRCAGTESFRESMLGLLRHNDMQVQQIARNFRDRWIQWAPRNISRNEPTEYSRASISAHDIHVISTAGGSFPTSANTMDWKSIRRKRKSRWDYQPDDHYKMGGLKIQKVCPVQSEFRTGSVGNKLHGNWGTNSSHNDVPVVGSSADGADDEAPPGFESQQESRPGQACLESGVSPGLYLESILEPQKLKEGHVAKTGKSHLVCLSSPFHHCRPIQEGVLVLPLRCLSMNTTVWDIVAGLQIETGEYIGIGEMGREQNFHTIIKDGDFLTIIKDFESCLLPPTSQEQGDPGPRGRE

SEQ ID NO: 17819 - protein, 826 aa, Oryza sativa
  Clone ID: TF_OSC401237j.C1.p16.fg
MKRKSVNERPRNYHVNEKGIYIFFEEILSSTNQIYMFLNLFVHCEQGSAVSTSQLRTGMAKPNGKEKTGDTGLSMAPPKISKDRFDAAIRAMADIGILKETAAPVLNNLLNLFDYNWVHIEADNYLALADAIFCDSDPKEGQKRQANETNLDADQSNKKLKTKKRSQNPTSKMHGNDNREFVEAPPQQGRGTLSARTVNGKKVTRAHLELPSSQLLIKEPHTCPSIAKNTTIVENNSAVLCHGQDLQTFEVPVATTCPQVVAPSTRKDARRTSGARHDQKHEGVSGAHERNRAVACSNQEIVSSKDSPSNIEVVLSNYGAGKLSFTYNSSLANRSDFHLPDIKLICKKMEARCLRKYKSLEPNFSFKNLIKDTCQCIVESSGPRHEGIIQTVPALDILSKPSVPQILQSNQANSAFMPPNNVMSLGGTSSSCTVAGVSQNSSNMPVVPHQLHIGANRPPHDVNDITKGEERLRIPIINEYGNGILPPPFHYIPHNITLQEAYVNISLARIGDDNCCSDCFRDCLAQSLPCACAAETGGEFAYTTDGLLKGAFLDSCISMIREPLKHPHFYCKICPNERMKIEVNSDSSNTEMNPGPCKGHLTRKFIKECWRKCGCTRNCGNRVVQRGITRHLQVFLTPEKKGWGLRSTEKLPRGAFVCEYVGEILTNIELYDRTIQKTGKAKHTYPLLLDADWGTEGVLKDEEALCLDATFYGNVARFINHRCFDANIIGIPVEIETPDHHYYHLAFFTTRIIEPFEELTWDYGIDFDDVDHPVKAFKCHCGSEFCRDKTRNEWFYAAALVWFINEIALADKSLYTATGSKSRARV

SEQ ID NO: 17820 - protein, 841 aa, Oryza sativa
  Clone ID: TF_OSC401000j.C1.p1.fg
MGIPEVVVPPRAAGPRRYKGLVPWRFQPGFVRPPPVKPPAAAAAVAGGGVAGTPGGKGRGLGASGEGVGSSGGRGDPQSRRCTRSASAKGSGDARSVEEGGPRVAGDDGGSGKSGVAAEGSGFEGLRNGRGGGVGTAAAEDCGLEKSNPDGIVGDADVHLESGSDARDGECVSEGLKKPCVNNSNGSSAADCAPKVKKGNDSGNGGADECNAAAKSSNLACPGNNGDETNRKGRKVVLPWRFQVGFKRSFSKAFCSDSESSGPSGTQFYRAQDSSTPCTPATRSSVRCYASAHSGVRVSAMRDFSVKGEKETSTPYKKSKTGMDGPSQGMPKNGVVLARENIMGSLQNFRLIYRDLLDEEEEKSTEAVIRPDLQAYRIFRERFITDCDEKKYIGNVPGIKVGDIFHLRVELCVVGLHRPHRVGVDHIKQEDGTCIAVSIVSYAQSSDIKNNLDVLVYSGAMTAIANQKIEGTNLALKKSMDTNTPVRVIHGFVTHLNGNCQRKKIPTYIYGGLYIVEKYWREKEGNDRYVYMFRLRRMAGQKHIDIQDILNSGQAESYGGIIIKDISRGLEKIPVSVVNSISDEYPMPYRYIAHLQYPRNYQPAPPAGCGCVGGCSDSKRCACAVKNGGEIPFNDKGRILEAKPLVYECGPSCKCPPTCHNRVGQHGLRFRLQVFKTKLMGWGVRTLDFIPSGSFVCEYIGEVLEDEEAQKRSTDEYLFAIGHNYYDEALWEGLSRSIPSLQKGPDKDEEAGFAVDASKMGNFAKFINHSCTPNLYAQNVLYDHDDKSVPHIMFFACEDIPPRQELSYHYNYTIDQVHDANGNIKKKKCLCGSIECDGWLY

SEQ ID NO: 17821 - protein, 506 aa, Oryza sativa
  Clone ID: TF_OSC409873j.C1.p16.gm
MAGTRQTTSVPMDNAAVVDAKPLRTLTPMFPAALGLHTFTAKENSSSIVCITPFGPYAGGTEQAMPASIPPMFASPAAPADPNQRQPYAVHLNGAAPANGTANNTGVIPDLQIAVAGTVESAKRKRGRPKRVQDSSVPSAHLVPSAPGGNITAVQTPPSATTDESGKKKRGRPKRVQDVPVLSTPSAPQTPSAVTLPEDGKRKRGRPKRVPDGALIPLSHSDDPRESVDNVLMMFDALRRRLMQLDEVKQGAKQQHNLKAGSIMMSAELRANKNKRIGEVPGVEVGDMFYFRIEMCLVGLNSQSMSGIDYMSAKFGNEEDPVAISIVSAGVYENTEDDPDVLVYTGQGMSGKDDQKLERGNLALERSLHRGEVIDRNSIIGEDDYIFETPSSEQNLRWNYAPELLGEPSLSDSILYDHGDEGYPHIAFFAIKHIPPMTELTYDYGQSQDPAALYLGGKLTWHMGAGRTFLGAMNFARGPLAVFCLGGKGPPCKICKGGKGPRCKKN

SEQ ID NO: 17822 - protein, 663 aa, Oryza sativa
  Clone ID: TF_OSC422929j.C1.p3.fg
MENSEDEAESDKLPLDLEPLRSLAPKFPTILGYDVETQSTDPLLVYATPSIPCSSSEQPQEAPASFSLPLPKSPVPIKATPISAAFPTPQHEDESSDQDYKPFCKNKKPAMPKRAKRPQQAEKSNDANIKRRSIRRNLDNEFNLCSSSSDNPKESVEGILMMFDSLRRRVLQLDEKEDASRRADLKAGTLMMQNNLRINNHKMIGHVPGVEVGDIFFFRIEMCIVGLHAPAMGGIDYISSKNKDETLAVCIISSGGYENDDDDTDILVYTGQGGNSRHKEKHDQKLERGNLALMNSKSKKNQIRVVRSAQDPFCNSGKIYIYDGLYRIEDTWTDTAKNGFNVFKYKLRRDPGQPDGISLWKMTEKWKANPATREKAILLDLSSKVEHLPVCLVNDVDDEKGPSHFNYVAGVKYLRPLRKTKPLQCCKCPSVCLPGDPNCSCAQQNGGDLPYSATGLLAKHTPMVYECSSNCQCSHNCRNRITQKGIKLNFEVFWTGDRGWGLRSWDPIRAGTFICEYAGEVIDETKMDIDVEEDKYTFRASCPGNKALSWNLGEELLEEKSTAVITKNFKKLPIIIRANNEGNVARFLNHSCSPNLLWQAVQYDHGDDSYPHIMFFAMEHIPPMTELTYDYGTRGAPPGFEGKPFKACKLKSCLCGSKHCRGY

SEQ ID NO: 17823 - protein, 739 aa, Oryza sativa
  Clone ID: TF_OSC401693j.C1.p9.gm
MEMDTSPSSSAPSSPAASSDSIDLNFLPFLKREPKSEPASPERGPLPLAAAAPPPPPPPPPPPPPPQVQAATVATPVPATPDLSAAAVMTPLQSLPPNPEEETLLAEYYRLATLYLSSAGAAGVIVPAAAPEASAGAVAQPGSGSGAKKRRPRSSELVRVSSLSVQDQIYFRDLVRRARITFESLRGILLRDDERAEVLGLTGVPGFGAVDRRRVRADLRAAALMGDRDLWLNRDRRIVGPIPGISVGDAFFFRMELCVLGLHGQVQAGIDFVTAGQSSSGEPIATSIIVSGGYEDDDDRGDVLVYTGHGGRDPNLHKHCVDQKLEGGNLALERSMAYGIEIRVIRAVKSKRSPVGKVYFYDGLYKVVDYWLDRGKSGFGVYKYKMLRIEGQESMGSVNFRLAEQLKVNALTFRPTGYLGFDISMGREIMPVALYNDVDDDRDPLLFEYLARPIFPSSAVQGKFAEGGGGCECTENCSIGCYCAQRNGGEFAYDKLGALLRGKPLVYECGPYCRCPPSCPNRVSQKGLRNRLEVFRSRETGWGVRSLDLIKAGTFICEFSGIVLTHQQSEIMAANGDCLVRPSRFPPRWLDWGDVSDVYPEYVAPNNPAVPDLKFSIDVSRARNVACYFSHSCSPNVFVQFVLFDHYNAAYPHLMIFAMENIPPLRELSIDYGMIDEWGTAIQSKVVTPRMLAWQGYDVAQSFSVSRSIMPGRITEACIWDDVSSLPMRKAKSQLIVIH

SEQ ID NO: 17824 - protein, 594 aa, Oryza sativa
  Clone ID: TF_OSC416986j.C1.p5.fg
MASPPPPPRLLTPKPDPDAPLPPLPYPDPNLVQSMLFSAQSPQAQPQAPPPHIQPPASASAEAPSGDEKNKKKKKRARASQEMVRITNLSIADHLHYRSLVRRARLTFEALRAIYQRQDLATAGGIRNRFDLRASSKMLSKGLWMHRDIRTVGSIPGLLVGDSFFYRAELCVLGLHTAPQAGIGYIPASIVDQGHPVATSIVSSGGYLDDEDSGDVLVYSGSGGRLRNRLDHSADQTLQRGNLALHYSCHYGIEVRVIRGHACDHSPSSKVYVYDGLYRVVTSTFGPGKSGRDVCKFKLVRIPGQDDLGSKAWHTAAELKDALDSKIRPPKYISLDIAKGKEPFRVPLYNKLDDDRSPLFYDYIACPDFPTTQQLLKRQTQRGCHCAELCGSRCSCERKNRGADGPVYTSDGILLRGRPLVYECGPLCGCPMTCPNRVTQQGMKHRLEVFRSKETGWGVRTLDLIQPGAFICEYAGDVLSLDSHSGDAPLPPMEDGSSIIDPTKFPERWREWGDASVVYPDRVPHFPLFAGARYRLDVSQRRNVACYISHSCSPNVFLQYVIRGNEDESYPHMMVFAMETIPPMRDLSIDYGLD

SEQ ID NO: 17825 - protein, 459 aa, Oryza sativa
  Clone ID: TF_OSC401218j.C1.p25.fg
MGGSSASPCDLDREFAPQIAQLLATPPLQPAQEYYNGLIQSRKHDGIRVNFSSKHGKGVCANKEFAEGDLILKDQILVGAQHSLNKIDCAVCSYCFRFIGSIEFQIGRRLYWQSVGSSSDCTNRRHCHESDLGSSASSSGATKENSSTLPEEVLGSLITGDMSLPFTDHFSLPQVVPCRGCEEERYCSQSCADSDWETYHSLLCTGSKTEPSQRSALQKFIEHANGSNDIFLVAAKAITFTLLRYKKLKTQPEFQNNTDESNFSLLMEAWKPLSMGYKKRWWDSVALPEDVDSCDEDTFRQQIRDLALTIIIFCVSQSLQLLKDASGLVVPSPVEDYFIHIDDLPDDEKCNISQEEAEKVTRPFLDALGEDYAAPCEGTAFFPLQSCMNHSCCPNAKAYKRDEDTDGNAVIIALEPIKKDDEITISYIDEDVSYEERQAELADYGFICTCPRCQEEKPN

SEQ ID NO: 17826 - protein, 684 aa, Oryza sativa
  Clone ID: TF_OSC900416j.C1.p2.fg
MEMDTSPSSSAPSSPAASSDSIDLNFLPFLKREPKSEPASPERGPLPLPAAAPPPPPPPPPPPPPPQVQAATVATPVPATPDLSAAAVMTPLQSLPPNPEEETLLAEYYRLATLYLSSAGAAGVIVPAAAPEASAGAVAQPGSGSGAKKRRPRSSELVRVSSLSVQDQIYFRDLVRRARITFESLRGILLRDDERAEVLGLTGVPGFGAVDRRRVRADLRAAALMGDRDLWLNRDRRIVGPIPGISVGDAFFFRMELCVLGLHGQVQAGIDFVTAGQSSSGEPIATSIIVSGGYEDDDDRGDVLVYTGHGGRDPNLHKHCVDQKLEGGNLALERSMAYGIEIRVIRAVKSKRSPVGKVYFYDGLYKVVDYWLDRGKSGFGVYKYKMLRIEGQESMGSVNFRLAEQLKVNALTFRPTGYLGFDISMGREIMPVALYNDVDDDRDPLLFEYLARPIFPSSAVQGKFAEGGGGCECTENCSIGCYCAQRNGGEFAYDKLGALLRGKPLVYECGPYCRCPPSCPNRVSQKGLRNRLEVFRSRETGWGVRSLDLIKAGTFICEFSGIVLTHQQSEIMAANGDCLVRPSRFPPRWLDWGDVSDVYPEYVAPNNPAVPDLKFSIDVSRARNVACYFSHSCSPNVFVQFVLFDHYNAAYPHLMIFAMENIPPLRELSIDYGMIDEWVGKLTM

SEQ ID NO: 17827 - protein, 126 aa, Oryza sativa
  unsure (1)..(126): unsure at all Xaa locations
  Clone ID: TF_OSC9932j.C1.p1.np
ASNIXKRREYFIYFVRNIIDDETCEERLEDMRRRGDKNFYMCKVKKDFVIDATFKGNDCRFFNHSCEPNCQLQKWLVNGKTRLGVFASKAIEVGEPLTYDYRYLHYGPEIECFCGAQNCQGNMSVN

SEQ ID NO: 17828 - protein, 523 aa, Oryza sativa
  Clone ID: TF_OSC401276j.C1.p12.fg
MAGPPGPAPGTSSSSSSLPSRRRRRPPPRLGRRRGGDDQQPPHPPKASSEALPCAASPPARCRGGDHQPPHPPEAALEALRGAASPPARRRGGDLHPSHPPEAASEALRGAASPPERRRGGDRQPSHPTEAASEAPSGSASPPARRRGGDQQPPPAVAVAVTSEGGVGPRRSFRISLRHRVRVVPWVKPPVARKPKDPAKPPRPSIEALAAEWAKEKAASGAPEEECVLPFLQKDAPKKLDIVKVLGLDGFGYMDTVILSLKSYRKNIPITVGNFVIVMQSCIRLVLKKVMDAVLDMMQVQQMEAFRRLPLPHTFQEFNIDPIKKEELDNGTEPPPYKIKIIPTGLYWLAALGLVTAQMSALTNHFADRKRLRSLSGILLQTQYCGWGSRALEAIEKDDFVIEFVGEVIDDETCEERLEDMRRRGDKNFYMCKVKKDFVIDATFKGNDCRFFNHSCEPNCQLQKWQVNGKTRLGVFASKAIEVGEPLTYDYRFEQHYGPEIECFCGAQNCQGNMSTPYILNFE

SEQ ID NO: 17829 - protein, 1158 aa, Oryza sativa
  Clone ID: TF_OSC421726j.C1.p17.fg
MQPELVPEWKTWKQEVMKQFFSSHPVGNAGNFEQHNCYDDPGMDQQARIKHSKLEVRRGEAHFSQEDDANLNTLSEDPNKSNLPSISIIHEAVGPLESRDQNKTAAFPSTSGVQDTGEPNSALHNVRHELDSFKSSRQCSAYIEAKGRQCGRWANDGDIYCCVHQSMHFADHSSREDKSLTVETPLCGGMTNLGRKCKHRAQHGFIFCKKHRFQTNPDAMSSDSLLSSSEGRKWEESQKSVEKMSSSNATCSVGSEQANNFQVAVHMKVTPTMAVETTSDKVNVSENADLCYPMSTSMENSNLDASICIGIRSHDNIAECQDYAVRHTLYCERHIPKFLKRARNGKSRLISKDVFINLLKCCTSRKEKLCLHQACEFLYWFLRNNLSHQRPGLGSDHMPQILAEVSKNPDVGEFLLKLISSEREKLSHVWGFGTDSSNQMHSENQDGSVMVLREDGTHPSPGLKCKICSQEFSDDQGLGLHWTEVHKKEVRWLFRGYSCAVCMDSFTNRRVLERHVQEKHGAQYLQYSTLLRCISCNSNFLNTDLLWQHIVSDHSRDFSLLDHVPRRPRGQSIKRTERASDELLYDNHNLGKDDGLQKFTCRLCGMMFDLLPDLGHHHQVAHTNSGTVSDIPSGREKYQFNRGRHYYSAFKKSLRPSGSLKKRTSSGVEKHFKAQSLDLSMDTSHIVESETTTLGRLLDFQCSDVALTLFSKIQKTRPHPSNLDILSIARSVCCKTSLRAALKAKYGILPDNIFVKAAKLCSDVGIQIDWHQEEFFCPKGCKSRSSSNSLLPLQPTQVDFVMSPPIGDEIWGMDEYHYVLDSEHFGWNLKNEMVIVCEDVSFGREKVPVVCAIDVDAKEFPYMKPGEILQSENSLPWQGFHYVTKRLMDSSLVDSENTMVGCACSHAHCSPEECDHVSLFDSIYENLVDLHGVPMRGRFAYDENSKVILQEGYPIYECNSSCTCDASCQNKVLQRGLLVKLEVFRTENKGWAVRAAEPIPQGTFVCEYIGEVLKMKDDGAIRHVERLEIYWNFSGAFHKLIRKLLDLREAKSGSSYLFEITSQIDRERVQTTGTTAYVIDATRYGNVSRFINHSCSPNLSTRLVSVESKDCQLAHIGLFANQDILMGEELAYDYGQKLLPGDGCPCHCGAKNCRGRVY

SEQ ID NO: 17830 - protein, 696 aa, Oryza sativa
  Clone ID: TF_OSC401583j.C1.p35.fg
MEVSPVPKPPLEAALALRRSVRCLNRTRRPTYVEQEEPKESAGRRRGGKRKREEEKKEPVAQHAMKPVRMGDAASERKPSSEGKPMPAIAAEPVSCAGFARPAAEDDVLGNGKSAKLRVKETLRAFTSHYLHLVQERMLSDNALVEFQEEQKRAQAVLQEGQKRPSKRPDLKAITKMQESNAVLYPEKIIGELPGVDVGDQFYSRAEMVVLGIHSHWLNGIDYMGMKYQGKEEYANLTFPLATCIVMSGIYEDDLDKADEIIYTGQGGNDLLGNHRQIGSQQLQRGNLALKNSKDNGNPIRVIRGHISKNSYTGKVYTYDGLYKVVDDWVQNGVQGHVVFKYKLKRLEGQPSLTTSEIDYYVWSCFVYSVPFLVTLISCCMTCALLLSRLVCDDISGGQENLPIPATNLVDDPPVPPTGFVYSKSLKIPKGIKIPSYCNGCDCEGDCANNKNCSCAQRNGSDLPYVSHKNIGRLVEPKAIVFECGANCSCNNNCVNRTSQKGLQYRLEVFKTASKGWGVRTWDTILPGAPICEYTGVLRRTEEVDGLLQNNYIFDIDCLQTMKGLDGREKRAGSDMHLPSLHAENDSDPPAPEYCIDAGSIGNFARFINHSCEPNLFVQCVLSSHNDVKLAKVTLFAADTILPLQELSYDYGYVLDSVVGPDGNIVSCLASVVHRTAGSDFIRSAPVCIYLEYEPL

SEQ ID NO: 17831 - protein, 1292 aa, Oryza sativa
  Clone ID: TF_OSC400435j.C1.p7.fg
MSGLDLREMLSSAARRHTWRRSGWGAEWGGGDDARSAALPARCPPPPPPRRPAAAGGRGDEGSGGVRGRGEEGTSRGGSGARREDAAGTGRNAVAVVAGGSATSGAERVAARAEDGRRSMDGPTLELSEMMLHAAQPWRSRCTQRDVRPGAVPPRPVAADGRGEGTSTVRGRVLEGTTRGGGRGGGMEREREVVAPARNAVAVAGDLATHGGERVAGPLVAKEKRNGGGELGTKRGLEKRAPLPPPKRRVVSAKRQFPPDFGRDSAVPLGRGRGRGGGVRPSDGAPARAVLGEKVASAGNGDSMANVHHHAVMDTVLMKSSHASDENLVAFKVGSPENGAEGAARGKGAHNGELLGKREVLAQAVNLLPMRRTVSATHRFTAGCGRDAAAPLARREEGKVGSGLEVMPVDVGGGVSKEVMATDGSKHSVNQCTANIVGAVGVLDGTVQYQELEEGEVADEAYCDVESQKVVGCDSFDDSAGERHEGVVPVTFAVTEVLTSHAYDEMMQIKALQEGGSDAAQETEHDLPMGGKCETILPDASPKCSFGGPSNEIVHGKRVLGSHGMKGEVPSLAIEDHGGIAQIDQELEDVEMTTGEYRVQDAQIATHVIPHESTTGRHEGGLCASAAAEDVKVMNKYKGTLPKGAAKSSMNIATGVFGDGIMRSKILSTARKVVKPPVRASHKPPLNTLHRPFSTNSASFGHKKLKVKRPDQSKDIPMKIASTSGLAGKDNLIDEKALSLEDDDILKALVVHDGKLEVYLNVPSCVQLHRQHGSGNADDRSKIRMLCRRFQFICRALLHAVEQGSLKIRRVDLAADKIIRKLPGFTKPGPTVGNVNGVEVGDEFMYRVELALVGLHRPYQGGIDTTDYNGVLVAISIVCSGGYPDELSSSGELIYTGSGGKPAGKKKDEDQKLERGNLALKNCIETKTPVRVIHGFKGQNREDNSHSRAKQILTFTYDGLYLVVDCWTEGLKGSRIFKYKLQRIPGQPELPLHIAKGLRRSLSRPGLCIADISQGKEMDPICVINDVSNVHPTSFQYISRIKYPSWLTKRHPQHHGCDCSDGCIDSTKCFCAVKNGGKIPFNSNGAIVHDKPLIFECGPSCRCHSSCHNRVSQKGMKIHLEVFRTANKGWGVRSLRSISSGSFICEYVGILLTDKEADKRTNDEYLFDISHNCDDEDCSKGRPSTISSLNSSGGCSQTMEDVCFTIDASEYGNIGRFINHSCSPNLYAQNVLWDHDDQRVPHIMFFAAENIPPLQELTYDYNYKIGEVRDLNGRVKVKDCHCGSPQCCGRLY

SEQ ID NO: 17832 - protein, 678 aa, Oryza sativa
  Clone ID: TF_OSC1067j.C1.p1.fg
MDASALSNPRLQAMLEEEKRKAMANEFVAKLTDVCWDKCITGSIGSSFSNSEASCLSNCAKRFLELKMLTMQRPQEAPASFSLPLPKSPVPIKATPISAAFPTPQHEDESSDQDYKPFCRQKKPTLPKRAKRPQQAEKSNDANIKRRSIRRSLDNEFNLCSSSSDNPKESVEGILMMFDSLRRRVLQLDEKEDASRRADLKAGTLMMQNNLRINNHKMIGHVPGVEVGDIFFFRIEMCIIGLHAPAMGGIDYISSKNKDETLAVCIISSGGYENDDDDTDILVYTGQGGNSRHKEKHDQKLERGNLALMNSKIKKNQIRVVRSAQDPFCNSGKIYIYDGLYRIEDTWTDTAKNGFNVFKYKLRRDPGQPDGISLWKMTEKWKANPATREKAILLDLSSKVEHLPVCLVNDVDDEKGPSHFNYVAGVKYLRPLRKTKPLQCCKCPSVCLPGDPNCSCAQQNGGDLPYSATGLLAKHTPMVYECSSNCQCSHNCRNRITQKGIKLNFEVFWTGDRGWGLRSWDPIRAGTFICEYAGEVIDETKMDIDVEEDKYTFCASCPGDKALSWNLGAELLEEKSTAVTTKNFKKLPIIIRANNEGNVARFLNHSCSPNLLWQAVQYDHGDDSYPHIMFFAMEHIPPMTELTYDYGTRGAPPGFEGKPFKACKLKSCLCGSKHCRGY

SEQ ID NO: 17833 - protein, 335 aa, Oryza sativa
  Clone ID: TF_OSC900159j.C1.p20.fg
MVVDYWKEGPEGSMVYKYKLQRIPGQPELALHIIKATRKSKVREGVCVPDISQGRERIPIPAINTIDDTQPTAFKYTTEVIYPHSYAKEPLKGCDCTNGCSDSNRCACAVKNGGEIPFNSNGAIVEAKPLVYECGPSCRCPPTCHNRVSQHGIKIPLEIFKTGNKGWGVRSLSSISSGSFVCEYAGEVLQENGDEHVETDEYLFDIGHHYHDEVWEDPKFEGILGLESSTSKTTEDTEGSKTTEDTEGSTIDASKCSNVGRFINHSCSPNLYAQNVLWDHDDMKKPHIMFFATENIPPLQELTYDYNYGKVEDKNGKEKVKPCFCGSPDCSRRLY

SEQ ID NO: 17834 - protein, 1015 aa, Oryza sativa
  Clone ID: TF_OSC400961j.C1.p13.fg
MEPGQLPMVARRCIRHQQSTSRLMSVAWSAMRPALRPMSLVRPTPFTAPSVSTCPVAMACCAASTAVWNPNEPPLLDLTVDCRRAAHHVVPTAVGVGRRRSRGGAGGRGCRRWASEGGAWKLVLSPQPMFCEEGSSESGYVLCVIDSLKKKITSDRFVYIQKRVEENSIKLSPITLHSHNLSKNRQTSTSNSTDLVSNLLTKRKEDALCAVNSRESSPDESEGANCQDECSSTVIVGGNLSARNSVRPIRLPEVATLPPYTTWIFLDRNQRMQEDQSVLGRRRIYYDTNCGEALICSDSEDEAVEDEEEKKEFKDSEDCIIRMTIQECGMSDAVLETLARDIERAPDDIKARYEILQGEKPEGSSKKVSELNVKMEDVYGDKDLDAALDSFDNLFCRRCLVFDCKLHGCSQDLVFPTEKQAPLCSSDEGTPCGIHCYKLVSKPDAIMEIDSHLLVDVEEPTSDNLKDQIGSNKKKLGSSGQKTKSQQSESSSTARVSSESSESEVQLLSNKSPQHSPGLSKNKLGAKGGIKKSTNRRIAERILMSVKKGQQEMSPDSNSIVNGCHWPRDMKLRSDTRSGIKDSVVSSQCNSPSTRSFRKKGTLQMENNSSFVDAQSDSMEDTNNEHSATDGCDSSRKEECVDESICRQEAHGRSWKVIEQGLLLKGLEIFGKNSCLIARNLLGGMKTCTDVFQYMNYIENSSASGALSGVDSLVKGYMKGNELRTRSRFVRRRGRVRRLKYTWKTAGYHFIRKRITERKDQPCRQYTPCGCQSACGKQCPCLTNGTCCEKYCGCPKMCKNRFRGCHCAKSQCRSRQCPCFAADRECDPDVCRNCWVGCGDGTLGVPNQRGDNYECRNMKLLLKQQQRVLLGRSDVSGWGAFLKNSVGKHEYLGEYTGELISHKEADKRGKIYDRENSSFLFNLNNEYVLDAYRMGDKLKFANHSPDPNCYAKVIMVAGDHRVGIFAKERISAGEELFYDYRYEPDRAPAWARKPEGPGAKDDAQPSTGRAKKLAH

SEQ ID NO: 17835 - protein, 1193 aa, Oryza sativa
  Clone ID: TF_OSC417639j.C1.p16.fg
MPHSRSDSGSGSRGADPCRGRKRGRLLMLEEEEEEEESGMEGCSAPACGDVRGDFVGWCSDRHQVASCSGDQTQSASMFAAMQENACSIDSKGVVCPQSGLGYSAGQNGTHGGGGSMLHQNLEGCMYMNQLGQMCGPYPPEQLYDGLSTGFLHRDLAIYAVFGGKMANPVSLGSLKQFLSQWSSDSVVATRDESVENKKMAPVNKLILPDNLSSEESCWMFEDAEGRRHGPHSLAELSYWHHSSYLHDLSMIYHVDSKFGPFTLVSLIDWWSGGTEHSESSANDSGSLNALMDDVVEDISHQLHAGIMKSARKVFIDEIFSSVLPEMIACRKTEKQMAAKRKSQAAKTDNVSNKNALVLKGKGDGTSTRPKSLNSYNNKVPEDPSVAVQSTAMQYEFADILSAVWETIYNKSMKSIWDEVLYDPVMDYCDAWLKRKNESNLLSTVVPGASDNQKMQDTDEMSPKAICDSDAPESDMDFPPGFGPNQESAEHSHSACVEYVTEKTDGRSGSSITLFSGPLGRVQERIRTPVHAPEPSSPPGISVHETPSPAEMPRDEISDMAEMARDEISDMAVDTIPCPADMAASGTSTVPEVTTDKLIIPYVEHQSPSASHASIFEKLDAHEEAELDDSFDEVPPGTEAGLASLVIMEKNKYQPSKSVDSVLDIYRYTSWAFFRQILHESVMKEWASLFSGALSNCFDSWYARKNIVAKTMDDTLRPKEYTYYRKRKLRKNCEASSSEKPMDEQLSRPLRDLVECKVNMKNIHRSSKAGISQRVSVVEKPSKKRAKPSHNDNINLNIQQDLKLLSDKVPKRNRSSHPTSKPLVSSKVPTEDRTTSAMPAKKRKQKNLATESNLKTKAVILSPESHGCEAPTEKRTTAIMPVNKRKKNLSGESKLKAKPLTSPESYVCEAPIDNRTTSTMPAKKRKQKNLSNESNLKKKPLVLCPESYGCARASVSGWEWRDWARNATPSERAQVRGYRVRSILSAPENNVLKSSQVKGSSARTNRVKLRNLLAAAEGTDLLKIMQSKSRKKRLRFQRSKIHEWGLVALESIDAEDFVIEYVGELIRRQVSDIREDQYEKSGIGSSYLFRLDDDYVVDATKRGGLARFINHSCDVPRINELGSKVYKSGGNCNWVLPQYVCVMRACRLYWAEVHCRNVLGFTDRMVRWTNSGYPEEGQQHYYIDWIEDIEFTR

SEQ ID NO: 17836 - protein, 336 aa, Oryza sativa
  Clone ID: TF_OSC401117j.C1.p6.fg
MADICLDKASRTRTNYYESRSKDADEIDTGAVKVSEDFIVSDIAIHPRHAKQMRPHQLEGFSFLVKNLVGDKPGGCILAHAPGSGKTFMLISFIQSFLANVFNALYSEPVIQGRVLNRKGWIYVGEQGDVRKNYIWCKLGTWKREFQWWQVEDIPLYDFYSVKADKRVEQLEVLKYWEAQMSILFLGYKQFSRIICGDGDGNIAAACWDRLLMVPNLLILDEGHTPRNRETDVLASLKRHHAKWSCLTYNESGSNIRYQSLKGVHDSAFTESVEDTLLNDDNFTRKAHVIRSLRELTKDVLHYYKGDILDELSGLVDFSVFLKLSNKLKEIVHCWN

SEQ ID NO: 17837 - protein, 920 aa, Oryza sativa
  Clone ID: TF_OSC18752j.C1.p1.fg
MAWTWRPEDLFLETLKDSLARQRAWRHRGIAWRWPGMRGQSGRGVATGRGGTTWRLDDDIARDYAVGDVGLEGVEDMQLVVLRVAKGGDGGGAAAEAEEAEEAHPADYTAGTQHCLGAFEVVAVTPALTDTRNVDAVLARLPSITEGHSHLQKRARERYAALSAGDKEARLQKMREYYQRKKSIDPVPTHVILPDEKQLKVLNPCKFVLNVLTKRARGKRWVFSLNVTGTNTDNEKSYELDTTYYCKGIYNPRWRTTSGAGTGAVAEGSSARGRRAVSVTGSSPVVVANSVSSQRNPKARFRTCTGVKQTSQASVCFFINTWASQRRGQGWKEKNQVREPCPQATTSPNVSPSSVARRKATEERRKTRPSARDGKLMDWRRLYQLEALERAVRGNTLAFLETGSGKTLIAVMLLRAYAHRVRRPDSRRFAVFLVPTVVLVGQQARVVEQHTDLVVKQFCGEMGVDFWDAATWRSQLEDGEVLVMTPQILLDNLRHSFFRLQDIALLIFDECHHARGNTPYACIFKEFYHPQLNSSASDPLPRIFGMSASLIYSKDLNPHNYSKQISEIENLMNSKVYTVDSESALSEYIPFASTKIVDFDDSNISSELHANILSCLNRLNKKAAEVQSYEENSLSFWGETLDKNVEGFIRNYSEEVHRELSCFLKNGHIGEKFPADSQDGILTPKVHCLIRTLLQYRHMQDLRCIVFVERVITSIVLEHLLSSIHQMSGWNVKHMAGSRPGLLSQSRKNHTEIVESFRKGKVHIIIATQILEEGLDVPSCNLVIRFDPSATNQRGDVEAQTNAEKFLASGQIMREESLRLGSISCQPLENTLYFNPLPRFDIDKASGTCTLHLPKSSPVQTVNVEGEGSILKETVCLKACQELHAIGALTDSLLPELDVPCDEEPDIGKLDAWWVRLYLK

SEQ ID NO: 17838 - protein, 788 aa, Oryza sativa
  Clone ID: TF_OSC900120j.C1.p3.fg
MGGPLTAAGGRGDGGAKAVEPLRPPPPPDPKTMARWYQLEALERAVRGNTLAFLETGSGKTLIAVMLLRAYAHRVRRPDSRRFAVFLVPTVVLVGQQARVVEQHTDLVVKQFCGEMGVDFWDAATWRSQLEDGEVLVMTPQILLDNLRHSFFRLQDIALLIFDECHHARGNTPYACIFKEFYHPQLNSSASDPLPRIFGMSASLIYSKDLNPHNYSKQISEIENLMNSKVYTVDSESALSEYIPFASTKIVDFDDSNISSELHANILSCLNRLNKKAAEVQSYEENSLSFWGETLDKNVEGFIRNYSEEVHRELSCFLKNGHIGEKFPADSQDGILTPKVHCLIRTLLQYRHMQDLRCIVFVERVITSIVLEHLLSSIHQMSGWNVKHMAGSRPGLLSQSRKNHTEIVESFRKGKVHIIIATQILEEGLDVPSCNLVIRFDPSATNQRGDVEAQTNAEKFLASGQIMREESLRLGSISCQPLENTLYFNPLPRFDIDKASGTCTLHLPKSSPVQTVNVEGEGSILKETVCLKACQELHAIGALTDSLLPELDVPCDEEPDIGGQDNASVTMKYVGIIHLNQEQVIIARRFQTTILSFLIGDDHLEVSNGIKYFHEMQVPIGVVYLLLPLVSGRIDWCSMKFSSSPIYEANNKHMTHCHSCKDIDLLQTKDGPFCRHGLTLTFENQPLLAGSKHVKVRNFLHNCYSKKEKEPGDRYSVELPPELCRIIMSPVSANNLHIFSYVPSIMFRIQCMLLSVKLKVQLGPTVQQFDVPVLKVDFLINSFLFMNY

SEQ ID NO: 17839 - protein, 1004 aa, Oryza sativa
  Clone ID: TF_OSC401693j.C1.p16.fg
MAAAGRDPPATPSSRMYYCRQRKASSEVNANVFVPGGQNGISFPASNRAHDWGYGGVREEWEASYARKLQLINFLSSLHQRTANSLITTRMDANMDTPLEQKQKDSSAIIVLDSDDEDEAERCEQLASENNKQQAPSGPTSPCTTWIVSSAKDQVNGTLHVDGVQSTQIVPYGQNAPLINQSPLQTSWQPSIQYERVILQRRPEEQRVQDLVAASHAEKIAETQVFLTLPTLPNERKRRKSEPTTLVDGDGGTNLGKGKRKNHQNQAAVDSILDLQQTVVPLQQNDVPSQSYRTMIEEEKPVKESDGLEDLWKDFSLAAECTKLDTNEDMSNEKDVDDENEMDDDCNHDIRIHEDLGHVCRICGMIVRKAETIIDYQWKKKNLLWGIFSLLKYFLKWESVFITNYIDIDTALEYIASRTRTNYYESRSKDADDIDTGAVKVSEDFIVSDIAIHPRHAKQMRPHQLEGFSFLVKNLVGDKPGGCILAHAPGSGKTFMLISFIQSFLAKYPSARPLVVLPKGILGTWKREFQRWQVEDIPLYDFYSVKADKRTEQLEVLKSWEARMSILFLGYKQFSRIICGDGDGNIAAACRDRLLMVPNLLILDEGHTPRNRETDVLASLKRVQTPRKVVLSGTLFQNHVSEVFNILDLVRPKFLKMESSRPIARRIMSQVAISGIRSLKGVHDSAFTESVEDTLLNDDNFTRKSHVIRSLRELTKDVLHYYKGDILDELPGLVDFSVFLKLSTKQKEIVHKIEAYEKFKRSAVGTALYIHPCLSEISEGDAADRATNLTDATVDSLIESIIIKDGVKAKFFFNILSLANSAGEKLLAFSQYILPMKFLERLLVKRLGWHVGKEIFMISGDTSADDREVAMDQFNNSADAKVLFGSIKACGEGISLVGASRVIILDVHLNPSVTRQAIGRAFRPGQQKKVFVYRLVAADSPEVKFHETAFKKEVIPKLWFEWSELCTTEDFKLNQVDIDDSEDELLEANAIRQDIKALYRRVWQ

SEQ ID NO: 17840 - protein, 1457 aa, Oryza sativa
  Clone ID: TF_OSC23980j.C1.p3.fg
MDPRRPPSRGGAAANGGGLSYSTLFNLEPLLNFKVPLPEDLDRYRRSSPNGSMSSQGQGSLSDQYNGINDASHGLHRKRKRNLDGASDDDEVDAYSNQITEEHYRTMLSEHVQKYRRSKFKEDVFSSDPPQVIVPQKHKNGSARVTKYRSDTRNVAMLGGVEATAEYNGTKSTNAYGGFNKVVASLDSSYLDMGDNVSYKIPEGYDKLALSLNLPVFSDIRVEETFLNGTLDLRTLAAMLSTDQKFETTNRGGLAEPQPQYESLQERVKVQKFSLQVTEDPFAIPEGAAGRIRRFIISESGSLHVHYVKVLEKGDTYEIIERSLPKKQIIRKDPSEIAREESEKTIKLWHAIAVKGIPRHHRNFMALLKKRQVDAKRFSENCQREVKFKVSRSLKLMRSAAIRTRRLARDMLIFWKRVDKEQYELRKREEKEAAEALKREEELREAKRQQQRLNFLLSQTELYSHFMQNKAGESAPSDEASVPEEDEEDPEEAELKREALRAAQHAVSQQKRMTNAFDSETGRLRQSSDSGIPTDDLASMEPNKIDLLHPSTMPEKSSVQTPELFKGALKEYQLKGLQWLVNCYEQGLNGILADEMGLGKTVQAMAFLAHLAEDKNIWGPFLVVAPASVVNNWAEEILVNEEKLLRRVKWQYMVLDEAQAIKSSSSQRWKTLLSFNCRNRLLLTGTPIQNNMAELWALLHFIMPTLFDSHEQFNEWFSKGIEGHAEHGGALNEHQLSRLHAILKPFMLRRVKIDVIAEMTKKKEEIVPCRLSSRQQVFYQAIKNKISLNELLDGSRGNLNDKKLLSLMNIVMQLRKVCNHPELFERNEGSSYFYFADIPNSLLSPAFGELQDVHYAGKRNPIMFEIPKLVYKGIVSNMEMPVRGCGFLYGSFNRMFNIFSPSYIHQSAFPEAISPNNTVLLSGAFGFTRLINLSPVEASFLATCSLFNRLAFSAVRWNKKYTDELVDVFLDSESTDLESTHNDLTTVRAVVRLLLSPTKAESSFLRTKIETGPSDSPYEALVLSHHERLVSNIRLLRSTYAFIPPARAPPINVWCADRNFAYKLTDEMHDPLAKKLVLGFARTSEFNGPREPTSPHSLIEELHTDLPFPEPMLQLPYRIFGSSPPMSNFDPAKMLTDSGKLQTLDILLRRLRAENHRVLLFAQMTKMLDILEDYMNFRKFKYFRLDGSSAISDRRDMVRDFQNRNDIFVFLLSTRAGGLGINLTAADTVIFYEIDWNPTQDQQAMDRTHRLGQTKEVTVYRLICKDTIEEKILQRAKQKNAVQELVMKGKHVQDDHLMRQEDVVSLLIDDTQISHKLKEISMQAKDRLKKRRTKGIKVDKEGDLMLEDLDDQTSGAAEHDNTSSKKKKSSQKKLPKLQDNGSVDKNAEAEGGEVEDEDSIAAPRPKRSKRLMKNLNEDKEPEQEPTTDGDNPAEAAENNISPDDNDTEEAKDRTPSA

SEQ ID NO: 17841 - protein, 225 aa, Oryza sativa
  Clone ID: TF_OSC420110j.C1.p1.np
FSVFKLMDYEPVLKCLKKLPGVAVQDIPYKTRNVIKNLPKFFAESASDKEVDGLLMKLPQHLRDALLPFQLEGVKFGLRRHGRCLIADEMGLGKTLQAIAIACCYKDEGPVLIVCPAVLRYTWAEELERWDPSFLPKDIHLVFGHQDSLERLGACPKAVVISYQMLSRLRKSMMNRRWALMIIDESHNIRCTKKKHEKNETQAVLELAPNVSRIVLLSGTPSLSR

SEQ ID NO: 17842 - protein, 1870 aa, Oryza sativa
  Clone ID: TF_OSC400505j.C1.p62.fg
MDPPARSRRCTLLTRALLLAVAALALRLIYAAFLAGMALYPPLPAAAVLGSKTYLHSAVATPDAWRTRDWRKAVDYHATLLAPHLADGILSPTSRAVCLGAVQEALAMRELGVSTAVAVARKRSPPLAVAGNDRRLPFQDSSVDFVFAARALDSSKRPADLAAESARILKPDGHLVVLTTSAADAFSLRALQALLPSLRLLRSRQIKGPDDSTLRELVFQKIQDSTDDPVNKCTIGDHKLQLLTHAEPLIQEEPRKPWITLKRNIKNIKYLPTLADISFKRNYVYVDVGARSYGSSIGSWFRKHYPKQNHTFQVFAIEADPAFHSEYAAKKAVTLLPYAAWVKNETLNFEINADPGKEDEAKANGRGMGRIRPMAGKKMSGEVRSVPAFDFAEWLKRTVSEQDYVVMKMDVEGTEFDLIPRLFDTGAICLIDELFLECHYNRWQKCCPDRAEAFEMAKGVSCFYWSIQFPNFKDHLCFRNCSNASSTRHFSYRSLLIRTEKPVTTRNHAYAEVVVFVLDQNPMFFLFLRFFYPAIQRGPNCWSSANSTVMRQAFEVFYDGSWHGVNCIRIRNGNLFVKFIYSGSTVEHNVDGDCLRLRSRRATCSDCSNVLKPGVDVCVQSSHTPEASSQGGTNASVLLRHDARLITIKKNHQEDKCLCLFVVILYKNQCPGNAEKVITDRRAEVVTINDIFLLQKLQPEVHEGSMKWSFSKDRLSLNKGRLISARFSSEITHLIVLSILRGMEFNIKLVEGQIVYQIIKGDQAQWNLDSMAIPPGFGNTMEIISFQLRDEALRPTITNIPITHVKKNNITEDMRFTVKSEMDSELDRALDVEILYEHVDLRRSKRLKTQPDRFTSYDTPRFLSGYKKKEASSSPTKHVRGAVHCDSPVDDSKKEVESCCVEIPGNVTQKQTGVHSPMVDEKSNSPEGQHKNTTKRTTCSLVKEKASSPEGQHEKTTKRTTCALPVKEKASSPEGQHKNTIKRTTCSLPVKEEPSSVEIEEKSSKEQSAPEFHIPRTPAQNKEKHNRPPFSCKPKLFTSSGTLGVNCEPAFCQKVGGKRKRHMCEREYKQMIDQCIGNIESEMERDSMFNFDANMMNYVQHSYREEDFTWPPSADNQEVEEDELEELWKEMDYSLTTLALLEQKQVMAQSRINMLVDNFDGLRLDCLTLTDDYRCYYQKKEKFAESGSVNESTDYFGKVGGIPCHHECILDEELGLACRLCNVVCTEAKDIFPEMFNGNDYKDRPGCSNICLDDDILDPSLLANLAPELSELKNSGSVWSAISDLDPKLLPHQRKALDFLWKNLAGSIQVEGMDNSNVSTGGCVIAHTPGSGKTLLLISFLVSYMKAHPRSRPLVLTPKAAIHTWKREFEKWGISLPLHVFHHANRSGKPLGAMDSKLRSLLNNFHRPTWTNMRLMDSLDKLFKWHAHPSVLLMTYSSFLGMTKQDSKVRNRYREFIAEVLMNNPGLLILDEGHNPRSNKSKLRKLLMKVKTEFRILLSGTAFQNNFEEYFNTLCLARPRFIGDIMSELVPERKRETVGRRAKHQEAVARRAFVEKVGQKIESDNKHIRSDGISLLNKLTRGFIDSFEGAKLINLPGIHVYTVFMKPTDIQEEMLAKVTMPKLGSSRFPLEVELLITIGSIHPWLIKTTKAVSTFFSPAEVKKVERYKRDFAAGCKAKFVIDLLHKSSFRGERVLIFCHNVSPITFLVKLIEMVFGWRLGEEVLVLQGDQELPVRSDVMDKFNGDSAGKRKVLIASTTACAEGISLTGASRLVMLDSEWNHSKTRQAIARAFRRGQERTVYVYLLVASGTWEEEKYNSNRRKAWMSKMVFLGRYVDDSSQNRVTDIDDEVLKELADEDHTGTFHMIVKQD

SEQ ID NO: 17843 - protein, 801 aa, Oryza sativa
  Clone ID: TF_OSC400938j.C1.p6.fg
MPRRGASSASTSRGRRRPREEEEEEDEEEVVGDVASDDSADSDFVADTEEEEAADDEYDYASDGKDGAGPAAAAAAAPAAVAPPPPQPKRLQGGRKKGAGGHGKLPLPWEEWEEANEKWLDEREAAAKGEEPPDPEVPPAVAAGVPTAEPAPEVLLPLLRFQKEWLAWALAQEASPSRGGILADEMGMGKTIQGISLVITARRLRPPAPPPRRRAASSSQGQPKRWVGCTLVVCPVVAVIQWAQEIERHTAKDSVRVLVYHGGRRGAQKYDFNKYDFVITTYSTIEADYRKHIMPPKTRCCYCDKLFYPNKLKVHLRYYCGPDAQRTEKQAKQESRKWGSKKGTSKRRVQKKKNDSDGEDFEERDGGSGSQSRGQSPLHSVRWERIILDEAHFIKDRRCNTAKAIFALESEYKWALSGTPLQNRVGELYSLIRFLQIFPYSNYFCKDCNCEILDTLLKKQCDCGHSSVRHFCWWNKVTLRRDSFDKNEMEFYEALYTQSRTQFDSYVDAGTLMNNYAHIFDLLTRLRQAVDHPYLVAFSKTAELSDRSKNEGNENMESQCVPLTVDLTTRSSGEKVTPNLKGGKRSGILSRLQNLADFKTSTKIDALFLAYMFLLIELHNDVNGDVNDENTLVNLREEIRNMVEHDGSAKGIVFSQFTSFLDLIEFSLQKSGIKCVQLNGKMNIVEKGKAIDTFTNDPDCRIFLMSLKAGGVALNLTVASHVFLMDPWWNPAVESQAQDRIHRIGQFKPIRSMRFVIKDTVEERILQLQEKKRLVFEGTVGDSPEAMSKLTEADLKFLFQN

SEQ ID NO: 17844 - protein, 1148 aa, Oryza sativa
  Clone ID: TF_OSC420824j.C1.p3.fg
MSGSGNSLDTVALIVGGGSDSSGIVGRKRRRCDLIRERWCCLCPVWCKEAQEVVVPGRGRNGARQRDGGGCALGTTEVLGRICNSSVEKAEERETVIPAISNTEKMGEKQQKSIPRDRKRKGELDPAADYVKDLWDAFYVTAESTHLDTSEVNNKKQLDNCNHDIHVYEDLGHVCHECGLVVRKADSLFHYQWKKASRKRTNVNEVCLKKVGSDAISLSEDFIFSDIAIHPRHAKNIRPHQLEGFKFLVNNLVTDEPGGCILVHAPGSGEIFMLISFIQGFMARHFTARPLVVLPEGILGTWKREFQQWQVEDIPLYDFDSIKADNRVEQLEVLKSWSSKRSILFVGSKHFTQIVCDDRDENAVAECRDTLLMVPSLLILDEGHTPSIDETDMLQSARKVQTPCKVVMSGTLFHNHVKEVFNTLDLVRPGFLKTETFWPIVTRMMGQLEISSARSITEISESMEDTLLNDDNFTRKVNVIRSLGELTKDVLHYCKGEDLNEFPVLLDFSVFLELSPKQKDILCKLEEDHGMLKTSAVGAALYVHPCLSEISEANDVDRDDRVDSLVNSINLGDGVKARFFLNILALANSAGEKLVAFSQYTLPMKFLERLLVKEMGWHVGKEIFVINGDTSMEDGQLAMDQFNGSADAKVLFGSIKAFGEGISLVGASRIVILDVHLNPSVTRQAIGSTFRPGQKKKVFVYRLVAADSPEEKAHETAFNKEVIPKLWFQWSGRCTTEDFKLNQVCIDGSRDELLETDVIRQDIKALYQSIDMGLVSEATVCFNNVSSSGLSVHDTGGNVIGQGDQDSEKNRYLSIASETMLVHFVHVFSFVCVPVNTTCSLSICREILWFLIGTREVPFSSVKFGISSWMGKITLIRIFRILYDEKGQIALLASKGSIKDKQEACKSWRYPSIHPWLTEAVVLAVTAATPPHLLAVAGPLPLPSLCSAVPFALLYYFGKGRKVVHTLKNWLQQVSVENKICGWGYNTTEVLGRICNCSVEKAEERETIILASGNMEKMEEKHQKSDQDFHFSDSTMAIPRERKQKGEVDPAADCLKDRWGAFYVAVESTQLDTSEVNNKKQLNNYNHDIHVYEDLGRVCHECGSGEIFMLISFIQGFMTRHSTARPLGTWKREFQQWQVEHCSGFIYL

SEQ ID NO: 17845 - protein, 1122 aa, Oryza sativa
  Clone ID: TF_OSC404928j.C1.p12.fg
MAKPVKYDEEEEEVSSSGEEEEEQSDGAGSGSGEEEDEEEEEAPAAAAGEAAGGEEEEVDEEEIEAVTTGAGADEEEEESGAAAAAPGEGDEESQSTEDDEAVVGEDDDADEAEGGAVVGKREKARLKEMQKLKKQKIQEILDTQNAAVDADMNNKGKGRLKYLLQQTEIFAHFAKGNQSKEKKPRGRGRHASKMTEEEEDEEYLKEEEDALAGSGGTRLLSQPSCIKGKMRDYQLAGLNWLIRLYENGINGILADEMGLGKTLQTISLLGYLHEFRGITGPHMVVAPKSTLGNWIKEIQRFCPILRAVKFLGNPEERNHIRENLLQPGKFDVCVTSFEMAIKEKTTLKRFSWRYIIIDEAHRIKNENSLLSKTMRIYNTNYRLLITGTPLQNNLHELWSLLNFLLPEIFSSAETFDEWFQISGENDQQEVVQQLHKVLRPFLLRRLKSDVEKGLPPKKETILKVGMSQMQKQYYRALLQKDLEVINAGGERKRLLNIAMQLRKCCNHPYLFQGAEPGPPYTTGEHLVENAGKMVLLDKLLPKLKDRDSRVLIFSQMTRLLDILEDYLMYRGYQYCRIDGNTGGEDRDASIEAFNKPGSEKFVFLLSTRAGGLGINLATADVVVLYDSDWNPQADLQAQDRAHRIGQKKEVQVFRFCTEYTIEEKVIERAYKKLALDALVIQQGRLAEQKTVNKDDLLQMVRFGAEMVFSSKDSTITDEDIDRIIAKGEETTAELDAKMKKFTEDAIKFKMDDTAELYDFDDDKFGSLLNSIYILDFLKEENKLDFKKLVSDNWIEPPRRERKRNYSESEYFKQALRQGAPAKPREPRIPRMPHLHDFQFFNNQRLNELYEKEVRYLMQANQKKDTIDGEDEDQLEPLTAEEQEEKEQLLEEGFATWTRRDFNTFIRACEKYGRNDIRSIAAEMEGKTEEEVQRYAKVFKERYKELSDYDRIIKNIERGEARISRKDEIMRAIGKKLDRYKNPWLELKIQYGQNKGKFYNEECDRFMLCMVHKLGYGNWDELKAAFRMSPLFRFDWFVKSRTTQELARRCDTLIRLVEKENQEYDEQERQARKDKRMAKNMTPTKRSALRVSEGETTPSNSFKRRRQSLMDDYVGSGRRKRG

SEQ ID NO: 17846 - protein, 958 aa, Oryza sativa
  Clone ID: TF_OSC900293j.C1.p26.fg
MYYRRQRKASSEANANVFMPGGPNDISFPASNRDHDWGYGGVGKEWEASYARKLQLMNFLSSLHQRTANPLVTTRMDANMDTPLEQKQKDSSAIIVLDSDDEDGYTEGCEQLTSENNKQQAPSGLTSPYTTWIVSSAKDQVNGTLHVDGVQSTQIVPYYGQNAPLINQFPLQTSWQPSIQYERVILQKRPEEQRVQDLVAASHAEKIAETQVLLTLPTLPNERKRRKTEPTTLVDVDGGTNLGKRKRKNHQNQAAVDSNLDLQQNDVPSQSYRTMIEEEKPVKESDGLEDLWKDFSLAAECTKLDTNEDMSNEKDVDDENEMDDDCNHDIRIHEDLGHVCRICGMIVRKAETIIDYQWKKASRTRTNYYESRSKDADEIDTGAVKVSEDFIVSDIAIHPRHAKQMRPHQLEGFSFLVKNLVGDKPGGCILAHAPGSGKTFMLISFIQSFLAKYPSARPLVVLPKGILGTWKREFQRWQVEDIPLYDFYSVKADKRVEQLEVLKSWEAQMSILFLGYKQFSRIICGDGDGNIAAACRDRLLMVPNLLILDEGHTPRNRETDVLASLKRVQTPRKVVLSGTLFQNHVSEVFNILDLVRPKFLKMESSRPIARRIMSQVAISGIRSLKGVHDSAFTESVEDTLLNDDNFTRKAHVIRSLRELTKDVLHYYKGDILDELPGLVDFSVFLKLSTKQKEIVHKIEAYEKFKRSAVGTALYIHPCLSEISEGDAADRASNLTDATVDSLIESIIIKDGVKAKFFFNILSLANSAGEKLLAFSQYILPMKFLERLLVKRLGWHVGKEIFMISGDTSADDREVAMDQFNNSADAKVLFGSIKACGEGISLVGASRVIILDVHLNPSVTRQAIGRAFRPGQQKKVFVYRLVAADSPEVKFHETAFKKEVIPKLWFEWSELCTTEDFKLNQVDIDDSEDELLEANAIRQDIKALYRRSAISFSRCACAS

SEQ ID NO: 17847 - protein, 1152 aa, Oryza sativa
  Clone ID: TF_OSC409799j.C1.p8.fg
MGKPGKYGDGDDDDSEEEQLSPSSSAGEEEEEEVEEEEGEEQQEEQGEEEEGFSGDEEEQEVEGEADGEQVEEEEEEESSVGEEEAEAEGEEEEEEVEEEQGAGEEEEEEVDEEEIEAVTTGAGGDDDDEEVGDDGGAEEESQSTEDDEVAAGKDGGGEDGDKLEDATGNAEIGKRERAKLREMQKLKKHKIQEILDAQNKAIDADMNNKGKGRLKYLLQQTEIFAHFAKGNQSTEKKSRGRGRHASKMTEEEEDEEYLKEEEDALDGAGGTRLVSQPSCIKGKMRDYQLAGLNWLIRLYENGINGILADEMGLGKTLQTISLLGYLHEFRGITGPHMVVAPKSTLGNWMKEIQRFCPVLRAIKFLGNPEERNHIRENLLVPGKFDVCVTSFEMAIKEKTALKRFSWRYIIIDEAHRIKNENSLLSKTMRIYNTNYRLLITGTPLQNNLHELWSLLNFLLPEIFSSAETFDDWFQISGENDQHEVVQQLHKVLRPFLLRRLKSDVEKGLPPKKETILKVGMSEMQKQYYRALLQKDLEVVNAGGERKRLLNIAMQLRKCCNHPYLFQGAEPGPPYTTGDHLIENAGKMVLLDKLLPKLKERDSRVLIFSQMTRLLDILEDYLMYKGYQYCRIDGNTGGEDRDASIEAFNKPGSEKFVFLLSTRAGGLGINLATADVVILYDSDWNPQVDLQAQDRAHRIGQKKEVQVFRFCTEYTIEEKVIERAYKKLALDALVIQQGRLAEQKAVNKDELLQMVRFGAEMVFSSKDSTITDEDIDRIIAKGEEATAQLDAKMKKFTEDAIKFKMDDTAELYDFDDDKDENKLDFKKLVTDNWIEPTSRRERKRNYSESDYFKQALRQGAPAKPREPRIPRMPHLHDFQFFNTQRLNELYEKEVKYLVQANQKKDTVGEGDDEDQLEPLTVEEQEEKEQLLEEGFSTWTRRDFNTFIRACEKYGRNDIKNISSEMEGKTEEEVQRYAKVFQERYKELNDYDRVIKNIEKGEARIYRKDEIMKAIGKKLDRYKNPWLELKIQYGQNKGKLYNEECDRFMLCMVHKLGYGNWDELKAAFRMSPLFRFDWFVKSRTTQELARRCETLIRLVEKENQEYDERERLARKDKKNMSPAKRSSSRSLDTPPQSSSKRRRQSYTEANAGS

SEQ ID NO: 17848 - protein, 1282 aa, Oryza sativa
  Clone ID: TF_OSC400996j.C1.p76.fg
MEEAAAAAADFDGGFGGAGEDNLSMPLGDFMAFLDNEDWKEQQHEWRWAINGHQAVGIGEGQTGSSLVMNGQALQTKTQNDKYFGTEGNQGLEMPVDSTSSENAFQNHEEIFENKENWSNYSHTDPSHSQMDVMVELNNGGESFDHSEDTSYRLLSNDFLENSRNGNPEMHLPMDALNHAKTVDEEIVPPYEDYTNGLYYDSGCDMFAEQSGLSEVKCEGTGPMLGNSEQEGNHFTSVPMFDHSAVIPDIPYTELNIGDVPGSMQNGNGSCLTVQGEYLQGEYQEYPQPDYGSFDMANEIVLHDLPQNNQSYELEQLPQNICESSSMQVGSPDQYCDDTSLSDYYMDDVSSIESMSSEQNRSEDICFRSESSTDSSPVPSSRNSTTEDADKYFGDAPKHLQNSMFPVSTQHQHSFMNSSDPMHPTFHKKYDIPRNGSSSILGNSSRNCFSLDSNRDSDLCILEGSRSLASGHVLPPQGLQHNFQQSVCANPNLPRFGGRYRPHEERMTLRLALQPLLDAPLASSLLDISQPKSEANPPDGVLAVPLLRHQKIALSWMVQKERNGSSCSGGILADDQGLGKTVSTISLILTERSPVPSSAVKQEPCEAVTLDDDDEDDDAEPHLKKPALAHLADTCKPEATSSTIKTENPIANVKARPAAGTLVVCPTSVLRQWADELRNKVTSKANLTFLVYHGSNRTKDPNDLTKYDVVLTTYSIVSMEVPKQSSPDSDDEEKGKPDRYGAPVGSSGSKKRKTSSSKKNKSGSTPESKLPEKPLAKVAWFRVILDEAQSIKNYRTQVARACWGLRAKRRWCLSGTPIQNAVEDLYSYFRFLRYDPYAEYKKFCFMIKTPISRNPITGYKKLQVVLKTVMLRRTKATMLDGKPIISLPPKTVSLKTVDFTSEERAFYNTLEAESREQFKEYAAAGTVKQNYVNILLMLLRLRQACDHPHLVRGHESTSSWMSSLEMAKKLPVERQQSLLVCLQSCSAICALCNDAPEDAVVTICGHVFCNQCILEQLTGDDSVCPVSNCRVRLNSTSLFSRGTLECALSRSTCEFLSDDSCEDMVQGKQPRFDSSYASSKVRAALDILLSLPKLDLTHMSDDKNKIVHPDKINGNSTPSEYAGTKITEKAIVFSQWTRMLDLVEVHLKSSHLSYRRLDGTMSVAARDRAVKDFNTNPEVSVMIMSLKAASLGLNMVAACHVLLLDLWWNPTTEDQAVDRAHRIGQTRPVTVSRLTIKDTVEDRILALQEKKREMVASAFGEDKSGAHQTRLTVEDLNYLFMV

SEQ ID NO: 17849 - protein, 698 aa, Oryza sativa
  Clone ID: TF_OSC407487j.C1.p21.fg
MAPPQMYERRLLAAASLLLSADAQGQPPHAAAQLGVGVTAELKPHQVDGVAWLIRRYQLGVNVLLVVLCPLSVTDGWLSEFNKFCPSLRVIQYVGDKLHRRDLRRMMFQDVQKSSSSSHSTELPFDVMMTTYDIALMDQEFLSQIPWHYVVIDEAQRLKNPSSVLYNVLEQRFIMPRRLLLTGTPIQNNLSELWALMHFCMPSIFGTLDQFLSTFKQSGDSLTGGETNKTDKQFKILKHVIQLRKASSHPYLFSGIEPEPYVEGEHLVQASGKLVMLDLILKKLHEVGHRVLLFAQMTQTLDILQDFLELRQYTYERLDGSVRAEERFAAIKSFSSQPTKGVVRDDNQSGAFVFMISTRAGGVGLNLIGADTVIFYEQDWNPQADKQALQRAHRIGQLNNVIMRRAERKLKLSHSVIGEEDATYGKGKYVENEASDMRSIIFGLHLFDTSDTTAETMNDDTASETIKEETMLKLKSMSEKVVLMRSHEPSEKDERAFEINPNMTDNSGAVVTRVSDSVNVDPDFNEAAYLSWLEKFKESSHSKENTRAELERQRIAPEEKFLKREAIKKKVEEKRLAKWESLGYQTLKIKDPDILPNQNIPDSGSVQLVYGDCTNPSVVCPAKPAIIFRYYFPRVKYVTFYERELLHPRIVEGNVVLIIQEPGDMEECSMLWPISQHAFQMLIIVLLNLMISTWQIFT

SEQ ID NO: 17850 - protein, 345 aa, Oryza sativa
  Clone ID: TF_OSC22947j.C1.p9.fg
AYAAAGTLKQNYANILLMLLRLRQACDHPLLVKGHQSEYKGDGSIEMAKQLPKEMIINLLAKLEVGEFCSVCSDVPEDAVVTMCGHVFCYQCIYERITTDENMCPSPNCGNTLSTDSVFSSGALRICMSGVSSSHASGSSSLDDESSSISQTSYISSKIQAAIDILNSIINTYALTDSDTVESNPSRVAPVKAIVFSQWTGMLDLLELSLNSNLIQYRRLDGTMSLNSRDKAVKDFNTDPEVRVMIMSLKAGNLGLNMVAACHVILLDLWWNPYAEDQAIDRAHRIGQTRPVTVSRLTIKDTVEDRILALQEEKRAMVSSAFGEDKSGGHATRLTVDDLKYLFRF

SEQ ID NO: 17851 - protein, 811 aa, Oryza sativa
  Clone ID: TF_OSC415522j.C1.p1.fg
MSEVRSVPGMKVEASPAAAAAATVDSPTSVLEDDEKISECKNGDVLDTTEAIKQEEDHLDVLIEEKVDGFVDASSSLNVEPAANNSDLSPLTVPVKEEGQLLEPVKEEKADDFVDAVPSLPIDLEAKNGDASLITDAMKEEEEKLHDARVKAEEEEVARKREEAARLAFDPNARFNKLDELLSQTQLYSEFLLEKMETIADVEGVQTHAEEEPVEEKKNGRGRKRKATSAPKYNDKKAKKAVAVMLTRSHEDCSPEDCTLTEEERWEKEQARLVPLMTGGKLKSYQIKGVKWLISLWQNGLNGILADQMGLGKTIQTIGFLAHLKGKGLDGPYLIIAPLSTLSNWVNEISRFVPSMTGLIYHGDKAARAEIRRKFMPKTTGPDFPLIVTSYEMAMSDAKHLAHYKWKYVIVDEGHRLKNSKCLLLRELKRLPMDNKLLLTGTPLQNNLAELWSLLNFILPDIFSSHQEFESWFDFSAKGGEEEQEDSEEKRKVDVVSKLHAILRPFLLRRMKEDVEHMLPRKKEIIIYANMTDHQKQIQNHLVEQTFDQYLHEKSEIGLYPPVEKLLEQCGKFQLLNRLLSLLLARKHKVLIFSQWTKVLDIIEYYLETKGLQVCRIDGSVKLEERRRQIAEFNDLNSSMNIFILSTRAGGLGINLTSADTCILYDSDWNPQMDLQAMDRCHRIGQTRPVHVYRLATSHSVEGRIIKKAFGKLRLEHVVIGKGQFEQDRAKPNALDEAELLALLRDEQGDEDRMIQTDISDEDLLKVMDRSDLTGPPANADAAPLVPLKGPGWEVVVPTKSGGGMLTSLTS

SEQ ID NO: 17852 - protein, 219 aa, Oryza sativa
  Clone ID: TF_OSC408712j.C1.p1.np
NLIMLIFKSLDIKCCMLFINELLGGTMLPCANKQSLQEYAAAGTVKQNYVNILLMLLRLRQACDHPHLVRGHESTSSWMSSLEMAKKLPVERQQSLLVCLQSCSAICALCNDAPEDAVVTICGHVFCNQCILEQLTGDDSVCPVSNCRVRLNSTSLFSRGTLECALSRSTCEFLSDDSCEDMVQGKQPRFDSSYASSKVRAALDILLSLPKLDLTHMGD

SEQ ID NO: 17853 - protein, 693 aa, Oryza sativa
  Clone ID: TF_OSC422293j.C1.p4.fg
MAPVRGERAVLPARAACGLRAAAGTPAPVWVPVGGRAVPWAAAAAVDVGCCSPLCSLPCPSSCQLLKLPVGGDVAGDGAVDVAAQGLNLYLRRTCRIFRRLRLRLRPGCCQLRCRQSGCPRCCCSGLSRCSPALFCCGELGVLLTPSARGDRTPRPSVGHGAPPGGCCVERGKGKGKEEQPVLLLLLAKSSTELGRGWNKRCLVYRKVAAFLRGLLQADVIHNAMIICPVTVIETWRKELNIVGVLVIKVFRYDRRTDCIALKSIATEFYALMNFCCPNLLGESGQFHENFSMPIERARYRGASAQLIKESIEASERLKKLVSPFVLRRTKEMLKNSASKLGTKHELTVWLKISAAQEYLYTNLIMSNVLGDEPGTPLAASQVARSICNHPVMVIGSDFEQRGESEEKKDALTDIIRKGLLARALSTIVDPSKMIRMDGKTPQKQRPMLIQVIKGEKATAVTKENQSRREITKPTRRVLSMPPEGFGVSKTLIELLAIHGGAFDPSLDESEIRQVRGHESVVGVSNHLHLFSQRESDPVTNEKHKYTAGPSRKRSELSMPVDAEILKSIRSTFIEIPIQQLYKISGTPHQISKAENLVKEFLQEMDSMVEEEISVPMEKVGLVIGSGGATIKKYKNLHPRSESGTTGRFVIRGSQNQAIRWGWKAFYSDLHVCLGDVAFYSRYCRNVLRQILR

SEQ ID NO: 17854 - protein, 677 aa, Oryza sativa
  Clone ID: TF_OSC25681j.C1.p1.fg
MRRGYEEIDDDEWSNHSFKPSRVLKRPSRGAQPDSQPPPPIDSFRYNPRPSSSSAAAAATATVVLSDDDDDFELGEEERLRRAGKSTRVLNRPQRQHSPPGRALPPRESFRYNPKPAKAAAAVSVSDDDDDGFDLEDDDFDIPSSRTSRPRRTAGRRLATAVADLSEEDDDLELADDDFDHPDPRPTRPRRATARRFVIKDDDDSDGDVGASEVDGVEAEEDDGVNWSELENEDDEDGDYGETKVEVEEGDVVGKALRKCARISADLRQELYGSSTRNCESYAEIDDSSVRIVTQVWSFDSMDVSEQDDVDAACTSEESEFEPILKPYQLVGVNFLLLLHRKNIGGAILADEMGLGKTVQAVTYLTLLRHLYNDPGPHLIVCPASVLENWERELKKWCPSFSIIMFHGAGRTAYSKELSSLGKAGYPPPFNVLLVCYSLFERRSAQQKDDRKALKRWRWSCVLMDEAHVLKDKGSFRWRNLMAVAQHARQRLMLTGTPLQNDLHELWSLLEFMMPDIFATGDIDLKKLLNAEDHELISRIKSILGPFILRRLKSDVMQQLVPKIQHVNFVTMDSEQFQAYNYAIDEYRGACQARSAKSTSNFSNNVVGLIPKRQISNYFMQFRKIANHPLLIRRIYSDKDVDRIAKLLYPKGAFGFECSLERATQELRKYNDFAIHQ

SEQ ID NO: 17855 - protein, 1037 aa, Oryza sativa
  Clone ID: TF_OSC900282j.C1.p6.fg
MDIIDLCSDSEEYFSPYSDTEDNLDFDDPNDGVNQVVLHNTAFGNNSSELLVGLDDDNWLNNTHALSSHRPAENRSDIIESSSGVNTDCQNSAWQYRTLPHTFMSSSYKSRPLSLTGGNNVESTHPTVKPNTVHYNGIGFPSPAIASGYKPYVSYGQGVSIDDDDDDVYEVLHQPFPFSHSSLGDKKIEEESTWKYNGFQTSSAYGIEMPTSARSTGGVSAYGGLNSHRIFPPSVPYNNSVNNFGVNGLGTQSHLNIEKRLFGRDERVVYDEALKQISQETTEENLPEGVMSVSLLKHQRIALAWMVSRENSSHCSGGILADDQERVEQSKFMSADVGSMKSVANLDEDDEVVIVMDKKQLKGESVNMLQDSTLFPSSEAASDAADLKPWASLPGSAVDRMVNAVKVEPKKKARVRPSSSSTLRSANRSTAGTLVVCPASVLRQWASELAAKVTESSKLSVLVYHGGSRTKDPTELTKYDVVVTTYTIVANEVPKQNSDEDMEEKNSETYGLCPAFSIGNKRKKDSEPKKKKKPKNSDADLDGGPLARVRWFRVVLDEAQTIKNHNTQVARACCGLRAKRRWCLSGTPIQNTIDDLYSYFRFLKYEPYSVYGSFRSMIKYQISRDATRGYKKLQAVLKIVLLRRTKETLIDGEPIIKLPPKTIQLSKIDFSKEERTFYMMLEEGSREKFKEYASAGTIRENYANILVLLLRLRQACDHPLLLKGKEKDLIDTGSVEVAKKLPKETVINLLGQLEGDYAICSRCSDPPEDVVVATCGHVFCYQCVHKSLKSDENVCPSPSCGKKLSAQSVFSPGVLRFCIADKLESGATTSSSVEADGSPSICESSYISSKIRATTDILNSIVNTPALTWSDTMESSPSEVAPSKAIVFSQWTGLLDLLELSLDSSRIKFRRLDGAMSLNLREAAVREFNTDPEVRVMLMSLKAGNLGLNMVAACHVIMIDPWWNPYAEDQAVDRAHRIGQTRPVTVSRLTIKDTVEDRILALQEKKRKMVQSAFGEDKPGGSATRLTIDDLQYLFGI

SEQ ID NO: 17856 - protein, 4245 aa, Oryza sativa
  Clone ID: TF_OSC4701j.C1.p12.fg
MASSQQVELEAAKLLQKLIQESKDEPAKLATKLYVICQHMKLSGKEQSLPYQVISRAMETVVSQHGIDMDALRSSRIPLAGGPQAGDSSGAMPKDKEIIGSQPPMVGTDASQSSAHAGLWNFPSGSADMARHSASISGRVPAGPNRSDVAGADIHQGSMSQKSGRSSGMESPASLQIEDTRSMNSHDSLKSDEKTSKKSSSKRKRVDPKAAGDLHSEDNSKSDAMSTGQNIRKGKQPGKAGTQGQLSRTVEHDPSHTLQVGNAQVPPLPSGAPFFRAHQEGPSASSARTIDKTKPSNPFTMAQISNFAEGLASGNIPAELQKSILGGANLLNASFGWNQNAQGPVMKNTQGSVPNLMRPGVNVEGKVNLGSQGTFNSMSASQMDYPTVPPYVSSSFGGGPQYLDKGKDLTSGNTGSELNSSKAGAQLGIMHMHFDTQMRYNFQGSPMQERHGIVRAPQRAGSSQMSQTSPSIPFKEQQLKQLRAQCLVFLAFRNNLQPRKVHLEIALGVGPPASEGGSAGQRGSESRMADGSGKENGNSQENPAIFGRQSDISRLQSTSTGSVADVDSASKDPEIVKKKIKIAEHEKSFEAENIQQTVPIQGTDSEMHSQETISPMPSGQLHYFQGDTRKTTPEIYKADAENLNRNLGWVGGQGPSPLGGNRHTSMEVGLLAKDEVSKEPFAVLRPHHMPVDGSNHNLSGKDQTPETAGNEIDNGSHMGEMIFERSADEGDEDLSEQDDLPLSPPKYTMTDKWILDHQKRRYEENKRKALELQKAHRRISASYEKLKENVSSSEDLSAKTKSVIELKKLQLLQLQRRVRSEFLQDFFKPNTTDLDRIKSVKKHRHGRRVKQLEKIEQKMKEERQKRIRERQKEFFADIEAHREKLEDSFKVKRERLKGFNRYVKEFHKRKERIHREKLDRIQREKINLLKNNDVEGYLRMVQDAKSDRVKQLLRETEKYLQKLGAKLQGSKSMDGRVSYASDSTANDIEDESYQPQHYLESNEKYYQLAHRYQMNGLRWLVSLYNNNLNGILADEMGLGKTVQVISLLCYLMETKNDRGPFLVVVPSSVLPGWESELNFWAPSINKIAYAGPPEERRKLFKEMIVHQKFNVLLTTYEYLMNKHDRPKLSKIQWHYIIIDEGHRIKNASCKLNADLKHYRSSHRLLLTGTPLQNNLEELWALLNFLLPNIFNSSEDFSQWFNKPFESNGDSSTEEVENELPEKIERLVRCWPSAYQKLLIKRVEENLGGIGAVKIEGYLPRHYLPSILRLCGKLEMLDRLLPKLKATGHRVLLFSTMTRLLDVMEDYLVWKKYKYLRLDGHTSGQERGALIDKFNNPNSQAFIFLLSIRAGGVGVNLQAADTVIIFDTDWNPQVDLQAQARAHRIGQKKEVLVLRLETVQTVEEQVRASAEHKLGVANQSITAGFFDNNTSAEDRREYLESLLRGGKKEEAAPVLDDDALNDLLARSEDEIDIFESIDKQRREEEMIYESSNIKSVKVVRRKGELGGLDTQHYGRGKRAREVRSYEDQWTEEEFEKLCQVDSPDSPQPGGISRDADVPKVVKLEVPPESSKEPEQAKKEPASSVGDSPPAKRRRGRPRRSDASLSPVTAPPNTGKQEAGTIIDGSSSAPTTTIHSVAPDVTIDSTALSATGNPDVGTEIKGTTPDGTIKPVICTDNKGTASIAVLEGSNAKEVGIPAHSVHEPVSSSAPHPPTPATSRGRKTQAGETPRRRGRKPKSLAASAGDVILSPVVAVGSGEAYASSVVSSYPQGNVSSSHANAMAGLQKDTIIYKPAALLPEGVKGTLTPSGGDKDEMVKTPLAEDIYAGTVTTSGNANSQLPMIAHNENAGLVQGGTDQNLSVATPTIPVVSEGSTKISEVVVADKPAEKQGARRRRKKTSGTGSEDTGVSTRQRAASRRLYGIGTADIAGTDMSTGEKIGIVKEIDGSCQDTSKGLPNIISPSYEKSGYDSQPSTPIAVPINEAALPSGFSEAHATHSELHPARESISSVGHEKLAGAHLEAPPSVSFQAPVQHETRKDYVGVHSEVATTHPETITTHSSVNPVIDHKLANVQFESHASLHTSGKDITTMPSEVDSGAPSKAPGRRRKGSAREPRTRSNSATAASERRARLAGSKQPDDIKMAEMSGNPSTAVCSSTQQQEDNTLKAAHATGSVGEEQNNAENRVREVSMPAGILEAKLELTKQTDQAGHNSEQEQEMVSAAKSASANDEEHKVHEVHQIIADHNALPSSAQYTLQDKIDSSADAGLVPCDKIASVVIAVDDQDPSNASDKDAPASTEDDGNGLQSECVHVDLVLAKQDNTKVEDTQKSNQPAEQGESLEMTGSKFRSETRLEKTEETVDKSGGDNLPTIEKNDDSPIERSSPSADKIAQVAYGGEAGTETTTVEAVSAMNSDGLQDVRNALSTHGLSTNDITVASEEHRDPESHLSGEVSMSGGSSELKLESLNQSESACQSGEVTLEDTHATLDIQIPALIESEEKKSPGGDVHGSEEQHMHEVLHNTVDGSISPSNREQDKLQVHIDTNTDVDIPSSDKDHSTDIVLAGCQAPCDASGKDKLSTCDASGKDMAAPTDDDLNCLQSEDTVIPVADAKDETMLVKAIQNDEMSMGSSHGLPATIQSTDSDRLAEEGESAEITGSKFSCGMEQEKMEEPLDKSVTDNQTSSQINDGSNNMDSQKVDSSLQAADGGDLLVSRGTSVETTTAINTDASDESISVSTQSVKEASTVEIGASTNDIAPACELRKDFESHVSGCVSKPVGLSELRLEELSQTKSVSQSIVANAEETSTRSDIETPAMDASESKSPESDVHELSERVEFMGPTPSANEKSNELHSQELVKMISAAETASTEGHREKDTCEVDHKIDCTIFSPIGDQDTRNRIDGDTDCGVPSCQRNAAFDSENEVSAEINLTGSQAPCDAPNKATPAPTEDDHNGQESEDTVIGAEQGTVEVEAMQIDGISKSYSSDSHATLQSSDSNQLVNSDSKFESSKKHDKTDETSNESRGDNPTHSCTNDDSHDKNLVGCSPSEDLNEDNSAQLADGDDLVGSKDTTAAHASGLKELTSGNYVASSSSHVVQDVTSISKMESVQAGSEEIYHGYSDETIHSARIKPVVGTEITENASVASAPVITIQPDIETEAGVTASLTVLEGSIAEEVDTQVESGHDLVTSTAPLSPAPLPGESHACTDVSCPVAVEVSETKLESANHTASQLGAACTETPNALLNTLIPALPESEETKLSGSDTDGKTIMAELASSSDEHDKVHEVGNETGDDNKLPSSVAEDAVQGEIDGSADMDSQIIAGSSEAEINNSTVATIADSQIPFDPSDKDTLAEDGNGLQREGTTVDVTGSKEDDMEAEEKQMDDSHLPAALQSTESSQPTEHAAPTQDDGNGLQCEGTTVDVSGSKEDIMEVEEKLIDDISGSPSSHLPVALKSTESNQPAEHAVPAEDDGDGLQSEGTAVDVVDSKKDDMEVEEKQIDISRGSSSFLPGALESAELNQPAEHTAPTEDHGNCLQSEGTAVDVPCSKEDNMEVEDQFDGISRGPSSFSPDTLESAELNQAAEHAAPTEDDGNGPQSEGTSVDVAGSKEDNIEVEEKIDDISRGSSSHLPDVLQSTPNQRAEQECLDNSDDVNTSVVSSHAPLSGPKFTCVKELEKADETLETSDAQVADEVCLQTNDGAHNMASGSCSTLEDKNEDSSAQIADCEDLLLRKGTTVDDLDGCVEGHSGLSTHSNDEVRNLVEIVKGMNDTTAGSEVHVDPESHVSDEVSMPVAPSELKVELKNQSEPACQFGAVIVEESNVSLGIQTPALAESEEMTSGGFMHGKEVCASEQTNIGAAAEPASTKDDHDMHEVDKEIVHCTISSPIGDQENLQGNIDGKMDVGLAACQTESDFVSGNDHSRETDLAGSQAPYDASDKEDTAADLIGPKQATLEIEKMQIDGIPEGPSSVPAVLQLTDSNQPAEQERLENSDSKFASTKDQGRVDGTSNLSGGDNAKCSLTNDDSQTVNLVGYSPSEDSNDDDSVQAADSDGVLGNKEGTDDVISAACTDDVSMLKTESIDRHGSDEVDHSTAPSAAIKQESGTEVTCDASVPVSESSISKEIGTSPECDDDQVATAAPHPPTPLSDATDVSADVQIPAGISEAKLEQPNETTSPSGAATEENNTVVSTQIPTLAESEDRTPADTAIQGTEVDSAEPASVSDDENKVTAADDSALPSTGPEDTADDKIDSSADASEK

SEQ ID NO: 17857 - protein, 912 aa, Oryza sativa
  Clone ID: TF_OSC400299j.C1.p7.fg
MPSTSKCNRISRVADEEEEEEIVAVSSDADESESESEVGSGAEEEDDDYVGESSDSAGGSGSGSGDGDGDEEGGRSDIGDGEGEGGGRRVRSACRGVRANDRERKSQNVDALVRGNLVVRRQPLIPRILSVSDAAAIARKPFKPPCQNGYSENNEQLARRLSARKRFVPWGSVQPFAVTNILPQSPAVSSDDSVENEESLPPGIEPLILWQPEGRDKENSNFSAIKVDHLLVRYLRPHQREGVQFMFDCVSGLLNDDGISGCILADDMGLGKTLQSITLLYTLLCQGFDAKPMVKRAVVVTPTSLVSNWESEIIKWLKGRVQLLALCESTRADVLSGIESFLKPLSRLQVLIVSYETFRMHSSKFERPGSCDLLICDEAHRLKNDQTLTNKALAALPCKRRILLSGTPMQNDLEEFFSMVNFTNPGVLGDATYFRRYYEAPIICGREPTASAEEKNLGSERSAELSAKVNLFILRRTNALLSNHLPPKIVEVVCCKLTALQTALYNHFIHSKNVKRLISEGTKQSKVLAYITALKKLCNHPKLIYDTIKSNNSGGSGFDDCLRFFPPELFSGRSGFVTLDLFAQLCRERRYPYIRLDGATSINKRQKLVNQFNDPSRDEFVFLLSSKAGGCGLNLVGGNRLILFDPDWNPANDKQVYQRQMSKEGLQKVIQQEQADGKMQGSSLSTEDLRDLFTFHEQIRSEIHENLKCNRCNKDGCMVLDGSKFDSAATEHEASNSGENSYIDIGGFGAISGCVQKMNSSNQQIGSPSEEDLGSWGHHSDPSTVPDTILQCSSGDEVSFVFTNQIDGKLVPVESMARAATHRTHEVTVNAEKEVGKINSSNVPGTERQSLLGKNLKMMGFNLKNSSMKFPTKSRRMLPNCLQGMNKTSTSSDHQQTKKLHVISDASDDDFV

SEQ ID NO: 17858 - protein, 1274 aa, Oryza sativa
  Clone ID: TF_OSC400376j.C1.p26.fg
MGGDEEEVAGDVRRKLGGYLRAVVSVSSDVGVEALAPLSPCSLFACGGVSLAPIPDGGGATPRSKGRACGGGGVVRQLRALVSSRCVEVEGRVLRAVARRGREGGGGDGEVEARAVVLFDVYLPVSVWSGWQFPRSRAAAAAAVFKHVSCNWDARNALLAFNWTSPDNPHCDDQYIWTCTDCHVLGCEVHQIPSVLNNDKSFDLHEIFKTLPSVMVEKRMQITRITPDEAASGVGIWSVPDDVLYKVLVRLKPRDLIRVAAACHHLRNLSASIMPCMKLKLFPHQEAAVEWMLRREQNLQVLEHPLYKGLCTMDGFPYYINVTSGEISTGSAPTVHDFCGGMFCDEPGLGKTVTALSLILKTHGTLAVPPPGMNVMWCMHKPDKKYGYYELSASNSSNGNIFLSGSKKLRKDVIREDTCSSESLNNGGSVVSTRSSRKRGRLVNPDLNMIAAHPSGKSPMSAPTGAHSTPATHVLKITKNLKHVRKNLMEAYSDGSVGNKRKRDATSELSETWVQCDACRKWRRLLDGTALDSSTAWFCSMNPDSARQKCSIPEESWDLKRKITYLPGFHKKGTPPGNEQNASFFTNILKEHAALIDSETMKALLWLAKLSPKKHIEMEAVGLTRPVLDARANIGKGARPYYKIFQAFGLVRKVEKGITRWYYPSMLDDLAFDSAALGIALEKPLDLIQRHVSSDTLNVYVWGDHKKPSAHNLAWDYDIVITTFSRLSAEWGPKKRSVLKQIHWFRVILDEGHTLGSSLALTNKLQMAVSLVASNRWILTGTPTPNTPTSQVAHLHPMLKFLHEEVYGQNYQSWDTGIHRPFEAQMEDGRSRLLQLLQRTMISARKQDLKNIPPCIKKITFLDFSEGHAKSYNELAVTIRRNILMADWNDPSHVESLLNPKQWKFRTTTIKNVRLSCCVAGHIKVAEAGQDIQETMDALMQLGLDPSSGEYQSIRYALLNGASCFRCRDWCRLPVVTPCRHLLCLDCVALDSEKCTLPGCGNHYEMQTPETRARPENPNPKWPVPKDLIELQPSYKQDDWDPDWQSTTSSKVAYLVNKLRSLKAENIKHGYSRNMANGACLSSQSSCQDHNNVEGRLPHTMPDKVIIFSQFLEHIHVIEQQLTIGGITYAGMYSPMPLGSKRSSLTKFKDDPACMALVMDGTAALGLDLSFVSYVFLMEPIWDRSMEEQVISRAHRMGATRPIFVETLAMRGTIEEQMLKLLQDSNACRQMVNKGTSSTDNEGARPHRSLHDFAESSYLAQLSFVKGSDAAEKL

SEQ ID NO: 17859 - protein, 877 aa, Oryza sativa
  Clone ID: TF_OSC410323j.C1.p1.fg
MAASVEAAAAAVVAPPASVGGDEVVVGGGGGGASEQARTLIGALNLLSRNLPLPPAVLHAVSSIYHGGDAWEGEGEEGGEEEVAAAAAAVGDGCGESGEGEEDRADASPGADEGCSFKAPYCHCDDWGVTLIQELEDAVLKNQGPYMSYSELTALKEDRFNTSIQHRLTELEGLPSTRGEDLQMKCLLELYGLKLLDLQKKVRTDISAEYWLHKKCAHPDRQLFDWGMMRIRYPFTMYGIGDSFSMDADDINRKKRFSEDSLFGIWEQQRISRLEEEEKNQAEIRKRKFFSEILNAAREYQLQVPASYKRKKQRNDGVLAWHVRARQRINRMEKSRLQVLKAGDQEAYLRMVEESKNERLKLLLGKTNELLEGIGKAVQRQKDAEHVSRPDGSELPKGSESDDCSQISGLKVESPDEESPSDVDADHHSSADHSKFNAGHRLDSTVHSIEEKVTEQPSALEGGELRPYQLEGLQWMLSLFNNNLNGILADEMGLGKTIQTIALIAYLLEKKEVTGPHLIIAPKAVLPNWSNEFKTWAPSIGTILYDGRPDDRKALREKNFGQRQFNVLLTHYDLILKDLKFLKKNFEEWFNAPFACEVSLNDEEQLLIIHRLHQVLRPFLLRRKKDEVEKYLPVKTQVILKCDMSAWQKAYYEQVTSNGRVSLGSGLKSKALQNLSMQLRKCCNHPYLFVEHYNMYQRQEIVRSSGKFELLDRLLPKLQRAGHRVLLFSQMTKLLDILEVYLQMYQFKYMRLDGSTKTEERGRLLADFNKKDSEYFLFLLSTRAGGLGLNLQTADTVIIFDSDWNPQMDQQAEDRAHRIGQKNEVRVFVLVSVGSIEEEILDRAKQKMGIDAKVIQAGLFNTTSTGWAVQHNLHRLD

SEQ ID NO: 17860 - protein, 63 aa, Oryza sativa
  Clone ID: TF_OSC422293j.C1.p3.gm
MKRATENKYLANLKTDIVEKALKYDRKEKMKEKEGIKWLWTLHLKKLGGALCDEMGMGKTRQP

SEQ ID NO: 17861 - protein, 1445 aa, Oryza sativa
  Clone ID: TF_OSC400007j.C1.p4.fg
MDRAARLARRGGGVTVAEYRMVRGRRRGGDAGPVVVIDVEDDGEDAADDSAGGGGGAAAAVKRRVVVPGAVATRTRSRRMAMAQQAPVTPPAAAEEAPSRRRKRKGAASAEAGGGGPSKRRVRSSGSAGGRGARKRKEAEADEEEAEAEAEEEAEAEAGTPARGESMEVSQVDGGGSSGRADDASHNGNGESRVCNADGIDQASEERPSVAGGDLIEEEHYGNGEASVAGGDRIEEHCGNVEASVANSNRDGGEIIAGEGTEDRGNTELSVVDPVNEELASDEDDYDDEMLEEKLVGDVIRAYSNGADLDTNGVDWEAEDEMEFADLDTNVVDWEAEDEMEFDDDNDNDADDDGDNFGGDADEGDKSVQMHDFSKVETQDLVSHNVNVSEVRPHEDEEAIKDEMESKGKGSLSFNEGSSYIEILDSDEEVKVVNDTGNALRRKPLVPAKLPIVPSCVAWRTRSSWGMKEERISYNTYFEVLSDEPKEDDDDTEVELDDEEDDENDDDCNSASCDEEDEEEEEEREEEEEEAQRRKQKKGIDSSDDEMIDDAVDCGIDWEEDYPEVDFTRPLTFQKDGSEAPVGSEAFTEQQKRSRFTWELERRKKLKLGMMTNHRLYERDLESDSNSSDSSQNRKNGCQGSGDHRTGRKRKNPLSKSGKKSSRMLKRQSLMKLLMDKMCSNDDGKSTPFDQKPQIEYSFKDLHPLVFSFGDDDPSPTDRSEQDAALDMLWADLDFTLESENIGTYYDDEGQEDSLLDHALAPITPCSRGKHEFIIDEQIGIRCKYCSLVNLEIRFILPLLASNFAEKPAWRNSSCLKTALMCPDLYEQTGTGDGQSQDFHINGTVWDLIPGVITDMYQHQREAFEFMWTNLVGDIRLNEIKHGAKPDVVGGCVICHAPGTGKTRLAIVFIQTYMKVFPDCRPVIIAPRGMLFAWEQEFKKWNVNVPFHIMNTTDYSGKEDRDICRLIKKEHRTEKLTRLVKLFSWNRGHGVLGISYGLYMKLTSEKVGCTGENKVRTILLENPGLLVLDEGHTPRNERSVIWKTLGKVKTEKRIILSGTPFQNNFLELYNILCLVRPRFGEMFLTKTRVGRRHCVSKKQRDKFSDKYEKGVWASLTSNVTDDNAEKVRSILKPFVHIHNGTILRTLPGLRECVIVLKPLPLQKSIIRKVENVGSGNNFEHEYVISLASTHPSLVNAINMTEEEASLIDKPMLERLRSNPYEGVKTRFVMEVVRLCEALKEKVLIFSQFIQPLELIKEHLRKIFKWREGKEILQMDGKILPRYRQNSIEVFNNPDSDARVLLASTRACCEGISLTGASRVVLLDVVWNPAVGRQAISRAFRIGQKKFVYTYNLITYGTGEGDKYDRQAEKDHLSKLVFSTEDEFSNVRNMLSKAEMEHCSKLISEDKVLEEMTSHDQLKGMFLKIHYPPTESNIVFTYNQIAPELS

SEQ ID NO: 17862 - protein, 791 aa, Oryza sativa
  Clone ID: TF_OSC400679j.C1.p1.fg
MGGNSVTMAEELKGAAVPMSLDGRQGGGSISAGVCVDGMGACLSACGIQVLKFWCIRLVIFYSFIGSKCCSEVQFAFCYILFLQALEAPRGEPRRTKTHWDHLLGEMAWLAKEFDAERKWKLSMAKRIAQRANKGVVDQATKDERKQKVFYKNQLELEERKKKALDKQLDFLLGQTERYSTMLAENLVDVRLQNQENDSLQTNQRSQQELAQENINASSPTDVDNVEIDDDYNSSLGEEPKDDEHTIDEDEAQITEAERNEELAALQAEADLPLDDILKLYTKNKVQAFSVSRESSPDGRDVFSDSDSKDLIKDPLNQANGCNDESDHTSSDEGISSEEADDYQSYSEFVKKNTVKCNGNISSVDAKLTELSVRSLVSTEMTEGTWTLGELGPSGGAEVGWMQAVGGGATISRDLGGAEFGCWPWCNEQQGPRRGCARAAVQRAAERRADDEDYVANDEGKDDEATLSEEEELAKKEDCDPLDEVKLLQKESEIPLEELLARYQKDGYADDDTTELENSPALSVEDVNANMPVDDESADTVEVNRDLSADTMKLTRDQSAETVKVNNDQSAEIVEGNNDTFEDHESAGMLGPEHVSGSVLQLETSEPIVQENTAKEGDVTDTKAMANGDNSDVIADAAAAARSAQPTGNTFSTTNVRTKFPFLLKHSLREYQHIGLDWLVAMYEKRLNGILADEMGLGKTIMTISLLAHLACEKGIWGPHLIVVPTSVMLNWETEFLKWCPAFKILTYFGSAKERKQKRQGWMKPNYFHSHQEFKDWFCNPISGMVEGQDK

SEQ ID NO: 17863 - protein, 1006 aa, Oryza sativa
  Clone ID: TF_OSC400288j.C1.p5.fg
MGKERGREEQVATVRAVLGDGTPEMDIIRALHMAGDDPTRAINILLDFPHGPPPPPPPSPSPSPSPPAGKPTKPHPESTPPTKTPARSKPAAAAAEKPRPSVAPESTNGGGGGEHWWLVGSVEMAGLSTCKGRRVASGDAVTFSFPNSPVAAAAGGKSRSGRPALVSCSSEIMRFSTPRHGEVGRIPNEWARCLLPLLKEGKIKIDGVCKSAPEVLSIMDTVLLSVSVYINSSMFHGQKQSTPKAARAATEDSTFHPLPALFKLTGLSPFKKAAFTPEDLYSRKRPLETKSSAPATKLTTEKLRLSSDGNEDDHAERIVSDSELDDIIGISDSSALEERDPPDALQCDLRPYQKQAFYWMMQLEKGSSSQDAATTLHPCWEAYKLEDKYGLVILFEPFLYYNDFLKLTLGRLYCIHFRRELVLYLNVFSGDATTEFPSTLQLARGGILADAMGLGKTIMTIALLLADSSKGCITTQHSTHICEEASGLGELPVQPHDDVKKLAIPFSFSKLRKPKTPLIAGGNLIVCPMTLLGQWKAEIEAHATPGSVSIYVHYGQNRPKEANLIGQSDIVLTTYGVLSSEFSNENSTESGGLYSIHWFRVVLDEAHMIKSPKSLISLAAAALTADRRWCLTGTPIQNNLEDIYSLFRFLRVEPWRNWSLPILILPPANIEVKYCDLSETEKDFYDALFRRSKSFNVGSRGDTQEFADLNKLAKRFLHGGNGAVNGDSSLPSRAYIEEVVQELQKGEGECPICLEAFEDAVLTPCAHRLCRECLLSSWRSASAGLCPVCRKSMSKQDLITAPTDNRFQIDVEKNWVESSKISFLLQELEVLRTSGAKSIIFSQWTAFLDLLQIPLSRATENFVVPNHGYYENSCISTRHNFSFARLDGTLNLQQREKVIKEFSEDKSILVLLMSLKAGGVGINLTAASNAFVMDPWWNPAVEEQAIMRIHRIGQTKSVSIKRFIVKGTVEERMEAVQARKQRMISGALTDQEVRSARIEELKMLFS

SEQ ID NO: 17864 - protein, 821 aa, Oryza sativa
  Clone ID: TF_OSC400606j.C1.p2.fg
MASTSRRGGGEDNDDEPYLLGFIVANAVGLQYYQGGRAITRRESVGLVREPHNPHDANAIRVDNARGEKIGHIGRRAAAALAPLLDAGHVAAAHGIVPKPASKRLYSLPCQVHLFARPPHAALVAAALAASGIDLIHVDHPEFALSESAIVQEQQTKRSRGDVDRLFSHVGKGGRARIAPMEAPRDVVVSELFEHQKAALGWLVHREESCDLPPFWEEDNDGGFKNVLTNQKTNERPPPLKGGIFADDMGLGKTLTLLSLIGRSKARNVGGKKARGAKRRKVEEAVEEESRTTLVVCPPSVFSSWVTQLEEHTKTGSLKVYLYHGERTKEKKELLKYDIVITTYSTLGQELEQEGSPVKEIEWFRVILDEAHVIKNSAARQTKAVIALNAERRWVVTGTPIQNSSFDLYPLMAFLRFQPFSIKSYWQSLIQLPLERKNNGIGLARLQSLLGAISLRRTKETESGSKSLVSIPPKTVLACYIELSAEEREYYDQMELEGKNKLREFGDRDSILRNYSTVLYFILRLRQLCNDIALCPLDLKSWLPGSGSSLEDVSKNPELLKKLASLVDDGDDFECPICLAPPAKTVITSCTHIYCQTCIMKILKSSSSRCPICRRSLCKEDLFIAPEIKHPDEDSSVNLDRPLSSKVQALLKLLRRSQSEDPLSKSVIFSQFRKMLILLEGPLKAAGFNILRLDGSMTAKKRSEVIRQFGCVGPDSPTVLLASLKAAGAGVNLTAASTVYLFDPWWNPGVEEQAMDRVHRIGQTKEVKVVRLIVKDSIEERMLELQERKKKLISGAFGRKKGGKEHKEIRVEELQMMMGMK

SEQ ID NO: 17865 - protein, 856 aa, Oryza sativa
  Clone ID: TF_OSC401643j.C1.p6.fg
MSLHSLKETLQSSSFSQPQSESQPRSPPPLLARRPPKTSLSQQLLRLDASSSSSSFSVSPPPPPRTSPTSDAAADDAPPLPEEEDEVPCIRPRASLPPAASLDSRGPYEPLALSPPGERPVVQVPSSINCRLLVHQRDGVRFLYNLYRNNHGGVLGDDMGLGKTIQTIAFLSAVIGKDNDHGDQLVEGRKIAPILILCPTSVIRNWENEFAEWARCSVAVYHGPNRDLVLQKVETQRLEIVITSFDTFRIHGKILCGISWDLVVVDEAHRLKNEKSKLYTACLEITTRKRFGLTGTIMQNKIMELFNLFDWIVPGCLGDREHFRVYYDEPLKHGQRFSAPERFVQVADKRKKHLVSVLSKFLLRRTKEETIGHLMLGKEDNIVFCRMSDVQKRVYRRMLQQPDVQILINKDLPCSCGSPLTQVECCKRTEPHGIIWSYLHRDNPEGCSLCPFCLVLPCLGKLQQISNHLELIKPNLKDEIEKQKKDAELAAAVFDTDIELVGGGAKSENFMGLSDAEHCGKMRALERLLSLWTLQGDKILLFSYSVRMLDILEKFLIRKGYCFSRFDGTTPMNARQLLIDEFNRCPSKQVFLISTRAGNLGVNLVSANRVVIFDPSWNPAQDLQAQDRSFRFGQRRHVTVFRLLGAGSLEELIYSRQIYKQQLSNIAVSGKIEKRYFEGVQDDKKFQGELFGICNLFRDLSDKLFTSEIIEMHGEHGKGNTAETIGIREIVDTNIFGTQDQMKSSMTAIHNENKNLYHCGIVYAHRNEDVVNTRTNEASNCAEDKTVPRHLEELQSKKNETMHTIKAKSYSLVQKKKEFSRIASFMGMNDLEFSKWLLSVSPLQRHEVLDRYRNAK

SEQ ID NO: 17866 - protein, 2329 aa, Oryza sativa
  Clone ID: TF_OSC18580j.C1.p1.fg
ERRHEKKTDDGETNSSRSLSLSDNNDEKKKDKFSSGDEKEDHEKQLKQIRLDMEALRDDKTQMEVILDEKIDEVRKISSKVNDLEVQLRREKDECHRMTSKMKKFIKAHARFLKAQEEVKRSQARFERLGDLLASDILKRGANEEGSSVNEDLNERSPNTAATKKRSIPYSTSEEAKAVKKRRERDSDTMTRSDKYRSDVTDFDKTSKGTEATKSLYLKKKLWEDEKSKYFVNLQVKGSPVRHVLPSTGMAAHAIDDLNEAIELEDRHESIDALLENDADDKTRSPAIPLQPPPVVQNAYEQSGFEHISFDIPFGLSIYCAKFPLTQLAGSTQATRFAAARQIGEIAKSHPQELNVLLKKDICIIIILRRKRVSPYLRSKNWDTRVAAAHAIGAIAENVKHTSVKDLFASAEAEKHASGLSGIGDVGSTLRHADTTATSELAFGSFDINRVLEFGSPLLASGGQEYDIANDNGKNPAERLARQKQNLRRRLGLDVCEQFMDFNDVIKDEDLLAQKNYWGANMQNNGFYSFNTGQNIQHLVASMVPSAIALEHSVGMALSSICDDLITPLTFFQDTVDAITDEDNLEYSENGRWPFQQFVDQLIHDMFDPIWEVRHGTIMALREILTHQGACAGVYFPDLNSPFADLDDKNNLDSLKRAHGIDLNEDIDSGQLEPVLKRQKKEESNPEVMDIQLDKEPSNGDYSKTEASLSTEPTVSSGEPNLAHAKVESPFQVDGSANPSKVDPYCTPPHETLNSMPKLSSTHLPENSKFIKLMKLANYSAVKNWEFLQDCAIRFLCVLSLDRFGDYVSDQVVAPVRETCAQALGAVLKYMHPTLVCHTLNILLQMQRRQEWEVRHGSLLGIKYLVAVRQEMLKDLLNYVLHACKAGLEDPDDDVRAVAAEALIPAAASLVRLNDQMLHSIVMLLWDILLDLDDLSPSTSSVMNLLAEIYSQPEMVPKMLGTTAIGGDNEFDLNSVTLVAGEEKMGSNDNPYVLAALTPRLWPFMRHSITSVRRSAVRTLERLLEVGNTRNSAKLWLASILGDALQVVFQNLLLESNDEIIRSSERAWKLLLQCPTEDLESAASSYFSNWVQLATTPYGTALDSAKMFLPVALPRGSRSRAAAKIKSARLEHENTRMISFGSTGENTSQEKHSEASLSVSKIIVGSDSDKSVTHTRVLTSMALGLFASKLPEGSWQVVLGPLASDLMSLSGVQRQVASMVIVSWFKDLRKSDPAAVGTLLAFLSSLKGWMLDLLACSDPSFPTKDSPLPYAELARTYRKMRNEANNLFQSIESCALLKEYTSNLNFEADMLSVDDAINFTSKLLLPSEPDFSLDSDKIVLNNIESAKQGLLSTSGYLKCVQNNLHVTVSSLVASAVVWMAGLPSKLNPVILPLMAAVKREQEEILQDKAADALAELIFSCVGRKPGPNDKLTKNLCTLTCTDASETPQAAVINSIQVIEDQNLLSIGKRFSNHKSRGQMTSGGESKSEGFISRRGSELAFKHLCEKFGASLFEKLPKLWDCLTEFLKPVKTGDDLMKEDPSIAQLGRSCEDKEPQSLINNIQVVRSVTPHLAEPLRPQLLSLLPCILGCVRHPHVAVRLAAARCITSMAKSLTANVMVIVIENVIPMLSDSSSVCARQGAGMLLSLLVQGLAVELVPYAPFLVVPLLRCMSDPDGSVRQTVTHSFAALVPLLPLAKGSLLPDGLSERLSSSAEDAQFLEQLLDNSQIDDYKLSIDLSVELRRYQQEGINWLAFLRRFKLHGILCDDMGLGKTLQASAIVAADIAESRARNDEQDPKSLIICPSTLVAHWEYEIEKYIDSSIMKPLQYIGSSQDRIILRSQFDKFNVIITSYDIIRKDIDFLENVFWNYCVLDEGHIIKNSRSKITSAVKQLKAQHRLILSGTPIQNNVLELWSLFDFLMPGFLGTEKQFQATYGKPLLAAKDPKCSAKDAEAGILAMEALHKQVMPFLLRRTKDEVLSDLPEKIIQDRYCNLSLLQLKLYDKFSNSNAKQEISTIVKENELDQSTSQPKATRHVFQALQYLLKLCSHPLLVTGESPPDYLVDLLKEIGMGTGDELHDLHHSPKLVALQEILQECGIGSEISSPDASAAIGQHRVLIFAQHKALLDIIEKDLFQSHMRSVTYLRLDGSVEPEKRFEIVKAFNSDPTIDVLLLTTHVGGLGLNLTSADTLVFMEHDWNPMKDLQAMDRAHRLGQRKVVNVHRLIMRGTLEEKVMSLQRFKVSVANAVINAENASLKTMNTDQLLDLFASTPASRKASVLPSSSGGDQSKDSKGKSGGKGLKSILNGLDELWDQSQYADEYDLNQFLAKLNG

SEQ ID NO: 17867 - protein, 2482 aa, Oryza sativa
  Clone ID: TF_OSC400740j.C1.p2.fg
MLGPPRRGPAYKTKLCALWQRGNCNRDTCSFAHGHGDIRRPPSSRGAFTHHPDSADMLTQLLPEDSMTFFINSSLGISTICVDDNACAVPEGELGEEIIEPVISEAGLIGGFHLGGGIPLEESPGVIVPFMIEGHLLEKEILAIHDLLAGRECERRHEKKTDDGETNSSRSLSLSDNNDEKKKDKFSSGDEKEDHEKQLKQIRLDMEALRDDKTQMEVILDEKIDEVRKISSKVNDLEVQLRREKDECHRMTSKMKKFIKAHARFLKAQEEVKRSQARFERLGDLLASDILKRGANEEGSSVNEDLNERSPNTAATKKRSIPYSTSEEAKAVKKRRERDSDTMTRSDKYRSDVTDFDKTSKGTEATKSLYLKKKLWEDEKSKYFVNLQVKGSPVRHVLPSTGMAAHAIDDLNEAIELEDRHESIDALLENDADDKTRSPAIPLQPPPVVQNAYEQSGFEHISFDIPFGLSIYCAKFPLTQLAGSTQATRFAAARQIGEIAKSHPQELNVLLKKDICIIIILRRKRVSPYLRSKNWDTRVAAAHAIGAIAENVKHTSVKDLFASAEAEKHASGLSGIGDVGSTLRHADTTATSELAFGSFDINRVLEFGSPLLASGGQEYDIANDNGKNPAERLARQKQNLRRRLGLDVCEQFMDFNDVIKDEDLLAQKNYWGANMQNNGFYSFNTGQNIQHLVASMVPSAIALEHSVGMALSSICDDLITPLTFFQDTVDAITDEDNLEYSENGRWPFQQFVDQLIHDMFDPIWEVRHGTIMALREILTHQGACAGVYFPDLNSPFADLDDKNNLDSLKRAHGIDLNEDIDSGQLEPVLKRQKKEESNPEVMDIQLDKEPSNGDYSKTEASLSTEPTVSSGEPNLAHAKVESPFQVDGSANPSKVDPYCTPPHETLNSMPKLSSTHLPENSKFIKLMKLANYSAVKNWEFLQDCAIRFLCVLSLDRFGDYVSDQVVAPVRETCAQALGAVLKYMHPTLVCHTLNILLQMQRRQEWEVRHGSLLGIKYLVAVRQEMLKDLLNYVLHACKAGLEDPDDDVRAVAAEALIPAAASLVRLNDQMLHSIVMLLWDILLDLDDLSPSTSSVMNLLAEIYSQPEMVPKMLGTTAIGGDNEFDLNSVTLVAGEEKMGSNDNPYVLAALTPRLWPFMRHSITSVRRSAVRTLERLLEVGNTRNSAKLWLASILGDALQVVFQNLLLESNDEIIRSSERAWKLLLQCPTEDLESAASSYFSNWVQLATTPYGTALDSAKMFLPVALPRGSRSRAAAKIKSARLEHENTRMISFGSTGENTSQEKHSEASLSVSKIIVGSDSDKSVTHTRVLTSMALGLFASKLPEGSWQVVLGPLASDLMSLSGVQRQVASMVIVSWFKDLRKSDPAAVGTLLAFLSSLKGWMLDLLACSDPSFPTKDSPLPYAELARTYRKMRNEANNLFQSIESCALLKEYTSNLNFEADMLSVDDAINFTSKLLLPSEPDFSLDSDKIVLNNIESAKQGLLSTSGYLKCVQNNLHVTVSSLVASAVVWMAGLPSKLNPVILPLMAAVKREQEEILQDKAADALAELIFSCVGRKPGPNDKLTKNLCTLTCTDASETPQAAVINSIQVIEDQNLLSIGKRFSNHKSRGQMTSGGESKSEGFISRRGSELAFKHLCEKFGASLFEKLPKLWDCLTEFLKPVKTGDDLMKEDPSIAQLGRSCEDKEPQSLINNIQVVRSVTPHLAEPLRPQLLSLLPCILGCVRHPHVAVRLAAARCITSMAKSLTANVMVIVIENVIPMLSDSSSVCARQGAGMLLSLLVQGLAVELVPYAPFLVVPLLRCMSDPDGSVRQTVTHSFAALVPLLPLAKGSLLPDGLSERLSSSAEDAQFLEQLLDNSQIDDYKLSIDLSVELRRYQQEGINWLAFLRRFKLHGILCDDMGLGKTLQASAIVAADIAESRARNDEQDPKSLIICPSTLVAHWEYEIEKYIDSSIMKPLQYIGSSQDRIILRSQFDKFNVIITSYDIIRKDIDFLENVFWNYCVLDEGHIIKNSRSKITSAVKQLKAQHRLILSGTPIQNNVLELWSLFDFLMPGFLGTEKQFQATYGKPLLAAKDPKCSAKDAEAGILAMEALHKQVMPFLLRRTKDEVLSDLPEKIIQDRYCNLSLLQLKLYDKFSNSNAKQEISTIVKENELDQSTSQPKATRHVFQALQYLLKLCSHPLLVTGESPPDYLVDLLKEIGMGTGDELHDLHHSPKLVALQEILQECGIGSEISSPDASAAIGQHRVLIFAQHKALLDIIEKDLFQSHMRSVTYLRLDGSVEPEKRFEIVKAFNSDPTIDVLLLTTHVGGLGLNLTSADTLVFMEHDWNPMKDLQAMDRAHRLGQRKVVNVHRLIMRGTLEEKVMSLQRFKVSVANAVINAENASLKTMNTDQLLDLFASTPASRKASVLPSSSGGDQSKDSKGKSGGKGLKSILNGLDELWDQSQYADEYDLNQFLAKLNG

SEQ ID NO: 17868 - protein, 1342 aa, Oryza sativa
  Clone ID: TF_OSC401858j.C1.p30.fg
MAMARSILLLLLLAAAASASADAPFLVAHKKVSLSRPKPGVERLAVSLDLYNQGSATAYDVSINDDTWPKEAFELVSGEMSKTLERLDPGVTASHAFVLETKVQGRFQGSPAVITYRVPTKAALQEAYSTPILALDVLAERPPEKKFEWAKVTSSMEDDDDDQRLLHSLGVTSADIHDIERRIISQATTDPADSSGPTINGGHQPDDALAKLHHKLRSVQIEIDAVASTIKGAKLKQPSGNKPHEHKGKDQPDHHGAGHLQQALAADRLTSLRKAKAQIQKEILQSHPSPSASNRKDKMLAMLVQDEPRHKKPPVGPKNIVKRPMKTVTYDDDNNFDAVLDGASAGFMETEREELIRKGLLTPFHKLKGFEKRVELPEPSHRQDDSAGQTEEAMEASRIARVAQSLKQIAQNRPATKLLDSESLPKLDAPAAPFQRLGKPLKRPVSPSSDEQEKKRPRNKTKRPLPGKKWRKANSIKESSLDDNDVGEAAVSVSDDDEDQVTEGSDELTDVTLEGGLRIPGTLYTQLFDYQKVGVQWLWELHCQRAGGIIGDEMGLGKTVQVLSFLGSLHNSGLYKPSIVVCPVTLLQQWRREASRWYPKFKVEILHDSANSSSKKSKRSSDSDSEASWDSDQEEAVTCSKPAKKWDDLISRVVSSGSGLLLTTYEQLRILGEKLLDIEWGYAVLDEGHRIRNPNAEITLVCKQLQTVHRIIMTGAPIQNKLSELWSLFDFVFPGKLGVLPVFEAEFSVPITVGGYANATPLQVSTAYRCAVVLRDLVMPYLLRRMKADVNAQLPKKTEHVLFCSLTTEQRATYRAFLASSEVEQIFDGNRNSLYGIDVLRKICNHPDLLEREHAAQNPDYGNPERSGKMKVVEQVLKVWKEQGHRVLLFTQTQQMLDIMENFLTACEYQYRRMDGLTPAKQRMALIDEFNNTDEIFIFILTTKVGGLGTNLTGANRIIIYDPDWNPSTDMQARERAWRIGQTRDVTVYRLITRGTIEEKVYHRQIYKHFLTNKVLKDPQQRRFFKARDMKDLFTLQDDDNNGSTETSNIFSQLSEDVNIGVPSDKQQDQLYAASATPTTSGTEPSSSRHGQGKEDHCPDQADEECNILKSLFDAQGIHSAINHDAIMNANDDQKLRLEAEATQVAQRAAEALRQSRMLRSHESFSVPTWTGRAGAAGAPSSVRRKFGSTLNTQLVNSSQPSETSNGRGQSLQVGALNGKALSSAELLARIRGTREGAASDALEHQLNLGSASNHTSSSSGNGRASSSSTRSMIVQPEVLIRQLCTFIQQHGGSASSTSITEHFKNRILSKDMLLFKNLLKEIATLQRGANGATWVLKPDYQ

SEQ ID NO: 17869 - protein, 1667 aa, Oryza sativa
  Clone ID: TF_OSC8410j.C1.p2.fg
MASPPPFDICGDLDDDPTPPAPTPLAAPTPNGLNDRLLRLTRTHQRGPSQNPNPNPNPNPKPPPPPPPQEPEPAKVKLAGRRRLCKLSTAGDESAGDDDSIRDILDDLTTRLDSLSVDRPTARPRPHVSPLPCALHADPDPSQSQLNDGTKPSSSFVDCDDDDDDAGGAYGGFGVKEEVTRKVFKASSSFGGRGNDDKMKAKGAYAFDTVSRKTTTESKASKFFGDYDDEDDIDQDAENGKENHADDVGWEKTEDFKMEPTGTGVTRKPYNLPGRIFNMLYPHQREGLRWLWVLHCRGTGGILGDDMGLGKTMQVSAFLAGLFHSRLIKRVLVVAPKTLLTHWTKELSVVSLKDKIRDYSGPNANARNYELKYAFKEGGILLTTYDIVRNNFKMIKGNFTNDFDDEEETLWNYVILDEGHIIKNPKTQRAQSLFEIPCAHRIVISGTPIQNNLKVQSKELRERIKPYFLRRMKNEVFLDSGTGEDKKLAKKNELIIWLKLTSCQRQLYEAFLNSELVHSSMQGSPLAAITILKKICDHPLLLTKKAAEGVLEGMDAMLNNQEMGMVEKMAMNLADMAHDDDDVELQVGQDVSCKLSFMMSLLQNLVSEGHNVLIFSQTRKMLNIIQEAIILEGYKFLRIDGTTKISERERIVKDFQEGPGAPIFLLTTQVGGLGLTLTKAARVIVVDPAWNPSTDNQSVDRAYRIGQMKDVIVYRLMTSGTIEEKIYKLQVFKGALFRTATEHKEQTRYFSKRDIQELFSLPEQGFDVSLTQKQLQEEHGQQLVMDDSLRKHIQFLEQQGIAGVSHHSLLFSKTAILPTLNDNDGLDSSRRAMPMAKHYYKGASSDYVANGAAYAMKPKEFIARTYSPNSTSTESPEEIKAKINRLSQTLANTVLVAKLPDRGDKIRRQINELDEKLTVIESSPEPLERKGPTEARTLKDWESLKAKEEEAGGRARGEGRKGSELNSTPFRLNSTSSTLVVFKVPSTFTTGRGALAAAAANGRFVPMAPTSQPQPQQEVEVEVDEDEELVNMVVEAGVGAIKMKMKIPRRVLGSLYPHQRDGLAWLWALHCTATGGILADDMGLGKTIQEGGILLTSYHIVRNNYMLLRGNGNGNNVDNNEEEPLWDYVILDEGHIVKNTKTQRAQSLFQIPSAHRIVLTGTPIQNKLKMSWFELRYEKPILCGNDKNATDQEKQMASNAAKRRLYEAFLNKDPVRSQTGALKGSSLEASTILRKICDHPLLLTKRDTDDFLEEMGAMLNNRDMCMVERILEDNLYADKRLQIVQGASCKIAFILPLLRNLVEEGHYVLIFSQTRVMLNLIQDAVSIEGHKFLRIDGTTKISERKKILKDFQEGLDSPILLLTSHVGGLGNTLTKADRVIVVDPAWNPSIDNQSVDRAYRIGQTKDVIVYRLVTCGTIEEKIYKQQIFKGGLFRTATECKEQPQFYNQDLYLQNEQEYSSLPPHGFDASLTQHKMQVENGQQLVMDESLKKHIQFLEQQGIAGVNRHGVLFCKTETTATLGDDGAINRKVRDIMVRRCYAPWEHICRDVEKKSLIDQVKEMSKKMDGLGDTMGRIVALEEEYAAELIGMLHENRWERSHLEKIRMQIDDLHEEHMAKFDEMLERIKRMELADEGELIAKFGEMVERMRQRCDMDRLSLPLLSSTLVA

SEQ ID NO: 17870 - protein, 1438 aa, Oryza sativa
  Clone ID: TF_OSC102263j.C1.p2.fg
MPRRKGKGKGVEDEVEVYEPASPPERVLIILDSSEDDLDLQEVRRSLMITGRGRARAAERVGEEAPRGSGRRAAPVVASRRRRRRSRSRSRSPRAARPRAESSRRPTARRARARARSPSLEIIDVDSGSDRGVVRVKEEPRSGSDSDYNGARGRARARARAPVAATAAKKKKRKRGKEAPSRAQESREVVRVKEEPNSDGNGAGGRARARSPVAAAAKQRKRGGREAPSRAQESRVPVQIKEEPYSGSDSDGNVAGGRAVVPAADAKQGKRGKKTPSRGKGRRVVVRETSTPAAPSNGAPSVGRGKGRGPGRGRQRSKGAVRGRATPVNRVSTGVGSRTRSRLAEQGRAFAQEEEEQVEEREEEEEEEEQGRAFAQVKEEQVEEQEEDEEEGEEEMEMEVEVEVRSDDNDHGNGGIRGEGGGTDDVAEIEEEELGTDEDETSDDSDENFSDEEGDEEELEEEEEEEEEEDDDDDDEEEEEPGDAPDQPGEAGEESPPRSRIMAMPLMGKRMFEGFSFLQQVDTSTGRDIRARTRSNFKRKKLLDKKLLKRGTFAKPYCIDVSSSGSEEDVPQPEQSAYGGDCADDDGGSDGNEEHRAVKRRKLNRRQSAHSDSEEDTTFVCDVKEGSGSRRVQEGAPRRQVKKEGSNKKKDGSTPQCVRNNGPKVGRQTNGLNGQGGVSFKRNVKIAQRRKRRQATADQEKYGHLLDPMFNEIESNQYEPVPEEQIDRRLPLVFAFGDDDKLEEKSKHDKLQDEDELWKEFDFALESINVCSHNCEEGEKEDEQEIPADKAASCIQGKHELIIDEQIGLRCKHCNFVDLEIRFVLPSMVKSCTERDMRKDHELDLFFDDILTSAGYEGPRDFGGKKTGLVWDLVPGVREDMFPHQQEGFEFMWRKLAGGTSIEQLRNNANTIEGGCVISHAPGTGKTRLAITFVQSYFAFFPECCPVIIAPRGMLATWEQEFRKWKVKVPFHVLNSKEINWKEDRTIKQLAIMDENLAQSLARNKLDHKFRRKLKLASWRKGSSIIGVSYTLFRKLANQSSMDGNMVRNLLLEMPDLLVLDEGHTPRNKKSLIWKVLEEVRTKKRIILSGTPFQNSFLELSNVLYLIRPKFARHFASKSFKKIGLEDYWTSLTLNNITEKKIDEIRQILDPIVHIHNGDILQKSLPGLRESVVILNPLPHQKEIITAMENTVTMGTLDAEYKISLASIHPFLVTCAKLSEKETSSVDVSLLKSLRPNPCVGVKTKFVLEIVRLCEAMKERVLVFSQYLEPLSLIMDQLSKMFNWTEGEEILLMSGNVLVQNREALMEAFNDMKSNAKVMLASTKACCEGITLIGASRVVLLDVVWNPSVGRQAIGRAYRIGQEKIVYTYNLITEGTKEKDKYDRQAKKDHMSKLLFSKEPHAAGFNLSQEVIFNDKILEAMTSHRELKDMFVKILHSH

SEQ ID NO: 17871 - protein, 948 aa, Oryza sativa
  Clone ID: TF_OSC400255j.C1.p28.fg
MDYEPVLKCLKKLPGVAVQDIPYKTRNVIKNLPKFFAESCASDKEVDGLLMKLPQHLRDALLPFQLEGVKFGLRRHGRCLIADEMGLGKTLQHFSLLSKILQCTNVEIISNYLFQLLQSPCVSILHLISLMIAAMIYDIFCVHHLNGFKIPEIYLTVCFLLGDNRPFDIYHQINMLWPHLLGSNKFDFANKYCLLHTVQGCNGRTYQDFSKGARLTELNVLLSQTLMIRRLKEHLLNELPPKRRQIIWLKLNASDIKTAISCIKGVNTSDEIPTIASPDNSNDSEEVNMEEGFKISKIGLSAPYKHCAHFLVFPFHLPTADGCKKSPRNLTTQEIGIVKIPGFSEWFLNHFIMKEPADNGSLDSQSNCQKTIIFAHHLKVLDGVQVFVTEQRIKYVRIDGSTSPRERKDAVDSFRLNPEVMVAIIGITAGGVGLDFSSAQNVVFVELPKSASELLQNTLDESHWLHLNQSLFRVSSLMNGKKDAIREIEVLPWSVTIDKIFLLSKVDQVYHLEESSKSEGKSQLGFLPLENHNADCGHGPGENVESDDMSIENFPGLNDMNFESDFFSIRTIPLHFEDDSLHTVMQNCPSPTAHEEIAFDSSSISQASVICPSMSSAKSVKVSQHTGRIHLYICVPGHDSRPRPLFENFLPEEVESPLCSDNTMKTSNRLLKRDPAFCNTFKAFVKEWLALRPIEQKRLLGKPLQLPLSLELCYLKDTNNHSTKGLLKGGSKRRVTPWCDISNPLPENAEWRKVVLHNGTSREREYTQGWTVHDEPLCKLCQGPCNGRLAKSPEYFEDLFCGLPCFEVFRSRTSGRFARQALFEIEHGICSKCKLDCHELVKNIRPLCKKKREEYIRNVAPNIASRLKLLDKLVHEPNEGNAWHADHIVPVYKGGGHLCTAKGAKRLTKKAKELLKNTVNNQQKDEASEAAEEDDKSLLVVVPGSAYS

SEQ ID NO: 17872 - protein, 464 aa, Oryza sativa
  Clone ID: TF_OSC414036j.C1.p1.gm
MQCDGGAYMRCADAHRCKSAPIDSTNPPVLSPAVLVDSNQNSEADREVAAPPSCSPPVAVSEEVKIPPPPSLPSAWSAPCSTTPAGADDIVHFFSPYGTVVDHQITQKDENKLSEGSGFWCAKTRHDSLAQVLKEGGVLLITYDLVRLYNEELNGMSSKSSKMRRACPSWDYVILDEGHVLKNPNTKNAAALKSLSRGQTVVLTGTPEFRKMVRPYFLRRTKESIESLLPNKADLVIWLKLTPYQVCIAVEAGDDVEFVPVEIGGTTRQSRAGALPRAGRGKKIGDSPSPPPPWPLAFTSASAPASAGLPLSRTGSVAPLRHGFGSAVVTAPPAEDEDFATAADLQFEPPLKVVKYPDPILRARNKRINTFDDNLRSLTDEMFDVMYKTDGIGLSAPQVGVNVQLMRPDNVKIDAQDVTGAKIKVKLSGLSARVFQHEFDHLQGILFFDRMSLDVLESVREGLK

SEQ ID NO: 17873 - protein, 667 aa, Oryza sativa
  Clone ID: TF_OSC10297j.C1.p4.fg
MAGLGGGWGGGYDDDDDWGLSAEQLDQLERDAYRKLAERKASSSAASTATSPLPSAAYSPVKNSHHHPASRVSQESCFGKVESLSPSRLSQPNASGNAVNNSQGNMSKVSVHLFLHSTGVIAAKFQYHQKLVDAVHKIPKASWNGKERVWMFPHSSLSVAEEVLSTVPGIAVEVQKLDPLVKRALTASLYAGDLRDLYGKIPTDVESKLMPFQREGVRFALQHGARTLIADEMGLGKTLQAIAVASCLHDAWPVLVISPSSLRLHWASVVLPQTGGSNKAGYRLVYSNTKGDFNLDGVFNVISYDVVPKIKDMLLDLDFKIVIADESHFLKNAQAKRTMHSLPVLQKAKYVVLLSGTPALSRPIELFTQLQALYPTVYKNVNEYGNRYCKGGFFGLYQGASNHEELHNLMKATVMIRRLKKDVLSQLPVKRRQQLETVKIKIQSCDSQETMDSLKFAQKNLINKIYNDSAEAKIPAVLDYLGTIIEAECKFLIFAHHQSMLEAIHQHLLKKKVKCIRIDGQTPVPVRQTLVTDFQNKDDIKAAVLSIKAGGVGLTLTAASTVIFAELSWTPGDLIQAEDRAHRIGQVSSVNIYYLLANDTVDDIIWDVVQGKLENLGQMLDGQEKTLDVSQSDTRPSPSKQKTLDAYLKRCSNSTEADQPKLKNPRF

SEQ ID NO: 17874 - protein, 1432 aa, Oryza sativa
  Clone ID: TF_OSC401803j.C1.p22.fg
MDENRKLSDDMSKKMEPIHSNGEAGEDKTIIIEPESDANKLEVETDARHGICEAHKAHEYGTMENDLHEEASTTDDDSENDSYEYLLRESDNEQTSESDAGEGDNEAPLTDEEVETLITEFLDAESKAAQAQESLEKESLEKIESEVRLELSESLQGNELESAVSTEMKQYKKEWESELDDLETHIAVLLEQLDAAGVELPSLYKSIESQVPNVCETEAWKNRAHWAGYQVPEEANKSIRKADEYLQSCRPVRRKHGRLLEEGASGFLAGKIPVGDDGSAQCHEKSWNAFNELTKSKEYAESSFGSSNWASVYLASTPQEAAALGLQFPGVDEVEEIAEVEGAVSDIKGVDEIELSEVQRRKYRKVPEEDDAKMTKRLQRHLKERRTRHLHKENIGLASSSNGCFSVELAKRTREDDVEFDNKRSKTVIIESDDDMQTDSKPDSAPSENADEIIDLDIFPSQSPKLGDKVRPKPFKCTICTEMLNVPEVHRHPVLDVIICGSCRFLVIEKNRLEDPVSGGYCTWCVKSEQLQSCSSCKLLFCRNCLSKNFGEEGLSEARVAGWQCCCCLPSQLEHLISDCDKALGGVESSDPENDFAELSVLESNGPFSKHKMKKRIRRIMDDEELGEETKLKIAMEKARQEHLKSMQEQSASKLKSNNIGISLEAPSEVSEYVGDGHIVNLAREEDEAPVRIPSSISAKLKPHQYRITITLVMISVQLYLYCYRKLKYIMIFQVSGIRFMWENVIQSVKKVKSGDKGFGCILAHNMGLGKTFQVITFLYTVMRCIQLGLRTALIVTPVNVLHNWKKEFIKWCPAELKPLRVYMLEDVPRCRANIQYLLKKWRIKGGVLLIGYSSFRNLSLGRSARDKTVANEITNALQMWVLIQSIYICHNQCGPDILVCDEAHIIKNRRADTTQALKQMVDFVREGYLGSSHEFRNRFQNPIENGQHTNSTSDDVKIMNQRSHILYEQLKGFVQRMDMNVVKNDLPEKKVFVVTVKLSQLQRKLYRRFLDVNGFSSSAASEKSFQRSGFFAKYQTLALIWNHPGLLQMAKQKGNLRQEDVESFLMDESSSDDNIENYLPNGEKLRSRNDQLSKKSSDVVNEESNWWENLLDENAYKEADYSGKMVLLLDILSSCSELGDKALVFSQSLSTLDLVEFYLSKLQVNGKEGKYWKQGKDWYRIDGSTPSSERQNLVERYGQTKPVYAYRLMAHATMEEKIYKRQVTKEGLAARVVDRQQVSRTISKEEMLHLFEFGDEELLEQSGSTMNGHSKVGTEKPPTPNSSETTEHLPLDRLMVNLLHDHSRWIASYHEHETLLQENEEERLTKEEQDMAWLSYNKLLEVAPRKATHDAERKPSTVPTESSLIQPPKATSRSRQPQQPKITSNNQKKCNNLSHLLTLRSQGTKPGCSTSCKECGQDISWETLNRDGRSR

SEQ ID NO: 17875 - protein, 1132 aa, Oryza sativa
  Clone ID: TF_OSC20491j.C1.p1.fg
MHGDWPESPSQEVLYADEIAAVRAVLGAGLPEARVVAAISRCGGNAERAINALLDDATAGVEDKPEPKKGKGAKTAAPPVKAERDAGGAAPKPPPPPVKVEVLDDEPLGSQESNGCSARVKKEREDELLVKAPPPMPDRVKEEDGVAAKRGAATANAAGISLVPRPKKRSRVHDEADTIDLTATHPVPYLNPRPIRAVPPPEAMEMLESRRVRARPPPPSSDLRMVVAPPDAEFGEFPEERDWFLVGRSYVTGLSTNRGRRRLDAGELVHFSFPSLERTYGGIKVSNKKAAALAEIVRFSTNRAGEIGKLSTEWTKCLVPLVSSSKVKIQGKIVFPTVELRLMQEILLYVSFYIHRSVFTASGNNSSWDLLAPANVDYSTNPLYRLFRLLKLRAFTKADITPEELAAGKRPRNLRGDDNDEDEPMAIVGLENRRTAGQTFPEQGTDEQAISEAALNKIVGTAETYDLEEAEPPSTLVSVLKPYQKEALFWMSQLEKGIDGDQAKKTLHPCWSAYKIVDKRAPAVYVNVFTGEATTQFQSVTQSARGGILADAMGLGKTVMTIALILSNPRGELEQDKRGTRDRDTKAQTSRSSVRGGTLIICPMALLGQWKDELEAHSTPGALSVFVYYGGDRTTDLRFMAQHSVVLTTYGVLQSAHKNDGSSIFHRIDWYRVVLDEAHTIKSPRTKAARAAYELTSHCRWCLTGTPLQNNLEDLFSLLCFLHVEPWGDASWWNKLIQRPYENGDERGLKLVRAILRPLMLRRTKETKDKMGNPILVLPPANIEIVECEQSEDERDFYEALFRRSKVQFDKFVAQGSVLNNYANILELLLRLRQCCDHPFLVISRADTQKYTDLDELAQRFLDGVQRDSARRSAPPSQAYVEEVVEEIRQGATTECPICLESASDDPVLTPCAHRMCRECLLSSWRTPSGGPCPLCRSPITKSELITLPSQCRFQVDPENNWKDSCKVIKLIKILEGLQEKREKSIVFSQFTSFFDLLEVPFNQKGIKFLRFDGKLSQKHREKVLKEFSESKDKLVLLMSLKAGGVGLNLTAASNVFLMDPWWNPAVEEQAIMRIHRIGQKRAVQVRRFIVKDTVEERMQKVQACKQRMISGALTDDEVRSARIEQLKMLFT

SEQ ID NO: 17876 - protein, 178 aa, Oryza sativa
  Clone ID: TF_OSC900422j.C1.p8.fg
MESEEARKVCFSKRRADLFKMASELSVHFNADVAAVVFSPAGNRAYSIGDPSVMDRFLSSLPAPAPPAETEPEPEVDWSVMEELSRLCGQLQAMVDAHKARLEKAEEKLRESGAAAWMMDLEAEVGRMAPEDVLALVTKLAVLRDGVAERAHEMLREALLAVAAPTPTTPTTPPPAGF

SEQ ID NO: 17877 - protein, 406 aa, Oryza sativa
  Clone ID: TF_OSC400773j.C1.p106.fg
MAGRKETVIKMAKELSVLCDVPVALVCAVGGAVEVWESEEGVLDRYRALPPEVRATRAHTHRGYLERELRARRAKLAKVREEGAFKSWGRDALSGIITAEEAPALLESIDAAIAAATARQEALALLDGGGLHLQHVPASASDAVAPVVGGHGVQVQYIGGSGGGGGSQQEMTPAADGDGARNADQYDDILPWDGNTFEAHNAHVMLPACGFQCTGDYRVDMDGYVWGAPDDANAYHGWPDEAMWCTDESCSCNAATATAVPAMYHPPTLDTVHGSFLAAPAQPLAFSTGADFINAPNDFLTVGVGGSFINVGDYSAQSLADEFHHLSDATNQLDQTHYPPFGGTGGAEPGDTQSHSWGDYYLAQSSANECQLLGVDGGDIHLDQTHCLGGAGGAEPGDTKSHNWGG

SEQ ID NO: 17878 - protein, 180 aa, Oryza sativa
  Clone ID: TF_OSC102221j.C1.p1.np
MARKKMKLLRIVIDVKRRVTFRKHLKGLMKKVSEFATLLMVYGEVEVQATKVWPSVWEATRVLEHFKAMPQLGRYKKMIDLEGILNKQIDKLKEKLHKLGREADESETKLLLIEAINGRHPSLDGLTIEQIISLGRMANSRLKIVNDRLKKLRASNTYTSVIPWSPPPPPPRRPASPPPP

SEQ ID NO: 17879 - protein, 166 aa, Oryza sativa
  Clone ID: TF_OSC401885j.C1.p19.np
MARKKMKLLRIVIDVKRRVTFRKHLKGLMKKVSEFATLLMVYGEVEVQATKVWPSVWEATRVLEHFKAMPQLGRYKKMIDLEGILNKQIDKLKEKLHKLGREADESETKLLLIEAINGRHPSLDGLTIEQIISLGRMANSRLKIVNDRLKKLREPSSLAMVLCFPL

SEQ ID NO: 17880 - protein, 209 aa, Oryza sativa
  Clone ID: TF_OSC102221j.C1.p3.gm
MARKKMKLLRIVIDVKRRVTFRKHLKGLMKKVSEFATLFLMVYGEVEVQATKVWPSVWEATRVLEHFKAMPQLGRYKKMIDLEGILNKQIDKLKEKLHKLGREADESETKLLLIEAINGRHPSLDGLTIEQIISLGRMANSRLKIVNDRLKKLREQGLIPASVSLSSTEVPIQREGWLMDVARGTGSMGYNQFEGSSVSGTAGSNGDMA

SEQ ID NO: 17881 - protein, 209 aa, Oryza sativa
  Clone ID: TF_OSC401885j.C1.p22.fg
MARKKVKLQGIVIDVKQRVTFMKSLKGLTKKVSEFATLFLMVYGEVEVQATKVWPSVWEATRVLEHFKAMPHLVRYKKMTDLEDILNEQVNKLKEQLHKVGRDADESETKLLLIEAINGHRPSLEGLTIEQITSLGWMANAHLKIVNDRLKKLREEGLIPASVSLSSTEVPIQREGWLVDVARGIGSIGYNRFGGSSGSGTAGSNGDMA

SEQ ID NO: 17882 - protein, 188 aa, Oryza sativa
  Clone ID: TF_OSC6754j.C1.p1.fg
MARKKVKLQGIVIDVKQRVTFMKSLKGLTKKVSEFATLFLMVYGEVEVQATKVWPSVWEATRVLEHFKAMPHLVRYKKMTDLEDILNEQVNKLKEQLHKVGRDADESETKLLLIEAINGHRPSLEGLTIEQITSLGWMANAHLKIVNDRLKKLREEGLIPASVSLSSTEVPIQREGLLVDVARGIGSM

SEQ ID NO: 17883 - protein, 209 aa, Oryza sativa
  Clone ID: TF_OSC401885j.C1.p21.fg
MACKKVKLQRIVIDVKQRVTFMKSLKGLTKKVSEFATLFLMVYGEVEVQATKVWPSVWEATRVLEHFKAMPHLVRSKKMTDLEGILNEQVDKLKEQLHKVGRDADESETKLLLIEAINGHRPSLEGLTIEQITSLGWMANAHLKIVNDRLKKLREEGLIPASVSLSSTEVPIQREGLLVDVARGIGSMGYNRFGGSSGSGTARSNGDMA

SEQ ID NO: 17884 - protein, 111 aa, Oryza sativa
  Clone ID: TF_OSC401465j.C1.p6.gm
MARNKVKLQRIINDAKRRATFKKRLKGLMKKASELATLCNVDTCLMVYGEGEAQATVVWPSESEVMRVLERFKTLPQLDKYKKMTDLEGFIQERINKFQEQLDKVRRDADE

SEQ ID NO: 17885 - protein, 268 aa, Oryza sativa
  Clone ID: TF_OSC900168j.C1.p3.gm
MARNKVKLQRIINDAKRRATFKKRLKGLMKKASELATLCNVDTCLMVYGEGEAQATVVWPSESEVMRVLERFKTLPQLDKYKKMTDLEGFIQERINKFQEQLDKVRRDADESETKLLLIEALEGRRPGLEGITIEQLTSLGWLVDARLNIVNDQLQKLHEQGLLPASISLPTMGVLPYTTAGYTVAQEAPIQRGGWLMGVVRGIGSLGYSLFRGSGRSNTAGPSGDMVQPFNIGAGSSLANQGGCRNNQQEEVVTSVRSGKLNVVAFP

SEQ ID NO: 17886 - protein, 241 aa, Oryza sativa
  Clone ID: TF_OSC30381j.C1.p2.fg
MGRPRGGTSKGKQKIEMCCIDGKEKRQVTFSKRRRGLFKKASEISTLSGASIAIVSFSKAGNVFAFGSPSVDAVLRRHVVAGPSTSTSHAHAGGDVFADDGGDNPEVLNALKRATDEAAAEVAAEDARQSGVEGKITEAMAAGRRRFWWDAANVEALGEAELPVFERALHKLRGAVAQGGNNPIQERWDRIPAQGSPGGSYGWEDLSPTGKLYNQPPFAYRLPVMQSIVSDQLGVVCAMLL

SEQ ID NO: 17887 - protein, 483 aa, Oryza sativa
  Clone ID: TF_OSC400964j.C1.p2.fg
MVRTPTIIPLRPNYSPPGDGAAFRREPATYSRFPPAAARNECDLTFGQERKREGMKGKPPISRKIIYNHRDFVSMGERFVALCFIFTMSPCIDATLFVRVVLDFVRREETRRDEMPRTKLVLKLIENEKKRKATFKNRRDGLKQKVSQFATLCGVEALLICVAPAVAGGEVTTWPPDRAAVLDLIARLRATPPEKIRQLHNTQSQLRDDLDKQQRLLLKVQKCGADDVLTPWHCSLYDLSLDGLNALHDTLSETLDRAHRRIAALGGGHGHVHDDAASSSEFSVPAPAPHAVALPDNAFDFPFAPSNTGPVVGAHYFYPLHDTLPLPLPLPQQVPGQHPPCIAYQMPPPPCLAYQMPPPPPPSLAAAPFDQCMSATGFMDSNPYATHIMHGGSTAAGLLDDHGQIFSAGAGYDDDDILGHGFGFAAGTGYDLDPRMATADVWPMNTLNNIPNDGGIGFQLQNDLKWMLPGGSNGSNLQGGFQI

SEQ ID NO: 17888 - protein, 194 aa, Oryza sativa
  Clone ID: TF_OSC400481j.C1.p33.fg
MVHPLGRTSMGRQRIEIRRIDNKERRQVTFTKRRGGLFKKASELALLTGASVAVVVFSPAKHVYAFGHPSVDAVLRSYASVPGEAAAVAPVPVHGGSGGEDVDLLGLRLAADDTGAQVAAEHARMRDVAARIVQAKAGRRFWWEADVDALGEAELLEFFTALKKLRDNVGRHANALLAPQPPPLPLQQKQRRRR

SEQ ID NO: 17889 - protein, 240 aa, Oryza sativa
  Clone ID: TF_OSC401478j.C1.p9.fg
MARNRIILKKVAKDSTRRLTFKKRRRGLIKKAGELASLCGIGVCVVVYGEGEVKPEVWPSAPEARAILSRFNSAPNIDRFKRVTNQEQYLRKRIAKARERTSKADDVNRERDATIMLYEAATDKRPVADLNVQELTNLGLVINERINHLKERIERLGGAALMAPPPSTQPTEASSSLPPLVPYANGAGMEGNKRMKVSTHQKGWFINMSTMTGDAGTSADVEGNTGVGTSARGDMMHLSN

SEQ ID NO: 17890 - protein, 479 aa, Oryza sativa
  Clone ID: TF_OSC400964j.C1.p68.fg
MSRRKTSIALIANPQTRATTYKKRKAGLIKKAGELATLCDIPVAVVCAGPDGGAPTVWVSPEGGDAIERYRALPAEKRARHTHVAYLQEELDKERAKLARLRQKGRPGELDPPDAVLDGMSQDELQQLLASIDATLLATAKRREALGLLPGADDDADGGGRRRDADVAGTNSVGVHGYQHQEVHAPATCDPFHPYNAGVTLMQPGYNNAQYMGGHGAVDMSGYQLQMQMPGNGSNNHSRLAWGGFQPCNATFVQPVYGNLQCWYNNVVDGNGEPCDAIVPSAGDPYMDIAGNDVYGNQMQPAPAANGGWHDPGTWGYDGGEPCKAIVPSFGDPYMGIGVYGNQMQPAPAPAANGCWHNPAGTWGNDGEPCNAIVPSAGHPYIDIECDIDGNYIDTTVFDYQTTSTSDNFMDAPVQFIATGSDESIVTNVAGCDETEFSIDDLLQCSDASQHSSGLEELHYLSDLADGFDFGCNFDVLLD

SEQ ID NO: 17891 - protein, 215 aa, Oryza sativa
  Clone ID: TF_OSC19523j.C1.p1.hg
NRVGCQRQKPKGSQSSERSLRHTSWGVVGGSLKSWSSSSRLDGLGGAMQIAYGYGRGPKRKAEEEREGREGRGGRGERRASEQLWLRPNPTAPPPPLLAFFGESPFADSQIPLRFTTFALSAAPPIGIKKKRAASLAAPPPPPPPCRPQPLVWLVGSSAIEDGAGEDADEADREPHEPPGHLLQAPQRPAKKAFELSVLCDAEVALIVFSPRGKL

SEQ ID NO: 17892 - protein, 140 aa, Oryza sativa
  Clone ID: TF_OSC404997j.C1.p3.fg
MEGGGRRRKRGKVELRRIEDRTSRQVRFSKRRSGLFKKAYELSVLCDAQVALLVFSPAGRLYEFASSTSSIDTIFGRYWDLLDTTIDLNIEARESRVDCNIQVWIRRQIVHGGLAPLLVGDAAPPFRGVGVGSSPSPLYL

SEQ ID NO: 17893 - protein, 189 aa, Oryza sativa
  Clone ID: TF_OSC401367j.C1.p24.fg
MAVGEVLTERRRETLTTDLVLIPICRQEPKISSIVPEEAAAGEYLAIISASYVTNRNWTVLPVQTKQVSDLQQQEAKLCKQSYIRVTCITYSETDLSCGPSSMTELTAAAAPAGSGSSAAVAAGSSEKMGRGKIEIKRIENTTNRQVTFCKRRNGLLKKAYELSVLCDAEVALIVFSSRGRLYEYANNR

SEQ ID NO: 17894 - protein, 164 aa, Oryza sativa
  Clone ID: TF_OSC900058j.C1.p28.fg
MGRGKIVIRRIDNSTSRQVTFSKRRNGLLKKAKELSILCDAEVGLVVFSSTGRLYEFSSTNWAWCTAHAEEYIPTPITGELQQTPLKGAEYAHNICAQSDSTESSELEVGKSCKPRMGQRGQIAAVATLVLTPVTPLLSFSRFHEPHTSSASEGIRAGHPQVCK

SEQ ID NO: 17895 - protein, 385 aa, Oryza sativa
  Clone ID: TF_OSC422528j.C1.p3.fg
MGRVKLKIKKLENSSGRHVTYSKRRSGILKKAKELSILCDIPLILLMFSPNDKPTICVGDHSSIEDVITKYAQQTPQERAKRKLESLEALKKTFKKLDHDVNIQDFLGSGGQTVEMLIKSIVWQELSSHLGALQCQMADVEKRLSYWSDPEKVENIDHIRAMEQSLKESLNRIRIHKENFAKQHLMSLQCAAAQFQNDMKLPLGLTGDPNTSSWFHGGGGAEAQQPMMLPEDPSLLHQRDIGCSASTSLQSYPGYFSMGKQSTDNAGGGEQHHHAAVQQQPEFSQADCLTSLQLGAQFPYPSAFDNAGLLSDRLFDNAAAAAAAMDFGGHYDLPRPGDEASFQNWASAACGATMYDHQQQQQQQQQPAQIMTESLTPISSLQQQL

SEQ ID NO: 17896 - protein, 417 aa, Oryza sativa
  Clone ID: TF_OSC900368j.C1.p16.fg
MDAVRPLQPADREWPPNPTKPPRLSLATSICQPRYINRTKPYPPPSPRLADRSTDDGRNIAVDRAESPAAAMGRVKLQIKRIENIPNRQVTFSKRRNGLIKKAYELSVLCDIDIALLMFSPSGRLSHFSGRRRIEDVLTRYINLPESDRGGYVNFFDGKVSQRDFNLNLALFLVFVLNLGALADPGAVRRRLTPTLRMFEPDPARSASMEDVEASEKFIAGILSRVEERKRYLLCSMGSFDVTASTSAMQHLYLPQQHQHGDITDNGFGSDEVASWVSEGMPPTTSSVASIFAGTSDSMMSFRDQAVYDTMRQDACVDQTVVPEMGMCHVDQQNQSDDWQAYTSAEFLNALIPPTPFPLDDEDTMGPMLASSPLLMPGIHDQQPPVEDMATAGCSQAPANDGNGLYAAEDIAPVNVG

SEQ ID NO: 17897 - protein, 100 aa, Oryza sativa
  Clone ID: TF_OSC20924j.C1.p1.fg
MHIYKEQEAEPSTGLMMPEPAPAASPGSGSSEGSSIEDTADRQVTFCKRCNGLLKKAYELSMLCDAEVALIVFSSRGRLYEYSNNRYCIPLPLFSSRNLN

SEQ ID NO: 17898 - protein, 82 aa, Oryza sativa
  Clone ID: TF_OSC21205j.C1.p5.gm
MAGGGGGGGRGEGEGRAATGKRERIAIRRIDNLAARQVTFSKRRRGLFKKAEELSILCDAEVGLVVFSATGKLFQFASTRIR

SEQ ID NO: 17899 - protein, 79 aa, Oryza sativa
  Clone ID: TF_OSC21276j.C1.p6.gm
MAGGGGGGGRGEGEGRAATGKRERIAIRRIDNLAARQVTFSKRRRGLFKKAEELSILCDAEVGLVVFSATGKLFQFAST

SEQ ID NO: 17900 - protein, 210 aa, Oryza sativa
  Clone ID: TF_OSC101029j.C1.p5.gm
MVKCRARTTRKKIEIKRGDKKVRDACFSKRHTTIFNKANELAILCGVMVAVVFVSPNANGGIFSFGYPSVSSVANRFLANAPNNTSVSALIITALHIEGSSHPSGTALQPLPVLGEEKPWLEISLPAPRRRWPSHGYTLPPAPGLAWRVAASALPRGPSAVAPALRHAKHKDSPVRARLVAGGVADGKRRDPFSASRFHMPDRTGLWPIS

SEQ ID NO: 17901 - protein, 275 aa, Oryza sativa
  Clone ID: TF_OSC900022j.C1.p4.gm
MVKCRARTTRKKIEIKRGDKKVRDACFSKRHTTIFNKANELAILCGVMVAVVFVSPNANGGIFSFGYPSVSSVANRFLANAPNNTSVSSSTQSGRDVEIRELEREERELKEHLQASTDQNKLLREAIAARDGGQLMLLLQSDCSELGPKGLVSALIITALHIEGSSHPSGTALQPLPVLGEEKPWLEISLPAPRRRWPSHGYTLPPAPGLAWRVAASALPRGPSAVAPALRHAKHKDSPVRARLVAGGVADGKRRDPFSASRFHMPDRTGLWPIS

SEQ ID NO: 17902 - protein, 138 aa, Oryza sativa
  Clone ID: TF_OSC900028j.C1.p26.fg
MVKCRARTTRKKIEIKRGDKKVRDACFSKRHTTIFNKANELAILCGVMVAVVFVSPNANGGIFSFGYPSVSSVANRFLANAPNNTSVSSSTQSGRDVEIRELEREERELKEHLQASPSIAGWLARSSSKIDLWLYLTR

SEQ ID NO: 17903 - protein, 82 aa, Oryza sativa
  Clone ID: TF_OSC422477j.C1.p6.fg
MGRGKVQVRRIENEVSRQVTFSKRRPGLLKKAHEIAVLCDVDVAAIVFSAKGNLFHYASSHTTNLTGALDGARDENGADTDG

SEQ ID NO: 17904 - protein, 324 aa, Oryza sativa
  Clone ID: TF_OSC400773j.C1.p108.fg
MPRAKTPMGLIPFPKKRAATFARRKETVMKMAKELSVLCDAQVAVVVGNPGGGAAEKAAWESEEGRAKLAKVREEGAFKPWDDALDGIAEEETRKLHKYLSDKIEAARARMEAMGLQLGDVDDNGVNGDDGGGLDLQQHVPPSASDAKEFESVPVVHGGQYIGSSSGGGGGDIQMQTTPAADGISFAEHFLVAPRAQPLAFSTAGADFINAPNNFLTTGVSVSDYSVQSSGYGIGNQIDNAKQLLYQMQMQYPVGGTGGAEPSNTQTQSPDLRSFSNVVGDYSYTAAQSSANRLDQMHHPVGGRGSTGGAAADPSDTQSKNRGS

SEQ ID NO: 17905 - protein, 78 aa, Oryza sativa
  Clone ID: TF_OSC32476j.C1.p2.gm
HLHQAAGRGVKKASELALLAGASIAVVVFSETNLAYAFGDPSVDAVLLSYGPVPGEDAEPAPVHSGGLGKDVDLEMLR

SEQ ID NO: 17906 - protein, 238 aa, Oryza sativa
  Clone ID: TF_OSC420031j.C1.p3.fg
MTKRKIEIKRIKNEEARQVCFSKRRPSVFKKASELYTVCGAEVAMLVKSPAGKFFSFGAPSVGFVLSRFHATTTSRKHSSMGVTIQHDNSATIKLHELNQQHIELQNQLQAQNEKMKALQEVAKKESGGKVMGWLNSKVEDICQEDLEEFKMVLESLKYLTRGIINQLFQNYAMFSNMMRVQHCVTALPNQQFLPSSEDVKPMIHHVPSSSYGWNTSIDSKPNSSDAHVVGARRYFPK

SEQ ID NO: 17907 - protein, 337 aa, Oryza sativa
  Clone ID: TF_OSC413657j.C1.p13.fg
MGRVKLPIKRIENTTNRQVTFSKRRNGLIKKAYELSVLCDIDVALLMFSPSGRLSHFSGRRGVEDVILRYMNLSEHDRGEAIQNREEIQQEIYSSQQQLQITEDRLRMFEPDPAAFGTSSEVDGCEKYLMELLTRVVERKNNLLSSHMAPFDATTAAMQGADGTQMYVSQADGLATFGGDAAMWGPDGGADPGHPMFSASDPLIYLRDHDVYDANSQVAGLHGGDPCAAGGAAAAAAAVGCVDDDVAGGHAAAADAWRQAYTCTELLSTLIPTTPFPLMPHCLGPEDQYLSMEHGMVAAAQEPVEASTASCSYVPSDENSGTPVMAYDSNPPPANIA

SEQ ID NO: 17908 - protein, 203 aa, Oryza sativa
  Clone ID: TF_OSC20977j.C1.p1.fg
VGQPRGERRKVQEEEKHQGQYIDGLSPQLPPLHLISSFPNHSLLLEHTPLFLIIISSLIREELANMHIYKEQEAEPSTGLMMPEPAPVASPGSGGSGGSGSVGAEKIGSRGKIEIKRIENTTNRQVTFCKRRSGLLKKAYELSVLCDAEVALVVFSSRGRLYEYSNNRGKKWCTRVMHTLIIHDSFASSSSIGGCPITSALGP

SEQ ID NO: 17909 - protein, 99 aa, Oryza sativa
  Clone ID: TF_OSC401316j.C1.p12.fg
MGRGKIVIRRIDNSTSRQVTFSKRRNGIFKKAKELAILCDAEVGLVIFSSTGRLYEYASTSMKSVIDRYGRAKEEQQHVANPNSELKEFCSVFIYITEN

SEQ ID NO: 17910 - protein, 407 aa, Oryza sativa
  Clone ID: TF_OSC400773j.C1.p107.fg
MARRKIPIGLIAHRQKRAATYAKRKESLRKKAEELSTLCGVRVAFVCAGPVVPGGGGGAAGKEEVWESEEGVLAEYRALPPEARAQHAHRVYLEEEVGKERAKLARVRQDGAFPSWDAALDGITADEARALLESIDAARAAANARREALGLPDDGNGVDDDGGLDLQQQQEHVPPGGSDAVVVPVGHGVLQYTGSGGGNQMQTTPAADGINCADLYGAVPWDDTFQPQVMRTGDHFVPMDGYLWQAPGNGWPDLATGCTNESCSCNAAAAAAAMPAMYPPTLDTVHGSFLAAPAQPIPIAFSTSTDFIDAPNDFLTMGLCGGFTNVGDYSAAQPQSSADGGFQLGDTFAAEPGDTQSQNWGSFINVVSDDSAQCNCNAAIHLDQMYYLFGGTGGGEPSDTQSRHWGS

SEQ ID NO: 17911 - protein, 218 aa, Oryza sativa
  Clone ID: TF_OSC401113j.C1.p5.fg
MVKGKGRAGRKKVEIKRIEKKDARDVCFSKRRQTLFNKAGELSLLCNANIAAVVISPAGRGFSFAHPSVDDVADRLASMAMGIPNNHSLGGGYHDSGEVTNIAQQQKIEYVELQKSLEKSEKKKRVQEAMEKERAGHLMQSLTSEVNLLGQDELEELHNKLSALPYTSIAKFYQVLQDAKGTRMPLPQPHIEIACQSQFLFEEQAVTPANADFPGSST

SEQ ID NO: 17912 - protein, 285 aa, Oryza sativa
  Clone ID: TF_OSC401196j.C1.p47.gm
MRRIEDTTRRQVTFSKRRKGLLKKASELSVLCDAEVALLVFSPRGRFFHFASAPSYATIPPSSFFPTTAWLPPCCHQGGPAPCRRWATGCSNAGDGGCSGAGDDGDGDGSARTPAVEGRWAVGRGGGAAGNEARTPAVEVWLAEHGKGGGAAGDGASTPTDTDDGGIVSGGRGGRRRGGQRRQDAGGGGVVGGRWGGRRHSKRRRQDIRGGGVVVNDGEDGGAAGDGVRMSAVEAWWADEGKGGGAAGDGAKMPAMEAWWGAEPGRRRWSRGGRMTGRAAPGRRR

SEQ ID NO: 17913 - protein, 306 aa, Oryza sativa
  Clone ID: TF_OSC401478j.C1.p10.fg
MARKKIVLDRIANDATRRATFKKRRRGLLKKASELATLCDVDACLVVYGEGDAEPEVWPSTEVAMNVLRQFRALPEMEQCKKMMNQEDFLRLRIGKLKEQLRKMDRDNHERETLILLHDALQGRLGTYESLSVEQLTSVDCLASARLKVITDRLVEIRAPNEDGQVLVPPPPPPPPALPAPPPPPAPMLPLAPPPTHVTPAMPLSSMPPPAFHGMNHHHHQNHFINHGGNDQNAWLMNVARNGGDLGALVYSAFASSSSSNTGGAGTSAAGAAAPGPDMMDLANPDMPGFGCPWDDDSAGPSFPPM

SEQ ID NO: 17914 - protein, 208 aa, Oryza sativa
  Clone ID: TF_OSC401721j.C1.p14.fg
MAMQVAAPSRRRPSLGRQKIEIRRIESEEARQVCFSKRRAGFFKKASELSILCSADVAAVVFSPAGKAYSFGHPSVECLLERFLPDSSSGAAARVRRGANNNGGGGMVGELNRQYGELRAMVEAHKARRERADEKIEMERAAGRWLPMDADVRRMSPEELMAFGTGLMAVQAAVSARADQMLRDALLIGRRPPTTTTAGFGFFHMPHY

SEQ ID NO: 17915 - protein, 208 aa, Oryza sativa
  Clone ID: TF_OSC900422j.C1.p13.fg
MVTAAAARRRPSLGRQKIEIRRIESEEARQVCFSKRRAGFFKKASELSILCSADVAAVVFSPAGKAYSFGHPSVEFLLDRFLSSSLPATAGKEEGSSVSVVAELNRQYGELRAMVDAHKARRERAEKTMEKQRQRQPAAWMDPEAEVGRMAPEELMALGTKLVAVQGGVAARADQMLRDALLLGRRPNTTTTTTTRAPPGFFHLHPHF

SEQ ID NO: 17916 - protein, 604 aa, Oryza sativa
  Clone ID: TF_OSC18908j.C1.p2.fg
MPRRARRTGAAYVDDERERDITFFKRRNGLFKCASDLSILTGASVAVVIEDQNRSKFHAVGTPTVQAVVDAALSSDVEEAAAEARPVADEQLMERIAPLERELAWLKGEAAEKDETTKASKARFKMAQKKEENEEEGDTKKKKLFFSKADKLSSDEMNELLAEMLEIKKELNVRLPPLRRRGGKRPIQGSSVPPPPPPPPPPPQPEQQLQLPQWPNLSGPHNQLLPVAPPPFVADQPPPPPPPAAGGSLWIPELPPPPVEGSPWAGLLPLRPPRFAGMEPSFLESQQAPPPAQVSTQLAPLPLIREEAPLLQEPFLFADQAPVLAPLPAPLQMPVAETHLPLQAPLLQEPFLFSDHAPTLAPLPSPLQMPVAETHLPLQVQAPFMQEPFLFSDQAPVLAPPPTPLQMPVEAHMPLEAPWIQEPFLMPDQAPVHAPPPTPLLMPVGADHFPLEAPLFQESLIMADQKSVHALPPPPLQMPLEAHLPPAAQEYNQDLAVQQQPQEYENYDYMFENVGLSQAQPVAAGAGDAGFAAIGNDDNPFGYQQLVASPLYDGQIYFGSGVDNMGVPPAGDFGGVPEAALPEVEHASSSGWGNNITGDAGAWF

SEQ ID NO: 17917 - protein, 77 aa, Oryza sativa
  Clone ID: TF_OSC900209j.C1.p10.fg
MVRGKTVISRIENTTSRQVTFSKRRSGLFKKAKELAILCDAQVGVLVFSSTGRLYDYSNSSNSRNLTYDQLLGDTVC

SEQ ID NO: 17918 - protein, 450 aa, Oryza sativa
  Clone ID: TF_OSC419793j.C1.p3.gm
MTLMSAMTWLPRKIDARKHGNGSYQRTTQPRGGRSSPRSCDPEGGDGERRRRWTATNGAAEDGTNRLHGDDGAPMACVFAEVAAGLLLTAAMPTVDTARSGDHGVDDGWLLEAWQRPKASALTLAKPREATAQGGHGGQWAVLRRTMEAASGEEEDGGGSGYERRIVLAIARQKVNLQRLANYTIRRAMFKKRQKSLMKKASELSTLYGVDACVVMYAEGEAQPMMVWPSVPEARRVIERFRALPQKDQYENTTNLEGFLKQRIANLQEKVDKAKHENDELETKLLLLNSLDCCLPSLVGLTVKQITSLNSMVEERLKKLRGNGLLATPVPTSSKKKIIWDVRYNLKARYVTDDSAKNGPPSRQSTAIPSFAAPQASSATTLLLHSIPLAALSTMNPSRHQLYRLRPLLGATPDHPSLRHATNSFVVSHRTLAIAPPDPITTETLPSPST

SEQ ID NO: 17919 - protein, 380 aa, Oryza sativa
  Clone ID: TF_OSC102307j.C1.p3.fg
MESQICQFGTFLEVNNQHSATPKGKTIPVKCTDCLPGVASRSLTVIPLEVPHDVLLSAREAKTQYNSTFEHNLSETNFVTGTYNGAHHANVKDVPPDIYETEFRHQFPRIETSFSIIGAHFLSSMVRRGRRKGVRYIEEDRDRSLTLSKRRDGLFKLANDLSLLTDASVAICLHDSNKAQFFGAPSVKPVVDAFVSEAEPFADEQLKAKLTSMQSELVQLENEEEEKDKKTEESIQRFKEAQEESLGMGMAKHLFSRLEDLSHDDMRELLDVLLPLQQEFKKRLPPLRRGQQSLPKNLGLGEFPKKPPAEVQACTPVEQPQNDNAVHTPTFSDSFLLELLADVSDDGIATAEPLCSPPIDDQFLADIDWLAELDTIDGNL

SEQ ID NO: 17920 - protein, 482 aa, Oryza sativa
  Clone ID: TF_OSC400618j.C1.p20.fg
MESQICQFGTFLEVNNQHSATPKGKTIPVKCTDCLPGVASRSLTVIPLEVPHDVLLSAREAKTQYNSTFEHNLSETNFVTGTYNGAHHANVKDVPPDIYETEFRHQFPRIETSFSIIGAHFLSSMVRRGRRKGVRYIEEDRDRSLTLSKRRDGLFKLANDLSLLTDASVAICLHDSNKAQFFGAPSVKPVVDAFVSEAEPFADEQLKAKLTSMQSELVQLENEEEEKDKKTEESIQRFKEAQEESLGMGMAKHLFSRLEDLSHDDMRELLDVLLPLQQDFKKRLPPLRRGSKLQIGGSSAWAHQQPSCSRFLASHRPFTPLLPGGTSGVPMIPPPPVPGSPWSQIFPLRPPLFPSPELVPSQQLPPVSPPQNTVAPPPMHAPLVQQPLTNQSSAVPLLTQWQMRFGDQPPAEVQACTPVEQPQNDNAVHTPTFSDSFLLELLADVSDDGIATAEPLCSPPIDDQFLADIDWLAELDTIDGNL

SEQ ID NO: 17921 - protein, 239 aa, Oryza sativa
  Clone ID: TF_OSC900043j.C1.p3.fg
MAAAEAAAEAAAALEGSEPVDLVKHPSGIIPTLQFSLGGYYMFEVLICLIDEKGGRSEIRESEKVEHAYIAACHSVPASMCSHKNIVSTVNLDCKLDLKAIALQARNAEYNPKRFAAVIMRIREPKTTALIFASGKMVCTGAKSEQQSKLAARKYARIIQKLGFAAKFKDFKIQNIVGSCDVKFPIRLEGLAYSHGAFSSYEPELFPGLIYRMKQPKIVLLIFVSGKIVLTGAKVCSVW

SEQ ID NO: 17922 - protein, 241 aa, Oryza sativa
  Clone ID: TF_OSC423203j.C1.p9.fg
MAAAEAAAEAAAALEGSEPVDLVKHPSGIIPTLQFSLGGYYMFEVLICLIDEKGGRSEIRESEKVEHAYIAACHSVPASMCSHKNIVSTVNLDCKLDLKAIALQARNAEYNPKRFAAVIMRIREPKTTALIFASGKMVWYVLGAKSEQQSKLAARKYARIIQKLGFAAKFKDFKIQNIVGSCDVKFPIRLEGLAYSHGAFSSYEPELFPGLIYRMKQPKIVLLIFVSGKIVLTGAKVCSVW

SEQ ID NO: 17923 - protein, 224 aa, Oryza sativa
  Clone ID: TF_OSC400049j.C1.p46.fg
MAAAAVDPMALGLGTSGGGGGGESAVGGDGAEPVDLVEHPSGIVPTLQNIVSTVNLDCRLDLKKIALQARNAEYNPKRFAAVIMRIRDPKTTALIFASGKMVCTGAKSEDHSKLAARKYARIVQKLGFPAKFKDFKIQNIVGSCDVKFPIRLEGLAYSHGAFSSYEPELFPGLIYRMKQPKIVLLIFVSGKIVLTGAKYRKEIYAAFENMFPVLTEYRKTQQRW

SEQ ID NO: 17924 - protein, 259 aa, Oryza sativa
  Clone ID: TF_OSC900102j.C1.p17.fg
MRQRRHGRRGGKAAAGARGAKAASIKIEQTKPRRISQELAQASAMEEVVVGKERKRPRCALVGVGGHDSDVADEPGGVRARRTSTARLSVPTSIAFYDIQDRLGVNRPSKSIEWLICAALVARLLLRPPQRRPAPHPRRPSSGQPSEEQARTRKATVAVSPGKSGEKRRKTRSGCAARKAERIAKLRVWREGWMPRREASTSATSGGQSWIRKPSTPGSGDSCSCSDAKPGKRRWAEKAGEVVAREADGAERGGGGRRR

SEQ ID NO: 17925 - protein, 362 aa, Oryza sativa
  Clone ID: TF_OSC400226j.C1.p13.fg
MAATTTGRVVALGAVAVVVALTFLAGGADADCYDFCFKDCMARENNMVDYCSYACDKTCQPDKPTLYSSSSSSRLAGDMECQLSCALGSCHRLLPDGKGAVEACFGQCYDGCKTTAAARLPRPLRAGHYVLSSPPDDVDHDPDHRYVFSSPHDDVDHDPDQVFASPPDDIDRHVFAAPPDVLAALPVVLLTWHPSHRKKLKKIHEGPHLTRELGHKSDGETVQWLLQQAEPAIVTAMGTGVGADIRRTLPPFPKLRPLQVAPPPPPHVGCRRGVRRCHIGFATMFAAHVAAAMPGLELGHSQDGHIGVLFARSLSQFYHQVGGASATGQLPHPHHHHQHHQQQQEDGEDDRDDGESDEESGQ

SEQ ID NO: 17926 - protein, 278 aa, Oryza sativa
  Clone ID: TF_OSC100867j.C1.p5.gm
FYDLQDRLGFDQPSKAIEWLINAASPAIDTLPSLDPAAFAAIPHAAADAAPTRRRSQQQQQQLSNKSGCSSTSETSKGSDKEVTVASAPAQAASFTELLIAGVAASSAGGGAIGNGADCVGIAHPGKGGAEGASTYGFSAASSFGDAPPIGMVPAPPFNFSAPGADMAAHYSLAQDQLAAPPPPAGGDYNLNFSMSSGFLGANRGTLQSNSPSNMSGHHHHHHQQQLQRLDGSTISFLLGHAAAAAHPAASEGQITSTAALQLWDGFRHSGMKEKSKN

SEQ ID NO: 17927 - protein, 160 aa, Oryza sativa
  unsure (1)..(160): unsure at all Xaa locations
  Clone ID: TF_OSC401000j.C1.p10.np
RARPGEAPEVREVWGPSEDAAGARREGEDPLSVAVDAGGSGGGGGEEDLTRELSHKSDGDTVQWLLQQAEPAIVAATGTGHTGVGADIRRMPGLELGLSXDGHIGVLAAQSLSQFYHQVGGAGATGQLPHPHHHHQHHQQQQEDREDERDDGESDEESGQ

SEQ ID NO: 17928 - protein, 188 aa, Oryza sativa
  Clone ID: TF_OSC401539j.C1.p115.gp
NLASCFNFRSSPFRLTVGERELKLEEDKNQLSKGLDPWTSNPTASASTLHYLLQEKERAQQAHEQLQIYQQQQGFGSFLQHRIRQPASRGPGGGGGGGDGGGSSGESTPVEALATAFGAGRIVRSAAGRKDRHSKVCTARGLRDRRVRLAAHTAIRFYDVQDRLGYDRPSKAVDWLMRNAKAAIDELP

SEQ ID NO: 17929 - protein, 236 aa, Oryza sativa
  Clone ID: TF_OSC401978j.C1.p39.gm
MTTRPDGGGGGGGAPDKQLVPASNANGTALAVRKPPSKDRHSKVDGRGRRIRMPIICAARVFQLTRELGHKSDGQTIEWLLRQAEPSIIAATGTGTTPASFSTSSPSSLRSNSTSNSNDLLLPRAAPFILGKRLRAADDHTTSPAPAPDATAPTQAFWALPARADFGQLWSFAAAPEMMVAAAAAPAMPGEASAARVGNYLPMAQGNLNLLASFSGGPGGAGATAATGRPEEESAR

SEQ ID NO: 17930 - protein, 408 aa, Oryza sativa
  Clone ID: TF_OSC900102j.C1.p14.fg
MDVAGDAGGGRRPNFPLQLLEKKEEQPCSSSAAGGGTGPSSAGGNGNNGSGPGGAGGEMQLRKAAPKRSSTKDRHTKVEGRGRRIRMPALCAARVFQLTRELGHKTDGETIEWLLQQAEPAVIAATGTGTIPANFTSLNISLRSSGSSLSAPAHLRALPSPAAAARFGSRADAWDRVVSLGFPSEGPASSSSSPSPLLLNFHSGSVGLDVQPSPSAAAAAADLSRKRRWEQEMQQQQQQQQQQQQQQQQQYQQQMAGYTQSQMPGTVWMVPSNSTQGGGPSGGGGGGGGGSGESIWTFPQMSSAAAAAAVYRGSVPSGLHFMNFPAPMALLPGQQLGLGPVGGGGGGGGGGEGHMGILAALNAYRTQAATDAAGQQGGGGGGGGSSQQQHGGGGGGGERHQSISTSDS

SEQ ID NO: 17931 - protein, 326 aa, Oryza sativa
  Clone ID: TF_OSC900234j.C1.p8.fg
MGAGWQWPAGGGGMEAAGRGLAAARSNHEQLKMTSNNSTNEELGGGGRKAADKPSGGGGAAAAVASSRHWSASTESRIVRVSRVFGGKDRHSKVRTVKGLRDRRVRLSVPTAIQLYDLQDRLGLSQPSKVVDWLINAAQAEIDKLPPLQFPPHDHDLVAAAASSMAPPPFANGGDGHHGASASSMLEDGDKAAGGGGMKAFMSLSNSLGLLNAATMPATLAAHHHHHHHAAAYYAAAESWGNGGNGGHHHDVSHGVSPSAHNSPFPSLLSLAPGSHHQFVFYSPEGGGFAVKEAAAEQFPVDSLDHSQGQLTLSSARSFLHSGSQG

SEQ ID NO: 17932 - protein, 457 aa, Oryza sativa
  Clone ID: TF_OSC401539j.C1.p92.fg
MSGFTNKDGRQNLASCFNFRSSPFRLTVGERELKLEEDKNQLSKGLDPWTSNPTASASTLHYLLQEKERAQQAHEQLQIYQQQQGFGSFLQHRIRQPASRGPGGGGGGGDGGGSSGESTPVEALATAFGAGRIVRSAAGRKDRHSKVCTARGLRDRRVRLAAHTAIRFYDVQDRLGYDRPSKAVDWLMRNAKAAIDELPDRAEAPPPPAAASTEQPEATEQATSTSYGFGNTTGGTMTSAASAAAGSFLPHSLGADRVSDSVKSLFPSSSTASGAASAGHDEYRGSPPDLLSRTTSNQQPQELCLTLQSNQHQIFSHVSSNHHGMISSAGVPGWPDHSQRMQAWHAPENSTGDGRGGGNGDGYMFAMPSRQGLDQSQLFSHGEPLQSSGRGWASARAWLDPLAVAAIHHQPSTMAAGQVGFGHLVGGAGGGGGFMGFLAPAAQRLEGEEEHGSEVIR

SEQ ID NO: 17933 - protein, 140 aa, Oryza sativa
  Clone ID: TF_OSC2212j.C1.p2.gp
EEEAAELARKHTAAVATSRQWSAQTESRIVRVSRVFGGKDRHSKVKTVKGLRDRRVRLSVPTAIQLYDLQDRLGLNQPSKVVDWLLNAARHEIDKLPPLQFPPQDHLCMGHHHHLPSAMPLMHHHGHHHHADDDKYHVAA

SEQ ID NO: 17934 - protein, 307 aa, Oryza sativa
  Clone ID: TF_OSC401539j.C1.p32.fg
MILGSNQAAAAAAAAAAAEEEAAELARKHTAAVATSRQWSAQTESRIVRVSRVFGGKDRHSKVKTVKGLRDRRVRLSVPTAIQLYDLQDRLGLNQPSKVVDWLLNAARHEIDKLPPLQFPPQDHLCMGHHHHLPSAMPLMHHHGHHHHADDDKYHVAAAAAALAAEKEAAAAGGGGGGGGDDVDGGGGGGAAHIVGRFPAGGYHRFMGLNNPLGMVNSAAGAAMPFHYAGESWNNGSVQDSGAGSPQVAAAAAHHTSPFPSLLSLAPGPHHQLVFYSSEAEQFTVDNLGSQGLSLSSARAFHDQTGS

SEQ ID NO: 17935 - protein, 206 aa, Oryza sativa
  Clone ID: TF_OSC400220j.C1.p52.fg
MASRDAATFQVYRPMAMPTPAALPPSSQQITMPFTAALVDAVLPAPRKAAATQGGKDRHSKVNGRGRRVRMPIVCAARVFQLTRELGLKSDGQTIEWLLRQAEPSILAATGSGTTPAVFSCSSAPSTASSSFLLGKRPRQEDHEAPTFWEALQQQPRPAVSSWGALVSPSQEAQAYASSVAQVHHLNLLSALSGAATRRPAQEESR

SEQ ID NO: 17936 - protein, 337 aa, Oryza sativa
  Clone ID: TF_OSC401583j.C1.p12.fg
MDPKFPPPPPLNKTEPTTTTTNQQHHHDEQQQQHRLQIQVHPQQQEQQDGGGGGGKDQQQQQQMQVVVAAAAGERRMQGLGPKRSSNKDRHTKVDGRGRRIRMPALCAARIFQLTRELGHKSDGETVQWLLQQAEPAIVAATGTGTIPASALASVAPSLPSPNSALSRSHHHHHHMWAAAPPTASAGFAGAGFSGADSGVIGGIMQRMGIPAGIELQGGGAGGLGGGGGGGGGHIGFAPMFASHAAAAAAMPGLELGLSQDGHIGVLAAQSLSQFYHQVYNSRELDGLDHRCRVSALFVIAGRCVDIQVSSHYWYINRSCEEMPVKCSVRENLYHLI

SEQ ID NO: 17937 - protein, 326 aa, Oryza sativa
  Clone ID: TF_OSC401091j.C1.p11.gm
MADASRLLASEIEMIMILVQGGMGMVAASLMIPPYPNNNLHHHHHHCSSNQEPHLPLHPPAFLMSAPSSSSSPSTLDEYDARFFFPGADAYTAGHRQDEETLEAVLRQPVTTTAAAAAAVEGGGGGGGGGAGGSPAAAAAATRRRPFRTDRHSKIRTAQGVRDRRMRLSVGVARDFFALQDKLGFDKASRTVEWLLTQSKHAINRLTLPDSADAAAAPAFAAAPPPADQHSSAMAAAAASAAKEKGEASSSSTTNASSARARNRDHDGSSPVAPMDERGRRGVELDWTAAAAASTEQPMDGLEYYFQYYNHLEEIMSCDPTTTTDE

SEQ ID NO: 17938 - protein, 141 aa, Oryza sativa
  Clone ID: TF_OSC935j.C1.p4.fg
MAAAWRTSRVACVVAGEKDKHSKVVTSRGLRDRCVRLSVPMAIAFYDIQDRLGVDQPSKAIEWHIRAAAAAIDAFLSLDCSLVLPNAAQLLTRWRRRPSSGQPSEEQARTRKATVAASPRKSGKKRRKTRSGCAARSASRS

SEQ ID NO: 17939 - protein, 421 aa, Oryza sativa
  unsure (1)..(421): unsure at all Xaa locations
  Clone ID: TF_OSC411819j.C1.p1.np
PSSPRRRRARSHRRGGRRTAASRNHSRVVAATASRRARRHHSPAAARSAAAATDAPHPHHPFYYSGPAAAAAAAAAAQQQQQTFMGALAITPVVAAQGSSGGGEKKVVAPTTPAAAGAAATTTLAKRPSKDRHTKVDGRGRRIRMPALCAARVFQLTRELGHKSDGETIEWLLQQAEPAIIAATGTGTIPANFSSLNISIRSGAASASSASNPNRASPFPALALHPHHQQHDVSAMLGYHHHLLPPPQQQQESPQDPGGAGAFMRKRYREDLFKETTRQDPSAPKAREQQPTTPQAAAAAAAAAAMWAVAPNTAAPGGAFWMQPMWSFQPMWSFAGGGGGAATVQAPLQFMSTRVNYPGSAGAGMSDTNLGMLAALNAYNRGGAGDQQPQQQGDGPAGPQRRRRRXGDDSGDEDNGGANNN

SEQ ID NO: 17940 - protein, 387 aa, Oryza sativa
  Clone ID: TF_OSC4514j.C1.p3.fg
MDVTGDGGGGGQRPNFPLQLLGKKEEQTCSTSQTAGAGGGGVVGANGSAAAAPPKRTSTKDRHTKVDGRGRRIRMPAICAARVFQLTRELGHKTDGETIEWLLQQAEPAVIAATGTGTIPANFTSLNISLRSSGSSLSIPSHLRLAGLAGPRFGGGARAADAWDRVVGLGFGGAADAPSSATSSSSSPLLLSFHSGSVGLDVSPPSASTSPAAADLSRKRRWEQEMQQQQQYQQQMAGYTQSQIPAGTVWMVPSSNAQAAGGGAPPGGGGESIWTFPQSGSGGGGGAATVYRGVPSGLHFMNFPATPMALLPGGQQLGLAGAGGGGEGHPGILAALNAYRAQAAQPDAGAAAQNGAQGSSQHRQHQHHGGGGGGGDERHESMSASDS

SEQ ID NO: 17941 - protein, 225 aa, Oryza sativa
  Clone ID: TF_OSC401780j.C1.p3.gm
MSRALNSGCGPSSGRASREITTWLHGSLRDTVGRRRRRGRCGDRRRMRAHAARERIHYQQQQMQVVAAVTGNRRMQGLGPKRSSNKDRHTKVDGRGRRIRMPALCAAWIFQLTRELDHKSNSETVQWLLQQVEPAIVTAMGTGVGTDIQGPSLPSPNCALSRSHHHHHHMWAAAAAPPAASAAFAGLSQDGHIGVLSARSLSQFYHQEDGEDDRDDGESDEESGQ

SEQ ID NO: 17942 - protein, 190 aa, Oryza sativa
  Clone ID: TF_OSC412575j.C1.p3.gm
MQVVAAVTGNRRMQGLGPKRSSNKDRHTKVDGRGRRIRMPALCAAWIFQLTRELDHKSNSETVQWLLQQVEPAIVTAMGTGVGTDIQGPSLPSPNCALSRSHHHHHHMWAAAAAPPAASAAFAGLSQDGHIGVLSARSLSQFYHQVGDASAAVVTPAAPWMVAGLSPSKCLGESSIFFTPQSAHDMLFER

SEQ ID NO: 17943 - protein, 165 aa, Oryza sativa
  Clone ID: TF_OSC21368j.C1.p2.fg
MPALCAARIFQLTRELGHKSDGETVQWLLQQAEPAIVTAMGTGVGADIRRTLPPFPKLRPLQVAPPPPPHVGCRRGVRRCHIGFATMFAAHVAAAMPGLELGHSQDGHIGVLFARSLSQFYHQVGGASATGQLPHPHHHHQHHQQQQEDGEDDRDDGESDEESGQ

SEQ ID NO: 17944 - protein, 260 aa, Oryza sativa
  Clone ID: TF_OSC405018j.C1.p5.gm
MAIKDRFTGNPRRLTVLTTSGSGAEDLPSGSCPVEVGFVAAVKDCLWSGVPPLQNEAGVMPCHIHGGAALDKQLVPTASKANGTTLAVRKPPSKDRHSKVDGRGRRVRMPIICAARVFQLTRKLGLKSDGQTIEWLLREAEPSIIGATGTGTTLASSSPRRPLHPRQAPPWADFGQFWSFAAVREMMAATAAPAMLGEAFAATKQQPGRSQPRRRMCSTTGEVTAAASAPRGLLAGAAGARRLSVPAATSPLSPDVLLYG

SEQ ID NO: 17945 - protein, 258 aa, Oryza sativa
  Clone ID: TF_OSC400621j.C1.p28.fg
MQQQLDQQQQQQQHQYDHFFSGHGQFNSETLEAVLCRPPRGAAADPAVPAAAAAAAVLTAARNGGGGHGRARKRPFRTDRHSKIRTAQGVRDRRMRLSLDVARDFFALQDRLGFDKASKTVDWLLTQSKPAIDRLAADPSSSSHRAAGDTRMSSAERGGDHHMVAVGAAGSGKGDADKARGPRGGRSAPMELGCELGRLVPAPVLGEYYYELAEMMSNNTGGEGDDDGDYDDDGDFLDDSGFLCHYRSKKKFSIKDIS

SEQ ID NO: 17946 - protein, 320 aa, Oryza sativa
  Clone ID: TF_OSC419993j.C1.p2.fg
MHPFMDLELEPHGQQLAAAEEDGAGGQGVDAGVPFGVDGAAAAAAARKDRHSKISTAGGMRDRRMRLSLDVARKFFALQDMLGFDKASKTVQWLLNMSKAAIREIMSDDASSVCEEDGSSSLSVDGKQQQHSNPADRGGGAGDHKGAAHGHSDGKKPAKPRRAAANPKPPRRLANAHPVPDKESRAKARERARERTKEKNRMRWVTLASAISVEAATAAAAAGEDKSPTSPSNNLNHSSSTNLVSTELEDGSSSTRHNGVGVSGGRMQEISAASEASDVIMAFANGGAYGDSGSYYLQQQHQQDQWELGGVVYANSRHYC

SEQ ID NO: 17947 - protein, 331 aa, Oryza sativa
  Clone ID: TF_OSC401008j.C1.p9.fg
MSAIPMNSWLVPKPEPVEFFGGMAMVRKPPPRNRDRHTKVEGRGRRIRMPAACAARIFQLTRELGHKSDGETIRWLLQQSEPAIIAATGTGTVPAIATTVDGVLRIPTQSSSSSGPASSAVVDGEESSAKRRRKLQPTRAVAGASPLATAAPAAYYPVIADPLLQGSGGAAISVPSGLAPITATGAPQGLVPVFAVPATGSPAVAGGNRMIPQATAVWMVPQPAGAAGAGNQPTQFWAIQSAPQLVNFAGAQFPTAINVADFQQQQQQQPVSTTIVQNSNSGEHMHFSGADSHEQQRRGRKEGNSGGVVDHPEEDEDDDDDEPVSDSSPEE

SEQ ID NO: 17948 - protein, 445 aa, Oryza sativa
  Clone ID: TF_OSC407741j.C1.p10.fg
MELAGSNNKRGRVRGPNDDDDDAGEPDAKRHHHQLLLPWPQQQQQQHPASRIYRVSRASGGKDRHSKVYTAKGIRDRRVRLSVSTAIQFYDLQDRLGYDQPSKAIEWLIKAAAAAIDKLPSLDTASFPTNPASSAAVAAAAAPPLPHAEREQQQQLTKSGCSSTSETSKGSVLSLSRSESRVKARERARERSSAAAAAASKDAGDDAATPTAPTAAPASSQAASFTELLTGMAAANASPADHKQQQAWQPMTVAAATADYIGFAAAAAPHTQPRKSAAGHHSAMPHTFASPAPHLANITPIAMAPAQHFTLTPAAAEHHAEMTHYSFDHFMPVHAAAAAAAAASTPAGGDYNLNFSMSSGLVGVHSRGTLQSNSQSHLSSHHHHHHQQQQQQQQLQRLSAPLDAPNIPFLFSPAAAPTAADTQFAAALQLWDGFRHADIKEKGKH

SEQ ID NO: 17949 - protein, 221 aa, Oryza sativa
  Clone ID: TF_OSC418457j.C1.p6.fg
MAAAGEKDKHSKVVTSRGLPDRRVRLSVPTAIAFYDIQDRLGVDQPSKAIEWLIRAAAAAIDALPSLDCSFVLPNAAQLLTRRRRRPSSRRPSTEQARTRKATMAASPRKSGEKRRKTRSRCAARRAERIAKLRARREGWMPRREASTSAASGGQSWIRKPSTPRSGGLCSGTGEGEEGGGRSMGEIKEDELKHGGERSGATAGGEGRQGGGAERGGGGRR

SEQ ID NO: 17950 - protein, 211 aa, Oryza sativa
  Clone ID: TF_OSC407361j.C1.p2.fg
MSSRDAAATFHVYQPVQIPTATVAPAAAVSAAPAEAVAQLVPAPSKKAAGAAGGKDRHSKVNGRGRRVRMPIVCAARVFQLTRELGLKSDGQTIEWLLRQAEPSILAATGTGTTPAAFVSSSAPSTSSSHQHTLLGKRQRQESAAADAVSVAGAASAFWAALPAPGRPDAWGFSPLDAQPTYVPMAQAHHHHLNLLAALSGAARRAEEESR

SEQ ID NO: 17951 - protein, 311 aa, Oryza sativa
  Clone ID: TF_OSC400800j.C1.p53.hg
MRVSTVGGEGSGRSEGGIVADERWGGREGKGRRRGEEFHRRWGKGKGRRRGEEIRRRRHTGDGAVREKETGRGMCVWDEDLEGEKERGGPPRRPKLGSKPPKDLGHPTPTDADPTSQNPPTPPPPPPMMASSSDLILYNLVPAQPLNPSAIPNPNPDLSIAAAEPPSSDGATPRRVRPRKSPSSSDRHSKVAGRGRRVRIPAMVAARVFQLTRELGHRTDGETIEWLLRQAEPSIIAATGTGVTPEEAPPAAVAIGSSSVAAAAAAGGHGGAFVHVPYYTALLMQPPNADEPPMASAASASGTTAADENNN

SEQ ID NO: 17952 - protein, 367 aa, Oryza sativa
  Clone ID: TF_OSC400348j.C1.p2.hg
AHQHHPFYYAAAQGGANTMPAPASFMGSLAIVPAAAAPGGGGGQVQAAAAPVASSEKKAVVAAGAGAKRPTKDRHTKVEGRGRRIRMPALCAARVFQLTRELGHKTDGETIEWLLQQAEPAIVAATGTGTIPANFSSLAVSLRSAASHSSSPRAAPFHHLQQQQQHDVAAMLGFHHHHHQLLPPPPPHQHPEPTPQDPGAGEFMRKRYREADDLFKDTSRQDPVDGATGEAEQKARAAAAAAAPPPTAPSAMWAVGPNTTGATAAFWMQPAWAFPHGAGAGAAGNTVQAPLQFMSRSSFPTAMNVTMADNNNSSNNNLGMLAALNAGGGGRSGEHQHQHEGQSPAEMDHQRRANGGGGEAGGAASSQ

SEQ ID NO: 17953 - protein, 573 aa, Oryza sativa
  Clone ID: TF_OSC401369j.C1.p12.fg
METRLWDPARWMDAHWSSNSSGGEEGGGGSGSEAPPPPGHPRRRRRRRRRRRKRGQEEADEQQQQQHDHHRLLQLHHHQGVQQDQEPPPVPVFHLQPASVRQLSGSSAEYALLSPMGDAGGHSHHHQHGFQPQLLSFGGVGHHHHLHQFTAQPQPPAASHTRGRGGGGEIVPATTTPRSRGGGGGGGGEIVAVQGGHIVRSTGRKDRHSKVCTARGPRDRRVRLSAHTAIQFYDVQDRLGYDRPSKAVDWLIKNAKDAIDKLDVLPAWQPTAGGAGAGNAAAPPSSSTHPDSAENSDDQAQAITVAHTAFDFAGGGSGGTSFLPPSLDSDAIADTIKSFFPMGGTAGGEASSSTTAAQSSAMGFQSYTPDLLSRTGSQSQELRLSLQSLPDPMFHHQQHRHGGGGGGGNGTTQQALFSGAANYSFGGGAMWATEQQAQNQRMLPWNVPDPGGGGGAAYLFNVSQQAAHMQAAAAALGGHQSQFFFQRGPLQSSNQPSERGWPETVEADNQMSHHQGGLSPSVSAAIGFAAPGIGFSGFRLPARIQGDEEHNGGGGGNGDKPPPPSSVSSASHH

SEQ ID NO: 17954 - protein, 885 aa, Oryza sativa
  Clone ID: TF_OSC100626j.C1.p2.fg
MEAQADAGGDDLAAMREQCRSLEEAIGFRRETQMGLVASLQRLVPDLVPSLDRSLRIIAAFNDRPFVPTPNPDGGHGKSPAALKPHHRRALPDPARSTRRKTSPGSSPASVAAAPGGLDAVRTMVAVCLLELVPFAEIDAAALARRLQAESSSASEAERTALADLAAELGGSAASAVVLALRRIAEDTGGVQIEEAMIGGKSMTMVWAIDRNKLLKELPESATLPLLQPPPAPQMPPSETDAGSAMIPRTPQQQQPQPDMWPHSMPPIFPRPRGMTMQGMQRVPGVPPGLMPLQRPFMGPAGVITMGGGVGPSPNQQKQKSEEDELKDLELLLNKKTYREKQNTKTGEELLDLIHRPTAKETAVAAKSHTVSPVVVNELAVADLGFEPRGLNVKTIAYKEMGDTRSKSSKIYSMFKTKGGSQLKEYCTNLTKEDCRRQSGSFVACDKVHFRRIIAPHTDTNLGDCSFLDTCRHTKTCKYVHYELDQTPDIPPMMAGALAPPRQIRLQRAEYCSEVELGEAQWINCDIRNFRMDILGQFGVIMADPPWDIHMELPYGTMADDEMRTLNVPALQTDGLIFLWVTGRAMELGRECLELWGYKRVEEIIWVKTNQLQRIIRTGRTGHWLNHSKEHCLVGIKGNPLVNRNIDTDVIVAEVRETSRKPDEMYPMLERISPRTRKLELFARMHNAHAGWLSLGNQLNGVRLVDEGLRARYKAAYPDSEELLEGAHTGSPMRPRGGEGVAVSLPGETHTTVGFPGRIRAPNPMGLSGAIGLHLGPCQLFSKLSPRMTISPAGPGPLRGPDPTGAGAISDPWIVKKARLVKKEVEPIFSDSDAMKNAPKTTTTCPRCQNGEAYYRQMQIRSADEPMSTFYKCCREECQFDWRED

SEQ ID NO: 17955 - protein, 156 aa, Oryza sativa
  Clone ID: TF_OSC26017j.C1.p3.fg
MAFWQARDFLFCGVCGTLLKFDSVRSASCPLCGFKRKAKGRRLPHLSPCKALGCVLLAADAFVLFFYGADIEGKETRYTVTAEDIRRELKLDPYVILETTLKEEDVIVERATVNKECEKCKNPELQYYTKQLRSADEGQTVFYKCANCRHEFNENQ

SEQ ID NO: 17956 - protein, 123 aa, Oryza sativa
  unsure (1)..(123): unsure at all Xaa locations
  Clone ID: TF_OSC645j.C1.p1.np
FNFMDHRSCLFNELCGFLNLVPTIYIRYERRFPWLFICSXHFACCXQDIRRELKLDPYVILETTLKEEDVIVERATVNKVNKECEKCKNPELQYYTKQLRSADEGQTVFYKCANCRHEFNENQ

SEQ ID NO: 17957 - protein, 367 aa, Oryza sativa
  Clone ID: TF_OSC900118j.C1.p24.fg
MERELLETFEAAKKAADAAAGADDSPEADRCLDAMRRLRGLRVTTDVLVSTQVGKRLRYLTKHPHSDIQSMATDLLGYWKKVVIEEGKKNGTTENVGSTNSAARAEKAQPMKVDKSSASGSVKPEKREVNVRGQKPESIKVEKITNNDSKNQQVKVERAPKEATRTPDTKKPSSVPNGPPKLTSLVKCNDPTRDKIRELLADAFSRVHGETSKDDREEVRNILDEVDARDPFRVAVTVESALFERLGRSTGAHKAKYRSIMFNLRADNNTDFRRRVLLGQVRPERLVDISPEEMASDARKLENKQIKEKALFDCERGGAPKATTDQFKCGRCGQRKTTYYQLQTRSADEPMTTFVTCVNCNNHWKFC

SEQ ID NO: 17958 - protein, 373 aa, Oryza sativa
  Clone ID: TF_OSC900397j.C1.p13.fg
MERELLEAFEAARKAADAVGEAAAAAGAGEGESPEAARCVDALRRLRGARVTTAALVSTQIGRRIRYLTKHPHSSIKATASDLLGHWKKVVIEEDKKNGALQNGKSSSTVVKVEKVEPMKVEKASPRATVNNNNMDTRVVNHKGGKVEKFSNAELRTQSIKVEKVQKVVHKVSSVEKPSPVQGGPPRLTSVVKCGDASRDRIRAILGDAFSRVSEETRKDDREEVRNIIEEVKACDPFRIAVMVECALFQKLGNFNGPNKQRYRSLMFNLKDDHNTDFRRRVLLGQVQPERIADLTPTEMASDTRKLENKKIEEKALFECERGGAPKATTDQFKCGRCGQRKTTYYQLQTRSADEPMTTFVTCVNCNNHWKFC

SEQ ID NO: 17959 - protein, 312 aa, Oryza sativa
  Clone ID: TF_OSC900356j.C1.p20.fg
MSDSFCPDCKKHTEVAFDHSAGDTVCTECGLVLEAHSVDETSEWRTFANESSDNDPVRVGGPTNPLLTDGGLSTVIAKPNGAQGEFLSSSLGRWQNRGSNPDRSLILAFRTIANMADRLGLVATIKDRANEIYKKVEDLKSIRGRNQDAILAACLYIACRQEDRPRTVKEICSVANGATKKEIGRAKEFIVKQLEVEMGQSMEMGTIHAGDFLRRFCSTLGMNNQAVKAAQEAVQRSEELDIRRSPISIAAAVIYMITQLSDDKKPLKDISLATGVAEGTIRNSYKDLYPYASRLIPNTYAKEEDLKNLCTP

SEQ ID NO: 17960 - protein, 210 aa, Oryza sativa
  Clone ID: TF_OSC422155j.C1.p6.fg
MASRMGLAGNVRDRGKNVLRKVEEAKVCARGRSRDALYAACLHTACRMEGAPRTLKEFIAATPDAAATKRNLGKFIHAIKRLLGSNDEEAEAGQDQAGSKATNGCGGGGGAGAVVRASNYLLRYGSAVGMSGQEVSAAQRAASRLDESLDVRRNPQSIAAAIIYMAVQRAGGGGGRSKSVREVSAATGVSESTIKDAYKDLCQHAEVLFG

SEQ ID NO: 17961 - protein, 562 aa, Oryza sativa
  Clone ID: TF_OSC400277j.C1.p29.fg
MSQPTQCPYCRASGPARCVTTQPPLSRAVSECSSCARLVLERHLHTHPFFPLLPSLHPLPLVTPDLADAAPSPSPSAASASGDDDDDDDPFLPAGFVSAFSAFSLERHPVLARSASAFSGQLAELERALAVESAASSTPDPAGPMVSVDSLRAYVQIVDVASILRLDRDIADHAFELFKDCSSATCLRNRSVEALATAALVQAIREAQEPRTLQEISTASNLPQKEIGKYIKILGESLKLSQPLNSNSIAVHMPRFCSLLQLNKSAQELAAHIGEVVVNKCFCTRRNPISISAAAIYLACQLEDKRKTQAEICKVTGLTEVTLRKVYKELLENWDDLLPPNYTPATPPEKAFPMTTIYSSRSSSGKDLYQDKQLDSAKLKSSEAAEPDHMVIVKEEEDKKIGPFSRPSAKTETHDLNQAIWTPNVSSTPFSSSPKLDHDKTETSVRGINLNEASCTMDTDRPDMPVKSPFAERWLNESKVIPSPSRQPAPWQLKQGAPSAGSSYHSMPYGLDLLSRGKRNTGDGGDKEGRCFLVKFGSSCHPGVSVSCHVECYTGTKYSVIN

SEQ ID NO: 17962 - protein, 343 aa, Oryza sativa
  Clone ID: TF_OSC422155j.C1.p2.fg
MVLDHATGDAICTGCAFDLGNGANACPEPPRWRAAAGHGDSDGDRSSSSSSVGGDVSPAAADPLLQGGEGVACSVGAPPVQPRVRGAVVPPKQMRAGGAVPPKVRCGVPDTSKALAEGFDAIVGMASRLGLADKVSDRAKEVLRKLEEARACPKGRSRDALYAACLHAACRVEGAPRTLKELIAATSDAAATKRDLGKFINAIKRHLGMEERGQDQAADMKASGGGVGVVVRAGDYLHRYGSAVGMSGQEASAARRAAGRLDSLDVRRNPQSIAAAIVYMAAQGSSGVRKSVRRHGRQRVDHQGRVQGPVPARRPALRLKHTATARRDAALLNLLCVLRVVGY

SEQ ID NO: 17963 - protein, 411 aa, Oryza sativa
  Clone ID: TF_OSC410156j.C1.p3.gm
MPPDLEEARPGPPPPRRPDRSAAGSGGGAREKEGEVERVRGWKGALPLARGRVPTPPPLAGGRAPPLPLLVSRCKARWCVETRRGRDVVRAALRGKAASGGPAQCGVAGNEQCYCPECHRTTVVVVDHATGDTICTECALVLEERYIDETSEWRTFSDAGSGEDRDPNRVGGCSDPFLSHAELGTVVAPAKRQAKDTASPPHVRVDSKSGQDSSLAVAFRAISDMADRLQLVATIRDRAKELFKKMEEAKLCARVRNRDAAYAACLHIACRNEGNPRTLKELASVMRDCQDKKEIGRMERIIRRHLGEEAGTAMEMGVVRAADYMSRFGSRLGMGKPEVREAQRAAQTLEDKLDVRRNPESIAAAIIYMVVQRAGAQTSARDVSKASGVAEATIKEACKELSQHEELLFSS

SEQ ID NO: 17964 - protein, 467 aa, Oryza sativa
  Clone ID: TF_OSC6718j.C1.p1.fg
MYCSHCQDNCPVVKDPDKNYTCCGLCGKVLDDQVYDGEPTFQKGADGQARLAGSILSSIESGNSVSHERTINKGREEIRQIVSSLHVAGGDTIISMAHRYYTLAVDKNFTRGRRTTHVAAACLYIACRQSKKAYLLIDFSDHLQISVFAKFCYLRNIQLSKSSSTPAFSYIVLQNTGRKPSGLCGAALYIAALSHGYDYTKADIVAVVHVCEATLTKRLIEFENTDSGSLTIEEFLAKADEQVLVTKISPKSGEVLCKHKDKAEHFAHGLCEKCYNKFMKLSGGLEGGSDPPAFQRAEKQRLEAAKNAKGTAASKEAALESVCEARESDVENNITTPPKNIIGDKHSTIPSVKVAGDSVATEDPEGEGKNDKADEGPESLSDIDDAEVDGYLHNEEETQYKKIIWEEMNKEYLEEQAAKAALAAELAARGVVVEEGKRKRRRHNEDGKNATPAQTPAEATQNMLKRK

SEQ ID NO: 17965 - protein, 538 aa, Oryza sativa
  Clone ID: TF_OSC900226j.C1.p16.fg
MYCSHCQDNCPVVKDPDKNYTCCGLCGKVLDDQVYDGEPTFQKGADGQARLAGSILSSIESGNSVSHERTINKGREEIRQIVSSLHVAGGDTIISMAHRYYTLAVDKNFTRGRRTTHVAAACLYIACRQSKKAYLLIDFSDHLQISVFAKFCYLRNIQLSKSSSTPAFSYIVLQNTGRKPSGLCGAALYIAALSHGYDYTKADIVAVVHVCEATLTKRLIEFENTDSGSLTIEEFLAKADEQVLVTKISPKSGEVLCKHKDKAEHFAHGLCEKCYNKFMKLSGGLEGGSDPPAFQRAEKQRLEAAKNAKGTAASKEAALESVCEARESDVENNITTPPKNIIGDKHSTIPSVKVAGDSVATEDPEGEGKNDKADEGPESLSDIDDAEVDGYLHNEEETQYKKIIWEEMNKEYLEEQAAKAALAAELAARGVVVEEGKRKRRRHNEDGKNATPAQTPAEATQNMLKRKRLGSKINDEAVNKLYNTKDEDGKADKEMDFNDEYGQDTGDGETFEGGYDYPDYNYDGYGDGAYGDYDGVDF

SEQ ID NO: 17966 - protein, 251 aa, Oryza sativa
  Clone ID: TF_OSC401733j.C1.p22.fg
MGVTCVADKRCKEKWENINKYFKKVKESNKKRPEDSKTCPYYHQLDALYRTKAANAAAAASASPAPATTTVLAPVPLSQTPPHVDHGGSNGNGNGWASANNGGGGSSSGGMQTKASNNGTATAGGLPAVSGSKQVPVAKETAGQRQPQPLAMNHNYGNDRMADDMDSDSMDDDDDDDEFDDDENDDDIGGGKMQVQYETSSHFQRPQLQNQNVVVGRPNASGGGGGGAPTTPAGPPPPAATSGTSFLACVQ

SEQ ID NO: 17967 - protein, 283 aa, Oryza sativa
  Clone ID: TF_OSC900242j.C1.p18.fg
MDPFHHLNSSFSNPYHPLLASPPHHFAPDPLPPPPPPPPPPLLPADPPSLERERLPQWSHAETAAFLAIRADLDHSFLSTKRNKATLGGRLGAPPRPRTSPGPPISASPREEYSVERARALERKKVKGKDPDDDHDGGGDGDEDDEEEADQQVDEEDDGASGDTTRAGSKKRRRKAAAAARRTGSTGGVEGEVEAMLREFMRRQIEMEERWMEAAEAREAERRAREEEWRTAMVALGEERLALVRRWREREDAWRARAEEREERRHQLVAALLAKLGAGDASA

SEQ ID NO: 17968 - protein, 410 aa, Oryza sativa
  Clone ID: TF_OSC401599j.C1.p10.fg
MEGNLPPRGALVHGHGGGVGAFDLEATMQPPPPFHFAQDPHLHHHQGMVPVRGNPMLDLGNVVKTSPSDEEDVDDGHHHGGGGGSGKEASQWHRVKWISGMVKLLVSAVAYIDEDVDMDYGTGSAARRKHAMLKRKGKWRLVSAAMTERGFPVSPQQCEDKFNDLNKRYKRMTEILGRGTACQVVEHPELLEGMRLSGKLKEEARKHLNSKHLHYEEMCSYHNRNKMCLFDDPALQKSLRLALRSGEEHAKKNPFGYDDEDFSDDDDEDEEFDDLEVSAEDHHHGIHGAKRLKHDQEETHFGSNLSEVAVIDMNKMLSEGSGGPTAEKSPSTPGMRDIRLEKRRLKIKAQMLKIEQKHFKWLRFSKEKDRELEKMRLENEKMKLENERLELELKLKEIEMGIKPKKIFSD

SEQ ID NO: 17969 - protein, 547 aa, Oryza sativa
  Clone ID: TF_OSC400601j.C1.p83.fg
MGPRGVVGSAAMLGLEMHLAHPQMHAAAYQQPDPHGGGGGGFQQQVAAVRQQQQQSYSPYSAGASSRVIKAPGHDDGMGNGAGKGGVVQQQQQPGSVGCPWTRMKWTDGMVRLLINVVYSVGDDGDGVAAGGAAGGKASAGAAGHGKAGGSGSHGAHGQAAAQQKKGKWKSVSRAMMESGHMVSPQQCEDKFNDLNKRYKRVVDLLGRGKACKVVENHALLDAMDELTHKAKDEARKLLSSKHLFFREMCAYHNSGAAAAAAAHGPHGAGAAGVEATACFHHPPPASMAAASSAARQAAAAAPSLGMKDSSAGPEDDEDDSEDVPSSNEVDDEDDDDDDDDDEVGPGMKSRRIYGGHRVHHHHHHHNGHHKRRRGDDVSSAGAGDDDDEDGVKRARGAASAAGGGDDEGPSAVQQLQSELAAAVAGGGDPQQVRQWVRRRTVEVEEQQVAHEVRAYHLERQRLKWERFRANKERDMERARLRNDRLRIDGRRMLLLLRQKDLDFDIAEANSSSVDHLTSSAPPPLAALQQQQQPLGSSPSTAGGHPN

SEQ ID NO: 17970 - protein, 329 aa, Oryza sativa
  Clone ID: TF_OSC404645j.C1.p10.fg
MSGGGEVSGRAPRLPRWTRQEILVLIEGKRVVEGRGRGRGRGGGGGAAAEPTKWAAVAEYCRRHGLERGPVQCRKRWSNLAGDYKKIREWERSLSSPSSSSAAAGMGKEVSFWAMRNDARRERRLPGFFDREVYDILEGRGGGNAAAAAAAGKEGEEEKAAVFDSGRAAAGGGGGGGDDGLFSSSEEEEDDDEATPPATTPAAAPAPPPAPAPAVPVLTSEKKSDPPRQDASEQAGTSRAKQPEQIVEDSPAQGAHKRQRSDDASGEAPDLQGQLIEILDRSSRMVAAQLEAQNINCQLDREQRKDQVSSLLGVLGKVADALYRIADKM

SEQ ID NO: 17971 - protein, 432 aa, Oryza sativa
  Clone ID: TF_OSC9116j.C1.p2.fg
MEGNNLPSGSLMRSNSGQMHAPNPGKQGFDHTQMPGNLSMHVNQSTDSDHLSEFQFGELGKVDHHHHHHHRQHAKNGMSDDEEHGVNEDATDSQSGKGKKGAAWQRMKWTDSMVKLLITAVSYTGEDPGADSGAGKRNSAIMQKKGKWKAISKVMGERGCSVSPQQCEDKFNDLNKRYKRLTDILGRGTACKIVENHALLDCMSNLSDKMKDDARKILSSKHLFYEEMCSYHNNNRVSLPEDPALQRSLQLALRCKDEHDLRRGTSGDADEDDQSVDSDSEEENDEENYTLQGDKSALPMHKRLRLMTDQEDVGFGNSSSSHGCSRRSDSHGISLDINKAFPDGTNLALAQKDLATQSADLEEQRLQIEVQAVYLAKQRLKWERFSKNKDRELEQMRLENEKMRLENKRLELEVRHKELELELKQKGSGNHA

SEQ ID NO: 17972 - protein, 483 aa, Oryza sativa
  Clone ID: TF_OSC400355j.C1.p16.fg
MWAPWSVGPLSVGPACQRLYSCASSCTPVSILYGTNKKLKCLGDRFGEMEGSNPPGNMTQGPSYGSLDLHGISKQMHPPNSGNQGFNQPQIPGNFTIPMDRVTEPDNISDGVQLGQHGKIAHHHHHHRHHSKNHGSDEEEHDMNEDAADGKDKKGSPWHRMKWTDSMVKLLITAVSYTGEDPGADLGGGRRNYSMMQKKGKWKAISKVMGERGCHVSPQQCEDKFNDLNKRYKRLTDILGRGTACNVVENHSLLDHMDISEKMKEDARKILNSKHLFYEEMCSYHNNNRISLPEDPALQQSLQLALRCKEDNDFMRHASGDAELDDDQSEDSDYEENEEEHRAVDTNIRGPSMHKRMWHVVDHGDVGFVTSCSNDGSGRSDPYDVLDINKPFPDGCDLALVQKDLALKAAEIQKHRLQIETKAVQLAKQRLKWEMFRKNKDLELEKLALENEQMMLQNKRFELDLRHKELELEIKIKGNANHP

SEQ ID NO: 17973 - protein, 277 aa, Oryza sativa
  Clone ID: TF_OSC400920j.C1.p34.fg
MEPGCGEGGGGGGGRDERVPQWGAQETRELIAARGEMERESAAAAAARRSAKTLWEAVSARLRERGYRRTAEQCKCKWKNLVNRYKGKETSDPENGRQCPFFDELHAVFTERARTMQQQLLESESGPSVKKKLKRPSGDLSSEDSDDEEDGSGDSGDEKPIRSRKRKIADKRQQSQRMAEKSRTSISSIHELLQDFLVQQQRMDIQWHEMMERRSQERIVFEQEWRQSMQKLEQERLMLEHTWMEREEQRRMREEARAEKRDALLTTLLNKVLQEDL

SEQ ID NO: 17974 - protein, 89 aa, Oryza sativa
  Clone ID: TF_OSC900104j.C1.p3.fg
MPLTLLCLAFSPFAWPPSLPPPPQTPDAIAGCKNKAEAGAGRWLRQDTLELLTIRPEMDTVLQEATLNGAIWEEISRICDVFFVGDFVM

SEQ ID NO: 17975 - protein, 353 aa, Oryza sativa
  Clone ID: TF_OSC900025j.C1.p26.fg
MTPQPQLQPPQPQSKEANTVVRAAPPPQEQHDTAASGGGGGASSSRWPKAEVHALIQLRTELETRYQDSGPKGPLWEDISAGMRRLGYSRSSKRCKEKWENINKYFKKVKESNKKRPEDSKTCPYYHQLDALYRTKAANAAAAASASPAPATTTVLAPVPLSQTPPHVDHGGSNGNGNGWASANNGGGGSSSGGMQTKASNNGTATAGGLPVVSVAGGNGNGNGVAATTDNKGSKQVPVAKETAGQRQPQPLAMNHNYGNDRMADDMDSDSMDDDDDDDEFDDDENDDDIGGGKMQVQYETSSHFQRPQLQNQNVVVGRPNASGGGGGGAPTTPAGPPPPAATSGTSFLACVQ

SEQ ID NO: 17976 - protein, 687 aa, Oryza sativa
  Clone ID: TF_OSC900025j.C1.p23.fg
MPPFSAAGGEGAPSPISSRPPPPEQAAAAAAEEQLNGSSLEHDGVLGGEEGDRGGSSAGNRWPRQETLALLKIRSEMDAAFREAALKGPLWEEVSRTQKVIENSEGTSTTPPVVAFNQKGELLVGTPAKRQAVTNPQNTFFGTKRLIGRRFDDPQTQKEMKMVPYKIVKALNGDAWLPPPHGKQYSPSQIGAFVLTKMKETAESYLGKSVSKAVITVPAYFNDAQRQATKDAGRVGGLGGGGEEAIGAVQLRLSFRCLLSCTPSLRSAICVNCVVDSLQFSSHHDVAMDLINSVTGVDEEGRSRQRILSFAAKRYVSAIERNPEDPDAYYNWALVLQESADNVDPDSSSSKDSLLEEACKKYAEATRLCPTLYDAYYNWAIAIADRAKMRGRTKEAEELWKQAIMNYDKAVQLNWNSPQALNNWGLGLQELSAIVPARDKQTIIKTAISKFRSAIQLQFDFHRAIYNLGTVLYGLAEDTMRSAGPDVSPNDLYSQSAIYVAAAHALKPNYSVYRSALRLVRSMLPLPYLKAGYLTAPPADNTIAPHKHWERSEFVLNHEGLQQVDASESPSSKPLGHMGRSKKYIKVAVEDIVSVSACSDLTLPPGAGLCIETIHGPLFLVADTWESLDGWLDAIRLVYTIFARGKSDVLAVYRVNHAGIEVVSPSKTVVPSSINSLFTSFRRTGAE

SEQ ID NO: 17977 - protein, 202 aa, Oryza sativa
  Clone ID: TF_OSC101622j.C1.p1.fg
MDPFHHLNSSFSNPYHPLLASPPHQLAPDPLPPPPPPPPPPLLPADPPSLERERLPQWSHAETAAFLAIRADLDHSFLSTKRNKALWEAASARLHALGFARTPDQCKSKWKNLVTRFKGTEGAAAVAAAGTDQMQGGQGGGAAARGSSSSFPFHDELRRIFDARVERARALERKKVKGKDPDDDHDGGGDGDEDDEEEADHH

SEQ ID NO: 17978 - protein, 711 aa, Oryza sativa
  Clone ID: TF_OSC101782j.C1.p4.fg
MQSGYGGVSEFQQYIMDPGAFAMSAPPQPAQAAAAAAAAAAAAAGGQELGAPFRYQPLHHHALPQHHHHHHPPPQMPPHLAHFGGAGGIPFTQQLLHQAAAAGHHPHLQLFHEQHHHQKHQQQPPPPARWAPQHHHHHHPHHHLGLDVEAAVPESSGAGAGSAASGAAAPPGVPPFLAAAMSFKLGVDGGGGSGATGGTDDALNDGGGAGSGMMLHGGGGGGGGGDDEAATESRLRRWPGDEETSIKEPTWRPLDIDYIHSSSSSKRAPPKDKPATPDSPAPPPPAYYFKNKPDDNAAAASAASAGAVNYKLFSELEAIYKPGSGGPQTGSGSGLTGDDNAMLAPPMADLPDAAAANPPHLNTSETSAGEDAHAVVQPQPQTQQPSGADAARRKRKRRRQEQLSASASFFERLVQRLMEHQESLHRQFLDTMERRERERAARDEAWRRQEADKFAREAAARAQDRASAAARESAIIAYLEKISGETITLPPPAANPAPGADEQDGVGKEVVAYDGEGSLQLSSSRWPKHEVEALIRVRTGLEDRFQEPGLKGPLWEEVSARMAAAGYRRNAKRCKEKWENINKYFRKAKESGKKRPAHAKTCPYFDELDRLYSRSGSGGGGGSSSAGGNGGEEAKGSSELLDAVVKYPDVRCAPPGFPFDGEQNEEGRTKDDGDEAHHDGDGDGDEEDVGVGVGRATDDHDDQVDESHDGH

SEQ ID NO: 17979 - protein, 263 aa, Oryza sativa
  Clone ID: TF_OSC401779j.C1.p45.gm
LVPVPAPRAKAEDAWAAAGGDGSGTTAPSRWPKEEVQALIDLRMEKEEQYNDMGPKGPLWEEIAAGMQRIGYNRSAKRCKEKWENINKYFKKVKESNKRRPEDSKTCPYFHQLDAIYRKKHFAGRGGGGGGVTIAASHSSLAIVTVSEQDNPSQRELEGKSSNDVGNVQLAVPLLVHNAPDKKVEGSEGEPNVTAAAEETDSDEMCGEYTDDGDDDDKMQYKIEFQKPTAGGGGDGNDAPVPATTAAATSSAPTSNTSFLAVQ

SEQ ID NO: 17980 - protein, 150 aa, Oryza sativa
  Clone ID: TF_OSC900232j.C1.p13.fg
MDPFHHLNSSFSNPYHPLLASPPHHFAPDPLPPPPPPPPPPLLPADPPSLERERLPQWSHAETAAFLAIRADLDHSFLSTKRNKALWEAASARLHALGFARTPDQCKSKWKNLVTRFKGTEGAAAVAAAGTDQMQGGQGGEDNERLVKKL

SEQ ID NO: 17981 - protein, 140 aa, Oryza sativa
  Clone ID: TF_OSC101435j.C1.p1.fg
MDPFHHLNSSFSNPYHPLLASPPHHFAPDPLPPPPPPPPPPLLPADPPSLERERLPQWSHAETAAFLAIRADLDHSFLSTKRNKALWEAASARLHALGFARTPDQCKSKWKNLVTRFKGTEGAAAVAAAGTDQMQGGQGG

SEQ ID NO: 17982 - protein, 886 aa, Oryza sativa
  Clone ID: TF_OSC408508j.C1.p6.fg
MAIYYLEREGLTHNMPMHGHFYTPLPLNHWHADTTNAADMTRGPMRMWAPHVSGMNFIFFISKEKVLMRVEMVSSPDVLIIPSPPFPSGNTRGGGGGGGGSSMQQQQPGGGGGGVQQFGAVAPEMSPFSPAGGGGGGRISMAEAASPISSRPPPAQQQFDELGVGGGGGGGGGFDAEALAAAAVGEEGASGGAGGNRWPRQETLALLKIRSDMDAAFRDATLKGPLWEEVSRKLAEEGYRRSAKKCKEKFENVHKYYKRTKESRAGRNDGKTYRFFTQLEALHGTAAGVVAAPSPVTSLAPPPATAVGVSGGVRAPAEPPPAVVMGNVMSFSTSNTEEYSDEEDSDDEGTEDMGGGGGDERGKRKRLSEGGAAAGVGGGGGGGGGSGKMMRFFEGLMKQVMERQEAMQQRFLEAIEKREQDRMIREEAWRRQEMARLAREQEILAQERAMAASRDAAVVSFIQKITGQTIPMPPIIAAPAITVMPPPAPSQQPQPPPPPSHPTPITSVAPAPPPPPPAAAAAAASQPSPQATKSPLPATPQTQSSMDIVMTAAEAHDAGYDGSGGGGGQPSSSRWPKAEVHALIQLRSNLDNRYQEAGPKGPLWEEISAGMRRLGYSRSSKRCKEKWENINKYFKKVKESNKKRPEDSKTCPYFHQLDALYRNKAALNSSSSSAAAAAPALPPPEHAEPAVTVAAPISQTPPPPPPQPVTTTKNGNGTSSTNGANGEGGGGGSGGMQMQASNGSVVAGNKFFTGAAAKKPEDIMKEMMEQRPQQPAAANNAFNRTDGGGGGGGVDSDNMDEDDEDDYDDDDDDDDDDVDGNKMQYEIQFQHQHHHQQPPQHRHQQSVVRPNAAASAAAGGNPPGTAAPATAAAATTTTGSFLAMVQ

SEQ ID NO: 17983 - protein, 608 aa, Oryza sativa
  Clone ID: TF_OSC401782j.C1.p3.fg
MAAAFDLPPVTTPAPAAPSDVLLPTQPQVSGPEEFPAAAVNSNDDDMMMVDDVVVAGGVGGSGSTGNRWPREETLALIRIRSEMDAAFRNATLKAPVWEELSRRLAELGYQRSGKKCKEKFENVDKYYKRTKEGRTGRQDGKSYRFFSQLEALHAAAPPPPPQQRQGMPVEDPQPLAMAWMMLPGAADLGFLSMSSESESDDESDEEEEEEEAVAPGGGGREGLGDDGDGDGEGGSSTRKLMAMFEGMMRQVTEKQDAMQRVFLETLEKWEAERTEREEAWRRKEVARINREREQLSKERAAAASRDAALIAFLQRVGGAGGEPVRLSPSSAGATRHDAAAAGLQLVPVPAPRAKAEDAWAAAGGDGSGTTAPSRWPKEEVQALIDLRMEKEEQYNDMGPKGPLWEEIAAGMQRIGYNRSAKRCKEKWENINKYFKKVKESNKRRPEDSKTCPYFHQLDAIYRKKHFAGRGGGGGGVTIAASHSSLAIVTVSEQDNPSQRELEGKSSNDVGNVQLAVPLLVHNAPDKKVEGSEGEPNVTAAAEETDSDEMCGEYTDDGDDDDKMQYKIEFQKPTAGGGGDGNDAPVPATTAAATSSAPTSNTSFLAVQ

SEQ ID NO: 17984 - protein, 141 aa, Oryza sativa
  Clone ID: TF_OSC101435j.C1.p1.np
LNSSFSNPYHPLLASPPHHFAPDPLPPPPPPPPPPLLPADPPSLERERLPQWSHAETAAFLAIRADLDHSFLSTKRNKALWEAASARLHALGFARTPDQCKSKWKNLVTRFKGTEGAAARGSSSSFPRGSSSSFPFHDELR

SEQ ID NO: 17985 - protein, 81 aa, Oryza sativa
  Clone ID: TF_OSC401779j.C1.p36.gp
AGLQLVPVPAPRAKAEDAWAAAGGDGSGTTAPSRWPKEEVQALIDLRMEKEEQYNDMGPKGPLWEEIAAGMQRIGYNRSAK

SEQ ID NO: 17986 - protein, 385 aa, Oryza sativa
  Clone ID: TF_OSC416839j.C1.p1.fg
MLLSGPSPQQPTPPLLLPESSGEDGGHDSSSRAAASGGGGGPKKRAETWVQDETLCLIALRREMDSHFNTSKSNKHLWEAISARMREQGFDRSPTMCTDKWRNLLKEFKKARSHARGGGGGGVGGGGAGTGGGNCPAKMACYKEIDDLLKRRGKPTGGGGAAVGSGAVKSPTVTSKIDSYLQFDKGFEDASIPFGPVEASGRSLLSVEDRLEPDSHPLALTADAVATNGVNPWNWRDTSTNGGDNQVTFGGRVILVKWGDYTKRIGIDGTADAIKEAIKSAFGLRTRRAFWLEDEDEVVRSLDRDMPVGTYTLHLDTGMTIKLYMFENDEVRTEDKTFYTEEDFRDFLSRRGWTLLREYSGYRIADTLDDLRPGVIYEGMRSLGD

SEQ ID NO: 17987 - protein, 109 aa, Oryza sativa
  Clone ID: TF_OSC4354j.C1.p1.gm
MALFGFIKQLIGYNIIAFCHPSTVFIFGKSLRGYCGDYGYPIPTRHARWSHGSSLNHDRLASVKGDENGSSADNRWLRQDTLELLTIRPEMDTVLQEATLNGAIWEEIS

SEQ ID NO: 17988 - protein, 422 aa, Oryza sativa
  Clone ID: TF_OSC24072j.C1.p1.fg
EEVLQIVKPQHFLPVHGELLFLKEHELLGRSTGIRHTTVIKNGEMLGVSHLRNRRVLSNGFVALGKEDLRLMYSDGDKAFGTSTDLCIDERLRIASDGVIFVSMEIFRPQKELASSQSGLKGKFKITTRCLWLDNGRLLDALYKAAYAALSSCPVNCPLSHMERMVSEILRKMVRKYSGKRPDVIAVATENTTVSFVEDSETKSSGKFGSFSAPRHSSRSSGRSLEESDKSCPENTEGEAKENLPDVLRTTRDDATTSSNGEAFFSSDLHKPKTLEHFWDSFKSPTAVKIARIVNGSAQGSKSKIGKISIVGKDSSDPSSAPVKSSKKNKWKPEEIKSLIQMRGEMNEQFQTVKGRMVLWEEISSSMLSQGISRTPAQCKSLWTSLVQKYEESKKDEESVKTWPYFLDMDRVLSSQGEMATQ

SEQ ID NO: 17989 - protein, 882 aa, Oryza sativa
  Clone ID: TF_OSC900303j.C1.p3.fg
MGALASLSSLSPCGLARRRSASSAASISCCAAPPPPSAKGSQESRTPRRRVRKTEGATKSLEDSVKRKMEQFYEGLDGPPLRVLPIGGLGEIGMNCMLVGNYDRYILIDAGVMFPDFDEFGVQKIIPDTTFIKKWSHKIEAVIITHGHEDHIGALPWVIPALDSSTPIFASSFTMELIKRRLKEFGIFLSSRLKVFRVRKRFQAGPFEVEPLRVTHSIPDCCGLVLRCADGIIFHTGDWKIDESPVDGKIFDRQALEELSKEGVTLMMSDSTNVLSPGRSISESVVAGSLLRHISEAKGRVITTQFASNIHRIGSIKAAADLTGRKLVFVGMSLRTYLDAAFRDGKSPIDPSTLVHLIESRFLLKVKVEDMDAYAPNDLLVVTTGSQAEPRAALNLASFGGSHALKLSKEDVLLYSAKVIPGNESRVMKMLNRLTELGPKIVMGKDAGLHTSGHAYHDELEEVLQIVKPQHFLPVHGELLFLKEHELLGRSTGIRHTTVIKNGEMLGVSHLRNRRVLSNGFVALGKEDLRLMYSDGDKAFGTSTDLCIDERLRIASDGVIFVSMEIFRPQKELASSQSGLKGKFKITTRCLWLDNGRLLDALYKAAYAALSSCPVNCPLSHMERMVSEILRKMVRKYSGKRPDVIAVATENTTVSFVEDSETKSSGKFGSFSAPRHSSRSSGRSLEESDKSCPENTEGEAKENLPDVLRTTRDDATTSSNGEAFFSSDLHKPKTLEHFWDSFKSPTAVKIARIVNGSAQGSKSKIGKISIVGKDSSDPSSAPVKSSKKNKWKPEEIKSLIQMRGEMNEQFQTVKGRMVLWEEISSSMLSQGISRTPAQCKSLWTSLVQKYEESKKDEESVKTWPYFLDMDRVLSSQGEMATQ

SEQ ID NO: 17990 - protein, 154 aa, Oryza sativa
  Clone ID: TF_OSC5909j.C1.p1.fg
MAMLGSSSAVVLELMTMGYQSAAYLGELLRAASPAQAGDEQQELAAEILRCCDRVIAKLNRGGATGATTGKKRKAAESAAAAAVTSPSLPVTPTKRRARGAEAVREVRSGTTTDGFIWRKYGQKEINGCKHPRLYYRCAFRGQGCLATRRVQQS

SEQ ID NO: 17991 - protein, 329 aa, Oryza sativa
  Clone ID: TF_OSC404464j.C1.p5.fg
MAFGQDTIEQLYRELAGGRRLSAKLQALLEGPLDSRGQKEAVDVSRELGRVFMVSLYMLKPCSNSSRRPEGVTRTAPETRTDDSICLHTPARVKRVRLYFKCTFSRERSCAAKKQVQQRDAGEPPMFLVTYLNEHTCQQPQAVPGTPNTAGSSPTTTSRQRQSSSSPPAEMLDLTMNGAGLFSRLLLPHAVGGGGSAAEEEAAIVTCLAAVISGGGAAAAPPPLIWPTSAPEAAFVAFAAGHSASAADESVADEAAAAQIADMDYCFGQYDQSTFGAAAAADHRVLIGDDGDVQRIVAARIADTVCPRYTRDTSAWETAGTSSMRGSID

SEQ ID NO: 17992 - protein, 294 aa, Oryza sativa
  Clone ID: TF_OSC413087j.C1.p3.fg
MVELCGGEGEGQIMLATELAQLRAMARELEAKMDPDRVAARELCRALASSVDRSIRLAASCFPPPEHPPPAAGNAGRDAAFKKRQVMVPGHGGLISGLRDRRSNALTCVSMQEGDGQGEEAGEGDVGAGHGVAGRRPELEEVRPEGHSWRQIPEGCNATKQVQRADGDPLLFDVVYLGDHTCGQAAVAAAAQSAPPEHAGQEQQRQSSLLAAGTEGIHQQVVAEPMAAPFLFTSTAAGGVDDGYFSFISPANSDCQFSSDFSAGSVGVDMDHEARFEDLFSSTLEFFQSEIQNL

SEQ ID NO: 17993 - protein, 484 aa, Oryza sativa
  Clone ID: TF_OSC404471j.C1.p29.gm
MVKRSDNMDSSSECSRGAHKRLLQDSRSYDQENAMKCYYRCTYHQDHGCPASKHVEQHNSEDPPLFRVIYTNEHTCGTSNSASDYMASSMQIQQIADASLRKAQAAERLRKAEVETPRLMHSPPPRCSGGYNMAMKEEKDVIVSSLLTVIRGCHIAESAGGFDKGMSRQRLQGENDGNTTVAVRQAPLLHRHQNLCRCVGTLHRRPRRPVSACSHLTGLCLHRHHLSLRSHHAPAVLDVAGQAYTRWTVAGRNSFSEPTPPPPSRAAGRADLTGQPQPPVAAPPHAVARACCHLLCERGLLPLRHRHGFRGLRTIARAFTSLRAVAPSPPATASVANSDGWMLVVRPDPAVAESDLTRHRATGRHRPSPAEDPATGHLPARSRRGSGGHFYHCHHFQAPVPPLPNVAATPHYHADAADILPARSGRTARIWTVPPSQTPSSPPALAWRDESVIFDLAGHELEEEDYPVVDYESELQTAISTTVR

SEQ ID NO: 17994 - protein, 53 aa, Oryza sativa
  Clone ID: TF_OSC16135j.C1.p1.gm
LYFKCTFSRERSCAAKKQVQQRDAGEPPMFLVTYLNEHTCQQPQAVPGTPNTA

SEQ ID NO: 17995 - protein, 217 aa, Oryza sativa
  Clone ID: TF_OSC29687j.C1.p24.fg
MAAAASSSTTSAAAAPATATTTVAFSFQHPTPTPSHHHHHHGVLGYSPLVLDHHHPTTAAASSHAPSPPTLHHHHGGGLHAAAPPPRSSPPHPWSCEEGDHRGRPQMGNKGEAAAAMGAMGINDAGNNTAAAAAAQHHLGVGAVRMKKVGGGGGGGGKARRKVREPRFCFKTMSDVDVLDDGYKWRKYGQKVVKNTQHPRAFELPFFPCMVCDTFAR

SEQ ID NO: 17996 - protein, 176 aa, Oryza sativa
  Clone ID: TF_OSC5800j.C1.p3.gm
PYLMGDVLRAQATASAEEVAGGVWPCELDDHLIGELLGDDGLFVPAAEHPTLYYSFGAGSSAAAAAAPCNGGGSADHERRPRPAPAVSRDLCSVYSGPTIRDIEKALSSSASPRPPYPSGRRYSSLVEAESKYTSKVRSCGGKMPADGYKWRKYGQKSIKNNPHPRCATRSIIDPI

SEQ ID NO: 17997 - protein, 198 aa, Oryza sativa
  Clone ID: TF_OSC408573j.C1.p16.fg
MAKGNPCPRAYYRCTVAVGCPAAVAKSSSANAATTEMLELLRDFSDYSSFNSDISSELERLAAAVTPRSDAPQVAAVDLNGGSSSSSRLTTTTPPPLLQLGCRQALPFIVPTGRCASLAAVVEEISGRRASPPWMSAAGDAVAVIPSYENHVTEVSTCVKHSSSHTDIDRLRLSITTPFHDYDVITLIDKIINPLFWC

SEQ ID NO: 17998 - protein, 327 aa, Oryza sativa
  Clone ID: TF_OSC900417j.C1.p4.fg
MDAAWRGGVGCSPVCLDLCVGLSPVREPSAARHELLDRPAGCRGGGDSKSMTNDEAKIVEAKVTQMSEENRRLTEVIARLYGGQIPRLGLDGSASPPRPVSPLSGKKRSRESMETANSCDANSNRHQGGDADHAESFAADDGTCRRIKVSRVCRRIDPSDTSLVVKDGYQWRKYGQKVTRDNPSPRAYFRCAFAPSCPVKKKVQRSAEDSSLLVATYEGEHNHPHPSPRAGELPAAAGGAGGSLPCSISINSSGPTITLDLTKNGGAVQVVEAAHPPPPPDLKEVCREVASPEFRTALVEQMASALTSDPKFTGALAAAILQKLPEF

SEQ ID NO: 17999 - protein, 396 aa, Oryza sativa
  Clone ID: TF_OSC401425j.C1.p34.fg
MAKMLPPPSQSVPSRPPSWLYIPPRRRHGTFTSSCAFRLSPSSPSSPPPPVLDFQYIQFMDSWIEQTSLSLDLNVGLPSTARRSSAPAAPIKVLVEENFLSFKKDHEVEALEAELRRASEENKKLTEMLRAVVAKYTELQGQVNDMMSAAAAAAVNAGNHQSSTSEGGSVSPSRKRIRSVDSLDDAAHHRKPSPPFVAAAAAAAYASPDQMECTSAAAAAAAKRVVREDCKPKVSKRFVHADPSDLSLVVKDGYQWRKYGQKVTKDNPCPRAYFRCSFAPACPVKKKVQRSADDNTVLVATYEGEHNHAQPPHHDAGSKTAAAAKHSQHQPPPSAAAAVVRQQQEQAAAAGPSTEVAARKNLAEQMAATLTRDPGFKAALVTALSGRILELSPTKN

SEQ ID NO: 18000 - protein, 307 aa, Oryza sativa
  Clone ID: TF_OSC401918j.C1.p38.fg
MAVDLMGFSPRGGCRPSVETEQLAFQEAAAAGLRSLELLVSSLSAGGEHHHRRRPQEKQSSPPLGEIADQAVSRFRKVISILDRTGHARFRRGPVVGAAAAEAAAAAASASPSSSPVSPPLPPVTTQPAAAVKSLTLDFTNPAKVAAASVTSTSFFSSVTAGGDGSVSKGRSLVSSGKPPLAGGVKRKHPHPPCAAAGDGHGHGAGHAHAHGGCHCSKKRKQRVRRTVRVAAASARVADIPADEYSWRKYGQKPIKGSPYPRGYYRCSTVKGCPARKHVERAADDPATLVVTYEGDHRHSPPPPPLV

SEQ ID NO: 18001 - protein, 320 aa, Oryza sativa
  Clone ID: TF_OSC419986j.C1.p4.fg
MKNSSNKRSLVADQWHPSSVCCDHRAALREIAKGQSLVTQLRAIVLPALHSDERCDLAAQMLEGILDCSRKAVSQLQLLLSSPHDDDDHHHVDDKRRVRKIISSSDDDDHCSSKAAEDDNAKPLRQHKRRRFGDSVSLETPVPHYDGHQWRKYGQKHINNSKHPRSYYRCTYRQEEKCKATKTVQQREDLHHANSYNGDHPIMYTVVYYGQHTCCKGPAALADDHVVVEASQISTDSHCQSPSSSSDLQAAEVHAGNSSQCSNISVTCSPSVVVEDCNKLLDMMPAADELTADVLLFDMTAYAPLDLDINWEMDTNALWV

SEQ ID NO: 18002 - protein, 316 aa, Oryza sativa
  Clone ID: TF_OSC401064j.C1.p110.fg
MAAGEEVMDRSTSAEDGYCSAGTDSPRAESVDEQGAAEESSPRGGQKRELPSPSASPSSPLPPAAKRSRRSVEKRVVSVPIAECGDRPKGAGEGPPPSDSWAWRKYGQKPIKGSPYPRGYYRCSSSKGCPARKQVERSRADPTVLLVTYSFEHNHPWPQPKSSSCHASKSSPRSTAPKPEPVADGQHPEPAENESSASAELEVPEPEPEQESEPVVKQEEEQKEEQKAVVEPAAVTTTVAPAPAVEEEDENFDFGWIDQYHPTWHRSYAPLLPPEEWERELQGDDALFAGLGELPECAVVFGRRRELGLAATAPCS

SEQ ID NO: 18003 - protein, 170 aa, Oryza sativa
  Clone ID: TF_OSC400222j.C1.p67.fg
MTSLDWQSLLQTCLQVPPPVLEQQQPAAAAQADQYSGENDHGDLQAAESSGAGNKEKQVMAKGGAGRPSGTKKKASRPRFAFQTRSDNDILDDGYRWRKYGQKAVKNSKHPRSYYRCTHHTCNVKKQVQRLAKDTSIVVTTYEGVHNHPCEKLMEALTPILKQLQFLSQF

SEQ ID NO: 18004 - protein, 555 aa, Oryza sativa
  Clone ID: TF_OSC401716j.C1.p59.fg
MTTSSSGSVETSANSRLGTFSFASASFTDLLGGNAGAGGGGVSRYKAMTPPSLPLSPPPVSPSSFFNSPIGMNQADFLGSPVLLTSSIFPSPTTGAFASQHFDWRPEVAAAQSADQGGKDEQRNSYSDFSFQTAPASEEAVRTTTFQPPVPPAPLGDEAYRSQQQQQPWGYQQQPAGMDAGANAASFGAAPFQATSSEMAPQVQGGGGYSQPQSQRRSSDDGYNWRKYGQKQVKGSENPRSYYKCTFPNCPTKKKVERSLDGQITEIVYKGTHNHAKPQNTRRNSGSSAAQVLQSGGDMSEHSFGGMSGTAATPENSSASFGDDEIRVGSPRAGNGGGDEFDDDEPDSKRWRKDGDGEGISMAGNRTVREPRVVVQTMSDIDILDDGYRWRKYGQKVVKGNPNPRSYYKCTTAGCPVRKHVERASHDLRAVITTYEGKHNHDVPAARGSAALYRPAPPAAAATSSHPYLPNQPPPMSYQPTGPQPYALRPDGFGGQGPFGGVVGGSSFGGFSGFDDARGSYMSQHQQQQRQNDAMHASRAKEEPGDDMFFQNSLY

SEQ ID NO: 18005 - protein, 283 aa, Oryza sativa
  Clone ID: TF_OSC404471j.C1.p19.fg
MASPRLKREQSFDFEEASAQEAVGSASASYSPPGGGGVFGISPPESSPRDGRKRRKDRPSLVKHTFTPHFDGHLWRKYGQKNIKDSAFPRLYYRCSYREDRQCLASKLVQQENDDDPPLYRVTYTYEHTCNTTPVPTPDVVAEQPPPGAAGDAYLLRFGSSAGGGGGGAHQQQTERERQQQNTARRRPFMMLSFDSSSSHQLHEQPHAFPPDGQLPATAAAASPSSFTAAEALAAPPLTTTMNDGGDLFSTWDALRYGLDYDHGHLGNHVYLPDDCNGGDDNY

SEQ ID NO: 18006 - protein, 329 aa, Oryza sativa
  Clone ID: TF_OSC419986j.C1.p5.fg
MEEAYCMMMVGRERELVAELRHLLFPSPSPTPTTPASHSTTALAGDGECCLPPGLTTTTTVSGGGRRRGRKRVNRDNDNVKLLLQADDDQEAVIADHGDANAKPLPNFTKTRRRKQQATTSTMVTTVPDFDGYQWRKYGQKQIEGALYPRSYYRCTNSTNQGCLAKKTVQRNGGGGAAGYTVAYISEHTCKSIEPSLPPVILDTTVRTTNNHQQPAAAESPAATSSSSSNMVMTSSETGNWSGQHGAYACRQMIAADEEYCCWDTPATTTTTSGSNGGNSTCAEDIELLSRPIRSPMHIAAEGNWMDDLLLVTDGLIVISNSSITHFLT

SEQ ID NO: 18007 - protein, 274 aa, Oryza sativa
  Clone ID: TF_OSC401580j.C1.p5.fg
MAAGADERCRALVSGLLSSIDRSISIARSCCTEAAAAGRLTQQAGAAPESPPSADGSAGSDLGADSRCRANAAGPCKKRKTLPKWSKQVKVRSVQDVGPLDDGFSWRKYGQKDILGAKYPRAYFRCTHRHTQGCHASKQVQRADGDPLLFDVVYHGDHTCAHGVRSAAAAIDGQAAASAEQKHQPTPPQEQNAVSVAFTSMAVVNASTSSPFVSPAMSDCQISYELGGGSMAGVRNVPDVELASKTNSSMGDDMEFMFSLDSDFLDTYKYSSYF

SEQ ID NO: 18008 - protein, 260 aa, Oryza sativa
  Clone ID: TF_OSC415412j.C1.p2.fg
MEGSSSDGSRYGGSGRCALVAELVQMQGMVRQLEAEMGTHGGGGGGGGGGGADGRRSGRAGAARWKTLPKWSKQVKVRSVQDVGPLDDGFSWRKYGQKDILGAKYPRAYFRCTHRHTQGCHASKQVQRADGDPLLFDVVYHGDHTCAHGVRSAAAAIDGQAAASAEQKHQPTPPQEQNAVSVAFTSMAVVNASTSSPFVSPAMSDCQISYELGGGSMAGVRNVPDVELASKTNSSMGDDMEFMFSLDSDFLDTYKYSSYF

SEQ ID NO: 18009 - protein, 348 aa, Oryza sativa
  Clone ID: TF_OSC32142j.C1.p1.fg
RRSVGSDDSDCGKEDLGLSLSLGASSSYDDDQKAVEARPHDVDGAAAAAMIGGDGSRPAPRGYPLLESSKVQGGAAPAAGELAAAGGITSQSVNPANRKTRVSVRVRCQGPTMNDGCQWRKYGQKVAKGNPCPRAYYRCTVAPGCPVRKQVQRCLEDMSILVTTYEGTHNHPLPVGATAMASTTSAAATFMLLSSTTSSSSVSDASAAPSSSYLSPYLLNSASPLLMPGATGGGGGMQHLNLFGNSPSSSSLLAPQAPGSSKYPWSPNHPPLAGAGGNKRPFWSAGGDGDKPAPAALAENVGAVMSDPNKFSAAIAAAINNFMGKDGESSSGKSSSKWGVVESLPPHE

SEQ ID NO: 18010 - protein, 637 aa, Oryza sativa
  Clone ID: TF_OSC400663j.C1.p7.fg
MTWDNRIKEESSLLIALLIRLRHPDIDLDASGEVALGFKTVPHFSCTKRDKGTQDYQKEARSMSSKKKRAAIDLSLEAERRRPEERGGGSDREASDGAAAAAEEDGDVKQREGPKEETGGEEEKVVEVVVDQGEDGSNEEIKYRTQQAEMIEEDKQPAAAANVDDDGGDSDGVGASAEEKHMVTEATGGEGDDGGDSRTPMAQDELSEMQEEMERMKEENRMLRRVVDKTVRDYYELQMKLAAYQQQPAAADEPKETEVFLSLGATAAASAGCGGGFPEAKSKEQAAWRRRSVGSDDSDCGKEDLGLSLSLGASSSYDDDQKAVEARPHDVDGAAAAAMIGGDGSRPAPRGYALLESSKVQGGAAPAAGELAAAGGITSQSVNPANRKTRVSVRVRCQGPTMNDGCQWRKYGQKVAKGNPCPRAYYRCTVAPGCPVRKQVQRCLEDMSILVTTYEGTHNHPLPVGATAMASTTSAAATFMLLSSTTSSSSVSDASAAPSSSYLSPYLLNSASPLLMPGATGGGGGMQHLNLFGNSPSSSSLLAPQAPGSSKYPWSPNHPPLAGAGGNKRPFWSAGGDGDKPAPAALAENVGAVMSDPNKFSAAIAAAINNFMGKDGESSSGKSSSKWGVVESLPPHE

SEQ ID NO: 18011 - protein, 242 aa, Oryza sativa
  Clone ID: TF_OSC4096j.C1.p1.fg
MWMQEGHPTCVNLTPIPHTDGHLWRKYGEKKIKNSSFPRRWCKTVAIYRLYYRCSYRDDRNCMATKVVQQENDADPPLYRVTYIHPHTCNPSPPAPTPAHVFTEPPPAKAEVHHAVLFRFSSTAGGHTANNAVHRQQWQPAAATMAAGAQAQLSMTMSDDEREQPPAAIRSAPPARRLSMFRAVVDGLRQMRSSAPPTPSSSMVVDDGWDTFSSFDLDTCEFSVDDELLCGDHMYFPDSMQQ

SEQ ID NO: 18012 - protein, 319 aa, Oryza sativa
  Clone ID: TF_OSC413014j.C1.p3.fg
MEGVVDGSGAQLVVAELVRVQGLLRQLEAHLSAPCSVELCRGLVAQIVALTDRSIGIATRSFSSASGGGAHFADTAPPMPALTSCTPSPLSDGSDHQPFRTTNAKKRKTTARWTSQVRVSAAGGAEGPADDGHSWRKYGQKDILGAKHPRGYYRCTHRNTQGCTATKQVQRTDDDASLFDVVYHGEHTCRPGAASAAAAKRPHAQTLLQSLSASLTVNTDTNTPLTPENRAPAPPLQQQQQQQSVSASPVASDSYGLGGAGYGDWRCCDGDLQEVVSALATVTSAPDHAAMDAADFMSYCFDFDPAVYGGIVGTPSFFL

SEQ ID NO: 18013 - protein, 361 aa, Oryza sativa
  Clone ID: TF_OSC400271j.C1.p13.fg
MESMEGNGGGRLVVTELSHIKELVRQLEGHLGGSGSPDLCKHLASQIFSVTERSIGMIRSGHFDGHRKRSAAAVAAGDLDSATPSPLSDVSDLPFKATKKRKTSTEKKRHQIRVSSTGGVENPPVDDGHSWRKYGQKEILGAKHPRGYYRCTHRHSQGCMATKQVQRTDEDATVFDVIYHGEHTCVHKAVAAGAGKPETETDTNAAAESRLHDLSSGLTVKIEGLTAPPQQQQGGGGWNAMPPFCLSSPVSGLAPPDQHNPFSAPSTPENRLAAAASSAASPATSDSMAAAPFHQAAAGGGDEAWRDAELQEVVSALVAATTTTATAQPAPATAMVDADLSALDAFEFDPGFTIDITSFFA

SEQ ID NO: 18014 - protein, 225 aa, Oryza sativa
  Clone ID: TF_OSC900348j.C1.p27.fg
MESMEGNGGGRLVVTELSHIKELVRQLEGHLGGSGSPDLCKHLASQIFSVTERSIGMIRSGHFDGHRKRSAAAVAAGDLDSATPSPLSDVSDLPFKATKKRKTSTEKKRHQIRVSSTGGVENPPVDDGHSWRKYGQKEILGAKHPRGYYRCTHRHSQGCMATKQVQRTDEDATVFDVIYHGEHTCVHKAVAAGAGKPETETDTNAAAESRLHDLSSGLTEKWTRS

SEQ ID NO: 18015 - protein, 221 aa, Oryza sativa
  Clone ID: TF_OSC17493j.C1.p2.fg
MAAVGAHAAVYHHPVSGLSAPAGDAAYSMSSYFSHGGSSTSSSASSFSAALAAATTPPLPDPSGSQFDISEFFFDDAPPAAVFNGAPTAALPDGAAANATRSAAEAVPAPAPAAVERPRTERIAFRTKSEIEILDDGYKWRKYGKKSVKNSPNPRNYYRCSTEGCNVKKRVERDKDDPSYVVTTYEGTHNHVSPSTVYYASQDAASGRFFVAGTQPPGSLN

SEQ ID NO: 18016 - protein, 593 aa, Oryza sativa
  Clone ID: TF_OSC401478j.C1.p35.np
MELRPPPPKHHHHRRRRGGGGEDGGEEEEEETGRLSLRGGGFWRRHDGEEEEEKGGGRRGEIKEVDFFLGASGRDVVVASRRHDDGFRGTTHGGGGGGDVNIGLDLLTTTTAGAAAGGAAAGAGEEDTGKNHRKEATTAAVDVELRRVVEENRRLGMLDELNRSYSALYHQYLQVTQQQNHRHPDHHLIMNNNNNRPSLAQTHRTAATTTATTQQFLEPRASSTAQATADADMAASDDEAGRGGGDGDASSPSLSNAAGGGGGGNKMRRVGGQDETAAAAPARENGEQQAAAAAELPCRKPRVSISDGCQWRKYGQKMAKGNPCPRAYYRCTMAIGCPVRKQVQRCAEDKTVLITTYEGNHNHQLPPAATTMANTTSAAAAMLLSGPAASRDGAAAALLGHHHHHHPAAMFHQSFPYASTMATLSASAPFPTITLDLTQTPAGGAGAASLLHALHRPPVIHPGAAAQAMPFAVPPQLAMYLPQQRAAAAGLGGAGAARQPSVMETVTAALAADPNFTTALAAAISSVVAGGAHHQALSTTPRGSAAGAGDGNGNGSSAAAVATGAASPAATAEAPAASGSPPRLATQSCTTSN

SEQ ID NO: 18017 - protein, 540 aa, Oryza sativa
  Clone ID: TF_OSC418607j.C1.p7.fg
MSARPPPPPRPRLALPPRSAAESLFTGAGDASPGPLTLASALFPSDPDGGGGGGGVMTSSSSSAAGATSFTQLLIGNLSAPPPPPPPPQQQQQREAARGGGVARAGPALSVAPPPTAGSVFTVPPGLSPSGLLDSPGLLFSPAMFDAFDVLDMFIPDKILPKRATRIKLDIYFVKTSPEGGFGMSHREALAQVTAQASHSPLRMFDHTEQPSFSAAPTSSEAMQHMNAAVNMTGISDMVMGPTNNENVAFQPAEASQRYQVNAPVDKPADDGYNWRKYGQKVVKGSDCPRSYYKCTHPNCPVKKKVEHAEDGQISEIIYKGKHNHQRPPNKRAKDGSSSAADQNEQSNDTVSGLSGIKRDQEAIYGMSEQLSGLSEGDDMDDGESRPHEADDKESDSKKRNIQISSQRTSAEAKIIVQTTSEVDLLDDGYRWRKYGQKVVKGNPHPRSYYKCTYAGCNVRKHIERASSDPKAVITTYEGKHNHEPPVGRGNNQNAGNAAPSSSAQQNMQNLSSNQASLTMADFNNINQRPIGVLQFKSEE

SEQ ID NO: 18018 - protein, 59 aa, Oryza sativa
  Clone ID: TF_OSC29687j.C1.p31.gm
MEGSYYRCTQDNCRVKKRVERLAEDPRMVITTYEGRHVHSPSRDDDDAARASAEMTFIW

SEQ ID NO: 18019 - protein, 328 aa, Oryza sativa
  Clone ID: TF_OSC458j.C1.p1.fg
MALTMVSLAAIAGKPTAASAQLVAEGRESAARLYALLVGSSALHGPVGLAEQILLCFDRALAKLHGVNLAGAEDDDDAAGNGNGRKRKPGRGRGLTAASAAASSKRMRVSNAGGNGARIERKATMDDKFLWRKYGQKEIKNSKHPRFYYRCSYKDDHGCTATKQVQQSETADDDTASPVYIITYFGEHTCRHGDDAAAMVVDGGEEEDQLSPAQMVISFASSNGGDASVSWPCSGDDAQNNSETSHESSPPEAPAGEEERLRPCTAAGVSDEPIMESTPPAPELLADLKPMDGCLLDGESLFGMDELVYFHELSAALGLLDRDWGAPV

SEQ ID NO: 18020 - protein, 375 aa, Oryza sativa
  Clone ID: TF_OSC404471j.C1.p17.fg
MAFGQDTIEQLYRELAGGRRLSAKLQALLEGPLDSRGQKEAVDVSRELGRVFMVSLYMLKPCSNSSRRPEGVTRTAPETRTDDSICLHTPARVKRVRSEEVLVRNGREEVVTRTEIITPSPYKDGYQWRKYGQKNIQDSNYLRLYFKCTFSRERSCAAKKQVQQRDAGEPPMFLVTYLNEHTCQQPQAVPGTPNTAGSSPTTTSRQRQSSSSPPAEMLDLTMNGAGLFSRLLLPHAVGGGGSAAEEEAAIVTCLAAVISGGGAAAAPPPLIWPTSAPEAAFVASAAGHSPSAADESVADEAAAAQMADMDYCFGQYDQSTFGAAAAADHRVLIGDDGDVQRIVAARIADTVWPRYTRDTSAWETAGTSSMRGSID

SEQ ID NO: 18021 - protein, 219 aa, Oryza sativa
  Clone ID: TF_OSC400426j.C1.p42.fg
MAASLGLCHETSYAYSYPASNTSSSLCFPPLMADHIVDGGGGGGCSFGEFLELGHSVYSLPLPPPPSQPVVVAGGNNDQYGVSSSSSAAATTSRIGFRTRSEVEVLDDGFKWRKYGKKAVKSSPNPRNYYRCSAAGCGVKKRVERDGDDPRYVVTTYDGVHNHATPGCVGGGGHLPYPTSAAPPWSVPAAAASPPPAHAQAWGAPLHAAAAAHSSESSF

SEQ ID NO: 18022 - protein, 411 aa, Oryza sativa
  Clone ID: TF_OSC9240j.C1.p1.fg
MTAAPGSLPLVNSRPVSLSLAASRSSFSSLLSGGAGSSLNLMTPPSSLPPSSPSSYFGGVSSSGFLDSPILLTPSLFPSPTTTGALFSWITTATATAAIAPESQVQGGVKDEQQQYSDFTFLPTASTAPATTMAGATATTSNSFMQDSMLMAPLGGDPYNGEQQQPWSYQEPTMDADTRPAEFTSSAAAGDVAGNGSYSQVAAPAAAGGFRQQSRRSSDDGYNWRKYGQKQMKGSENPRSYYKCTFPGCPTKKKVEQSPDGQVTEIVYKGAHSHPKPPQNGRGRGGSGYALHGGAASDAYSSADALSGTPVATPENSSASFGDDEAVNGVSSSLRVASSVGGGEDLDDDEPDSKRWRRDGGDGEGVSLVAGNRTVREPRVVVQTMSDIDILDDGYRWRKYGQKVVKGNPNP

SEQ ID NO: 18023 - protein, 127 aa, Oryza sativa
  Clone ID: TF_OSC9240j.C1.p1.gp
GGDPYNGEQQQPWSYQEPTMDADTRPAEFTSSAAAGDVAGNGSYSQVAAPAAAGGFRQQSRRSSDDGYNWRKYGQKQMKGSENPRSYYKCTFPGCPTKKKVEQSPDGQVTEIVYKGAHSHPKPPQNG

SEQ ID NO: 18024 - protein, 518 aa, Oryza sativa
  Clone ID: TF_OSC400397j.C1.p35.np
MHELFHDLACSVSKDECFSSGEAFCSLPENICHLSVVLPDSKSVVLTKVQRHLQSLMVVKRSASEYPGSFVPLLKILGLNDLLMKCRFLRALNLSCTTIRELPSSIMKMKHLQFLALNNTKIQSLPAEIGQLQTLQTLELKYCCCLIELPESTMNLTKLRHLDVQKEPGNVHVSMPHGIGQLTDLQTLTVFNTGDDLSHCSIGDLKNLSGLRGHVHITGLQNITASDDAKEANLVGKQFLGALTLEWCWSSQDMEDDSDKEIANQVLHNLQPNTNLQELSIRNYSGNLFPNWIQDSSLSMLVSITIDDCQDCNEIPHLGDLPFLKYLLIHKMDKYTVKYLLKKTTTDDGWNWRKYSEKDLLGSKYKRSWYRCNQKQSTGCVARKIVEPNNDDPNTWLVTYLYEHNHKQEARPCDKPSPSDLHVQLASGNTQWCVLRGFYGGVRQMTVGSNTQLHERDYTGNANHSGIIARQTWIEMLRRGCTAGHSQRRAVTYWIYCDDSSSIKDKLEIVDVDVLYQQ

SEQ ID NO: 18025 - protein, 358 aa, Oryza sativa
  Clone ID: TF_OSC404464j.C1.p3.fg
MQAQSRLAAAASGGSGSGISGSGGISRLGGGAGEEHEAVVRELTRGHELTARLRAEALRALRGQGQAEATATFILGEVSRAFTVCLSIMASASPSASPPQPDETPPADSAVSPPPPRAAREDNVPRKRLLTASPYDDGYQWRKYGQKKINNTNFPRSYYRCSYHRERRCPAQKHVQQRDGDDVPALHVVVYTHEHTCLQGAPAELPDAATNGGAAAAASPDYFPAGGETPSSLRRLRGVGGGGLQPQFVDHRAAMEERERQVLVSSLARVLQGRQCYDDDDDDDTDVASLGAVHARAPAAAAPVAASSSSSGPVDAAGEELDVMDYDMTDALFWGPFGTDSNSYDGNLTSTRCFDLIN

SEQ ID NO: 18026 - protein, 243 aa, Oryza sativa
  Clone ID: TF_OSC135j.C1.p3.gm
GEFELGTRGSSRVDLQACKLPQLPQLVHDHAAATGTNHGVMFSSDHGCLYPLLPGIPFCLDSGCGAAACDDDKPAGFAHLGSAEADTSAAAARVDSEIAAAATATTCHGPNSWWKGTEKGKMKVRRKMREPRFCFQTRSDVDVLDDGYKWRKYGQKVVKNSLHPRLQYFSSEILSTRKKGKPLSYYRCTHNNCRVKKRVERLSEDCRMVITTYEGRHTHTPCSDDATTGAAGDHTASCAFTSF

SEQ ID NO: 18027 - protein, 246 aa, Oryza sativa
  Clone ID: TF_OSC400036j.C1.p6.fg
MSSLYPSLLSLSESPAEYRQVGGGRYAGEDVVDDDDDMAAVADAVSSYLSFDMDDVEYYTPEVGFHSKQHNPPPVAAAPLEAGGGREQSRREAAVNLGKMDRGPAPVSGGAATGGVPRSKNGSKIAFKTRSEVDVLDDGYRWRKYGKKMVKNSPNPRNYYRCSSEGCRVKKRVERARDDARFVVTTYDGVHNHPAPLHLRPQLPPPGGYSIAGAPAVVAPHGRLGLEEAEVIALFRGTTATSLLLP

SEQ ID NO: 18028 - protein, 583 aa, Oryza sativa
  Clone ID: TF_OSC401655j.C1.p1.fg
MEADDSGGGGGRARRSVEVDFFSDEKKNMKKSRVSGGVAAEADDAKGPAAAGLAIKKEDLTINVSRRRLLRSSIARHLFNSRRSNACARPCSLQLLPAGNNARSDRSMVVDDDAASRPDHEEKSRSSNELAAMQAELGRMNEENQRLRGMLTQVTTSYQALQMHLVALMQQRPQMMQPPTQPEPPPPHQDGKAEGAVVPRQFLDLGPSSGAGGEAAEEPSNSSTEAGSPRRSSSTGNKDQERGDSPDAPSTAAAWLPGRAMAPQMGAAGAAGKSHDQQAQDANMRKARVSVRARSEAPIIADGCQWRKYGQKMAKGNPCPRAYYRCTMATGCPVRKQVQRCAEDRSILITTYEGTHNHPLPPAAMAMASTTSAAASMLLSGSMPSADGAAGLMSSNFLARTVLPCSSSMATISASAPFPTVTLDLTHAPPGAPNAVPLNAARPGAPAPQFQVPLPGGGMAPAFAVPPQVLYNQSKFSGLQMSSDSAEAAAAAAAAAQFAQPRPPIGQLPGPLSDTVSAAAAAITADPNFTVALAAAITSIIGGQHAAAAGNSNANNTNTNTTSNTNNTSSNNTTSNNTNSETQ

SEQ ID NO: 18029 - protein, 996 aa, Oryza sativa
  Clone ID: TF_OSC401140j.C1.p23.fg
MTTATLDPPPPPLLIAGSLLDDDRDAGSAASSSPRWLPRARGSTVGSPPRRGGEERGGEAATRRKGNSSCPDDDDDCRNDEDDCRNDDDYRDDDVGATTDGGGDAAALLPMAMMTATTMAPMPVEAAVDGGGELSSAGEGGQRRVNLLPTKILSAYENHLFSQALACREDEWIIEKLAVIAARRSSFVSEESLCSVPAAALVSLAIAHLAFSPMLVYGVLDRLCSVCHLGEMEGDIAMEEWKDSNHRGADYLMTMPMQNFLADAFPPPELLEGEGGFEKHGLSVAVGSPPPTPPPPEDGCSPLPLTPQFGQKFGSGGGGGGSLADRRARGGFSNVARISVPYNQPAADVSSAGAPSPYVTIPPGLSPTTLLESPVFSNAMGQASPTTGKLHMLGGANDSNPIRFESPRIEEGSGAFSFKPLNLASSHYAAEEKTKSLPNNQHQSLPISVKTEATSIQTAQDEAAANQLMQPQFNGGKRSRAAPDNGGDGEGQPAEGDAKADSSSGAAAVAVVAAAAAAVAEDGYSWRKYGQKQVKHSEYPRSYYKCTHASCAVKKKVERSHEGHVTEIIYKGTHNHPKPAASRRPPVHPPPPSPATTTTTPLPPGDAQADHAPDGGGGSTPVGAGQAGAEWHNGGVVGGEGLVDATSSPSVPGELCESTASMQVHEGAAAAQLGESPEGVDVTSAVSDEVDRDDKATHVLPLAAAAADGESDELERKRRKLDSCATMDMSTASRAVREPRVVIQTTSEVDILDDGYRWRKYGQKVVKGNPNPRSYYKCTHPGCLVRKHVERASHDLKSVITTYEGKHNHEVPAARNSGHPAGSASPGGGAGSSSQPHGVGVGGRRPEVPSVQESLMRLGGGCGAAPFPPHFGLHLPPPPPRDPLAPMSNFPYSLGHAPSPALRGLPPPPPPPPSASALAVAGLGGVVEGLKYPMLAPPSVHSLLRHRQGGGMEAVVVPKAEVKQEAMRPAAAVAGAGRGAAVYQQAMSRVSLGNQL

SEQ ID NO: 18030 - protein, 337 aa, Oryza sativa
  Clone ID: TF_OSC101929j.C1.p1.fg
MSGPGGGGHGLYEDHPAAAGFLPFDHDDDVVASFFFGRSAASGGGAGAGAGAGDDDGVGLITPYSSITDYLQGFLQDPVYASSPLGGDAAVKHETVVDHPSQAGGVAAAPATPNSSVLSSSSEAAGGDDLRRCKKGRRPEDEEEEEIDDEGSAVQSCKTNKMKNKKGAKKEREPRVAFMTKSEVDHLEDGYRWRKYGQKAVKNSSYPRSYYRCTAPRCGVKKRVERSEQDPSMVITTYEGQHTHPSPVSYHMHRQQGLMHVSARGVMPGAAGAYQFGAPPPPLLGFDEALAARVRMTMNQQQQQQQLGFVPSIHAAAARPTMPPLHLYTAQQDLFLP

SEQ ID NO: 18031 - protein, 319 aa, Oryza sativa
  Clone ID: TF_OSC23303j.C1.p9.gm
MAMAGAGDWPFAADEAYADSSAIFAELGWANGLAVVDAVGELLPPLDPPGELATPPPPPLDLPETPAGSSADGAASSCSTDDADGGKPAAASTEAASKSLTPGKKRARQPRFAFMTKSEIDHLEDGYRWRKYGQKAVKNSPFPRCTNSKCTVKKRVERSSDDPSVVITTYEGQHSHHTVTFPRAAATAAGFSHIHAMAALAAAPFSAHQQLYSNLQPPPPTMPLAATTPASSSSLLQLPLHCNHELQVVASCGGYPSSSSSPPASVLPVDKGLLDDMVPRAMRHDGRAPPPILSSSSLGKAAVVIAKPSPTSSAPPSSP

SEQ ID NO: 18032 - protein, 317 aa, Oryza sativa
  Clone ID: TF_OSC400495j.C1.p37.gm
MAGAGDWPFAADEAYADSSAIFAELGWANGLAVVDAVGELLPPLDPPGELATPPPPPLDLPETPAGSSADGAASSCSTDDADGGKPAAASTEAASKSLTPGKKRARQPRFAFMTKSEIDHLEDGYRWRKYGQKAVKNSPFPRCTNSKCTVKKRVERSSDDPSVVITTYEGQHSHHTVTFPRAAATAAGFSHIHAMAALAAAPFSAHQQLYSNLQPPPPTMPLAATTPASSSSLLQLPLHCNHELQVVASCGGYPSSSSSPPASVLPVDKGLLDDMVPRAMRHDGRAPPPILSSSSLGKAAVVIAKPSPTSSAPPSSP

SEQ ID NO: 18033 - protein, 399 aa, Oryza sativa
  unsure (1)..(399): unsure at all Xaa locations
  Clone ID: TF_OSC101754j.C1.p8.hg
XQRTARGEAGTEREDRXTQTGPTERQRAXGRSPPEERXXPAGRQEERRRQGGDRTSKGTSXNEEKNPRKEKRXRGTSPXAGEAPGGXQRGGKPRPXXQAKGTAKEARDPQKPKQARGPQRKEEKEREKGRGASKKDRKTRKGKDTTGPSEDNNPXATPRAGTAPPPRKRKSESLXDSPPPPPPPHPHAAPHHMHVMPGAAAAGYADQTECTSGEPCKRIREECKPKISKLYVHADPSDLSLVVKDGYQWRKYGQKVTKDNPCPRAYFRCSFAPACPVKKKVQRSAEDNTILVATYEGEHNHGQPPPPLQSAAQNSDGSGKSAGKPPHAPAAAPPAPVVPHRQHEPVVVNGEQQAAAASEMIRRNLAEQMAMTLTRDPSFKAALVTALSGRILELSPTKD

SEQ ID NO: 18034 - protein, 308 aa, Oryza sativa
  Clone ID: TF_OSC13125j.C1.p4.fg
MKNKGSSCRYLPHSSAPCATDGARCFRCDHRPAIDEIVREQSLVTQLRAVVLPALETKADDGRAEIVAQLFGSILDCSRKVISALNSRYVGESPPDDDEIVDKRRAKRKNSEGKKGDDQVKVKPHEHKRSRRYTNSTSQITAVPHYDGHQWRKYGQKNINNSNHQRSYYRCSYKHEQNCKATKTVQQLDSAGETIMYTVVYYGQHTCKTNMSNAPLHVVETSTTQSISTTCCSDDLGDYSQKMENMHTPELAEVCSDELGSYHAIIGAEHSALGLEDEHMHKLLDTFACGALDLDSWEIDAIVRSGFC

SEQ ID NO: 18035 - protein, 309 aa, Oryza sativa
  Clone ID: TF_OSC400920j.C1.p10.fg
MAVDLMGCYAPRRADDQLAIQEAATAGLRSLEMLVSSLSSSSQAAGAHKASPQQQPFGEIADQAVSKFRKVISILDRTGHARFRRGPVESSAPAAPVAAAPPPPPPPPAPVAAALAPTSSQPQTLTLDFTKPNLTMSAATSVTSTSFFSSVTAGEGSVSKGRSLLSSGKPPLSGHKRKPCAGGHSEATANGGRCHCSKRRKNRVKRTIRVPAISSKIADIPPDEYSWRKYGQKPIKGSPYPRGYYKCSTVRGCPARKHVERATDDPAMLVVTYEGEHRHTPGPLPAPPAAAAVAAMPVSVAVSTGNGHV

SEQ ID NO: 18036 - protein, 421 aa, Oryza sativa
  Clone ID: TF_OSC400542j.C1.p3.fg
MEEANREAVQSCHRVLTLLSSPHSQLVPNKDLAAATGEAVAKFCSVASRLNNGNGLQGHARVRKIKKPLPIFDSNLFLESPALAVAMAAKTPNSSPITSLQLFPRYHQMEGSSSKDPVRIPAQFPKRLLLDNPAVDSDGPSRGPPLQLIQPVSVAPPAGTPHPALPSAHLHFIQQHQSYQRFQLMQQMKMQSEMIKRSGLGEQGGSNGGGKGVNLKFDSSNCTASSSRSFLSSLSMEGSIASLDGSRSSRPFQLVSGSQTSSTPELGLMQRRRCTGREDGSGRCTTGSRCHCAKKRKLRIRRSIKVPAISNKVADIPADEFSWRKYGQKPIKGSPHPRGYYKCSSVRGCPARKHVERSGLQGECGKATDKRSDRQPFVSVLLCPKSKPCKSEMACFLVATSPLGKLELMPDTQGPTAPSTP

SEQ ID NO: 18037 - protein, 727 aa, Oryza sativa
  Clone ID: TF_OSC400075j.C1.p19.fg
MALELSLVSASPPGGLAASPPPPAAIPGKEQQVAGVGILLQISMLVLSFVLGHVLRRHRFYYLPEASASLLIGLVVGGLANISNTETNTRTQSGFSLSPKPFFANFGAIVTFAILGTFIASVVTGVLVYLGGLTFLMYKLPFVECLMFGALISATDPVTVLSIFQELGTDVNLYALVFGESVLNDAMAISLYRTMSLVRSQAAAGENFFMMVFQFLETFVGSLSSGCITAQNILNYFKGTFGIVVLELDLSLLLYPFPKFYMETLFAKHERLCMLSIDHVKLQYLCITIYHLLIACFTVNYFIYYLILCNLDHSVYLFKYAGLDIDKYMLAEGLGLSGIVSILFTGMVMKHYTFSNLSNNSQRFVSAFFHLLSSLAETFVAVNVFSCAYLVNMSRPEHRRIPLKHQKALWFSGLRGAMAFALALQSANELPGGHGKTIFTTTTAIVVLTVLLIGGSTGTMLEALDVIGDENRSIENYDDNNGYIPPTYEEGSSSGGGLRMKLKEFHKSTTSFTALDRNYLTPFFTSQTDEDDDVFEIGHYATPKSGFRQNAILPNGFVKMPCTRDTKHLFCHLRQFSPFLPNFASGLTKIPLRAGSRPVLRNTSSGCAAAAACADQYSAATPDNSSVTFGDDEADNESHSSEGYEPEAKCWKEDADNEGSSGGMGGGAGGKPVRKPRLVVHTLSDIDVNIDILDAGFRWRKYGQKVVKGNPNPRSYYKCTTVGCPVR

SEQ ID NO: 18038 - protein, 565 aa, Oryza sativa
  Clone ID: TF_OSC400934j.C1.p26.np
MGGEPRARAEAAWAAALPAALVALVRDTATYTRMMHRLRMETPRGPTCQLDPCCCCCTAHVIPPPPPVSRTHATRRDAEASVPPPPASAAVSSRSDGTGQMAAGVTLACAAPPPLRAPRASDGGRRRGVVKGGAGTDTCRSPQRLNVRPRERERVRACVRARAKNHEHGQRRREAAVDPAMSGEYQFQDELAPLFARPGGGAGEMQMLPSSWFADYLQAGTPMQMDYDLMCRALELPVGEDVKREVGVVDVVAAGGGGAPPLTPNTTSSMSTSSSEGVGGGGGGGAGAGAGEEESPARCKKEEDENKEEGKGEEDEGHKNKKGSAAKGGKAGKGEKRARQPRFAFMTKSEVDHLEDGYRWRKYGQKAVKNSPYPRSYYRCTTQKCPVKKRVERSYQDPAVVITTYEGKHTHPIPATLRGSTHLLAAHAQAAAAAAAAHQLHHHHGHHGHHGMAPPLPLGSGAAAQFGRSSGIDVLSSFLPRAAAAHHGMTTMGGAAATTTTSHGLNSAISGGGGVSSETTSAVTVAASAQPSSPAALQMQHFMAQDLGLLQDMLLPSFIHGTNQP

SEQ ID NO: 18039 - protein, 434 aa, Oryza sativa
  Clone ID: TF_OSC400940j.C1.p1.gm
GTSRLDPDQGPTSGRTSPSPGWTGLSETKSRAKNHEHGQRRREAAVDPAMSGEYQFQDELAPLFARPGGGAGEMQMLPSSWFADYLQAGTPMQMDYDLMCRALELPVGEDVKREVGVVDVVAAGGGGAPPLTPNTTSSMSTSSSEGVGGGGGGGAGAGAGEEESPARCKKEEDENKEEGKGEEDEGHKNKKGSAAKGGKAGKGEKRARQPRFAFMTKSEVDHLEDGYRWRKYGQKAVKNSPYPRSYYRCTTQKCPVKKRVERSYQDPAVVITTYEGKHTHPIPATLRGSTHLLAAHAQAAAAAAAAHQLHHHHGHHGHHGMAPPLPLGSGAAAQFGRSSGIDVLSSFLPRAAAAHHGMTTMGGAAATTTTSHGLNSAISGEDGVSSETTSAVTVAASAQPSSPAALQMQHFMAQDLGLLQDMLLPSFIHGTNQP

SEQ ID NO: 18040 - protein, 280 aa, Oryza sativa
  Clone ID: TF_OSC464j.C1.p2.fg
MARRLPKSERSPSPPPPPPGDQRDAAIQELSKGSELATQLMAQLELIPERELDGRRDDALANVRSLSMSLSSSLYALRSERREHYYCGSSSSSGGAGPAAVTSVSGAGGERKTKRRRGKHGEELIETVFITTTPENDGFHWRKYGEKNILNSEFRKLYYRCGYSDERKCQAKKYVQQENNKHPPEFRVTLTNEHTCNTVFQDQPSSSSTNSQVLDFTKASISSSLMDSHVGAPILKEEEEEEVPSIDESTRIMSTIMRNYGSYGDYDESSPQPWNGAGWK

SEQ ID NO: 18041 - protein, 623 aa, Oryza sativa
  Clone ID: TF_OSC400127j.C1.p3.fg
MEDWMPPPTPSPRTLMSSFLNEDFVSGSFSNIFSDHESNKPQDQFERNRELVDLSKEVPSQFARPAFQRDASLDHSLVSPTQRSNSHGGLAERRAARAGFSVPKIDTSRGGSSTVIRSPVAIPPGLSPTTLLESPVFLYNAMAQPSPTTGTLPFLMASNAKSTIPSATKMDEDCTFGNDTFSFQPHVGSRRPNFSAAEKGPNACHQNQSLSNIHQRESSLQSSFTAVKDITDEKNIKTKTSDSMFGDNHSSDEQDDETNQNGENSMPPPNHRSGVPLSHTNDPEVNVLENRGSQTCHNSASLWDNAKNDCLQDVQSEVIETRTAACLPVSTNCDTSIMESQDAVDVSSTLSNEEDDRATHGTASIECNGDGDETDSKRRKLDALTAATAAITTTSNIDMGAAASRGVREPRVVVQTTSEVDILDDGYRWRKYGQKVVKGNPNPRSYYKCTHQGCSVRKHVERASHDLKSVITTYEGKHNHEVPAARNSGHGSSGSGNAPSAPQSNGSQRRQEQGQASFSQFGGAAPFSSFVLPPRNQFGPSASNFPFGMVPPGMAIPMPSLGSLAPAKMAGHPSTMQGYQGLMIPEGEMKTEPMSQLGFPAVNQSSSSFQQMMNRPPSFGPQM

SEQ ID NO: 18042 - protein, 210 aa, Oryza sativa
  Clone ID: TF_OSC401607j.C1.p4.fg
MSPVPSPHQSHHLGHGSRKEKRMRKVDTFAPHNDGHQWRKYGEKKINNCNFPRYYYRCTYKDNMNCPATKQIQQKDYSDPPLYSVTYYNEHTCNSAFLPLSPSEFQLQTASGKAVSICFESSGAQEPMTNASSPSSSAARRSTPSENKNQPLPRHSEAYSWGVGVVEQKPSCTELQSCSTECQDAFSAGTIPEETVDAGRFGSIRFFHFL

SEQ ID NO: 18043 - protein, 253 aa, Oryza sativa
  Clone ID: TF_OSC400974j.C1.p8.fg
MADPFPAAARGGEQGGGTAGQLVSTPSRLRTAVASMLNRTGHARFRRAAPVVVQEEEDEAAAAARDAVVRCDGLSASASSSFPSSVTGVTGDGSVSNARAVLPAAGDGDKPPPMQSASDYASDGRLKRSSDDDGERCHCSKKKRKASWRARRRIRVPAISSRNADIPADDYSWRKYGQKPIKGSPYPRGYYKCSTVRGCPARKHVERDPGEPAMLIVTYDGDHRHGEPGHRRPDEAATTTEHRTTDQTTGRLL

SEQ ID NO: 18044 - protein, 507 aa, Oryza sativa
  Clone ID: TF_OSC400426j.C1.p40.fg
MDVVVESPPVRDEKKVDVAAIGGAPPIVFESFAPSTQRDSTIIKKEEKMEAAKAEMGEVREENERLKTMLTRIVSDYKSLHTHFLDVVKVKEQTAAELSGDDDDDEPDDLVSLSLCTRPNAAATRRKGHERTPSSGGGGDDGRLSLGLSCARGGVASDDDDDKQASRRALPPMPVLNLSSDSSGDAAGAGAGEPTQPNKASRSSSGGGDGADDEVLQQQQAKKARVSVRVKCDTPTMNDGCQWRKYGQKISKGNPCPRAYYRCTVAPNCPVRKQVQRCADDMSILITTYEGTHSHPLPPAAAAMASTTSAAAAMLTSGSTNSTMHGSGGVHHHLPFASAVGGGGGVGLLGPTTISTATSCPTVTLDLTAPHSLLHPSSASPYAAAAAGYESSRALPAAWSSGYLAYGGAAAAQPYYAKGVAPSPFGHHFGMMGMAAAAARPAPEQLFGGQTTSPYLQRAIGGGGVAPAAVTDTIAKAITSDPSFQSVLAAAITSYMGRGGGAAAPNK

SEQ ID NO: 18045 - protein, 344 aa, Oryza sativa
  Clone ID: TF_OSC102216j.C1.p15.fg
MVNFLKLSDIQSTDAESVDVGFISSVHKTTRKKGFTTCLLGRNSILFGKTTVVIGEKVEHCCRWSQEEEITGIAGVDSCYGEPGGVLSGRLGVNGEKGSTQFQISYGVSSAFGFRCDFGTGFITHGMGDHHGMPLPPPLQLPCHPKLLQMPFDQEDQPGIHGVMLSSDHCGLYPLPALPLSNSAAAAAATVALGKHSAAAGSMPNIGGAEEVATTVTKAGNESTTCNGSTTWWRGSTMAAAGEKGKMKIRRKMREPRFCFQTRSEVDVLDDGYKWRKYGQKVVKNSLHPRSYFRCTHSNCRVKKRVERLSTDCRMVITTYEGRHTHSPCDDNSSGEHTNCFSSF

SEQ ID NO: 18046 - protein, 375 aa, Oryza sativa
  Clone ID: TF_OSC31206j.C1.p5.fg
MVTPLSVLLAAAAGGGFDRRDRSRVVGGGGGGREGWEMDEVLAQISEGFRLAGELMSELAATQNDPDYLAARCHAIAGAYAAAARVLQGARHGGGGVGAASTSFGGEGYLHHQHRQQRTSSAFRIACQVMALPLCTQVTRGFTHNYEYSTRRESGEKVTVMVAAQRTGNTEQPPDDGYTWRKYGQKDILGSRYPRSYYRCTHKNYYGCEAKKKVQRLDDDPFTYEVTYCGNHTCLTSTTPLLTLPAAAATSVTNSPTAAAVLGQDFVMAPAADQQPPQHQQAQPPLSTSIHLGIGWPMTPASLAGAVGEGSTSTTATAPQVTTMGATAAGGGGAAARDADHYPVADLADVMFNSGGSGSSSIMDGIFSSHDRRDN

SEQ ID NO: 18047 - protein, 332 aa, Oryza sativa
  Clone ID: TF_OSC400044j.C1.p100.np
MGFAKTTTETDIKLFLMGPCGASKQNNSKRGGSRTVARAEASSNDSSQEARRLFGACHVRESANPHARRLFGACHVRESANPHARVPMYMAAAAAGASTPFNFCRHGSHAEYDAVFSGSWMARRPSAAPHGGGASGSGSGSGYGAASYVAPTFGAAFRQQHLDLLDYLSDDQGVPAPPPAAVPSASYVTPAPAMAPAEPVVPDAVAAAGGYPRSVAAAAAAVAGEGRDRTTTDKIAFRTRSDDEILDDGYKWRKYGKKSVKNSPNPRNYYRCSTEGCNVKKRVERDKNDPRYVVTMYEGIHNHVCPGTVYYAAQDAASGRFFVAGISHPDLN

SEQ ID NO: 18048 - protein, 79 aa, Oryza sativa
  unsure (1)..(79): unsure at all Xaa locations
  Clone ID: TF_OSC400426j.C1.p60.gp
RVERDGDDPRYVVTTYDGVHNHATPGCVGGGGHLPYPTSAAPPWSVPAAAASPPPAHAQAWGAPLHAAAAAHSSESSFX

SEQ ID NO: 18049 - protein, 429 aa, Oryza sativa
  Clone ID: TF_OSC400099j.C1.p8.fg
MEEEVEAANRAAVESCHRVLALLSQQQDPALLRSIASETGEACAKFRKVVSLLGNGGGGGGGGGGGGHARGRMAGRSRPSAVLREKGFLESSSGGGQLGMMMSGAATPSTSSAAHLRNRIGGGSGVPPDSLRGLDLVSSSSKGGAHQFDPPKLVQPLSVQFQFGATAHRYPFQQHQHQQKLQAEMFKRSNSGISLKFDSPSATGTMSSAFMSSLSMDGSVASLEGKPPFHLISGPVASDPVNAHHVPKRRCTGRGEDGSGKCATTGRCHCSKRRKLRIKRSIKVPAISNKIADIPPDEYSWRKYGQKPIKGSPHPRGYYKCSSVRGCPARKHVERLRENGGRTCDWIVTGKICSKKGGIRFEDFKGRLTKGSEQLKHRVSLEKDKQDLAFSVHKFTCNDLPLYVAFALLKDQNFLLAEESFSIKAVSTC

SEQ ID NO: 18050 - protein, 336 aa, Oryza sativa
  Clone ID: TF_OSC401122j.C1.p48.fg
MEHFNDWDLQAVVRSCSFPQSEPPRVGVGVPAAPGAGGAPVVVAPPARAPDGPDQMARASASALYDLEYLDLDHKPFLLPGSSSSSSSSRAVARARGEDDGKGRHEVMISFPAAAAASTSGAQPRSPSGRKPGIRTPRPKRRSSKKSQLKKVVYEVPVADGGVSSDLWAWRKYGQKPIKGSPYPRGYYKCSSMKGCMARKMVERSPAKPGMLVVTYMAEHCHPVPTQLNALAGTTRHKSAPTGDDDKPTSPGPAAGRAAAGEGVVKCEDVDGNELSAMAADGGAEDTAAAADDDGELWPEGMGLELDEFLGPMDDDVFEFDHVLEDDGVLGRRLSL

SEQ ID NO: 18051 - protein, 194 aa, Oryza sativa
  Clone ID: TF_OSC15464j.C1.p1.fg
MAASVGLNPEAFFFSNSYSYSSSPFMASYTPEFSAAAIDANLFSGELDFDCSLPAPAQEYPENENTMMRYESEEKMRARVNGRIGFRTRSEVEILDDGFKWRKYGKKAVKNSPNPRNYYRCSTEGCNVKKRVERDREDHRYVITTYDGVHNHASPAAAAAALQYAAAAGDYYSPPLSSAGSPPAAYSAGGSLLF

SEQ ID NO: 18052 - protein, 215 aa, Oryza sativa
  Clone ID: TF_OSC29687j.C1.p32.gm
MALGHHGAARQPPTTMAAAASSSTTSAAAAPATATTTVAFSFQHPTPTPSHHHHHHGVLGYSPLVLDHHHPTTAAASSHAPSPPTLHHHHGGGLHAAAPPPRSSPPHPWSCEEGDHRGRPQMGNKGEAAAAMGAMGINDAGNNTAAAAAAQHHLGVGAVRMKKVGGGGGGGGKARRKVREPRFCFKTMSDVDVLDDGYKWRKYGQKVVKNTQHPR

SEQ ID NO: 18053 - protein, 201 aa, Oryza sativa
  Clone ID: TF_OSC29698j.C1.p1.np
PPPWVVGLNNVDLLHARRCQATTTVAFPFQIPTATLYHHHHNGFIGYSHLVPVFHHGPAAQASWHEPSPPTVRRHNGGGFHAAAHLQRWSPPHPWSCEEGDHRGRPQMGNKGEAAAAMGAMGINDAGNNTSAAAAAQHHLGVGAVRMKKVGGGGGGGGKARRKVREPRFCFKTMSDVDVLDDGYKWRKYGQKVVKNTQHPR

SEQ ID NO: 18054 - protein, 406 aa, Oryza sativa
  Clone ID: TF_OSC401719j.C1.p53.fg
MQESREYWRDGGDVVGEELLREILDETAAVHSNSNSNSNSNSNSKEAEEEDEREYFAAAAADEQLQVEAPCGRRRRESMVNKLISTVYSGPTISDIESALSFTAAGDHQLLADGHNFAASSCSPVVFSPEKTLSKTMENKYTLKMKSCGNNGGLADDGYKWRKYGQKSIKNSPNPRSYYRCTNPRCNAKKQVERAVDEPDTLIVTYEGLHLHYTYSHFLHSTSSSSSSTTTQQQLQPQPQMMTNCKKKPKLHLHPLLHDDPPPPPPPPEMTTMMIMQSFSIQQQQHDDDQLLQPAADDHLMVQAPPDDCYNINGSSSSGLMMSLDDDEQAAGAGGLLEDVVPLLVRRPPPPICNNNNYYYSPATTCTSDNEYGSSASASPSSSVSVSSWTTPMSPCIDMAILSNIF

SEQ ID NO: 18055 - protein, 276 aa, Oryza sativa
  Clone ID: TF_OSC875j.C1.p1.fg
MSHQQALAQVTAEAVHSPYSMINQSDFSLPFSSTTTSVLASQHVNSSANVSSPREIPTLPSHTDNSTIESTEVSHGFQTTALTEDKPADDGYNWRKYGQKAVKGGEYPRSYYKCTHLSCPVKKKVERSSDGQITQILYRGQHNHQRPPKRRSKDGGALLNEADVSPEKEDASTRSEQGSQDYSGKFKASNDGGPSSSRRGDRGEQISGSSDSNSSSVPEEVKVEGRATSDGNANKRHVPAPAQRIIVQTTSEVDLLDDGYRWRKYGQKVVKGNPHP

SEQ ID NO: 18056 - protein, 363 aa, Oryza sativa
  Clone ID: TF_OSC419704j.C1.p3.fg
MAAVESSKKLVAILSKSGDPFRLMAAVAETDEAVSRFGKVVTILSNRVGHARARLGKRRSSPPVDPGCLMDHPLAAAASSPAPSNGRLHFSSSAATASPSPATAAAASSAANVTPAVVDRSLFLETTLLDLNSRGAPAPAASMAAAAKNSSKLAPAPMVNSSSSANHIQFQQPMKSFQFEQTPISDKFHIEMPRGVGGGGGKEVISFSFDNSVCTSSAATSFFTSISSQLISMSDAATNSAAAAAAPTTKKPSSCARKATADDDAGGKCHCPKKKSVSISPPFLGHFCHDLDRVLASDFFAGNPGRRRGYYRCSSKKDCPARKHVERCRSDPAMLLVTYENEHNHAQPLDLSVVQQATANPQT

SEQ ID NO: 18057 - protein, 223 aa, Oryza sativa
  Clone ID: TF_OSC31212j.C1.p2.gm
TQQSSGNSVVVKNLDDGQAWRKYGQKEIQNSKHPKAYFRCTHKYDQLCTAQRQVQRCDDDPASYRVTYIGEHTCRDPATAPIIAAHVIHQVAAGDNDDGCGGLQAGSRLISFVAAPAAPVDAAAAPTTSTITTVTAPGPLLQPLKVEGGVGSSDQEEVLSSLTPGSSAARGGGGGGGVAGPFGPDQGDVTSSLHWSYDAVAGMEFFKNDEVVFDLDDIMGLSF

SEQ ID NO: 18058 - protein, 340 aa, Oryza sativa
  Clone ID: TF_OSC900009j.C1.p3.fg
MSPAPAPAYAQVMEDMEKGKELAAQLQGLLRDSPEAGRFVDQILHTFSRAMRALDKAAVSAAGGEGSEVQSEVTCGGGASAGGKRKAPAADRKANCRRSLGVFEKGIEEIGKIRKTRTQQSSGNSVVVKNLDDGQAWRKYGQKEIQNSKHPKAYFRCTHKYDQLCTAQRQVQRCDDDPASYRVTYIGEHTCRDPATAPIIAAHVIHQVAAGDNDDGCGGLQAGSRLISFVAAPAAPVDAAAAPTTSTITTVTAPGPLLQPLKVEGGVGSSDQEEVLSSLTPGSSAARGGGGGGGVAGPFGPDQGDVTSSLHWSYDAVAGMEFFKNDEVVFDLDDIMGLSF

SEQ ID NO: 18059 - protein, 419 aa, Oryza sativa
  Clone ID: TF_OSC413551j.C1.p2.fg
MSGGGGGGEGFPFHDELASLFAERPPNGAMPGMLQQQQPWSFIDYHHHLMQESAPTTPPLDYEAFAGEFDDDVAPLEEVKRELVVDGVGLFPGGGASAAAAAAAVAGPMTPNSMSVSSTSSEACGVGGGAGGDEESAGKCKKEEEGDGGDDDGKEGSSTTKGDGDGEDKNKKGGKGKGKGEKRPRQPRFAFMTKSEVDHLEDGYRWRKYGQKAVKNSPFPRSYYRCTTQKCPVKKRVERSYQDAAVVITTYEGKHTHPIPATLRGTAHLLGAAAAAHHHGGLQYHHPGHFAAAVGHRLPPQPHDALGGGLLAPPHAQHLHAMQHQMQLAAAAAASGGSLHAAAMQQMPQPDHAGLVAIIASTTGASTTPPPPPATGSAAAATTPLRMQHFMAQDYGLLQDMFIPSPFLHNDDANNNNHR

SEQ ID NO: 18060 - protein, 279 aa, Oryza sativa
  Clone ID: TF_OSC900417j.C1.p3.fg
MEENARLTRALDAILAGHHAHQRALLAPSLSPPPPSATARAPSVSTSCAAREDAAPAVAAAAASTACPSRQQPPTAEPRPKVRTVRVRADAADATDANSMAETVKDGYQWRKYGQKVTRDNPYPRAYFRCAFAPSCPVKKKLQRCAEDRSMLVATYEGEHNHALSTQTTEFVASGCTTSQHAGGSSSSPLPCSISINSSGRTITLDLTNQAGSGSIASCGVEAAAVSGELVTVLSPELRRHLVEEVVQVLKNDAEFVEAVTNAVAARVVDQIPHIPVHL

SEQ ID NO: 18061 - protein, 618 aa, Oryza sativa
  Clone ID: TF_OSC400135j.C1.p2.fg
MADSPNPSSGDHPAGVGGSPEKQPPVDRRVAALAAGAAGAGARYKAMSPARLPISREPCLTIPAGFSPSALLESPVLLTNFKVEPSPTTGTLSMAAIMNKSANPDILPSPRDKTSGSTHEDGGSRDFEFKPHLNSSSQSTASAINDPKKHETSMKNESLNTALSSDDMMIDNIPLCSRESTLAVNISSAPSQLVGMVGLTDSSPAEVGTSELHQMNSSGNAMQESQPESVAEKSAEDGYNWRKYGQKHVKGSENPRSYYKCTHPNCDVKKLLERSLDGQITEVVYKGRHNHPKPQPNRRLSAGAVPPIQGEERYDGVATTDDKSSNVLSILGNAVHTAGMIEPVPGSASDDDNDAGGGRPYPGDDAVEDDDLESKRRKMESAAIDAALMGKPNREPRVVVQTVSEVDILDDGYRWRKYGQKVVKGNPNPRSYYKCTNTGCPVRKHVERASHDPKSVITTYEGKHNHEVPASRNASHEMSTPPMKPVVHPINSNMQGLGGMMRACEPRTFPNQYSQAAESDTISLDLGVGISPNHSDATNQLQSSVSDQMQYQMQPMGSVYSNMGLPAMAMPTMAGNAASNIYGSREEKPSEGFTFKATPMDHSANLCYSTAGNLVMGP

SEQ ID NO: 18062 - protein, 280 aa, Oryza sativa
  Clone ID: TF_OSC404459j.C1.p1.fg
MAMLGSSSAVVLELMTMGYQSAAYLGELLRAASPAQAGDEQQELAAEILRCCDRVIAKLNRGGATGATTGKKRKAAESAAAAAVTSPSLPVTPTKRRARGAEAVREVRSGTTTDGFIWRKYGQKEINGCKHPRLYYRCAFRGQGCLATRRVQQSQSQDDPAAAFVIAYYGEHTCGGDAAAAAACRDGELMPPAVINSGASSFAAAWNMASREPASSLAVERRSCDGDAPSETSQGWSPSFSSEVELDVVGFDLAGADSSASPVWEFLNGSFDWEFVINSL

SEQ ID NO: 18063 - protein, 314 aa, Oryza sativa
  Clone ID: TF_OSC400284j.C1.p48.fg
MAGAEWSPFDGDAAFAEYSSAVLAELGGWAAPGEEGGAGMMVPAALDLPVDVVGAAAREEEEEEEEAPARSGDGAAAAASSSSSGEPAAPDKRPAAAEAAPAAAATATATAKKGQKRARQPRFAFMTKSEIDHLEDGYRWRKYGQKAVKNSPFPRSYYRCTNSKCTVKKRVERSSDDPSVVITTYEGQHCHHTASFQRGVGGAAVAAHIHGAAAVALAEQMSAFVSPPPQPHMLYGLPRLHPPSSETAVSCSMPTTTSLQELNNSEGLQRPGYNNSPQAAVTIAQRPPSPSVPPAVSFDKGLLDDIVPPGVRLG

SEQ ID NO: 18064 - protein, 538 aa, Oryza sativa
  Clone ID: TF_OSC414373j.C1.p24.fg
MERPAPEAAAAAAEPPGAKAEEEEEGPKDVGVKGTGKEKETEKVEAEKEMEGKGKGKESMEVEEGKEKEGKGKAKEKEKETKVKVKEEGGEEKEKGKVEVVEAKRRPAGVGAETPILAVPMVAVPCFLASPAFAGHFSMSHQAALASVTAQAQIQLQSPTTPYSEGLPSPFPITPKAVMPLQRSPSGTEGSVRRSVLEKSASFQSRPHNHVSVNMVGDGFNWRKYGQKQVKSSENSRSYYRCTNSNCLAKKKVEHCPDGRVVEIIYRGTHNHEPPQKTRFVKERVAHITASSGDDETLGLVNNEIIESPSPGCKLEPGAVSEASEQQLFCSSDCEGDAGNKSEDDHPSTEPQPKRRIIETSTPLTPVLRTVREQKIIVQAGKTSDGYRWRKYGQKIVKGNPNPRSYYRCTHDGCPVRKHVEKAPDDDNNIVVTYEGKHNHDQPFRNNSESKDGPVPMIIPAETTSEQPSTMTSTSEQKQPISLLKDGGDEPMKGKTSEIGGEKAVESAQTLISIKTNPDDMKNTLLKDTSAVVPVQNN

SEQ ID NO: 18065 - protein, 183 aa, Oryza sativa
  Clone ID: TF_OSC18795j.C1.p1.fg
MESMEGNGGGRLVVTELSHIKELVRQLEGHLGGSGSPDLCKHLASQIFSVTERSIGMIRSGHFDGHRKRSAAAVAAGDLDSATPSPLSDVSDLPFKATKKRKTSTEKKRHQIRVSSTGGVENPPVDDGHSWRKYGQKEILGAKHPRGYYRCTHRHSQGCMATKQVQRTDEDATVFDVIYHGEH

SEQ ID NO: 18066 - protein, 260 aa, Oryza sativa
  Clone ID: TF_OSC401926j.C1.p17.fg
MTYLEFLQKNQWGQEASVGADGVQVDDVCAGSLGGHATAGVWPGRWREIGGRACAWTAAEGLENGGQESRADGSSRRIILELGDRDDSYPWRKYGQKDILGARFARSYYRCAQMLGCTARKQVQQSDDDPSRLEITYIGLHTCGGDRPSSPAPTNPADGPRCDAATSSHRLLPSALQQKLEEHVPAASDDMMMACTPSWLFIPSPACSQSELLSEGEVPELRVVRQEPYDPVELVEEHKKPSDADEDSLALHNSVVPDFM

SEQ ID NO: 18067 - protein, 631 aa, Oryza sativa
  Clone ID: TF_OSC27462j.C1.p1.fg
MSSFLNEEFSSGPFSDIFCDNGSNKHQDGLGKSKAFIDSSREETAQLAKKFESNLFGANQKSSSNGCLSERMAARTGFGVLKIDTSRVGYSTPIRSPVTIPPGVSPRELLESPVFLPNAIAQPSPTTGKLPFLMHSNVKPSIPKKTEDETRHDRVFFFQPILGSKPPTCPVAEKGFSVNHQNQPSVTDNHQELSLQPISTASNDFTSPTIVKPKTSDSMLDNDDHPSPANDQEENASHKNEEYSSDLIITPAEDGYNWRKYGQMRVRTVERSQDGQITEIVYKGSHNHPLPPSNRRPNVPFSHFNDLRDDHSEKFGSKSGQATATSWENAANGHLQDVGSEVLTKLSASLTTTEHAEKSVMDKQEAVDISSTLSNEEDDRVTHRAPLSLGFDANDDYVEHKRRKMDVYAATSTSTNAIDIGAVASRAIREPRVVVQTTSEVDILDDGYRWRKYGQKVVKGNPNPRSYYKCTHPGCSVRKHVERSSHDLKSVITTYEGKHNHEVPAARNSGHPSSGSAAAPQATNGLLHRRPEPAQGGGGGSLAQFGYGSAGHRPAEQFGAAAAGFSFGMLPRSIATPAPSPAIAVPAMQGYPGLVLPRGEMKVNLLPQSGNAGAAASQQLMGRLPKQHPQM

SEQ ID NO: 18068 - protein, 310 aa, Oryza sativa
  Clone ID: TF_OSC10036j.C1.p3.fg
MNTFTLFRDEVQKASEKVHRHHANDDEAGLFLSLGLSLGSSPDACQCHASKKDEADAGNGGGDGYLALALRCAPAAGEPMVHPKRQRATTNSSSSSSICGEYGGGAAAAAVPAGHDDDDRSCMITAASTANRPGRVVLRTRCSAPTVKDGCQWRKYGQKTAKGNPWPRGYYRCTGAPGCPVKKQVQRCNHDTSVLVTTYDGVHNHPITPYAAALPPSSSSSSSAAVAMLASSSSSSTWSELQRAMPAAQSSWSQRNYPIQADVVAKAIWDPKFQATVAAAVASYVRDREQSARVAGGKGAGELFNLAPPC

SEQ ID NO: 18069 - protein, 386 aa, Oryza sativa
  Clone ID: TF_OSC30380j.C1.p1.fg
MDGDAWWYPGGGGGGGSNNWDLGAVVRFGCGGGRVSPAAALLGEAWEYDDDPFSSFLAPPMTAQQAALPAVWEEGDDGDAAWMAPLPGLQTGGGWGDQAPMVVDELCGALVVAPPPPPKQQEVLQVQQQPPPADNTQPTTYQQGSGGDGESTRAGGSRSARRKYAASAIYIVSVCFSDSCIMWIRSLADDRGVRHACRKKQTRKEVVRVAASGPAPDLWAWRKYGQKPIKGSPYPRGYYRCSSNKNCAARKQVERCRFDPSFLLLTYTGAHSGHDVPLHRNSLAGTTRHKPPPPPPLPSAADKSPATAAEAATASQSPGLSPTTPLRASSMELHGEDDAEAELQVEEDDMAIDDEDDDDVADETISTVPWGTPISDAIIAASYEWR

SEQ ID NO: 18070 - protein, 199 aa, Oryza sativa
  unsure (1)..(199): unsure at all Xaa locations
  Clone ID: TF_OSC30380j.C1.p1.np
YLSLSSKILSSKSAPXLVSPRRRDGRRRMVVRVAASGPAPDLWAWRKYGQKPIKGSPYPRGYYRCSSNKNCAARKQVERCRFDPSFLLLTYTGAHSGHDVPLHRNSLAGTTRHKPPPPPPLPSAADKSPATAAEAATASQSPGLSPTTPLRASSMELHGEDDAEAELQVEEDDMAIDDEDDDDVADETISTFIISXISV

SEQ ID NO: 18071 - protein, 87 aa, Oryza sativa
  Clone ID: TF_OSC8596j.C1.p2.np
NSLSYDGYSWRKYGQKQVKGSEFPRSYYKCTHPTCPVKRKVEMTPDGRIAEIVYNGEHNHPKPHPPRKPTLSTSYNLPDICDDGIGL

SEQ ID NO: 18072 - protein, 304 aa, Oryza sativa
  Clone ID: TF_OSC400222j.C1.p48.fg
MSGGGGREQMKGGEDVAAADCPGSPVSPSPAAAQRSAAGAAASPSGRSRRSAQKRVVTVPLADVTGPRPKGVGEGNTPTDSWAWRKYGQKPIKGSPFPRAYYRCSSSKGCPARKQVERSRNDPDTVIVTYSFEHNHSATVPRAQNRQAAPQKPKAQACSPPEPVVEVEPEETHQYGVTAGPATGGGGGAAAIEVRDEFRWLYDVVSVPATSTSPSDIDAADEMQLYDQPMFFGGAVVGTAALLPDEFGDVGGLGGEGLGEEEALFEGLGELPECAMVFRRRAGDGLEMGGGVKIEQPAESTAMT

SEQ ID NO: 18073 - protein, 323 aa, Oryza sativa
  Clone ID: TF_OSC30411j.C1.p3.fg
MDLMGGYGRVDEQVAIQEAAAAGLRGMEHLILQLSQTGTSERSPAPAQEQQQQVDCREITDMTVSKFKKVISMLNRTGHARFRRGPVVAQSSGPAASEPAPVRSSPSAVSRPMTLDFTKAASGYGKDAGFSVSGISAASSSFLSSVTGDGSVSNGRGGGSSSLMLPPPPATSCGKPPLSSAAAAMSAGAGHKRKCHDHAHSENVAGGKYGSTGGRCHCSKRRKHRVKRTIRVPAISSKVADIPADDFSWRKYGQKPIKGSPFPRGYYKCSTLRGCPARKHVERDPTDPSMLIVTYEGEHRHSPSAAGQDHPPAPPPPLALPLA

SEQ ID NO: 18074 - protein, 333 aa, Oryza sativa
  Clone ID: TF_OSC400188j.C1.p7.fg
MASPDGGVGDGGAEPHEVMDDLLEMREQAAMLHSMLHGTSPSSCAAAASTRQLNQLIDGVMSRLQSSSLSVMSPGGGGGRRGSGGRKKKGAKAVAGPHRRSSSGRRRSKSPFVRMVTTKELEDGRQWRKYGQKHIQDSPNNPRSYYRCTHRPDQGCMATKQVQTSESNSSEFVISYYGEHTCSDPSTIPFVVEAEAPAADYANLISFGSSGGASTSRVDPLRQSRHRLMAEAVDPTPSCSFANCHSPVLSSECASEAAALSSSLPLSAVVGSAVTTPSTSIVGSAPADYDWPSGLAGGDMAGSFPSSPSSLGFMTGSFGNLPGDDDDMFGFDP

SEQ ID NO: 18075 - protein, 379 aa, Oryza sativa
  Clone ID: TF_OSC401122j.C1.p38.fg
MSSGGGGGGGGDRHGPYHQHGHLGRGEGADYVYSSSDMESFFFSQPGGVGIGGGGGGVVGAGGADEIMPYSSITDYLQGLLDPSGLARHLDVACPSSQDTVVKQELSVDVTSHDSQGTGGVAGEGVAQATPNSSASFSSSDGEAEGGKSSRRCKKGQAKAEEEDDKDEEDGENSKKPNKPKKKAEKRQRQPRVAFLTKSEVDHLEDGYRWRKYGQKAVKNSPYPRSYYRCTTPKCGVKKRVERSYQDPSTVITTYEGQHTHHSPASLRGGGGGVGIVGGHHHHHLFMPGVHGLPPSHLMPAGFHPELMGLMHHHPAMAAAAANPSMYFPGVAASAPPPPAVAGGGAMPPNDHPPLQQHHFTDYALLQDLFPSTMPSSNP

SEQ ID NO: 18076 - protein, 372 aa, Oryza sativa
  Clone ID: TF_OSC100778j.C1.p10.fg
MAPNPVGHAPLCCRLVQGNFETFPQQDLVPLTAQEVHSKCITFGRAENLPFIPLATSALVSQHTGSSSVNVTPLQEILTSPSQISNVNTESIGVLQGLPASSIVLDRPTDDGYNWRKYGQKAVKGGEYPKSYYKCTHLNCLVRKNVEHSADGRIVQIIYRGQHTHERPSKRRFKDCGGISDDLDDFSGTTGTSVRSQPDYDDYCRKPIIPSGTMVAPLVKKIEDGDDQLSGSSDNQDEHDDEVRTSDGASGDASANERNVPAPGQKIIVSTTSEIDLLDDGYRWRKYGQKVVKGNPYPRSYYKCTYLGCDVKKQVERSVEEPNAVITTYEGKHIHDVPAARNKSHVVANASLLQNTKSNTYCTEQSYTTITC

SEQ ID NO: 18077 - protein, 185 aa, Oryza sativa
  Clone ID: TF_OSC15307j.C1.p1.fg
SYYKCTSSRCSAKKHVEKSTDDPEMLIVTYEGSHHHGPQPLFPPHIAQPPPPTSVVGFSAASGAGPPPSSPAAAARKRKNYVRAAFSPTTSEDDGDGAGRLRPEWPQDDGTSCDVAELRRRGDAEHAAPRRVATDRSCDDGGGGGSTSASSSVARADAATALSSDSPPTIWSCLDWPWSQETLFL

SEQ ID NO: 18078 - protein, 167 aa, Oryza sativa
  Clone ID: TF_OSC5799j.C1.p1.gm
PYLMGDVLRAQATASAEEVAGGVWPCELDDHLIGELLGDDGLFVPAAEHPTLYYSFGAGSSAAAAAAPCNGGGSADHERRPRPAPAVSRDLCSVYSGPTIRDIEKALSSSASPRPPYPSGRRYSSLYLVEAESKYTSKVRSCGGKMPADGYKWRKYGQKSIKNNPHP

SEQ ID NO: 18079 - protein, 203 aa, Oryza sativa
  Clone ID: TF_OSC5800j.C1.p2.fg
MEEDDGLALMTGANQSLWSYYKCTSSRCSAKKHVEKSTDDPEMLIVTYEGSHHHGPQPLFPPHIAQPPPPTSVVGFSAASGAGPPPSSPAAAARKRKNYVRAAFSPTTSEDDGDGAGRLRPEWPQDDGTSCDVAELRRRGDAEHAAPRRVATDRSCDDGGGGGSTSASSSVARADAATALSSDSPPTIWSCLDWPWSQETLFL

SEQ ID NO: 18080 - protein, 572 aa, Oryza sativa
  Clone ID: TF_OSC401547j.C1.p14.gm
MENNQSGQAQDGMADQRFRSWLTEQLNMQQQNAGCSSNPAPAVMQMPALPSHTDYGGIYPNPTEYDGYNWRMCGQKLVQGGCHQKFYYECSQANCGAEKSVTRSADGQIKKTVWVIRPSVAMPRNEEEDGLQSGSSDSGDDDASEARAADMFLQLQLKIPPRITQLTLMFWVTALSSVRIITEVVEKFKVQNVNIVKNASVEKLQEEQAICADISRYVLHNLERLDCSKKVPSSANFRQFLVAICPDYNMVPQAAFEEKFLSFFHNEKMKLKEKIELTPGGVFLSVTKQYVEFKTFVCITVHFIDNEWKMNRKIISYGYGGYPDGADYYVDPRFKLRYLEQCFTQVSSSGCAKLFVLEVRAKIYELFLQYSCNVDWQTGELLNHRSNDLQMDRHGNDSLHGTDKNDIEQGSNGEFRELTSYIEGELYPQNDQFDILKWWKDNASTYPTLARLARDILAIPGSAVSAEYAFNKTGERAAGVIRPSVAMPMNEEEDELQSGLGDSEEDDANEARVDGDDMVQLKISPLKLQLRLMLRVTAVSNVRIIAEGFLAWEGMFRVSIGFYPELDVEEDL

SEQ ID NO: 18081 - protein, 502 aa, Oryza sativa
  Clone ID: TF_OSC101573j.C1.p8.fg
MEMMVQKQRHEEGEEERGGLCAREIKELDFFSAAGAGAGRRDDDDVLRADGISSSHAGFMVSTALDLLTAVNDGDHHEEKKGQSNIHQSKQMDAAATTVEGELRQAGEENRRLRRRLEELTSSYGALYHQLVQAQQLHTKHQQQAPIAGVQLLDALAAASPASHRRRAAAAVDGDRTADSDGGEGDENVSPSLGSKRPAAAATLTRLTPESGSGGENNGGGEQAPAAEMAPCRKARVSVRARSEAPMISDGCQWRKYGQKMAKGNPCPRAYYRCTMASQCPVRKQVQRCAKDKSILITTYEGTHSHPLPPAAAAMAKTTSAAAAMLLSGPAVSRDALFAAHHHVVAPPPFFHHPYAGSTMATLSASAPFPTITLDLTQPPPTTTTTAAAAMLQLHRPYAFSSLPFSMYGAGGGSHRPPVVLPPPSSVVETMTAAITRDPNFTTAVAAALSSIMAGGGAQARTPPRGGSDAAGDINGGGGADHATAGARAAAAATQPCGTSPT

SEQ ID NO: 18082 - protein, 650 aa, Oryza sativa
  Clone ID: TF_OSC400603j.C1.p12.fg
MSSFLNEEFSSGPFSDIFCDNGSNKHQDGLGKSKAFIDSSREETAQLAKKFESNLFGANQKSSSNGCLSERMAARTGFGVLKIDTSRVGYSTPIRSPVTIPPGVSPRELLESPVFLPNAIAQPSPTTGKLPFLMHSNVKPSIPKKTEDETRHDRVFFFQPILGSKPPTCPVAEKGFSVNHQNQPSVTDNHQELSLQSSSTAAKDFTSATIVKPKTSDSMLDNDDHPSPANDQEENATNKNEEYSSDLIITPAEDGYNWRKYGQKQVKNSEHPRSYYKCTFTNCAVKKVERSQDGQITEIVYKGSHNHPLPPSNRRPNVPFSHFNDLRDDHSEKFGSKSGQATATSWENAANGHLQDVGSEVLTKLSASLTTTEHAEKSVMDKQEAVDISSTLSNEEDDRVTHRAPLSLGFDANDDYVEHKRRKMDVYAATSTSTNAIDIGAVASRAIREPRVVVQTTSEVDILDDGYRWRKYGQKVVKGNPNPRSYYKCTHPGCSVRKHVERSSHDLKSVITTYEGKHNHEVPAARNSGHPSSGSAAAPQATNGLLHRRPEPAQGGGGGSLAQFGYGSAGHRPAEQFGAAAAGFSFGMLPRSIATPAPSPAIAVPAMQGYPGLVLPRGEMKVNLLPQSGNAGAAASQQLMGRLPKQHPQM

SEQ ID NO: 18083 - protein, 358 aa, Oryza sativa
  Clone ID: TF_OSC464j.C1.p1.fg
MALIATGATATATAAPVASPAASSMASELMAQGRESAAVLEALLHGASLPPAHGGAHALAAEILRCCDRALAALRAGGDAESSSADTKRKPATAQPSTRRRRRYIYMYVSSRSCDGARDRAATQQEIFCRATASGGGAAAAAEPARVEKARTSEDGFLWRKYGQKEIKNSKHPRLYYRCSYKDDHGCTATKQVQQSEEDPSLYVITYFGDHTCSCQTAAAAAMDDDDDDENSQHFVINFGPATASRSGSPPLLYDDGDDGDVWRETAATPPSSRQSRCSPEGDGEESGVKMSKEEPVDSCPGPSAVSSPADVVSCSSPAMEPDLLGCLNWDDDFGDSSFVDADEFMNFDEIDLFQIYS

SEQ ID NO: 18084 - protein, 439 aa, Oryza sativa
  Clone ID: TF_OSC400284j.C1.p39.fg
MADRRRSDGGGGMQQQPFTSPGQERVFDGGGVPGQVAAPYGSDFDQSSYMALLAAGAVGVGVGVQPTAAPWAVEEDVAAAPPGISLAPQFSMANYAPPPSYQHPATLVSPPLAAGLHPYPPYLHGVDAPPPQWPPRPAPPPSFSVLDLAAAAAPHEQRHSMQQLLLRAAAFGGGMHAAAAPAPAAAAAIEQPAKDGYNWRKYGQKQLKDAESPRSYYKCTRDGCPVKKIVERSSDGCIKEITYKGRHSHPRPVEPRRGGAASSSSSAMAAGTDHNAGAAADDAAAADEDDPSDDDDTLLHEDDDDGEEGHDRGVDGEVGQRVVRKPKIILQTRSEVDLLDDGYRWRKYGQKVVKGNPRPRSYYKCTADGCNVRKQIERASADPKCVLTTYTGRHNHDPPGRPPAAANLQMPGPAAMRLAGGGTAHQQPSGGAHQMKEET

SEQ ID NO: 18085 - protein, 814 aa, Oryza sativa
  Clone ID: TF_OSC401547j.C1.p17.fg
MADQGFRPFSALMSAPSTAQQHVGSSFSTAVVQVAAAQQSHTDHGNICLADDDGYYWRMTGQSTTQGESSPTILSHYQCAQANCVVQKTVAYTADVETFYRGRHNHLRQSDRLEPMSQVGVLVEASDAAGAAAGPSVPETENGDDQSSGSSDRNEDDAGDVEMDEDAAAGDPNAMQRRKLKSKVWKEFKLVFKDGKLHTAICNHCKLRLVAETRNGTSHLRRHLKICPEKAGTSRVQKKRRSSTSQSQPDLPVSENLENGQENPSQNLENGQENPLEEFMRATVLKLCPFPAMYRASFASFLAGRNPAPNMVPQTTVEDKFISVYEKEKLKLKEKIIATPGGVFLSVNKWYSGSYETGIVCLTVHFIDEEWKINRKTIRCCLSESDGLDLNLFPHWQSEIANYEDDDKMVLKKVVRDWCLEPKLLGVTLEGSVDKKATISLEDDLTTGKNYLVAKCKLLTIPCMVDGLDDLMQYTVGREVRSMWSRYMTNTPERKLKCQEVVSQLQLDRPSFGSKYRYLTFYWCEAALQFIKSFPLSNGSERPSLDDLEATENFCKIARAIYHATKAFYEPYNLTFNSYFHVIWSLRATLQELPRIKNIERVIKVKNMQEKFDNHWKKWYLWLSIAVVLDPRYKLAFIELRFREAFSQDAGTYISEVRAKFYELYIQYSHVNEQSNEILNQGNNGSGTQISAPLHKQRTNYTIAQAALEEFKELFEYLGGGLCPQNDSFDILKWWKDNSAAYPSLAKMARDILAIPGCAVSAESAFNDDSDHRAELFNGKLGPETTEALICAQSWIIKSSGTADADNGNNITLS

SEQ ID NO: 18086 - protein, 552 aa, Oryza sativa
  Clone ID: TF_OSC401772j.C1.p3.fg
MEEELCGNNWDLDAVVRLGCCRRRISPAAVAQQVDPFASFLQQGVAMEVAAEKEVGVEAAWSFPELTVRDGGGGGLGRDADELLKAFCAAFPSSSSSKSSPLPTPPPPPPTQPQPEQQKPVTVQENLPAPTTAPARASQPAAARQVPAGGVPRSKRRKNQQKKVVRHVPADGVSADVWAWRKYGQKPIKGSPYPRGYYRCSSSKGCPARKQVERSRSDPNTFILTYTGEHNHSAPTHRNSLAGTTRNKLPSSSAASAASAQPQPPPPSVVVVGAGGGGAEAAGLSPTTPLRTPSMEEDEEEEEEEELLVEDMEMAGEDELLFLNGGDDNAALDGTPIRGALLFLALPFSVQQPNLSACSSLGMFDWDLNSHHSSLFLHPQLLMVGDDGGIADVASLGDGNAITTEDDGGGADPVRGDGGGGGCSDAVRGGGSGSNVARGGGGCAVAASGGNDCTVVAYVGVGGVSLGGWIWDPSSSLSPGSGIHAGCAIRVELKLLRFNGELRGEVWLSPFLWRRPKGINGSSSGLHAKGDPRLQLSWLCRCSLSIRAFCTV

SEQ ID NO: 18087 - protein, 514 aa, Oryza sativa
  Clone ID: TF_OSC16302j.C1.p3.fg
MPPCVWGSHTPLSLLSPPAAWAGERMEGDQAGGDLTDIVRAGGGAMPGSVVVDLPSTAAEWQLPAEPMLFPPPPSLSSTTDGCGAGGAAGADIFGGGGGDLFSGLVDPFSSDYSSGADFLDAMPDAMAKVGFDTAVGGGCGGGGGGGGGSGGHLLDMSRKPLLPRGMPMAAVGGLAAPRVMPSPLSPRAIRPYPPISAGDMMKLGITAGQAAGCAIDAAVAGMQMSSPRSGGIKRRKNQARKVVCIPAPTAAGGRPSGEVVPSDLWAWRKYGQKPIKGSPYPRGYYRCSSSKGCSARKQVERSRTDPNMLVITYTSEHNHPWPTQRNALAGSTRSHHSKNSGGGGGSGSKGSQNDKSQQQPSVKEEQKDQATTATTTTTSTITTTNSASPVVVKEEEAALAGSSEALELERVMDTTAAGVVDHSELMDHVFSESYKPMIPETGQPDDFFADLAELESDPMSLIFSKEYMEAKPSGGDHAQEKAMAKELDPFDMLDWSTTTNSSAGSSFEQGKRG

SEQ ID NO: 18088 - protein, 259 aa, Oryza sativa
  Clone ID: TF_OSC409885j.C1.p4.np
YTVILRILPYNIEFKRRKNQARKVVCIPAPAAAGGRTSGEVVPSDLWAWRKYGQKPIKGSPYPRGYYRCSSSKGCSARKQVERSRTDPNMLVITYTSEHNHPWPTQRNALAGSTRSHHAKNSSSNSSSSGASSASKTTPPTAVTTTTTTRSHSSRRNPTINPPPPPAATVPVKEEAAMEHSDEHSDLMQQMFSQSYRPMIPEAAAGGHHDDFFADLAELESDPMSLIFSKDGGHAGNERRRATRETFVFFTSADAGQGT

SEQ ID NO: 18089 - protein, 624 aa, Oryza sativa
  Clone ID: TF_OSC18107j.C1.p12.fg
MIKGDSKQLASMYMKEEMIKGERQLGTHEDRLKDEVIKDGDKISDGNFFKSLQNISSTKEEVCSPGPIERSCMDSSLLNMKAQNKGQDDKLESTRAEMGEVREENERLKTLLSRISHDYRSLQTHFYDVLQQGRAKKLPDSPATDIEEPELVSLRLGTSTSKCKKEDKSTTSSEVKGSTEDFLKIKGGLSLGLSDCRVDANNSEKVQPDVMTLSPEGSFEDARDDTAETTEQWPPSKMLKNLRSVGAEAEDDIAPQPQVKKARVSVRARCDAPTMNDGCQWRKYGQKIAKGNPCPRAYYRCTVAAGCPVRKQVQRCADDMSILITTYEGTHNHPLSVSATAMASTTSAAASMLISGSSSTSLAAYPAAAASPALAFDASSKPPLIGGRPFFLPTAAAAAITSTPSYPTITLDLTSPAAAATSSHAAFSLSNRFSHTRYPSTGFTFSGSGPSSAPWPGYLSYGASLSAHPYNAGGGKSSSSFEAALSSINGSRQQGGGGGGGSAPPLYQMQQKAAAAAPPPPSVITDTIAKAITADPSFHTALAAAITSYVGKKGSPPASGGEDSKVGLKWGEHLGLGLTHSSLSTAAAAAASSSSQMFLQPSLGLSGSTTSASTSPVANREQAH

SEQ ID NO: 18090 - protein, 299 aa, Oryza sativa
  Clone ID: TF_OSC400831j.C1.p20.fg
MCDSLFWQSSADQGDLSDVVRASLQLQTAPRHQAASPPYVHLLGGGGGGGEDQLAAVSQHAEQQQQSMVDASAACDLLHALLPPPPVVQVQQQGASRTRTTIEEDTTGDGEELFAGAHYVVPPIKRRKSQTKKVVCIPAGASGGGGGEVVPSDLWAWRKYGQKPIKGSPYPRGYYRCSSSKGCSARKQVERSRADPTMLVVTYTSDHNHPWPTHRNALAGSTRPSSSNSSNIRLQDSTPVHHQSQTGHDRLTTTHLKQEDVIISPSLLQPDHHQLCTIIDTKHHLLFHQDYPHSFGLFD

SEQ ID NO: 18091 - protein, 142 aa, Oryza sativa
  Clone ID: TF_OSC900386j.C1.p14.fg
MNNRGAGGGRGQGDDEEPTPTPPPAPPPETAPSTVGGGGDGVQLVMPEDGYEWKKYGQKFIKNIQKNRSYFRCRDQRCGAKKKVEWHPHDPGLNLRVVYDGAHHHGSPSSAAGEGGTSAAAAANQYDLSTQYFGGAGGPRSQ

SEQ ID NO: 18092 - protein, 265 aa, Oryza sativa
  Clone ID: TF_OSC401716j.C1.p1.fg
MVKRSDNMDSSSECSRGAHKRLLQDSRSYDQENAMKKVCIGTRTEYTYAPYHDGYQWRKYGQKMIRGNSFPRCYYRCTYHQDHGCPASKHVEQHNSEDPPLFRVIYTNEHTCGTSNSASDYMASSMQIQQIADASLRKAQAAERLRKAEVETPRLMHSPPPRCSGGYNMAMKEEKDVIVSSLLTVIRGCHIAESAGNNSAAALPVNRPPPAVARSDHYSCSYAISPELLPASDDLTLDFMLDSVLDPHWVEPLDLAWLKESTHTG

SEQ ID NO: 18093 - protein, 1882 aa, Oryza sativa
  Clone ID: TF_OSC401547j.C1.p22.fg
MDNQSGQPQYGMADHGFRPFSASISAPSTAQQHTGSSSNTAVIQVATPPSHTDYGNIYLADDGYHWRMCGQNTIQGEPCQTIFYYQCAQANCMVQKSVARSADGQTTQTFSMGVHNHPQRGPTPPRSPSVDPPVPFSSPSCSPPRSPVECAERGCASLSPARANPPSEFEHVPPGDPELRVNREICVLPFSAAMREREAQLRRAVVAVVVGAARTPSAAQVHDELCSEFSLSPHSFSVRRFFPEDFLVTFQSDEIFDRVARRRSIPLGQFRLLVAPWSRQLHAREGSMLFRVRLHLEGIPGHAWDEATAAAVLGSSCRIISCDPVSSSASDMAVFKLYAWTSDPASIPKEKWLRIVEDGGPVVTPQGTCERYLDYVVLIHLTAMEDHISPPEPYLPFAPSSGDSGRPSSDDSDDGPPRRHFFHTSRGRRDGSPPPPQSGQGSTGGGGGGGHRAAPVAVMPAELCSGRLLRRAGALAPEKPVRAVAGAEAAMARRRRPRGRRRQQKVLKWKSKFLKLSPVRSCCRWQPRKGQDTSEPVSVAKAKESSALQSLSLGSVVGQEDREFVLPVSAASEADSAVSSRRDMVGLAASPVGLEAQQGGLVLSTVAGPAVESAGSRPEVQSQPSPLAMEEAHHDASTFLQGSVSAHADPFLSVVLAAKPSMAMAAPGESALPPPDSVPDATLGVEAVSAPLVCPEQHLAASSTPLSQVFSPVSALPTASAVVVVAEIGGPFPDEVVPVDEMAASPPAPSTAVFAAAVEEASAPPPTLITFSRRAKKAIPPALLPPPAPQQPPQPAPLQTPRRSVRQALQATHGAPTFSRCQSVLAKKMGEKDTAVPAAPAPTVCTIQQYNELFEKELSQDQMLALADLFGICLPPPASAVETKLDAISVPLATQFLGPNLADFCYLPSIQTRGGVLLAWDRSVVSCDSHSLGEFSLTARLSFCDGNSCWITVVYGPQPDADKVRFLQELRDTRSTRDGPWMVVGDFNLIYQDQDKNNSNLNRRMMGRFRRAINDLALNELHLNGRSFTWSNGWEHPTLERLDRIFVTSDLEELFPQSFLKALPSVISDHCPLLLSTLPSLPAKGRFRFENFWCKLEGFEEVVQEAWSADCRLQDPISRLDFKLRSTGRALQSWSDKKVGNVKLQLEMARELIGRFDRMEESRGLSGQERFLHRELKRKYLALASLERTMARQRSRISWLREGDANTRFFHQHAAWRRRRNFVQQLEHGSQVATAPDEKAALAHDFFDGVLGSVSHRNFSVNLDFFESRGQHIEELEDPFTEDEVRKAIADSPHDKAPGPDGFSGMFYHRCWVIIKDDPCLVHSFVKLFTKILSRRLSPKLDSLVAKNQSAFIKKRCIQDNFMLVRQSAKYLHDRRTPSVLLKLDIAQAFDSISWQFILEVLEHKGFGVRWRSWIAMLFRTASSRVLINGEPGCPIIHRRGVRQGDPISPMMFILAMDVLSSILAKAENVGLLRPLGIPFRVSLYADDVVAFIRPAVEEIHVATEVLSIFGEASGLRTNFAKCSALPIQCNEADLQILHDELPCQVASFPCTYLGLPLSIFRLKKEDLQPLIDKIGRRLPFWMSHLMTPIGRTTMVKAVLSSIPIYLLMAINAPKWVIKGIDKIRRGFLWAGKATANGGVCRVAWARVCSPIEYGGLGILDLERLGIALRSRWLWQQRTSSDKPWQGLNIPVSQKERNLVSISLVCSVGDGKLVRFWEDCWLQGSSIRSLAPAVYAAVPARFRNRRTVAEALQDRRWIRDICAALGIQAILEYLKLWDILRSIQLGEEPDTISWRWESSGSYSARSAYRLLFAGRTSLEHKPIWKSLAPPRCRYFLWLVALNRCWTADRLRSRGLSHPARCPLCDQCDETIDHLLVACSESR

SEQ ID NO: 18094 - protein, 128 aa, Oryza sativa
  Clone ID: TF_OSC4096j.C1.p6.np
VNLTPIPHTDGHLWRKYGEKKIKNSSFPRLYYRCSYRDDRNCMATKVVQQENDADPPLYRVTYIHPHTCNPSPPAPTPAHVFTEPPPAKAEVHHAVLFSRSVVPLDLSWNYFGAIVFFSFLFVSISPN

SEQ ID NO: 18095 - protein, 225 aa, Oryza sativa
  Clone ID: TF_OSC900242j.C1.p3.fg
MENHKDHTCKIATTTLVIVPLLLSLHQLYLFFLHLLPYACVVSVAEMTKMSSMKADGSVPKRRRQDVQKVVVSLKDHKVEQGPPADSWSWRKYGQKPIKGSPHPRGYYKCSSYRGCPARKQVDKCRNDASLLIITYTSDHNHDNYAATTTNSVQEQAHNPDTSDPLSNGMSLAEVVTVASSKLSGEEESCDFFDELEELPVSASPLPSLSFMVQECSFSDARTLL

SEQ ID NO: 18096 - protein, 310 aa, Oryza sativa
  unsure (1)..(310): unsure at all Xaa locations
  Clone ID: TF_OSC418164j.C1.p6.np
SQPRPPPGPGPGPTPPSWAPPPPRRASRWFAGPTASPSSSTSPAPDTASPASSTRIHVQCQYLLTXQKSTSGKLFDIIRTCXQXQQLAXRELTFPKFKVSDHTGFHLAATXRQRSLMFTSYRXKRGGILNINCGKEPNTCIHSANDPQCYLCGELNTKPSSLAIYYRKNEVKKVVCIPAPPATSSRGGGGEVIPSDLWAWRKYGQKPIKGSPYPRGYYRCSSSKGCMARKQVERSRSDPNMLVITYAAEHNHPWPMQRNVLAGYARSHHSTHATASSRQATAAAADQPAAACTDHNGLLPPPHSISTPTS

SEQ ID NO: 18097 - protein, 142 aa, Oryza sativa
  Clone ID: TF_OSC418197j.C1.p1.np
ASLASVSSSMDHNFLHIYYRKNEVKKVVCIPAPPATSSRGGGGEVIPSDLWAWRKYGQKPIKGSPYPRGYYRCSSSKGCMARKQVERSRSDPNMLVITYAAEHNHPWPMQRNVLAGYARSHHSTHATASSRQATAAAADQPA

SEQ ID NO: 18098 - protein, 563 aa, Oryza sativa
  Clone ID: TF_OSC900002j.C1.p20.gm
MRELKEVDDDAARGGHGRDATETRKSEHATMDMMEEEAANAATAQAAAAGDLADVVARANARAFLVSTPHHHPSPLHPLPPPPMPQAPHQYYPAPQITIPYHHHHHGELRRPTTIAYTDAPVPFETAGPPSTVVDSYHHLTPGDAGYGMPRPLALQISQHALCGGGDVVMGGGGAGAADDGEEAIRISPLTPSAHHQMMKRKNEVKKVVCIPAPPATSSRGGGGEVIPSDLWAWRKYGQKPIKGSPYPRGYYRCSSSKGCMARKQVERSRSDPNMLVITYAAEHNHPWPMQRNVLAGYARSHHSTHATASSSRHKQQQQQQTNQLQPALITSSSSSSSSPFNLYADVVLGGQQANMMMTTEGAGAGLGIQPSAADEVFAELEELEPDNPTMINANMQVYSTTSRPGASVDTRTGCTNIGTQLDGYKGTWLKMFKASRLAVERAHGEGLTGVGSTRPSWRLRGAYVAATRAGGRKTKAPAANGPRAAAVSPGRLATMRGDGAYTGMTRENKSERANGLDSPEGVRRRRIAAAAPGGGKRGKRRRGHEGPIPGGESIYAATGIRC

SEQ ID NO: 18099 - protein, 625 aa, Oryza sativa
  Clone ID: TF_OSC413566j.C1.p5.fg
MESYVGVKGKNVVGGGDVGREMPVAPPSSSSAAVGMVEFPAAAAGLGYAGMTAKEAGGGYQERRVVVGEMDFFKTAEKRGERKEPPPATATAAASGHAGASPDDLSLNKDDLTINMGLLVGRRRNSGSEESIVDDGGVSSNDEEHREAKAALAVTKAEIGRLSEENKRLKNMLSNVTTKYNSLQMQFVTLMQQRRSVLAAPIHQQELLDPEKKEQEGSQQQQQQLIPRQFISLGSASLQPDVEAPHSVVVVGGDVCAPSSSNPDAAVPAMMPLPHFDHHNHHHPIHGGRERGSSPAEADHHRHHQQEQPPPPPQQQQQLPPSWLPADKVPRFLPGKGPEPVPEAATMRKARVSVRARSDAPMISDGCQWRKYGQKMAKGNPCPRAYYRCTMAAGCPVRKQVQRCAEDRTVLITTYEGNHNHPLPPAAMAMASTTAAAASMLLSGSMPSADGSLMAGSNFLARAVLPCSSTVATISASAPFPTVTLDLTQTAPPPPPASSTQPQPPRPEPAQLQAALAEAARPVALPQLFGQKLYDQSKLSAVQAVAGTKGSDGGALADTVNAATAAIASDPNFTAVLAAALTSYIGSRSGSGGAGAGGSSGTVQPLMSGGGDSCSRDDKIGEQNS

SEQ ID NO: 18100 - protein, 335 aa, Oryza sativa
  Clone ID: TF_OSC419984j.C1.p2.fg
MAVTESACLSYEQEAVAVREVAQVYELIKTQQPLLLVHQQPQQLAHGLLNHALRALNVALSVMNQPHASSSAAAAAVPVMSLIKAEAATPANSSSPAADVAADNHVVGKPRRSSSAAKRRRINGEEYKSSSWSQFTPVPHEDGFQWRKYGEKKIQGTHFTRSYFRCTYRDDRGCQATKQIQQKDKNDPPMFQVTYSNEHTCTTTRLINNINNPAALHNLTANPNGHHDSDDDDTIFTKMIKQEEQAAWLPPPPPADLATISNNFDETPGLHVCQEVPPSSSNSSVISHYADEFDHHQMLETTVMEEALGLGADLDDPYFYDPNLLLIYESLMNCY

SEQ ID NO: 18101 - protein, 265 aa, Oryza sativa
  Clone ID: TF_OSC400524j.C1.p2.fg
MSSAPETFSLDHLSQHQQQQPPPLAEQEQLCYVHCNFCDTILAVGVPCSSLFKTVTVRCGHCANLLSVNLRGLLLPAAASTANQLPFGQALLSPTSPHGLLDEVPSFQAPASLMTEQASPNVSSITSSNSSCANNAPATSMASAANKATQREPQQPKNAPSANRTSEKRQRVPSAYNRFIKDEIQRIKASNPDITHREAFSAAAKNWAHFPHIHFGLMPDQGLKKTGIQSQDGAGECMLFKDGLYAAAAAAAAATAASSMGVTPF

SEQ ID NO: 18102 - protein, 273 aa, Oryza sativa
  Clone ID: TF_OSC400297j.C1.p6.fg
MSSSSSSSASSAAAAAFRPAVVQREQQVVEEKFPAAAAAMREMVLPPVAAAAADSEQEQLCYVHCHYCDTVLVVSDLRSNHAHFLSICVHLALDSRAFLVHPWRRVLQDEISTANSPTQLLLEQHGLGGLMASAASCRNNNSPAAAAAPPPPTSQGKAAAKEPSPRTNTAVINRPPEKRQRVPSAYNRFIKDEIQRIKAGNPDISHREAFSAAAKNWAHFPHIHFGLMPDHQGLKKTSLLPQDHQRKDGLLKEGLYAAAAAAAAAANMGVAPY

SEQ ID NO: 18103 - protein, 256 aa, Oryza sativa
  Clone ID: TF_OSC401780j.C1.p15.fg
MSSSSSSSAVFPLDHLAAPSPTEQLCYVHCNCCDTILAVGVPCSSLFKTVTVRCGHCANLLSVNLRGLLLPAPAPAPANQLHFGPSLLSPTSPHGLLDEVAFQTPSLLMEQAASASLSSITGRSSSSCASNAPAMQMPPAKPVQQEPELPKNAPASANRPPEKRQRVPSAYNRFIKDEIQRIKAGNPDISHREAFSAAAKNWAHFPHIHFGLMPDQGFKKTFKPQDGSEDILLKDSLYAAAAAAAAAAANMGVTPF

SEQ ID NO: 18104 - protein, 77 aa, Oryza sativa
  Clone ID: TF_OSC29392j.C1.p1.fg
EEIQRIKAAKPDIPHREAFSMAAKNWAKCDPRCSSTVSTSNSNPEPRVVAAPIPHQERANEQVVESFDIFKQMERSG

SEQ ID NO: 18105 - protein, 194 aa, Oryza sativa
  Clone ID: TF_OSC400152j.C1.p13.fg
MDLVSPSEHLCYVRCTYCNTVLAVGVPCKRLMDTVTVKCGHCNNLSFLSPRPPMVQPLSPTDHPLGPFQGPCTDCRRNQPLPLVSPTSNEGSPRAPFVVKPPEKKHRLPSAYNRFMREEIQRIKAAKPDIPHREAFSMAAKNWAKCDPRCSSTVSTSNSNPEPRVVAAPIPHQERANEQVVESFDIFKQMERSG

SEQ ID NO: 18106 - protein, 158 aa, Oryza sativa
  Clone ID: TF_OSC423581j.C1.p2.fg
MAQASPGKELAKLSKGRHTWEKVNVPNNCSYNIVTVRCGHCTMVLSMDLAPFHQARTVQDHQVQNRGFQAPEKRQRVPSAYNRFINSTIRDEYTYIFKGRRKPQLRMGLVEEIQRIKTSNPEISHREAFSAAAKNWAHLPRLHFGLSVADGGGGGGSN

SEQ ID NO: 18107 - protein, 337 aa, Oryza sativa
  Clone ID: TF_OSC400415j.C1.p6.fg
MRVQCDVCAAEPAAVLCCADEAALCSACDRRVHRANRLASKHRRLPLVHPSSSSSGDGGAAAAPLCDVCREKRGLVFCVEDRAILCADCDEPIHSANDLTAKHTRFLLVGAKLSPAALAEQPLPSSDCSSDDDAAAAATEEEYHSSAASTGAAVSAPLDASSNGAGGGGGVGGSSISDYLTTICPGWRVEDLLPDDDAFAAAAAVSTTNPSLRRVLATSPSMKPRLTYDSLEQQAGKEKDERVPFLDADLFDVVAGRPEKKGGAWAPHVPHLPAWCLDEVPVVVAASAAPAATPVKAKQGHVRDSHWSDSDAFAVPEFSPPPPPAKRARPSSQFWCF

SEQ ID NO: 18108 - protein, 250 aa, Oryza sativa
  Clone ID: TF_OSC101266j.C1.p1.fg
MKVQCDVCAAEAASVFCCADEAALCDACDRRVHSANKLAGKHRRFSLLQPLASSSSAQKPPLCDICQEKRGFLFCKEDRAILCRECDVTVHTTSELTRRHGRFLLTGVRLSSAPMDSPAPSEEEEEEAGEDYSCSPSSVAGTAAGSASDGSSISEYLTKTLPGWHVEDFLVDEATAASSSSDGLFQGGLLAQIGGVPDGYAAWAGREQLHSGVAVAADERASRERWVPQMNAEWGAGSKRPRASPPCLYW

SEQ ID NO: 18109 - protein, 384 aa, Oryza sativa
  Clone ID: TF_OSC28112j.C1.p11.fg
MLKLEPEFPGLPQRCDSCRSAPCAFYCLADSAALCATCDADVHSVNPLARRHRRVPMGVVAAPGAGGAFVVRPAGGVNSSWPIREGRRCDYDDDDADAAGEEDEEATSWLLFDPLKDSSDQGLPPFGDALVADFLNLGGGAGEKEDASSSKDCSSSHGKSSEGSHEFAVPGEPVPERQGFGAVSMDITDYDASNFRRGYSFGASLGHSPPATTKLVARASVDGRSTGGLVDGRSTGDSRGGGSGGGDSRGGGSGGDDSRGGGSGGGDSRGGRSNGGDSRGGVAQRRRLAGRRGAASPATVTRRRGDSWGGVARRIQRRRLALRGGRSDSHRWMAARRRGAVAGLYGSDPPPRRPWASLSPAMEDGHAGDFDFFFQNLDSNFLLF

SEQ ID NO: 18110 - protein, 365 aa, Oryza sativa
  Clone ID: TF_OSC900353j.C1.p17.fg
MLKLEPEFPGLPQRCDSCRSAPCAFYCLADSAALCATCDADVHSVNPLARRHRRVPMGVVAAPGAGGAFVVRPAGGVNSSWPIREGRRCDYDDDDADAAGEEDEEATSWLLFDPLKDSSDQGLPPFGDALVADFLNLGGGAGEKEDASSSKDCSSSHGKSSEGSHEFAVPGEPVPERQGFGAVSMDITDYDASNFRRGYSFGASLGHSPPATTKLVARASVDGRSTGGLVDGRSTGDSRGGGSGGGDSRGGGSGGDDSRGGGSGGGDSRGGRSNGGDSRGGVAQRRRLAGRRGAASPATVTRRRGDSWGGVARRIQRRRLALRGGSKWMIMDAYTGNLKDWVLAVVYLTGCRCCQYDRRSTLDCP

SEQ ID NO: 18111 - protein, 460 aa, Oryza sativa
  Clone ID: TF_OSC401426j.C1.p7.fg
MDTFFPLICFTENMRLQYPGRIPLNSTVEQKARKVAVLVALSASGSAPVLYRTMDALCDFCREQRSMVYCRSDAASLCLSCDRNVHSANALSRRHTRTLLCDRCVGQPAAVRCLEENTSLCQNCDWNGHGAASSAAGHKRQTINCYSGCPSSAELSRIWSFSMDIPTVAAEPNCEEGINMMSINDNDVNNHCGAPEDGRLLDIASTALMSDLPTGDKFKPLIGSSSGDGMNLLPLNSDQPAEPVSTTPKAPCVTDKDMFNDGSVYGDFCVDDADLTFENYEELFGTSHVQTEQLFDDAGIDSYFEMKDVPADESNEQPKPVQPECSNVASVDSGMSNPAARADSSHCIPGRQAISNISLSFSGLTGESSAGYFQDCGVSSMILMGEPPWHPPGPESSSAGGSRDNALTRYKEKKKRRKFDKKIRYASRKARADVRKRVKGRFVKAGEAYDYDPLSQTRSY

SEQ ID NO: 18112 - protein, 448 aa, Oryza sativa
  Clone ID: TF_OSC401365j.C1.p4.fg
MSSTAKAAAAGAVGAKSARACDGCLRRRARWYCAADDAFLCQGCDTSVHSANPLARRHERLRLRPSSPPPLVPPSGSGRRDEAVPAAWFKRKARTPRSHAAKSAAAFGQLLSRRLVVVPEAAAGSGGDSPEERKDEGEIVEEQEQLLYRVPIFDPALSEFCSPPPLEDAAAAVSCCNEDGAVENPTKPSMTTTTATTPPLQFFPDGQANFGPTDAELREFAADMEALLGRGLDDGNDEDSFCMETLGLIEPVDDDAGRVKVEADGDAGMTLAWCHELDTETSSGEMLDIDFDCGSPQAATTPDEKVGSSGPAAADDDAQLQQSNLALSLNYEAIIESWGTSPWTDGERPHVKLDDSWPRDYSGVWMAAAGVFGHGGEEQALTPRLGMDGGREARVSRYREKRRTRLFSKKIRYEVRKLNAEKRPRMKGRFVKRAAAAATAAVATACVA

SEQ ID NO: 18113 - protein, 452 aa, Oryza sativa
  Clone ID: TF_OSC401751j.C1.p9.fg
MSCSSEKAAGAVGGKAARACDSCLRRRARWYCAADDAFLCQGCDTSVHSANPLARRHERLRLRVSSPPPLTARASVEEEAAAAVGTTTTTTSKREGGVTPAWSKRKARTRRPQVKSVGQLLSRRLVVPEMAVESSDERKADEDGAHEELEGQLLYRVPVFDPSLAEFCSPPPIDDAAAASSSCFKEDAADGAVEDAKYPAAAASSPVQQLPDSFVNFEPTDAELREFAADMEALLGQGLDDSNELQDSFYMETLGLITPPVEESGRVKMELDGGVASNSRVSLPSCRAHPKPEDVESADVLDIDFNCTSPDEQKSSASNGAAADSQFFHRSLDLRLNYEAIIESWGNSPWTDGRPPHGQLDDFWPNDHHYSGLWAAGGGGHGAEVGMMTVRPRMDGPGREARVTRYREKRRTRLFSKKIRYEVRKLNAEKRPRMKGRFVKRPSAAAAPCAVT

SEQ ID NO: 18114 - protein, 357 aa, Oryza sativa
  Clone ID: TF_OSC401367j.C1.p31.fg
MKVLCSACEAAEARVLCCADDAALCARCDLHVHAANRLAGKHHRLPLLSSSSSSSSPSPPTCDICQDAHAYFFCVEDRALLCRACDVAVHTANALVSAHRRFLLTGVHVGLDAAADDDDKHPPHPLSSSLPRNTAPPPQPPPKRSPSPIYSDDDVIDWATGGHDIGITGNLPDWSLVDEQFNTPALPPVVTKTPPKRASRGPVTAGTAAAVFGNLAGGSPDWPLNEFFGFADFSSGFGFAENGTSKADSGKIGSMDGSPNGGRSSSSSSSSSAAAAGGGGGGQDFFGQVPEVHWAVPELPSPPTASGLHWQRDPRYGGGATDASAVFVPDISSPENPFRCFAAAAAGDHTMKRRRRC

SEQ ID NO: 18115 - protein, 276 aa, Oryza sativa
  Clone ID: TF_OSC419638j.C1.p6.fg
MASDGSASPASCGGAACGVCGGAATVYCAADAAALCVPCDAAVHAANPLASRHDRVPLAVAMAAASSGVGRGRGAPTTARRASPTTAPAAAAAAAPKGASLTCSPTSTSCPAAAAASRRRSTAPPRRRWGLHPGQLAALTPWSPADSVVVPTSAAGAVAAAAAAREERVRRYREKRKNRKFQKTIRYASRKAYAEARPRIKGRFVKRATTAAASSSSDDDSTAAAGVSGAGGAGAAATKEAKFWLSFSDDGRADGVGFYMDSTTAATAAYGVVPTF

SEQ ID NO: 18116 - protein, 332 aa, Oryza sativa
  Clone ID: TF_OSC401179j.C1.p19.fg
MEAVEDKAMVGVGGAVAAGYSSSSWGLGTRACDSCGGEAARLYCRADGAFLCARCDARAHGAGSRHARVWLCEVCEHAPAAVTCRADAAALCAACDADIHSANPLARRHERLPVAPFFGPLADAPQPFPFSQAAADAAAAREEDADDDRSNEAEAASWLLPEPDDNSHEDSAAAADAFFADTGAYLGVDLDFARSMDGIKAIGVPVAPPELDLTAGSLFYPEHSMAHSLSSSEVAIVPDALSAGSAAPPMVVVVASKGKEREARLMRYREKRKNRRFDKTIRYASRKAYAETRPRIKGRFAKRTADADDDDEAPCSPAFSALAASDGVVPSF

SEQ ID NO: 18117 - protein, 380 aa, Oryza sativa
  Clone ID: TF_OSC411062j.C1.p12.fg
MARDDDPAKKLAVDGGVAAAARCCDFCGGLPAVVYCRADSARLCLPCDRHVHAANTVSTRHARAPLCSACRAAPAAAFHRGDGFLCSSCDFDERLRRGSIGGGGDELPLDDRAAVEGYTGCPSIGELAAILGVVGGDSDKPADDGWWSASWEEEAPQVLSLDDIIVPTTSCHGLRPLLTPPSPENQSSPDNGELDGEVVRQLGELARSEAAAQATFVAGDQLASWASPEFTSGHGDFGIEAASTTVPSCENETWIMSTDCTDPTDASKTDIAREEAPASSSAEPCLSSLVEISEICRSMSYSGSGIDNGGHDPSTLAIMPTQALPKKGVYDIAYPDRGTVISRYKEKRKNRRFDKQIRYESRKARADGRLRIKGRFAKSN

SEQ ID NO: 18118 - protein, 360 aa, Oryza sativa
  Clone ID: TF_OSC415950j.C1.p4.fg
MKIQCNACGAAEARVLCCADEAALCTACDEEVHAANKLAGKHQRVPLLSDDGGAAPAAAAPAVPKCDICQEASGYFFCLEDRALLCRDCDVSIHTVNSFVSVHQRFLLTGVQVGLDPADPVPPVADKHVKSAGGSVDSATKHLQRNPTDLSGENSASLPSQNVINGNYSRQSSVTMAKTGQVNWTMSNNTIRSIDPPPKYSSEESPALLLASHTSTMAAYSSQISKDSDRIYNLPFTGGNGSDSLHDWHVDEFFSNSEFGFAEHGSSKGDNAKPGSAGGSPQCRLAEGLFVEGLLGQVPDNPWTVPEVPSPPTASGLYWQNNLLCPSYDSTMFVPEISSLENSQNNFTVSAGLKRRRRQF

SEQ ID NO: 18119 - protein, 505 aa, Oryza sativa
  Clone ID: TF_OSC400903j.C1.p13.np
MDSSRDSEEERPQRKDNGEETENGEDGGNALSLKDVANELLGCVVHRQKMEAEWHIPSSPPNPKSASRLLPSLSITTPRPTPNQTPCGRDLAALAMPPPLSFLHLAANPTPLHASPLRRARLRHRLSLRTDHPSRRAVASASASAGENPSTPGGPIADVEMVRGKDGVWTARPPTVVVLWDLDNKPPRGPPFPAATALRDAASLLGRVVSVSAFANRHAFSHVPAWVADERRERRAMDRAERAGAASPPVPYSCAVCGRRFPTRPDLTRHFRQLHQRERNKKLSRLRSLKGKKRQKFRERFISGNTKYDDAARELLTPKVGYGLAAELRRAGVHVRTVSDKPQAADHALKRQVKHSVACGVDWLVLVSDDSDFTDTVRKARAADLRTVVVGDGCRALGSVADIWLPWDRVENGEVDEDMLRNGTHMGFRDEEEDEQDDDEFIVDWDTSDLDGVVDDIVATRTKLFGATTMSAFADEEIMDGILGVGINGGDMLWSSDDEDEDGYF

SEQ ID NO: 18120 - protein, 224 aa, Oryza sativa
  Clone ID: TF_OSC402699j.C1.p3.fg
MAMAFLGQSRLYDGISWNSHLSMAFLVPPVSVATSAPSLSLPPPLPSSSLSLSLFSASRPVAGAKAARVRRRRQVANGETEALHAAVLKEEEQQHEVEEAAVVTSSSATSGEEGGHLPQGWAKRKRSRRQRSEEENLALCLLMLALGGHHRVQAPPPLSAPVGAEFKCSVCGRSFSSYQALGGHKTSHRFKLPTPPASPVLAPASSEVQSPLAFSPRNSAAARI

SEQ ID NO: 18121 - protein, 713 aa, Oryza sativa
  Clone ID: TF_OSC100644j.C1.p16.gm
MSRYHLDAAAGGAFFSKMVQGAVELIEKMVSNMGWNEERLQMRQRGMHTVKESELLAAKLDLLMKCLDDHEKRPQGTVKALDSHVTCEVCGNTGHSGNDYPETREEAMYMGNNNGYRSQGGTNGISKQAPSSDSADKEVQPEKTVPQEYCDTRLLPFPQRCRKPSVDEQFARFVEVIQKIHINVSLLDAMQVPTYTRYLKDIVNNKRPLPTTEVVKQCSNVILHKLPEKKKNQGIMPKDVFDRLNFTVLAPTPMRLQLADSSVRYPAGIAEDVSVKTRDFFIPVDFVVLDMDTGKETPLILGRPFHVNGKEEKFEFQPRTEQYSMNFMEKETTMPKNRYWKMPVEPPILAKKLEQPAQKKPPSAPKPKKVWRKKPKTPTPSPPETDVLMEDAEAPRRLLNDTDLDLVSDRKRQAYYMLSDREYAHTREYSPELLKKIGGTYRETRNMIRNEQESSSSSTPVQMYEAARYWILARRKLGDQKAPLFPTPHITIGAGGSSTSYYESWEERAFAEDSAGHLGGCIWPPRSYSCSFCGREFRSAQALGGHMNVHRRDRARLKLSGVVEDGTGGESHGMPPNQNYMIQPCPPQIGTLQHAYSPNPRSGSILAADTNPNSICDVVAYPARSLLQVAAARTALGKQVLNAPLVSSKSPSAGREHGKRETLFLGAVRLAQDHDTQDGGDDQHHEKILKLYRSSSVEELDLELRLGEAPKEQ

SEQ ID NO: 18122 - protein, 314 aa, Oryza sativa
  Clone ID: TF_OSC102397j.C1.p1.fg
RYWILARRKLGDQKAPLFPTPHITIGAGGSSTSYYESWEERAFAEDSAGHLGGCIWPPRSYSCSFCGREFRSAQALGGHMNVHRRDRARLKLSGVVEDGTGGESHGMPPNQKYMIQPCPPQIGTLQHAYSPNPRSGSILAADTNPNSICDVVAYPARSLLQVAAARTALGKQVLNAPLVSSKSPSAGREHGKRETLFLGAVRLAQDHDTVSSNLDLRVGKNELKITTVLGCRSRRDFMYDNDRADDEKTVEASHKKRRIDLEVNPLILTSSTSNHQQQDGGDDQHHEKILKLYRSSSVEELDLELRLGEAPKEQ

SEQ ID NO: 18123 - protein, 103 aa, Oryza sativa
  Clone ID: TF_OSC416211j.C1.p3.fg
MDGEGAPARRAPAASYYECTFCKRGFTNAQALGGHMNIHRKDRSAGGKSQGGGQHHEGGGSGSGGGGGQQHGRDVHLGLTLGRNEEERDGVDLELRLGHAHYP

SEQ ID NO: 18124 - protein, 129 aa, Oryza sativa
  Clone ID: TF_OSC900062j.C1.p12.fg
MDRYNGGGGGGEEGDEQLDLNLSLQPSQANEPPGYFTCTYCDKKFYSSQALGGHQNAHKFERSVAKRTRELAAARRQQAADEEARRGAGTTTTREPTGNASSSYQRASPPAEARRRDLLTDDIDLSLKL

SEQ ID NO: 18125 - protein, 416 aa, Oryza sativa
  Clone ID: TF_OSC400899j.C1.p35.fg
MAPSRISSSESERPVGSYRFHIPRQPPRIQAEGGKRHMIIGDRRHGGTALWRRGSMLPPSLPRWGVEDGHGHVDGSSRQHPSELGFSSALSVPIGGWIWRLAAAQAHGEVIDGGRCEDEAGDHMQPPPASSASMAMLSEERISASGIVVRERQLHGYGERPFQPCLATMAAKGTAREISTKKIAKKDHGEVGDLTMAVLMPSWTSTGNHSSRNPTRCLEQLPEPSKRAHSEAYGNMQLATGDLIVGLHKQATITVPPPNISEIGGHLTAHKNNEMTMGKGVQHTIDVSVAKEATRSLVSSARQSRRGPYECRKCGTMFSSGQALGWHMKSHNSDERWGDKRVPSAFVGSFLSLITPIDVSNVSVPSSRNPHTSSIPNKEEGRVLVMGAAPLNGVPKGSFRLFGENIAEAPKEEPME

SEQ ID NO: 18126 - protein, 97 aa, Oryza sativa
  Clone ID: TF_OSC20529j.C1.p3.np
WVMWGSAGRRRIIRQSASWEEQAFARDAAANANLGGCVWPPRFYTCSFCQREFRSAQALGGHMNVHRRDRARLRQADLLLLLPQPPSSPGYEVYAGG

SEQ ID NO: 18127 - protein, 245 aa, Oryza sativa
  Clone ID: TF_OSC900003j.C1.p8.fg
MEEQRGEEEWVMWGSAGRRRIIRQSASWEEQAFARDAAANANLGGCVWPPRFYTCSFCQREFRSAQALGGHMNVHRRDRARLRQRQTSSSSSPSHQEEEAEAPQDQQAGPYYTSFSKPSTTSTDNTTCSNDILLLARDQETIKKRVPRQQVQVVADQDEDEPAGRRYKRRRLGLVDQLPSSCEGGDHHHQVLIITPTTAAASPSSIIASASALVVGDQQHQQAGSVLDLELRLGTSTPPKAVVHA

SEQ ID NO: 18128 - protein, 449 aa, Oryza sativa
  Clone ID: TF_OSC33060j.C1.p2.gm
MRSKAIRSGVPLTSGRLDLRFLGQRTMLRSRARMQRHWCSTTVVEMTLARLLGIKESTPVITNVLKNTLITDEYLIRDGDVWPPATKRPRTGGRRGVGHGGGGGEGRRGGGRGGGAVEAGSSTVELDSEPRPALAPHPPFLSVGSVVVVVGRLASKAGSDLALACGVGVVFILRSELPGDEAAHHPEALGVAATRLLITLSAHMGHTIAERLCKTQGQPRSAGLSPRAGDESQRQRRRRTRGGGPRCCGRWSWARHVKGFFSSPLRNKRAALTVVTRVATSMAPTSSSTPAGSRALAAEGVFECKTCNKSFPSLQGLGGHRTSHTRLQAKLLSDPAAAAAERDRARIHECAACAGGETGTTTVVLTAADVDDSGGATVPQPPEAMLDLNYPPPVAVPPSPAAARARRSAAPICSLPAACASAAALPACLLNRVAPPPPPGFTKPTEHTD

SEQ ID NO: 18129 - protein, 317 aa, Oryza sativa
  Clone ID: TF_OSC400622j.C1.p29.fg
MSLASTSSTEIEMDEKKEMTKKTEQEKTLTSYVLRENPKRSYKVSAGEFSGGGGGGGGGGESSVVQDGESDTESSPPRGGAGSFFAVSRRRSKRARRRRRAPDPEPASSVSDATTEEDVAMSLLMLSRDSWTRSRSEHETHHRGASSEAEQNNNNVVNVFDEEDEDARDVAGEDHDEELSYGGGEAAAARHRTSRFQCGACRKVFRSYQALGGHRASLKRGKGGGCVPPPRPAPASSAAAPAIHECPFCFRVFDSGQALGGHKRAHMPSGGARPSPSPSPAKCGESSGSIDLNMPATMEDDFELSAVYDAEFASTRQ

SEQ ID NO: 18130 - protein, 857 aa, Oryza sativa
  Clone ID: TF_OSC400502j.C1.p32.fg
MGKKKKRVEKVFCYYCDREFDDEKILVQHQKAKHFKCHVCHKKLSTAGGMAIHVLQVHKESVTKVPNAKPERESTEIEIFGMQGIPPDVLAAHYGEEEDPSSKVAKVEVPSLRPPVMPNPAGMVYPPRPAYGVAPPMYNPALNPLMARPPIWPAPPPQPWFTQPVVSVPQMASGLAPQQPLFPIQNMPAPMTSAPANLLQTSFPMAHVGVPSPVTPQVSQPLFPVSTSAGNGAVSSPYVASVAPGSIPTSSPSVAPAGVGYAATNQGTGGPAAVPPPASNNKAPATQPGANEVYLVWDDEAMSMEERRLSLPKYQVHDETSQEFQVGIYIVLPARARVLRPDELLLDHYYYHSSSSDPYYSTPILPPYGDAFSPPNPPPPPPPMSPSCLLPPIIPAPTFTYSSPPPPPLYYPPPPDISPSPPPSVTPLPPVVYPSPPEVTPSPPEIAPYPSPPEIVPSPPEITPYPSPPEIVPSPPEITPYPSPPEVVPGPPEINPYPSPPEIVPSPPEITPYPSPPEIVPSPPEITPYPSPPEIVPSPPEIAPSPPIVTPMPPIIYPSPPEVTPSPPEITPYPSPPEVTPGPPEITPYPSPPEITPSPPEITPYPSPPEVVPSPPKITPYPSPPEVTPSPPEITPYPSPPDIVPSPPSYEPSPPSYEPSPPEYAPEPPVYAPYPPGIFPSPPEYSPEPPAYVPSPPQYAPQPPSYVPSPPEYAPEPPVYAPYPPGITPSPPEYAPEPPPGPPGGGGGYLPPVVFPPPYASRGPPGRRAVWCVAKPSVPEGIIQPAMDYACGSGADCDSIQPSGPCFRPDTMIAHASYAFNSYWQRAKSNGATCDFGGTAMLITKDPSYGGCHYSTM

SEQ ID NO: 18131 - protein, 153 aa, Oryza sativa
  Clone ID: TF_OSC401614j.C1.p1.fg
MASSSQTTVSMEVAMKVEGSGGGGGDGEEGEVVAKKEEEVAAAAAAMELDLLGALRAEEVMPAEKGKAAVVMVGEAVAPSVEERASAVAAAAANGGGGGGEARRRLFKCNYCQRKFYTSQALGGHQNAHKRERSPRQARRRRGGRGGGRRARP

SEQ ID NO: 18132 - protein, 478 aa, Oryza sativa
  Clone ID: TF_OSC401275j.C1.p67.gm
MESRSAREHGHGHLHQQHQRPWSCSFGFSWPPLQRSPPPSSSSSSYTCGYCRREFRSAQALGGHMNVHRRERARLRQFPNPRPHPLPNLNLSPPPPPPPPPPPPQQQQQCYCPGDRPAIVYSFFSTAAAAMAATKGLEVDLELGVGGDPLDGCAHDADELWHEAFSQGARAAANVQLRGGPIPSGSQAQDSRTCMAGRSRLQRRRRRPPWQWRAQLPSPLQPVLPAAAWEYGEENVRGGEGRADAIDYVLYIDARYFPRVPSTSQRLLPLRGASSAPTPSNFNLRSILEKEKLTGTNFMDWYRNLRIVLRQEHKEFVLTQPFPVDLPNNAIAAQCREHERRCNEYHDISCLMLATMSPKIQRQYEALDAHTIITGLRNMFEDQARAERFNTSKSLFACRLAEELHGMLKTAEESIKKNSNHVMVMHKRKPNNKKSGQKRKLNSDEIMSTSNSKTKVQKTGPAKNAECFFCKETGAEKK

SEQ ID NO: 18133 - protein, 620 aa, Oryza sativa
  Clone ID: TF_OSC32420j.C1.p2.np
MHEASEVKIPARPRSNTICNPRLDVIVAANHSVFIKGVLSLAICMQVSTAVGSCDYASTVPAAIVSSGSGVVNHTSYCTCRSIDIMLQLPLPWPLALHLNCKWSGVVVLCSSNIQSIRKQQAKKQHHSLHELAKRIAMVEPGRARETKVTASASSSAGSDAAVMKKKKKKKKKLVVASRKVDEKDKKQVDYKCSRSSGRDECCKVESRHQQCTEPESPSYRNSSSSSHAGHHHHRAADNSSSSSHAGHHHHRAADGKKLGCNSASICKVKQDNPMQQHMRRAEELKVKDKPPVAEPYCKRRASVSACNISSERSVKKSVKQQQQEASSSLQSSASISASSCSSTAGGGGSFRGMQQLSLRRLSGCYECHMVVDPISGVFRDSSSMRATICSCPDCGEIFVRPDSLHLHQSIRHAVSELGAEDTSRNIISIIFQSSWLKKQSPVCAIDRILKVHNAARTLARFDDYRAAVKAKAMAHRHPRCTADGNELLRFHCATLSCDLGLHGATHLCDHLSCAACAIIRHGFRPPAPGAGIRTMATSGRAHDAVVSSGSEGDRRAMLVCRVIAGRVRREEAAAAAAEEEEEEYDSVAGTTPGLYSNLDELDVFNPTAILPCFVVVYRA

SEQ ID NO: 18134 - protein, 621 aa, Oryza sativa
  Clone ID: TF_OSC401200j.C1.p51.np
MHEASEVKIPARPRSNTICNPRLDVIVAANHSVFIKGVLSLAICMQVSTAVGSCDYASTVPAAIVSSGSGVVNHTSYCTCRSIDIMLQLPLPWPLALHLNCKWSGVVVLCSSNIQSIRKQQAKKQHHSLHELAKRIAMVEPGRARETKVTASASSSAGSDAAVMKKKKKKKKKLVVASRKVDEKDKKQVDYKCSRSSGRDECCKVESRHQQCTEPESPSYRNSSSSSHAGHHHHRAADNSSSSSHAGHHHHRAADGKKLGCNSASICKVKQDNPMQQHMRRAEDELKVKDKPPVAEPYCKRRASVSACNISSERSVKKSVKQQQQEASSSLQSSASISASSCSSTAGGGGSFRGMQQLSLRRLSGCYECHMVVDPISGVFRDSSSMRATICSCPDCGEIFVRPDSLHLHQSIRHAVSELGAEDTSRNIISIIFQSSWLKKQSPVCAIDRILKVHNAARTLARFDDYRAAVKAKAMAHRHPRCTADGNELLRFHCATLSCDLGLHGATHLCDHLSCAACAIIRHGFRPPAPGAGIRTMATSGRAHDAVVSSGSEGDRRAMLVCRVIAGRVRREEAAAAAAEEEEEEYDSVAGTTPGLYSNLDELDVFNPTAILPCFVVVYRA

SEQ ID NO: 18135 - protein, 125 aa, Oryza sativa
  Clone ID: TF_OSC407914j.C1.p1.fg
MEYAAPAGAGAGGYYYYPPSQQHKPRRPPRPAARWVKHWIPQDLATSSGKCALYKWVREDVYKNLKDGKAVPEPEAVKPEPTTEILFLCSYENCGKTFVDVAALRKHAHVHNERQYICQEPGCGK
